United States Patent Application Publication US 2006/0134663 A1 - sequence listing, part 26

SEQ ID NO: 33299 - DNA, 434 bp, Homo Sapiens
ttttttttgacttctcacgaatacattaggagtctccctcaccctctggcttcaggttaggttcagcctgtggagaaccctgtaagaaggcagaaaggaagaggagaaaagggtcacggtgtttattctgttggtctcttccccaagaggctgtcttccctacatgtgtctctttacagaaggtcacttttgttctccaggtggtctgatcttctactccttctttttccaggttttggttttatcctcactgaatgccagttccagatttattgctaacaattctttcatgctccttcctttgtatggaagcattcctcaaattattcttggttgtatttacccactgctttctgttgaaattctgactaatccagaatataaaactttttagagtccaggcattctttgccatgttctgtttccccccatct

SEQ ID NO: 33300 - DNA, 495 bp, Homo Sapiens
aatatgtcagctttcattcctgagacagatctcaagattattcattctgagtgttacaatatctgcttctttttgctaataatgcagtgttaacttgttagaccaattagtttcatcacttttagaattctagccatctgcggtgccaaatattcaactttaaccacagtattatttggtcaaccaagaaatacctcatattccctctaaaacatgcagaagaatcctacttgggaaattctaaaaatatacattgtcactgtctttttaaaatcatggctttacaaacaaatccactgatttaaaataaattgcatgcacttgagcatgtactgctcagtttcctctatgagttattttgcacctgaaacttaaagaccttttttccatattctgaaccaccatctcaatcctgttcatcattaactctctcctggacaatgtcaataatcacataattgatctccacatagccatcagtctctatcttcggcg

SEQ ID NO: 33301 - DNA, 368 bp, Homo Sapiens
tttttttgaggcagggtctcactcttattgcttaggctggagtgagactccatccaaaaaacaaataaacaaataactaaaactgggtaatttataaagaaaaaaggatgaattagctcatgaatctgcaagctgtacaggaagcatagcggtatctgtttctggggaagcctctagaagctcccaatcatggtggaaagctaagtgggggcaagagagagcaagatgccacatacttttaaaccgccaggtctctcaggaagtcactcactctcgggaggacagcaccaagggatggtgataagccattcatgagaaatgggcccccatgattcccgtcacctcccaccaggcgccacctcagactg

SEQ ID NO: 33302 - DNA, 447 bp, Homo Sapiens
gtataaatatgaccccaaatcaacaagcttagattacaggaaataggacttttaacttgctcacctaacaaaaaaggaagttcatctttttcatttttcttacacttttataatatgcatttctaaattttgatgactgtagttaatattaggtattatgtaccctactttgttccaggcacttttaaaatgtactaacctttacatgtataataatttgttttaaaactttaagagacagggtcttgctatgttgcctaagctggaaagcagtggctattcccaggtgtgattccactactgatcagaccagtatcattttaagtgacagaaaaataaaattactgaaagaggggcttgctttaaattatttaagcttgtttgtattacctactatcttagagaaagaggaataaagcttatcgttgctataggaaacactatgca

SEQ ID NO: 33303 - DNA, 418 bp, Homo Sapiens
ttaatattctgatggttttattaacaagtatataatatatattgcatactgtatatagtatatgaggactgtacagtacaaatttatgttcacagtttgacatgacaaaatgtcattactgaattcccattggactacagagtagaaacagagaaggtacattaaacattcacatctttagtaagaaagattaccaaaatgtttcagtatctgcaagtatactaacgcatgctaaaaacctttacccattcagtcttattagcttataaaatatattacactttattaaaaatttctgcatagtttatacaagtattaaagtactgtaaatgtaataatcctgctatatttgcaggtatggtttaagagatgctaagcagaaagattattttgaccctctaacactaagtacataaca

SEQ ID NO: 33304 - DNA, 401 bp, Homo Sapiens
caaacctccagtacctcttatctcatcctcactctcagctgatgaccttgctttctgtttcacagaaaatagaacaaacaaaactttctcaaacccaccaccacatattcatacctacaaggatgttatcatatatttgcttacctctttgtctgggttctttgtggttaagccatcccctctaaaggttaactagattacctccccttatacctatttgagaaattcctctctcatcaattattttctttctgcctcccataccatcattttgttctctttacacgttattacttgaagcacatactctgctttctcctcagattgtataaatctttcatcttttattatctgcagagcatccaaacaggagctctatatcacctatctttagaaaaatt

SEQ ID NO: 33305 - DNA, 400 bp, Homo Sapiens
tagtatctatactttattcagctattgggaagattaaaaagaaaaatatacacattgggtacatagtaaacactcaatggtcagtaacctgtcttttgaagctttaccttcaaggtccaagttaaagtatcaattcttcaaatacaattttttatattggtccagccaaaattaatctttcccttattcatacactggtggcatgtttttagagctctattatagaaatcagtgcctttaagttgttcatatataggtctcttctaataaatttgatggcagggattaggtttttagtttgcatcctgtacaagatctttaccacaacaggttcaaatcatgtgttcataatatagttcttatgttctggattttttctttttaaaaagtaacagaaaac

SEQ ID NO: 33306 - DNA, 355 bp, Homo Sapiens
aagatggggtggatttgagtatatttaaatgctttgggaagaagccagtttagagacagttggaagataaaaggtaagtgacatattccactggatggggtctctgagaaggaaggaggaagtgtatctgcagagtacaggtgttggaattagctttaggccaccaggatattccttcaagttcagttcagatgggtaatataaaagctactccctagttaaaaaagctctaaatgtttctcatttttaaaatttaacacaaatgcctcagtctatttaactttatacatattgaaataaatataaatttaaaataaaatgcccttttaaactactgaattacttccccccaccc

SEQ ID NO: 33307 - DNA, 415 bp, Homo Sapiens
gggggcaatctgtttctgagtttacagcctggtgacatttccaggaaaacaaactttacactcaggctcaaagtttgctctcagttccttgaggtatgggaatcaaagaaagaaatagacttacaaagcagtcttgagaagttcatgccccctttcctccttccattcctagtaccatgaagctatgttaaatgagaaaataatacagtctagtggcagataacatcatggctaaaaactgatcattgttagggtccatcaaaaaaggatgagcaaatttatttattaaagttattctgacatttaaaaaatttgatcttagttgcattatagtttcaatgtcttatctaccatggaggcaccaatatgaaaaatgtggctaagtctatgtgttacctatgaaatgtgaaattaa

SEQ ID NO: 33308 - DNA, 368 bp, Homo Sapiens
gaaagacattgtatatttttattgtaatcatatgtgatgcaagataatattgctcatatctgaatcccaaaagaaaagaagatgtttgtctgagcatcccatgaggtaagcagccccatggaaggaccagctgcatccagcaaagggctccaggtccctgacgtagttgacggtgatggcagaagtaaatctttgtattcttgcagagactttgtttttctgtcattccacagcagctcagcatactctaataaacgtcctcctcttccccttcgtagcattctgggactaatcagggtttcatctgctcacatattgtagcgatgggttctgtgtggaattaagggaaagaatctagcactgtaagg

SEQ ID NO: 33309 - DNA, 544 bp, Homo Sapiens
ccctgctgaaagaggcctcatccatggactgcacataatcctctaaagcattgacctggtgctccctcatatgtgcacctactttgtcatcttactgtacacaccgtaccctgagtgacttgctcactggtcctactggagctacacctgatgaacctcctagtgagccaagggatggaatgcttgtgacccactcctttagatagaacctatttgcataatcatccctaggatacacttctaaggagatggaacatgctcttcacattatgctacgatgaatggctagaattgaaacatcttgtgcaccacagctgtgactaagacgttttgctagaatactaaacagcttatgggctaatccaaagaggtctgtgtcatcaccatttatactatctgtaaccgcacttgcggtattgtataacacactgggctgaatacttggattcaaacctaggatgacgtactgcaagctgtggcctcctttactgggacctggtgagagactccaacggcagggatgacacaatgttgaggcggtggg

SEQ ID NO: 33310 - DNA, 414 bp, Homo Sapiens
ttttttttggcatacaaagttttccagaaattactttaagtattaaaatggatgtgatttaatttatatcctagggtggcaaagagggtcaaccaaatacacgtgcttatatgttggtctttttgaaaacatccttggaaagttgcccttttccagaatggcttccaaggatctattctgagctctgtgaagacagtaaaaacattcactggtgctttaagattggtcattcattcagttggtcagtcatcattcattcaaaaatcatttttgaggagtctactaaatgtcaggcgttcagctggccacaatgagtatagaatttattgggaagtccctgccatgatagagggaaagatataggaatttaaaatatagtgtattttgctgtattttataatagatgcatgaaga

SEQ ID NO: 33311 - DNA, 381 bp, Homo Sapiens
tgtggcacaacaaaggccctcatctggtttattgtgaaacaggaatatttggaatttaaaagcctagttgttctggaacgtgtcagaagaaggaaacattttcacaggcagcacgcagtaaaacatcataaatataacagattgttaaagatcatttacaaatttatgaataaggctagagggaggacccaaatgaaatacaaacagaaacaaacaacgctctctgcgtttcagagaaggggaaaaatgaaacttggaacagtctgtgctttctctccacgtccaatgccaggacagaaggagctacaaacacatcttgaagtaatcatgcttgtttttccaagttgtatggttttggcaattctaaaactactttctgca

SEQ ID NO: 33312 - DNA, 424 bp, Homo Sapiens
gagaaaccttcaaactgttctccatagtggttgtactaatttacattcccaccaagagtgtatgaagcttcccttttctccatattgttgacagcatttgttattacctgtcttttggataaaagctattttaactggtgtgagataatacttcattgtagttttgattcacatttctctgatgatcaatgatgatgaacattttttatatacctgtttgtcatttgtacgtcttcttttgagaaaagtctattcagatcttttattcatttttaatcagattattagatattatcctatagagttgttcaagctccttatatagtctgattattaatccctcgtcagatgagtagtttgccaatattttctccctttctgtgggtcgtctcttcactttgttgattgtttcctttgctgtgca

SEQ ID NO: 33313 - DNA, 389 bp, Homo Sapiens
attgcagacttgaagagctattactagaaaaatgcatgacagttaaggtaagtttgcatgacacaaaaaaggtaactaaatacaaattctgtttggattccaacccccaagtagagagcgcacatttcaaacgtgaatacaaatccagagtagatctgcgctcctacctacattgcttatgatgtacttaagtacgtgtcctaaccatgtgagtctagaaagactttactggggatcctggtacctaaaacagcttcacatggcttaaaataggggaccaatgtcttttccaatctaagtcccatttataataaagtccatgttccatttttaaaggacaatcctttcggtttaaaaccaggcacgattacccaaacaactcacaacgg

SEQ ID NO: 33314 - DNA, 459 bp, Homo Sapiens
gtccttggagaatctgatgattatgtgtctttgggttgatcttgtggagtatcttagtggtgttctctgtatttcctgaatttgcatgttggcctgtcttgttaagttggggaggttctcctggatattatcctgaagtgtgttttccagcttctttctgttctccccatctccttcaggtattccagttaatcatagatttggtctttttaaacgctgaagtcccatatttcttggaggttttgttcattccttttcattcttttatctctactcttgtctgcatgccttatttcagcaacgtggtcttcaaactgatatcccttcttccacttggtcgattcggctattgattcttgtgtatgcttcatgaagttctcatgctgtgttttttagctccatagggtcatttatgctcctttctaaattggttattctagttggcagctcctctaacct

SEQ ID NO: 33315 - DNA, 403 bp, Homo Sapiens
tcaaataatctgtgccttgtaaaatccactaatgtaacatgaaaagcacaatttgacatcaacccgtgcagtgaacccagctgtgttactatagaatccttatctgctctttggaattactgatctctcaaaatctgactcagtttacttctagcccaaatggaaaagtcctcaataagccaggaaacagccctccctttggatgtgtgtctagtctacaaaggatggccttctggggtaccatcttgtgtctcccagacctttccctgtctccctcagtgtctgtgccccacaatacaacaaaggccacctggacacatctctccttacctggaacccaaagcagctctgcctccatgcctgccttggggagctacctgggcagacagctggaaaaagcaag

SEQ ID NO: 33316 - DNA, 421 bp, Homo Sapiens
gagatgaagaaaaaataccatattttattgattccaggttcttgcagtaatcagacagataaaagatcctttaatactggtgcttggacagtgttttacaaaacagaaagattatgcaatacttaatatttggtaacaatttttagcacatagtaaatattttattactttgtgtaataaacattctgaaaaataaattctttcattatgatataacttatgatcctcaccctaacatggctatgttctctaattactcctttgtaagtaaaatcataagtaataatagttgtaatcacaagtaatactagttttaatcataatacacacataattttgaatcctgatttttctacttaaaagtatgtaatgaccatgttactatcttgctacataattgtcataatcatcatttgaaaat

SEQ ID NO: 33317 - DNA, 389 bp, Homo Sapiens
tttttaatttcatagtattttaatagaaacaatataacaaaaatggttctgtggacaaatcaatataaaaaatgaggattaatcagtgaaagaatttgtctgggaggatttctcaatgagtttaatatgcttgtaatcattgtgaatctgcagctatgactgtttttcaacgtgacatgtttggagaattctgctttaatgaatatgcttttggaagtgtttttgaagacataatgacaaatagatttcatgtcatgtgtcacctcagttgatcatgaatggttgcctggagctctgtgttgaaaagggttctgaagcccactttgggttcaacaagaaaaacgtgatatttctttagctgcacctgctggagatgtagagaggatatg

SEQ ID NO: 33318 - DNA, 485 bp, Homo Sapiens
ttttttagctgaaaagaacagaaatttattctttctcagttctataggccagaagtctaaaatcaaagtgttggcagggctgcattgcctctggaggctgtaggggagagtccattccttgccttcttccagcttctggcagctgtcagcattccttggcttgtggccatatatctctctgctccatcttcacatggctttcttttctgtgtctctattgcctcttttgcctctctcttataaggacacttgggatggtattcaggacccacacatatctcctcggaaaattcactatagtctggagcctggctctcacccttactgaaccagaaatctgacaggtgttcgtgggctgccaataaatcttcgaggtgatcggattttggttcaaaggaaaacttttctttcacaacttcaagtacagatggagccacatatgtaaaacccagaaagacctgattggcactttcacttggaattga

SEQ ID NO: 33319 - DNA, 423 bp, Homo Sapiens
attgcattaaaaaactttatttcttttaaaaggtccaatataagccaaattaaccccaaaatttacagctacacttagagatctcctgaactaaatggcattgtttgagatgagtgtcttgttaaaggaggtcatttgctattaccaccatttcacccaaagtagttctagagcagaagctggtattataatacacatcagatatttcagatgtcatcttttatgtataagttaaataaagcaaacaggcttttctactctgtgtgaggataagaaacactacagaacagggcctgaatgctttagacatacaaggtgtaaccataaaggaaatttctacggtgctgtgttcattcattcaagtaattaatgtacttattccaacaatactggcgtagttcaaataccatttgagacagtact

SEQ ID NO: 33320 - DNA, 419 bp, Homo Sapiens
ttttctgttcttgcacaaatattttattcttcatatacaatatcaataatccacccaaaaaagccacattaaaatattttgaaatgcacagactaatgttaggacaatgttgcattttagtgcaacattccttttgcaggaatcacagagaagatgatgcagctatctataaagatacaggaaaagcagctattccaaatgtgagtatgggaatcagaataactcagcatgagctagagtaaggagagcaggggctggttggaaagagaggaaatcacctgtttctacttttccttcctgaggaggttgtgtatgagagcaagggctcgggcattgctagaatatttgatgtggcacaatgtccacctctgaatactctggcaaagagcatctttggagggcgttgacaacttctagaa

SEQ ID NO: 33321 - DNA, 373 bp, Homo Sapiens
catgccctttccatgatttaactttgggctgaaaagtaagcaaattaatttaaatctcttcagccaaagacacaaatatattttctctctttcttgatagccttttgtggataaaaatcaaatagtcattatagacttttctaaaacagcaaaaaaacttccgattttgttaaactttaagatgaataattatagaaatagagtttacctctaagtctgcaataataaatgagcatttctgtcagcactaaatacatttagcacccctgattatagcagtactcagagcacctgaaaaaaagtacttatactccacagaggattttcaaatgccccaaaattactactttaaaattcaacttataaccaagtg

SEQ ID NO: 33322 - DNA, 374 bp, Homo Sapiens
aaaaaacaaactgcaaaatggtatttatttacattaaaacatgaattgcctgtatacacacaaatataaaaggaacaatctgttatgcacaataactgtaatatttagtacatgttatacacagcagtatctgttaagtcagtggtttgagtgaaaacacagtaccaaaacattcctgatacaaaataagttactcattcacatattctaatcatacaagacacttaatattttaaaagttacatacttcaaataacactggctaaatgtacaactaaagtttattaattttttttatgaaaagacttcagattgttattcataaatgatccctttcaggatgcattatcttttaaataaataaactaaattga

SEQ ID NO: 33323 - DNA, 380 bp, Homo Sapiens
tttgctaaaaattttttttattgtgactgaagacattgccaacttacatatatcatttttatttggagtatttttttgccttgcagtgctcctgagaaattcaaaaatgcattaactttagctctataaataacacaacctaatattaaggttgcgttggaaatttcccacgtttagatatttccctaaaaatcaaaagacaatttaaattgttttacatagagaaaccttaataagtatttaactttttaataagttaaaaagtaaagactggcaaataatcacaaatgtcagaacattaaagtagcattttttccataggaatatataaaataaatatcatctatacttacttgatatttacaaaacttaaagataaa

SEQ ID NO: 33324 - DNA, 410 bp, Homo Sapiens
gtcaaccagttcagatgaaaggtaaaagcggctgttcctctctgctggcaatgcccaagaacagccaatggctgtagttaggtgtcctcacctcccaggcatttttgtgctaatacaaaaacatactcagaaagagtttagttcattcattctaaaattaggatatcacacatagaattatataatgtgccccttgcagccagcatttttcatagacgcttctccatttgagtccacagatagcagcagccttagtcctcagcagcttcacagctcctgttccttttcagagtgccagtaaaactgtaatgaattattttcttttcctggtataactcttccatgggcacataccgtttgcttcactgaatccatagtttcagactatttagccatatatgtatattttg

SEQ ID NO: 33325 - DNA, 366 bp, Homo Sapiens
aagatgtatttgtatattacaggtattggctctttatcatgtatggcaaatattttttcctcatctatcattgtctcttgacttttatcagtgttaattttcggggtaatcaagtatatctttttacagtttgaggttcctgtctttgcagtctctcaacccctagaatacccttatagtctcctaaattatattctaaatgttttgttgtttaaatttaagattctacgccatttatcaacgaaatcatcttttcctgattgaaataaaatactacatttgtggtatttccggattctgttgcactaatgtgtctttcctaccaacaatatcatattgttttattattgtggttttttgtttttg

SEQ ID NO: 33326 - DNA, 444 bp, Homo Sapiens
tttttacaactgaacacacattcaactgacttatgtccagcaggaatttgattcagactaatgattttctactattggcatgcttgataagttccttctttgactcaactagattgtgtatgaaagctatgcattttattgccagtgtcagacatttaatatttcttgtttactcttatttataaaataataggtaaaagtgtaaaaaatgagtaattggataaatagtacagtgcacacaaatatagtgaggctgctaaaatggaacaattggctgggaggtgactttgagcactcatttttcacctgagatatgaacatccaagtttggaaatagtattacacaaacacacacaaatatgagtatgttagttgtttgaaaactgaatgcttgaatgttgaggccatctggacttctatctcattcttttattttcttttgat

SEQ ID NO: 33327 - DNA, 376 bp, Homo Sapiens
ggaagtagaagacttaaaagcctaatactgaaatacaaagaaggcacttaatatttatacttaagaatcaaaagtggaaaaatgttcacagcaagtttaaagacaaaaaagtcaaatgtgtataccatcttggagtcctaagatgtgaacccttattttcaggttctgccttttactttttgtgtaattttgaccaacgcatgaaacctctgtgagacacaatttccttatccgtagcatggaagtaatacaaacacttagattattataattttaacttattataatttaaaattttttaataagaagagctctttaaatgttgtttgcatatacctttaaaatttgcttagtaaaatataataaaatacagatc

SEQ ID NO: 33328 - DNA, 471 bp, Homo Sapiens
ccagataatcattaagtatatttaagaatagtgtcaactttgaccattgtaattggtataaaaatatgacagatttctggatattttatatccagattatacaatatatacagattatattttatagatactaatgtttgccaacatttctaatatagagtttgaaatgtttcatcaaaacatttaatacatgtaaaatatatacaaagttaaatacagtaaaatcaaaataatgtggaaactagaatctacttgacatatctccctagcaagatagtgtttttttccaactgtactatattatatgaaagtcctgttgctatgcatattctgtacatgccatggctacgtctacaaatatgaaacagctagaataaacggaaaaatctaaacaccagagatgtttttacgtggttgtatatgaaattatcatgttgacaaaacagccagataataaagttttcaaactca

SEQ ID NO: 33329 - DNA, 446 bp, Homo Sapiens
aaggaaaataatttgaatttactgtctatcttcttcttcttgttgttattctaattgaagctctaacaactcttcttacagttcttctttctttatgttgttgatgtctgattacacgtttgataactttaatttgctttacaattggagctctttttacttttggtgcagtctttaatttctttgataatactattaatactttatcattcttcttcataactttattgatattatttatttttatcaatattctatctgaggctcctgcctttcttaactttttcatttgtttctttctgaatgatttattcatttgtgcaaatctcttggcttttctggcaactttcttagctacttttcttgaaattctctttcctacaacctttcttcttatttgtttctttgaaattctaactgaaattcttgcttcctttctcttcaag

SEQ ID NO: 33330 - DNA, 400 bp, Homo Sapiens
aattcaaacaatactattagagatacagaaggtatgacatatgacaaaagggttaatttcccacaaaaatatttaaaaatctaaacttgtatgtatctaataataaacctcaaaaacatataaagtaaaaggggaattaaccagatgaaaataataaatccataattataatctctcagtaattaaatgatcaagtagataaaaacatgaagaaggataaagatttaaatagcacatttaaaattttcatcttatagatacacatgaaactgcatccagtagctagagaatacacatcgttttaaagctacacgtggaacacttatttgtagagaacacctgccattgtccatggagctaaccttaacaagcatcaaagaactggtaagatacagaccac

SEQ ID NO: 33331 - DNA, 411 bp, Homo Sapiens
ttagttgcttcaaaaatacagtatatagaaatatgcattacattctttttggaaagattcataaaaaatggggtgtgattgcctctggaatgggcaacacgatggctgataatggtaggaggaagcaattcactctgtcctgaactgtgcataacctgggatttgttttcattgtaatgctaagggaacaagggaaggagggatggaggaaggaaggtcagtccaggctagaaggcccttccagctctgaaagtcaacaaatgccaagttgtctgctataattttagagatggttagttaatgatctatatagcttataagaaagactttaagatcagagattttcctttggtacttttaaaaaataaacaggcttaggatttgtacttcgtagagagcaatgaagaacag

SEQ ID NO: 33332 - DNA, 408 bp, Homo Sapiens
agcttttctgtacttaaatggtctgtagcacacgtatacttcaataaaaagcatgtggtgcggcgtgcgtgtgtgcctacgtaccacgcgtggtttttcctttcggaaggcactggaggctgggctgacagagccaggccctctgggttctgctgtccctttagtgcaaaaccaagctgaagaggggcgcctgtgctcctgctctctcttctagacatcaccttccacagtcatcctgacaagagtggcaagctgcctgtcccagctccacaggcaatccacgggaggaggagtggcgtcctttcttcccacaaagcctgcgtgttttccactttcctccaccagcaagaacacctggggttcgaggcctgccttccggcttcagaaataaaccccccggaaagtgca

SEQ ID NO: 33333 - DNA, 581 bp, Homo Sapiens
ctgagcagtaagtctcaacagtcagcttaaaatattcagtaaaccaagctataaacagatgtgctgccatccaggctctgttgttccatttctagagcacagacagcgtatatttagcataactcttaagagccctaggatttttggaatggtcaatgtgcactggcttcaacttcaagtcaccagctgcattagcccctaacaagagtcagcctgtcctttgaagccaggcactgatctctcttctctatctatgaaagtcctggagggcatctcgacaccttcttccacttgaaggctgtttcatctacatggaaaatctgtttcatgtagccacattatcttagtttgatcttctggataacttgatgcagcttctatattggcacttactgcttcacctgccacttttatgttatgaagatggcttctttctgtaaatctcatgaaccaacttctgttattgtcaaacttttcttctgcagcttcctcacttgtctcatagaattgaagagtgttagagccttcctctggattaagccttggcctacgggaatgttgtggctggtttgactttctat

SEQ ID NO: 33334 - DNA, 530 bp, Homo Sapiens
ttaattttaaaaattctttatttaaaataaagtttaaaaataatgtgggtagtgtaaaatattaatacagaaatgtataaagttgaaagtttcatgtgatctacactgttcaaagaaagctgtgaatagacctttctatgcatttataaacataagcacacacattttaaaatgagttcacactgtacacttttctattaataacttgtttcacctaatgtatcatggccatttttccatacacaatgaatgtactttattcattttaacagatacgagatattcctatatggctgaaccacaccttaacctatcctttaatgacagacatttaggttttctattactttctaccatgtcatttttacgcttctgtgggatcttaaatattccctcagttcctgtttcattttgtcttccactttggaaagtaatttcagtgaccatgacctctagcttaataaatacttggatctgtcaagtctcaatgttggtagatatattagtgtggattcaatttcaagtaacag

SEQ ID NO: 33335 - DNA, 378 bp, Homo Sapiens
gagtgagccacctcctgccgggctgttttcattttttaatacaaggtggttttacatgaactaagaaggaaaagttttcaagacatattttttagaacatgaaaaatatagtatgatttcatttgggaaaaagaaaacctcccaaaattagatgggcaaggcaaaggccctgatggacatacatcaaactaataaggaagtgacctttggaaaggggagtggaattgcaggtgggtattgtcaagaggggctttcactttatctgtttggtgtgaaagttttcacaatgagagtgtattatgttacttgtgtaaaccaaatgaaatgaaatatgggaaccttgattggatcacctttttttaagctacaaaagttact

SEQ ID NO: 33336 - DNA, 455 bp, Homo Sapiens
aattaaatttttattttgagataattgtggttccacatgtagttacaataaataatacagaaaaaaatcctgtatatcttttacccagtttccattaatgggaacatctcgcaaaactatagtacaatatcacaatcaagataaggacattgatacagtcaagatacagaatattccatcaccacaggtatctctcatgttgccgttttatggccatccctccttaacccctagcaacccatagtctgttttctacttcaataattttgccagttcaagaatgttatataaatgatatgatatggggattaactctttgttctcagcacaattctctggagattcatccagggtgttacatgtgtcaatagttccttcctttttatcagagtagtctatgataacagatatgccacagtttgtataaccattcacccactgaagaacatctggct

SEQ ID NO: 33337 - DNA, 450 bp, Homo Sapiens
tttttggtagagatgggatctcgccatcttgcctagactggtcttgaacacctgggctaagcgatcctccacttcagcctccccaagttcttggattacaggtgtcagccaccatgcccagctcctagtgtcctttttagggtcttaagcaccacaaagggaatcttgattaactagtgacaatcacaacaagtccacagccttgctcctagcctgcctccatacagacagcaattaaataccacctgtgtaaactgcaggagagtagttcagatttggctgagtaactttttcctggcatgaaagaaccggctctaatgactagttcattccagatttcactggacattagatctagtgctttgttttgtttgcaacatttcctatttgcccacacataaatggactttggggtctaaggccccactgctcttcaaatggacatgttct

SEQ ID NO: 33338 - DNA, 350 bp, Homo Sapiens
gattaaataatttcttaaattactcaattttatctctgttatttgctacctaattatatatttttctctaaaaaaattttaggtggtttccctatggtttataaatatacattttactgttccttgaaaaccacaaatttattccttgataaaggcctttctactaagtgtatgctctatctggaatgtttcttcccagatcttcaaatagtttccatcttcatatcattgagtctctggtcaaatcttagctcctcagggaagctctccaaaactagcttacctacagtagcacctgcacaaaccacctctcctctgctttatttttatttttcttcatcaccttatta

SEQ ID NO: 33339 - DNA, 445 bp, Homo Sapiens
aaaagagggagatgagacccgtggaaccccaggaggcccgagggcccaaagcacaaatagcatggccttatatctgcttgctaaactcccacaaggggcacatctcaggcagacagacatcccccccaacaaaacgagccacaacctcgggcacacataccacaccctgacgagacgggggacactggccacaactctctggcttataaaactcaacgaggcgggcgaaggcttacacgaactccgaatagcggtccctgacgaacacccgaattgaacccggaccttgaatgagctccacacaacgaataatatcccttatcaccgcttcacacacagacctggggatcagcggtgtaaacaatccccccagggacacaaagggaaagaccgcccatgcaccgctggacaccccacactcctacgcaatccgttcttgcagggc

SEQ ID NO: 33340 - DNA, 425 bp, Homo Sapiens
aattttgttagctgctttcctacaggaaagattctcagtatctagtttttccaccatactttctcttctacaattcctgtcttagacaatttgtgttgccataaaggaatgcctgagtctgggtaatttataggaaaaagtgtctcatgtttttgcaggctgtacaagatgcatgctgtccacatatggttttgatgagggtctcacactgcttccactcatggcagaaggcataagggagccagcatatgcagaaaccttatgggcaagagagctagcaagagagagaggcaggagattccatgcttttttaaacaaccagctctccagggtactgacagagtaacgacccactcactacagcaaggagtgtaccaagacgttcatgaggaatttgcctccatggacaaaacacctcccgttag

SEQ ID NO: 33341 - DNA, 379 bp, Homo Sapiens
aagggattttctgggaaataaattttacataaaaaaatatgtatttgaagttcacagttccctcagtttcacttcacttacattttcttctattaagtaaaattaaatactttatattttgaaataacatctagagatggtcattttttataaagataagtatttgtccaggtatccatgttactttctatcagcatacataggtgtctggaattatgtttgcctaagttaatgagatttagggttttttaaaagattttcttcactgtacatttttgcctcatttaacgtctttatgatatgcatgattcatttttataaaagcaatagaatgatttccttaaggcaattatgccaagatattaattatagtgattaa

SEQ ID NO: 33342 - DNA, 437 bp, Homo Sapiens
cgatccatttcaattctttttctcatctaggattaatcactcttgaataaattaaaccaggtggctgaagactttacgttcctccagttttgttctctctcctttaccagtcactttccacaaaggagatgtgacattgcactgtggccctgggactcgggagagacctcgccactcagcccaagagagaacgcaacacctgggaaaggaggacgcagagtacggtcgggatgtccctcatgttctccccactgtttgtatccccgaggagcctcgtctccagaggcccggtggagaggcacagtgtgcgtttttctctatggcctaagtgggttcccagctggagaccaggactcaggtggagagtaaactactgcaggctccagtccaacctacctcctaaaggctggaggacaagatgggttcactgggcagta

SEQ ID NO: 33343 - DNA, 403 bp, Homo Sapiens
tcccaggaaggataaccccctaagccttatggaggaacccccccagggccccctttttgtgaaacctggggtgggccccaccgcacccggcccagccctgttagcttgcgaagcgaaaacctggcccccccaggcccacatagaactccaacccctgaactccaaagatcgggccattttagacacccaaagcgctgggatccggggccccaacccccaagccacgctctgaccagaagtggtttcctcttaactcaaccacccgctcccctaaaccgtatatcaaaatttcctcacacttggcccctataactggccattggacatgcagttcttccatcttgcggaggccaagggacctgaccgtggccattgcataggaaaaaccaggggactgcccggt

SEQ ID NO: 33344 - DNA, 508 bp, Homo Sapiens
ggtttttagatgtgctctcaactttctggaataacaaaaataaaacaaaaccaaacacagaaggaaaacagtccccagcagcccacacacaaaactccactggcatatcttcatcgccatctcctagcacaattgcaccttttgtcatttctggtggaggtacagctgctgaagaagccaagacttagcagagaaagctaaggcatggaaggggggaagaaaatgcttcctttgttaatgaaaagccgtttccatttaaaagtttcaacatactatagaatagtgaatgcacttttgtgagcaaaagcaaaaagcacacaatgaagaaaagctgcctgtcaattaaatcaacagtcatctgaaggcaacacaaacctcctcttcttgaaaaaagagggaaggaagggagggaagcatggagggagtgtggacatttactacacttggctgaggatgtgtctaaaaggaataataaatgtgacacacagggcttctcgagtgatacagg

SEQ ID NO: 33345 - DNA, 424 bp, Homo Sapiens
caatagaaaaaacatacaaatttacttaacgtgtatacacaggaagaatcacagcgtgattacccacccctcaaagggcttaaccatcaaaaaaataaactctcccaagggggacggaagtttttaaaacaagggttaggggtcgccataccgcaagaaattgagtgtatcaggaacacattaatttgtacaacatcttgtgaaagggtctgctcaggtgtgattactacattcttggtcttacagggaggcaacaaaaacaattatgttccttgtgatgtgtctaaactttatcctttgctttggcagagatggcgtggggatttaggggagtgggaccttgaggcttcttcagttcagatgtcaaaacgccattatttgggggtatgtttctgcgcctccaacactgtttaacagggaggct

SEQ ID NO: 33346 - DNA, 480 bp, Homo Sapiens
acattaaagttttttaaattaagttaacctggatcctggattcactgtaacattttacctggctcatttaattcaggccaacacaatgaagctacagttattatactttgatttaaaaggtattttacactttaggtcagtttgaaaccaaaattcatgtaactttaaattccacacttacctactatctgtcctctaactgtatcattgtcatttggcccgagtttgcataaatccaacctctgatctatttgaagtcaacaaagaaagcaacgaaaaaattagctggtatcagagattctaacatctatagagtgacaataaatttccacaatccattagaaatcaaacctatcatttaaagagttcagatttcaaaaaccaaacactggtgtattacattgccaacatgcagtcactttctctccaaaacttttagaccactttagtctgagtcttaataattgttggtcttaagga

SEQ ID NO: 33347 - DNA, 444 bp, Homo Sapiens
ctatctgttgcccttgttcttggccctatttttgtcctctactctttttctgccttttatggttttaattgagcatttaatatacttttctctcctttgttagcatatcaattatatttcttgttttattttctttatgggttgccctacagtttgcaatatacctttacaactaatttaagctaacttttaaataactctatacaacttcacaggtagtgaaagtgctttgtaataacaagataatcctaattccttcttcctgtcccttgcattattgctgtcactcattttacttatacatgtagatttgaataagttgttgatactattttgaacaaaatgttatctgtcagatcaattgagaataagagatataaaagtttctattttacctttacttttccttctctgatgctcttcccttctattcatagacctgaa

SEQ ID NO: 33348 - DNA, 389 bp, Homo Sapiens
gggatgtttgaaacactgcaaacctcttttactgcatttgctctatataagtctaataaatacagaagtagttatgaacaaatagatttttattgcctgcaagctgttatactggagcaggagaatatggtatcttgacggaagcacacttgctaccccacacctggggattacttatagttgaaagaaaaaatgttgagaatggaacaaagacacaaacccattggataatctagtctatatttgggtttggcaatcctttcatcccaggaatatacctgtagaccaattcaaagtactaagaaccaagattaaagattttatacacatcacaataatagcaaattaagtacaaaacgaacctggaacataaattataatttgtaagg

SEQ ID NO: 33349 - DNA, 448 bp, Homo Sapiens
gtgaacgaaattttttatttacacactgtgtctagaagcagatacataaattcttatacaattaatttccaaaaatgtgcaagaaattactataatttgtttacaaaccaaaacacgtattaaaatcaatggactttggataattcattctgtggtgttctcagtacaaatggtacacacctgatttgaaacatacagaaaaagtgtaaactaccgcaatctgaattgcaagtattaatttcatggcactccaacgactatgaaatttctttcacccaacatgtaaatacttgttacaaaattctataagaatttttcataatctctggatgtagagtttggatcacttttcagaaacagcaactacacacttcgccatgttatgactgattaataaaaagaatgtttataaaaacccttctttacaggattaaaaaagtattaaaag

SEQ ID NO: 33350 - DNA, 408 bp, Homo Sapiens
ttttttattgaaaaccttggatatttggattatacaatgtaaaaactctgattcaatattagcagaaattttacttaaaatggatcaccttgtacttgcaaagacttggttttatgaccttgtgaaactgaatttgtgaaaaggccaaggtctttcccaagtccctctaacttagtggaactcagctttcaaattatgtctgtcttgttaatcttattaagcctttttaaaggcttcattttggtgggtctaaagtaggcacaggcctttggttcttatggtttcgaaacaaacccattgaaacctaatgagtccaatcatgagcacaattctctcacagtgcacgtgctattctttaccttctttccttctctggtttagcactttcttgtcattgcttgcttccca

SEQ ID NO: 33351 - DNA, 359 bp, Homo Sapiens
gttttagcaacgacttttttctctctgaatattcaaaacattgcaatacagtccttaaagagttgagatgatacaaggtttgtaaataatctagttgaatgcttagcacacaatagctaatacacattagtttctccccttcctcattctggaactgggattgtttccacttttaggctattatgaataacgctgctatggacatttgtgcacaggtttttatgtggatataagttttcatttatcttgggtatatacctgggagaggaattgctggatcatatcgcaactctacatttaaccatttgaagaactaccagactttttccaaagtggctgccccattttacattcctacc

SEQ ID NO: 33352 - DNA, 368 bp, Homo Sapiens
gaatttaacaaactttaatgacatgtcaagtaatatgtttttcttttctccagacagatacctgaaacatccaggaaatggtcatgaaaagattaaaaagtcaattacataggtgacacaagataatatacgcatgaaatataatacaatgccactgcctagattgcacagtaaaaaagcaatgtggcagggatacagagctgtccctgtcataaaaggggcggcacaaaggtttacaggtaagcacgcaaccaggctaagcgaataggaacattcaaacctctgagtccttcattctaggcccttctcatattctagggagagaaaggggaagaggagggaaatgtacatatgacgttttaaaacag

SEQ ID NO: 33353 - DNA, 359 bp, Homo Sapiens
gaagatttctggatttgaggctccatcccaaaaagtatgaattgaggggccaagtaaggggtggaaaggactcaaaagtagtattttgagcattaaaaggttgtggtgcctactaacatctaagtggagggacagagaaagcagctgggagtaagagtttggcgtttcagggcaaggtcaaggctgaaggtctagaccagggagggcctggcagatggaaggtgctaacagccctgggactgatgagctcacttgagaatacttgccacatttaccatactcacctggtcagcagaatcacctggaacacgttaaaaacacagattcccatgtccctttcagatcttgcattctaaaat

SEQ ID NO: 33354 - DNA, 439 bp, Homo Sapiens
gtcatgagcatattttataacaactttaaaaactagttttaaaatatttactcaggcaacagcaaaatttacatgtcatgggttatatgagtcagtctcccggttctatatttcatatatttcagaagagctttgtgtcaaaaactttgttttgtggtgggcctttgaatgcgtctctgatgtggttcccagtccctcccttctcccaaaatggcatattccagagaacagaagtgcatcacagagggccttttccacacgacaaagaaatgaaatggtttggatcatctagccggcggagtgccagctccttcaagccattcgtcttctgcagacgccaccggtagaatgcaggtggttttggaccctgaggcacaaaccacgtggaccccaagtcgaacccaatgcttcatagcatctggacaccctttgaagctca

SEQ ID NO: 33355 - DNA, 460 bp, Homo Sapiens
tccgatgggcacagctttattctggaacggtgaacccagtggggaggatcctgcaggcggacggcagttggggtactatagatgactaagtagggtccagtccatcgaggttgtagagtttgaggggtcaggttcttaataagaactgatcgtccagctagggtgtcttcatatagttgggaatcctctactgtaagagttatccaaagctcagcatccgtaatggtccagggggcttccaaggcgatcaggcagcatcagtcttcagctgctaagccgatttgaaattcatgagatgttccttgggctggttggtctgaggacccgaggtcgtaggtggatctcctcacggagtgagggcaaggacaggggacccgtctcctgaaggagtcctcctgtcccgggtcttcagcaccaaatgtcacacgcgtccatgtgaagagactaccaaacaggcttt

SEQ ID NO: 33356 - DNA, 448 bp, Homo Sapiens
ttttttatgtgagatgggtaatgtgccaatactgtagcaaggtttgagggaggcaatctcaaagattagagattaatgtgaagtcccaacctcatgagttaaaaatgtttagtgtgaaaatcccaagcttatgagccacaaaagaatccatccatattaagttttaactcaatgaaagccagttcaggtaaattaggctattaaacacacaaaataaaatttaccattttcattttttgtgtcattaattttaaggaagatgttgctttttaatattaaaacattaattttaattttaaagcagataattgttaaacagagtccttcttaagttaggatgaactacaccaaatcctgcccctgtatcaaaaacaaattccttaagcatcaatttattcacctaaaagtgggtcaaatggaacagatggtaaatagtacagcaatttat

SEQ ID NO: 33357 - DNA, 466 bp, Homo Sapiens
tttactgcagcaaacacgtttaataagaatacaaaattcacactagaggcacattctggggaatgtaaatgaactatcacaagtagtaattctgctggaagaataaaataaggctctctgagtacaaatatacaggaaggaatgatttaaaataggtatgatttacaatcacattacattgtattaagcactcaaaacaggcatattaattaaaaagccagctaaaaggcatttgaacatatataacaaatcttacagtccacaaagttcatgtataacggtaattttaagtacttcatttcaacacagaagaaatgaacaggtgagggatgcctctcaaaatattaatttatgtctatgacaaaaactaaaagagctttacattgaaaatggattacactactgatagaaccatgtagtggacagggcaaccacattaaaacaaaaccaacagtgccgagcaact

SEQ ID NO: 33358 - DNA, 374 bp, Homo Sapiens
ggcttcaataaaagaattttatttctcacagttctggaggctagaatttcaagatcaaggtgccagcaaaataggtttcattctgatccctctcctagcttgctggtggccaccatgttgctgtgtggtcatatcacctcttctgtatgtgtgcgccaggtaggcagagaaacagagcaagctctctggtgtttcttcttatcaggccactgagcctttcatgagggcctccctctcatgacctcatctagctctaatcacctgccaaaggcctcatctccaaagaccatcacactggaggtcagagggtcaacatgaatttgtggggatacattcagtccataataatatacataaagttattcaaggcccta

SEQ ID NO: 33359 - DNA, 415 bp, Homo Sapiens
ggaaactcagaaaaaactttaatctttattatagggatgattgaataaatcataacacatttcatgttagcagaacaaagagacactaaaatatataccttaatacaaaaatctacaacaagtggaattaaaaagcagaatgcagagctgaatataagaatcacaattgggcactgaggaatacattagcagttaatataagttgtgtctttacatcttcaggtatttatttaaaggaactacagtttggtgttataattagaaaaatacaaccctaaaagtatggactgtgaaatcatatttattctagtgtcctcctttaagtagaacattgcattccatttctttagggactgtatttcttaatcattgtaacaggtataacctcttgtacccattacagcaagcaattact

SEQ ID NO: 33360 - DNA, 440 bp, Homo Sapiens
gcatttatcatcctgttcctgtataacaggagtttgtttttctagaggcatcttatctttagtgtcagctagaggagcatctgtttcctcacttgtgggcttgtcctcagcagttaggtccttgcagaggacctggagcctgcgggcagggctgcagccagagcctaagacccaggacggagtcagatcacaggcactaggggtggaggtcacgtcgggccgagtgcgctgcagtcagaagaggagctgtgtcccgcatacggtgattgtaagccaggtccatgccaccaagagctggagctgtggagtagtacttggtccccagaaaagccctcagtctgaggtccacatttcttcttaatgtgggcagaaataattgctgatgcttgtggtggttgagaatcctcagctgcagttcctttaacagttgctgtgggaag

SEQ ID NO: 33361 - DNA, 470 bp, Homo Sapiens
tataaaaaggtaaggaacttttattggcaaaatcaatcaagaaagatggtaaaaatgtagatttaataagaaaaaatgtgacagtattctatccaatactaaaatgggagttacatattttaactataagtatttgcctataagcccattcaagggcttacagtgctcatggaagtgatcacccttctttcttcatttctacctgaatagtagagcattagagtcattctttctctaccagaccatgtgaattgacatttcctgttttagattgtactgaaactaaaagaaacaactgtacaaccaaagatgaggtataaccttaaccaaaattatatctctggacattttcataaaaccatgggtcctcttattaaatgctggaacccagtactcctcctgctacaaccacacacactaaagatttcaaatcacctgatcctactattgcaaataaatctccactgagt

SEQ ID NO: 33362 - DNA, 466 bp, Homo Sapiens
ggacaacaggcttttactccaaaataaagtggcttgtactgtatttctcctctggagccttgccgctggctccataggaaaattctgcctcacatagatacctgaggcattggattccctaaacaaaattgtagatccacttgtactgcaggcctctgtagtccaaaacgtttctctttctctgagtcccactcacagctgacatccttcttgacatttgcattttatttagaatacacatccaaatatgttttatgttgcctctaacattcaaaagagcctctaacagtcttcctttccctatcccttccttccatttgaaagatgtttgctccacatcactttctactgcattcttagactccctgaaggtaggaaacccacatttttgtcattggctcgatgtgtctttcctgaagtctatggtaactgctatttttctctagagcatatcaaccggatgctg

SEQ ID NO: 33363 - DNA, 422 bp, Homo Sapiens
acctggaagtctattcagtggataagattaaactagattttctttatttaggttggtaagtagaaccagccgatgatgcttctttgaaaagtgttcatttgggagtaaaacggtttactcagacacaggttggtggctctggtcactttgaagagtacagccagtagatttttggataaatggccaaatactacacaccttaggatttgtgggccataaggtctctgttgcaactcttcaaacctgtgtacctaaggcaaaaacagtcacaggcaataagtaaatgaatgtatatggctgtgtttcaagaaaactttaatgagaaaaacaagttaagggtcagatatgttccagggtcaacagtttccagattcttgatctagattgtccttgatggtttggaaaaagtatatagataatca

SEQ ID NO: 33364 - DNA, 357 bp, Homo Sapiens
catttatggggagggggaaggggacgaaccatgtctcaaagccagaactatctccttcacctaaatggcctcgtgttcccattggtcacatcttgttgctggctggaagatggcgtgaaagttttaatgctggcagtgatttgaggaattatggccaaaatttagcaaatgtatttgtttctcttttttagactttggaaatgagttgccttactattattttataatttcattcaaaaatgtctagtaccttaaaagcaagacctttccaattaaatcaaacattaattattagatgtatgagcatttgtatacttaatttcatacacccaaactaccagatgtacgtactcttca

SEQ ID NO: 33365 - DNA, 364 bp, Homo Sapiens
caaaataaagattgcacttacatttttcatgtccacagaatatacccaaaacacttcttgtatctacaaacttgcccaagatatgcaaattatagtataacatttttaaaaagacactggacaacaaagtgcaaaacatctgagaaaaacttatgttagaaataatatgcatactgattcctgcaacgacagggggtctgcattgctgacacagtatatatttctatttcttttggtccaacagaaccactctcctgctgtttggtgtcttcaaccattggattgttgttgcagctaacaggaaactgtccactcccacctgttacaacagcaaactccctatcaacgtgcattttgtcagcat

SEQ ID NO: 33366 - DNA, 352 bp, Homo Sapiens
tcacttagttctttcttattttttccttcttttggacatacagctctgaatcagaagactgtaaagaattctactcataaataccaaaagcttagtcccctcttatgtataccatgaaatgaagggtattttttggcagattaataaatctaatatcaactatcacttgaaaaaagtatcacattccactgcaccaaaaggatgaatttaaatgaaagtctgtaatttcacctggaattggtccagtaagtgacagctgatggctaatctcaaaaagaacatgcttgtaaacacctgtgttccaattatctgaaaatcaattttagattgtagaaattattgaaaatatatt

SEQ ID NO: 33367 - DNA, 412 bp, Homo Sapiens
gagtcagaggtacatgtgcaggtttgctacatggatatattgcgtgatgctgagttttgggcttctatggaactcattgcccaaacagtgaacatatacccagtaggcaatgttttagcccttgccccctcctttcctcccaatttttggaatcctcagtgtctattgttctcatctttatgtccatgagtacacaatgtttagctcccacttataagtgagaacatgcggtatttgattctgtgtttctgcattaattcacttaggataatggcctccagctgcatccatgttgctgcaaagcacacaatttcattctttttcattactgtgtattggcctactcttgatgcaaaacatatcagtgtagtgtaaggtgaaaggcaatagtcatagagttgatgaattcact

SEQ ID NO: 33368 - DNA, 396 bp, Homo Sapiens
cagatattctttacatgtatgaaaacaaagattattccactgtgctcatttcattgtttgatcattatattccatcctttgttcaatcgaataaaaagacacagtgcactcaatatactttggtcaacagcaagataggaaaaagtgatacaattgctgaaatgtgactcgtgaggtgctcttcctcacttagcagcagaacagaaggcagagggacaaagccatctgacaatggtgtggccaggctgaaggtctgctctgggaccactcttcaacccagcctcactccccttccattcagccacaccttgcacctgtttaacaccacgggatacctaccaactgtatcacaccacaatttgatacaatttctgatgatgatcatagcagtagtca

SEQ ID NO: 33369 - DNA, 389 bp, Homo Sapiens
cagttgtcgtgtctctcaggctctaaacaatttccagcccaaaccacagcaccatcctgatgaaaagggccagatattaagacagctgttaggcagttaatctgtaattaaaaggctgtggcaacttcagttccatgacgacctccgactttaacacagtctcgaggaaatttgtccaattgttcatatgccagccgcccatcttctcccagagacaagagggtttctgaggccacatttctgatttcttcagtatcagattgacacaatgtcaccagcattttaatgctttcagtagcctcaaggattttcagagccaggcaagctgctttctggagctggaggtttgtctttgttagtgcttcacagtaatagagcaaggccttttc

SEQ ID NO: 33370 - DNA, 523 bp, Homo Sapiens
caatttttgagattgcaaaagttgagaaacaaattcttccctcccttttcaaagtatattttaatctcagtctttgatcagaatctaagcctttcatatatgctatctagaagccaaatgctacaaatcagtcaaggctttcccaaaagtcacctctgaaagtcggccctgaatactccagtcacagggaaatccctcccctcctatcccctgccactctttatctgagttctgtgtattgagttttctgtggctgttttaccttcccagttaccctatcagtctcatatcccctgtagcacccggcacctacaggtttgacctgcagcagcttctccattaatgaatgaaggaaggaggcaggaggtctggagaagaagggctcaacgtgaactgatgtggagaaggtggagttttatactggatctgcgacaggctcagaactctgactcagagaggacaaagaaggcaacagtgtgaaggagtgagcagctaagccttgcctgcacagggttagggagag

SEQ ID NO: 33371 - DNA, 369 bp, Homo Sapiens
aaatataaaacctttcatccgttttggaggttactttaaagatagggacaagcaaggtataagacatgggggatgatgaggaaccacataaatttttctactgtttttctcattaaatactaaggcattatatatcactgtgaacaatcaaggatcaactgacactgaaatactgccaagactgcacatattctattgactccctgcctaactccatagctccctattgctaaactgaaatggggtaccttcccaaattacaaaatgggttttattgtgcccccttaaaatcaggaatgtttatgttttacaaaaacatccaaccattatgacagattctgacacccatgggggagcaagtggcagtca

SEQ ID NO: 33372 - DNA, 514 bp, Homo Sapiens
ttgcaggagttgctgatatttattcaaacgtcatccatacaataaagaactctgcttttaaaattccatttacatcagcagttaaaaaaaagtgacagtggatgaaacatgaagctgtaaagtgcctttatggggagggtcacacaagggcgcgcagctgtgcgacgagacggaggcaccgcgcctgcacagtacatcagggacatcgcgggacacagcacgcgttccaaataacttacacatcagaggaaaagctgccgagtctctgcatgcttcctatttgattccgcaccctggaggtctggccagtgacggctacaagccgctgggagggtagcgtgaggggaatgcagccacgcctgcctccactgtgctggggctgggaaccgtgaggctgtgaggcggccctcccagcagcacggggacagcgaatatgtcctttccagcaagacacatatgtacacacatggtcagaggtgcacacatacaaaaacatctgcagactagacaccga

SEQ ID NO: 33373 - DNA, 470 bp, Homo Sapiens
catttagaagaatttccttggcaactccgtctctccttagtcaacatcagctaacttcatcctccccctttatcaagacattgtttagagtaaataattcattaactggtacagcaatttcagaaccctttcacatagtttcttaaggggaccgtttcccttgaagaatggggtacaccagaggacttaggaagagaagcgcccactggggcttggtcagactctgccaggagacaggcagctgtctgttaactgaccctacccagtaccttctgggattggattaacaaaaggggagttggttaggctggagcattgcaactcatttcttccctgcagtctctctcctgaggtggcccaggtatgtgtttgaggcctgggacttgctgccagcatgagacaagctccagtggggtccatccccctgattcctcagtgccccagcaccacctctttcatttgaaaacgtg

SEQ ID NO: 33374 - DNA, 350 bp, Homo Sapiens
ccatttcagttatttgatttataaaagtatcgaatgcttgctataacaattcagatgacatctatatgctgtgtatgatatgaaatatttccctccgtacattcttcttacataaaacacgtatgcctggatcttgagggggtgatttttagtaaaaataagatcatgcaatacatatttctctgtaatgtgcctttgagggtcacccaagtctgtacatgaagacttcattcctctgtgataactgcacactctggacacaccataattgattcccccattcctttcttgaggaatattcaggtgccaccagtttttcccttttataaataacgctcaataaatactgc

SEQ ID NO: 33375 - DNA, 401 bp, Homo Sapiens
ttttttaagtttaaaaaagaactttattgacaaaagtaccggtaccagctaaaatagacattctacaagatataaacagattattggcctctaattttctacaggcagaaagcaggttgaagaacccatttatccaccaaaaagggcatattctctaatgtcctttgcaagtgactaaggaagatgagggaaaaagaatgattccctagagtgtagaacaaagagctgtggaggatagactggaaagtcatttttaaggagcagaaacagtgcctaatcatgaaacacaattccctccaatggaggaacctgacaaccattgtccaatgagttttcctaattgttatggaccagtggctgtgatctgcttccatttctcccctttgtgaataagagtattt

SEQ ID NO: 33376 - DNA, 355 bp, Homo Sapiens
agcggccgctcgcgatctagaactagtcttttttttgaaaaagtcatggaggccatggggttggacaggcttgagagtccagcaagtacaatagacaagaaaaagaaataaaaacccatacttggaaaggaagaaaaacatcatcatacacagatgatgtgatttttctttgtagaaaaatccaaaaaaatctacaggtaatttttagaattaataagcataaggttcctgaatacagaagcaatatcccaaattcatttgtattactctatatcaggaccaagtggaaaattttagagagattattgcatttacaaaagccataaacaatataaaggatctagaaataaatcta

SEQ ID NO: 33377 - DNA, 451 bp, Homo Sapiens
gaagtcttgttttttccagctttattggggaatggttgacaaataaaaatggtatgtattcaaagcatacaatgtgatgttttgatatatgtctatgttgtgaaatgattaccataatcaagctaattaacgttaatcacctaacatagttatatatatattgtgtgtgtgtatagtgagaaaattttaaatctactctcttagaaaacttcaaatgtataatatatttttattaactataggcaaggtgtcagcatttacttacctcttatggcaatgtctaaaaatccctaactcccaaatctgacatgctctttctcacaaaatttcaaatgcctacatgtcttatttctacaatcttccaaaaattttttgttaataatgtacgtaaataagagaaatagaaagtgtaacataaatatatgtgtaagtataatatagggaaatatgg

SEQ ID NO: 33378 - DNA, 368 bp, Homo Sapiens
ggcttaaacaacaaaaatttatttgctcataatttttgaggctggaagtccaggatcaaagtgtagataaggatgatttcctctataatgagccttaaaagaaggatctcctccaggaatctctctttgccttgaaggtaaccatttccggtcacttcacataaaattctgtgcctgctaccctggtatctctttcacttcttataaggaaaccagtcatattgaatgagggccccattctaactgcctcattttaaaatcacctctttaaaaaaccacatctctaaataccaccattatcttgaggtcccagggatgaaagccttaatgttaatgagtggatgggacatgtgacataatctaaatca

SEQ ID NO: 33379 - DNA, 392 bp, Homo Sapiens
tacgtaaacccagacatgcttctgctctttttaattagacagataaaattagcaaggagattaaggtaaaaggagaaatttaaaataattaaatgttaggtggaatttacaaaagtgaattgaacaatgaggtacaacaaggaatgtaaagagaaacacagacacatttgaaacattcctcggatgccacacggcttaagccagtccataggtaaagcaagaattctcccttgtcacttcttgaattgcagattccagtgatgtgaaagaacattctccagaaacactttccttctccttttcttgagatgttatcaggaataattaatcagtcagtatcattccaggatggcccacactgcatccaattcaaaccactcacctgtttcctg

SEQ ID NO: 33380 - DNA, 464 bp, Homo Sapiens
cgtaaatacttattaactgattggcctaaggttccacctctattctctggtggaatactcaaaagatctctaactattagagatgagcgcctttgcttctggagcaagcctttgtgtcagtcacatctattttctttgataaagacatgtatttcctgaattggacttgctgttcttgtcataactgttgcatgtgggcaacaacatgcttagtgctgtgaaagaggacactaacccctctctgtccctactgtgtcgacaggcttacccaggacagttccgagcccttctaggactcggagcagcctttggctggagtattgccatgagtccatcagcaagagtccagtttcggctctcaggagtgtgttcacctgtttctttctgggctgtgtcgagtctggagacacagcaccaggccagcctcattcaggtacacgggaggccctctgagctctaatgtg

SEQ ID NO: 33381 - DNA, 471 bp, Homo Sapiens
gattagcaggcgccttaaagaccccaagaactttagagatttgtatgtggcccatgtcagtgacagatggaacagtaagttcaatagatgtcatgtctgccgctcccaggctatgcttcctttaatgtagtgaccttctgggagcattgtcctcaattgtctgcaagagggaaaggagtacatctaaatttctggtaaacttaatttgggtggcttattacctactgttatgtatcttttaaagatccagtgatccaaaaagctgtgctttgcccaaaattccaaaatgagaaaaccataaaaaccaccctctagtttctggagccatttcaaatctgtgttgattctgaaggaatttcatttacgtagcattttcacatgttaacagtccttcccctaagggattatgggtagaggaaagaagatgaggtggtaaggaggcactggaggagatgaagtctgatttgttta

SEQ ID NO: 33382 - DNA, 356 bp, Homo Sapiens
cttaaaaatagctttattccattatcttttaaaaaaggcatatgataacctcagaactaatttctcccaacctccccccaccacatcttaaaatgtaaataatggagaaggagctgcttatttttctttgcagcagttcctggccagtcccaacgtgagaaataccagttggcacttattgcatcataatacattttacctagtaaggatgattttctaagtctcagtgcatgggttattgcaattttccatcttgtgttttcctgcggcaattatggggcttgtatgtgcttgtgagaattggggctaatatcaaagccacagaattgtggaggcccccttcccaggctccacca

SEQ ID NO: 33383 - DNA, 481 bp, Homo Sapiens
ttgtgattttgccgtttatggtggcccccaagtgtaatgctgaagtgctagtgttcctaagtgcaagaaggctgtgatgtgccttacagagacactataacaccatacatgtgtatgtattagacgagcttttgttcaggtatgaattatagtgctactggccttgagttcaatgtcaatgattcaacaatatgatatatccagaaaaatgaagagaaaatgtgctaatctgtgtatgaggccattcccaaaagtgctacagtaacatctatagcatgtgatgaagttatagaaaagtggctaactttgtggattcatgggatgacgatcaattaaacagtaagtgtggtgaacagcaatgttgtgaagctgaaagccaaagaaattcatggtctctttacacagggtcaggaaaacgttaaacccttcttggctagtgctggctgtctcatgttcaaaaggtgatatggcatgaaaccgt

SEQ ID NO: 33384 - DNA, 350 bp, Homo Sapiens
gcggccgcgctgcctccacctggccggggtccctcagctactcacatgaggctccagcatccggccctgctgccctttaacctcaactgtagcctctccagcgtggtcaccaattttttaacctaagggttcatgttcttgacaagtacacagtttattcattttctatccgttctcttttatattccaaatacctctccatctccatgttcaaatatttcaatcccgtcccaccagttcctggtaggatccatcactgtgtctatgaacacgaagataccgattagactggatgcaggtgctggtgtttctggttctgcagcgtgagtggccacattgcaaacatagcc

SEQ ID NO: 33385 - DNA, 576 bp, Homo Sapiens
ttttttcccttttcgcatttaatttgtataagaagcaccaaaactggagccaaggtttcaaaaggtaatgttaacagcaggaactataatttaatcacacaacactatgtaacattctatatttttgcctgttgatatgtaacatagttaagtttattacaaacattatttcctaagacttatggtataagtgctccttttcaagtattaccacttaatagtgtttaatctacaaggtaacattaggtaaatcaatgataaatgtatataatgcaatacactgtgccacttcttcctaccctgtgttaaggtattattaacaaaatcaattaagaaaaaaacaagacaactattataactgaaacaaggctatgaacatcacagatgcatgtctgagtagataaacagcatttccccttaacatgaaagtcattttgtcagagactcctgtatctttaggctagcattgttttagcagcagctagtcttcaggacaagatcaaaaatttcaagcgaaaagacaccgagttactctgagaaaacatcaatccacattactaataaaagaagcaaact

SEQ ID NO: 33386 - DNA, 469 bp, Homo Sapiens
gagatggagtctcgctctgccgcccaggctggagtgcactgctgactgactgcagcccctcccctcctacacactgctccctaaaagctcccccttgaacccctgatgccaaatccaaggcctcttcttaaatctcattttgcatctctgcagggcccgcttgtagccactgtccttcagggcttgcctcccctctgagctgctgtgaccccatcatccccctgacctcagccttctccaaggaacccccaccgcccgagcgcatctctggctgtctttccatcttgagctgggtcggcctctccactaaatccatccactggcatgacttcagccaaacttcatcggtgtttccagagtcagatctatggatgggtaatggggcggtaagacagaagtacaggaacagtgatcagtgcatgggaggaaggctgggtcagacaggcctccttctgcaggctcctcagag

SEQ ID NO: 33387 - DNA, 377 bp, Homo Sapiens
atcttttggggggaaatattttgtttactgaaactgcgaggaaggtagactttaaaatgcaggacaaagactgaacatactgatatactgattctttgaagggaagtttagaactcattgtttctaacattattcaggcttaaaacagtttccaatccagtgggaaaagtcactccatatattccgtgaagtcaaccagttccatcaaggagaaagtcagggccgctgggagcgcgtggaccgtgggctccggggcggcgcctgcccgggcaccccggccccgtccacgccccgcaagaggagctcgctggccccgccacgcgggaaggggtcgccccggggtcttgggcgggagggccgtgcgggctgcggaaaca

SEQ ID NO: 33388 - DNA, 490 bp, Homo Sapiens
ccttgtccaattacctaatccaagttcacttaactagttacgagaactctatttgagtaacaaaacaagtctctacaggagcagagcgagacgtgcactcctacttaaaagtactgtctgacgaaaagtactctacttctctggatataacatgtttaacgtgtaaccctttctgtggagctgaagaaaaaggtttacttaaaataaatgctcaaaggaacttttctaacctcactattcatttcttagacaggtacagtttgcccaaaaccctcccttgatcaagcccccactcagaaaaggtgcctccttacacgcgacgttacttggttgctattacacttggtttgcaagccacaaagggactccttttgagtgcagaggataaagcataagaaaaagagaggatcaccctcttcgagtgattgatcaagtcaggttctcacttagagatcctgtttaaacacaagacgctaaaacacaccccctt

SEQ ID NO: 33389 - DNA, 454 bp, Homo Sapiens
aattggagccacattttaagcaaggagaatggacttttgtaccactgtattaaaactatatttctgtcgttcataaagtttcttcctgtggcatgcaaaaggccagaaaggggactggtattttgaaactgtggaacaatgcccttctgtttctgcccccttctcgttactgtatgtagtgattaaacaaaaatgtctgctttagtcaagatggctacaggagagactgctggcttcttttaaagcttttgaagtccgcagccgtcagaaatctctgatcccctaattatatcattatcaggcacatagtttcggtatctgtgacttcatgtcagcctcagtccctccctgttctgcccgcctttgatagggccaggaggctcccctctgcaagccacaagggctgttatttagggttaattacacccttccttccaaaataaataaatactgt

SEQ ID NO: 33390 - DNA, 372 bp, Homo Sapiens
gccaaggaaggaatccgagggtttattctccaagcaacaaagatcccttaaagaggactttgctgtggactgatgtgggctggcccgcagttttaatagctccctctggctgagtgtggagaggggatttctggaagaccagggaagagacttctgtgccagcagagatgagcagcagtggtggcagtggaggcaaaaggaagggcttgggtcgggggtctgtttgcaggagctgctgggaggacgcttgcattgcttcccaagtgtttactgggcacttgtcctggacaggcgctgtgctgggggctgggtgtacagcagtgaacaaaacacacaaaaatccccacctgggcgatggtgacattccaccca

SEQ ID NO: 33391 - DNA, 585 bp, Homo Sapiens
tttaaaataataataataatacgtttaaaaggtacaaaccaggccaggcacagtggctcatgcctataaatcccagccagaggaagcattttaatgagatcttggggagtgttgctttcagaggcgttccccagctgccctgccagtcctcagccaacccctaatgccaagcccctttgcacatccaccttcagcagtgcctcagacagctctccaagggaagctgtgaggcttgccatttttaatcaccacctacccagatggcagaggaccctgaagggctatttcatttcatccaaccctcagattttatcagcattttgccatcatcaaagagtagggaaaagacaggaatcaaaaacccttccattcgagggggctttttctaaacctactctcactttggttatcttatttcaaactccgaagaaatgcacaaggcagccaagcagaggcttcagtctccacgcatccgtgtgttcagcaaatgtctactgaatggcccccggttggggatgggggaaggacaggaggagacagaaaccatgctttcctggagacaacaatggagtgaaacggatcacc

SEQ ID NO: 33392 - DNA, 516 bp, Homo Sapiens
cagggcccatacatagttttattggaacagtcacactcgtttattgattggctgtggctgctttcattctacaaaggcagaggtgaacagctgggacacagatggcctgagaagcctaaaatattcactatctggccctttacagaacaagtttgcagacttccagcttaatgtgtcaaagatttttacaaagtccaattacacaaagccaccactagtgggaggataaattggtgcatcctcttctgaaggcaatcacaattttaaatgctgagatgctctgactcagcatttaggaatgtaacctacagattcctttgcacatgttcacggggatttccatgaggatatttcttggtacaccatcctttgtaatatcaaaggcctcaggggatctgcccacctcagcctcccaaagtgttggggatcacaagcatgagccaccgctcccggctatcaaaggcattaaacaagacatatttctatcagtaggggaatagtaaactaaatagtaac

SEQ ID NO: 33393 - DNA, 476 bp, Homo Sapiens
ctgcacaatttgggtaattttaattttacatagtagccaaccttggaaatgtcagtcttaacattctgatcaatccactgcattcaatgcagcggagtgtgttaagggttacttcaaataattacattgctgctacttctatgttgaagcatgctttttaaacactggagttattgaatatttacaatatgtatcatttaaacttcatgtaaaagcacaagtatgactgtctgacttcaatacaaacaccatacttggatttccccccaaaatgaaatgtaaaatactacaattttaataatcgacacttttggaagttttaaaaatatgtcttaacgtggaccaccaacatttgctcaagtaactcaaacaatgctgttccttttttagggtgcaaaacttcagtctggcttcagtttctttaggcatagagaaagaaaatatttcctccaaagcgactccaaaatcacgcattt

SEQ ID NO: 33394 - DNA, 354 bp, Homo Sapiens
ttttgaatgaaaataaatttattgattcatataatggaaactatctaaggggtggtctcactttcagcacagagagattgaggggattcaaagggcttccaggaaggtgtctctcctttgttgccttcactctgctctccagaggtggactacagtcttaagttccatgtagagacaatattgccacaacatttgctttgaagatgcaaatttgtttcaaattgatacatgagggaacaatgtgaacacagcatgaattcagcatttgcttacgcgtgacttcatctgacaagagcactaggtacggtcagcaaactttttctgtaaagggccagataataaatagtttaggct

SEQ ID NO: 33395 - DNA, 367 bp, Homo Sapiens
tttttagcttttagcttttggtttgagttttaaattactaccaaatcatgaaagatcagagctgcagggcctttagggagtctaaggcagggctctaaatggaagtagttgggcctaattcaccatgtcttgtgagaccaagcacagatctaaaataattttgacttctgaatacctttgaaaagaacacaccctatcccattcctccaggtagccaccattcttggacttataccaagcagccttgctacaaaacacttctgagtttgctaagatccaagagaccagaccttctcatgacaccactgctgtcttcttgtcttcctctctgtgcagccaccttagcaaggctcagtctcagtcttgc

SEQ ID NO: 33396 - DNA, 461 bp, Homo Sapiens
gagaaatggcgtgagagggcagtgaggaagggtgtcttgtgtactctgtcaaggccaatcaccaccccacacctgcctgacaacgctgtgaggcttcaccacttcccactcacatacagacaagaatcctccctcgattctcatgggacatactgtcctagtcattgacctctaacctcttcccaatagcggatacatctatagactcagaaatgaaatgtagcctttgtctttcctttgcccctaaagttaacatctgcatgggggaactccaagaaaataaaagcactttttccaagccagtctggaagaagccacagaaccctggggaccgctgacccaccctcagtggcctccacccctccctcactcccactggacatgcaatcctccgggcctgctgaccctgcttttaaaatgtttgtaaataatatctgacactaaactcatgatgtggggag

SEQ ID NO: 33397 - DNA, 465 bp, Homo Sapiens
gcaggcttgtccatttatttacttatttgtatggtagtaaaacacacataacataacattgcccacctgaactattttaaagagtccaattcagccacattccgtgcactcacactgttgtgcagacactgcctcaagcaagctccagaactcgttcatcttcccaaacggagacccatcagcagccggtcccttccctctgccctcaggccctggaagccacgaatccacttcatctcctgggtttctctactctagacactttacatcagtgcaagctttttatataaacgcagtcacttagcaccatgtttctgaggctcacccacgccataatgtgtaagggagcttcaccctttttctggctgcacaatactccgtcgtgcgtgcgccgtggcctgttgatctgttcctcggtccacggacacttggggttgtttccaccttctagctactgaataacgc

SEQ ID NO: 33398 - DNA, 419 bp, Homo Sapiens
ctcattaacttttcacttgttcctcatttcttctacaacaattaaaaagaagacatttgggaacaaaacaaattcttttaagaatcactgaacaagagagtatacaaataatttgaatttaaagtctcagaaggcaccacggttgagttcatgagatacactgagctgtatccctaatgaccagcacaaggggccagggcacgtcacctatgaccatggtcccactgctgctgaacgccaacaccatgaagcgctggaaaactttacagtcccaaaggaattttctgccatgaatcaaaggtagttgaacttacttgcaagtaaaatgtagctcacaaccatttcttagcaaagataatcataaaaatctgtaagacttcaaatctcaatgcaaaatgttgctgtaaaaagaatcccca

SEQ ID NO: 33399 - DNA, 432 bp, Homo Sapiens
ctagatcgcaccgcgggaagcgagcgcttcggggcaccgcacctcgctcctcattagatggcggcttttgccctgacagccaatggggaacgggggtcgggtcgggaacgccaagtatcctggcaacagggtctcccgaggcagccagcaaaccaatcataaggattttgcgcgccgctggggtccattgtgaggtgttccgaccaatgggctccggttctcgcctctagtaacaggcgccccttccttgaccaatgagcgcatccccgtcgctctcccgccgctcccccgccgcaagcctggcaacaagggcgcctcaattggtaggggaggtcgggtcacctcgggggcaactgtactgggcctcttccgggtgccaagatgtaccttgcacggcgcctgacctgaggttagaccccgcccttcccccaa

SEQ ID NO: 33400 - DNA, 415 bp, Homo Sapiens
gtgtatatgatagttttttcaaaatgttttctataaaatcctccctgaggagagcttggaaaaagattcttaatagctagatcattttgagtccttctctaccatgtactcaacactctaatatattctgcacatttggttctatgtcatttgccatagtcttaaggacgtaggttccataatcatcccttattctgtagaggaggcccaaggttagtgagcagaggaaggttccactgtcgggaaccggtggtcttcaaactcctgtgctcctcttttgatatctttctgctcatatatgttggaaacagcccagcatgagcaaagcaccacctcctagcccccagcctgtgccagccctgcaaagaggaaatatggctccactcagggagcccatcagcgactcagggagccc

SEQ ID NO: 33401 - DNA, 472 bp, Homo Sapiens
ttagtgcttaccactttttggcattataccatatatctatttgtttgtttcctgccttaggtgccaagagggcattaactctgtcttgttcactgctgaacacttaagtccctggcacttaaagttgttggcaatcgttaattggtttaactgaaggaatgagaatatgctctacatcaggcatgcagtgggagatgaggctggatctcctggtcctgaggggtgcctctggtgcttgagaatgcagatctgcacacgggccctcctacctgaagctcagctgtagaaacagaaactggtcccaacttctgtcagaggaaacactggctacatgaaacttaccaaggaatggcacacagacctccagggaaaccctaaggaattttcatgggaacttctgactgaacttcagtgttgctttttacgctgaccttacaactcagtcccagagtccaggactccactataccac

SEQ ID NO: 33402 - DNA, 454 bp, Homo Sapiens
cccgttttaaaaatgaatttggttcatttgctttctgcttctggatttgcctgttctggacatttcatataaatggaatcatataatacatggacttttgtgactggcttctttggcttgtttcacttagtgtaatgttttcaaggctcatccataccacagcatgcagcagtgctttattcctttttatggctgaatattattccattggatagagatacaatattttgtttatccaataataaattgggcacttagattgttttcacatttggctattaggaataatgttgttgtgaacatttcttgtacagtttttgtgtaaggacatgttttcaattcccagaggctatatatctaggcatgcaattgctgggtcacatggtaactctatgtttaatttttgaggaactgccaaacagtcttccacagaggctgcaacattttacattct

SEQ ID NO: 33403 - DNA, 380 bp, Homo Sapiens
ggaattcaacctcttgattttatttttcaaaatattcaatgtgcttggttggttttagacctgaacattgcgctccactttggagacatcttggattaacaatcttgcctttgggtttaaaaatatctggggagggcggattcaagtaacttgtttccacagatgcttttgagtacctgttatgaaccaggtcaactgctcttatcagtttgggtcaggagtcagggacaggatgttggaaggaaggaggagaaagctgcaggagcttatttgggatgcacctctgcctcccagaaccctcccttgccacgcactacgagcattttctgagtcctacagtgcaccacaccaagcacagtactagcgcctcaaatactttc

SEQ ID NO: 33404 - DNA, 424 bp, Homo Sapiens
ttttctactttttggttaagcagaatctctcatctgctgaaaaagattaaagacatcttttaaaggatgaatgtgaggtgttcttatctgagaggaataagcctgggtcatgggaaccacttttaaaaaagttttgcttttttgagactttccaagccaacaaacaaacaaagaagaatgttgctggttagaagctcaaactccccaaatgcagctcccactatcaatgcttgatggataaatgtttggcttctttgtctaaaggctctgtgcgtttataccctagtgcacctgaaaggtgcactcctggttgactgctccagggccaccaaacagctacattaaactgagtcagggaaatcttaaaaggattattaatcacaatactatccatttaaattaactgatcaatgttttcatccaa

SEQ ID NO: 33405 - DNA, 422 bp, Homo Sapiens
ttctcgttttatcctctactctttcatcccttgctttaggaataaagatttctgcctgaatcttgggcctgactgatcatccacagatgttactggtagccctctgagcagcactgtctcaagcggtctgataacaggccctgaaacttccaccctgcattccattccttgtgtcttaaaagcagactgcagtgtagctgaagcaaccttctattcatgccaaagtgctttattctgtgactataccttgtattgagctctaaaacctcagagagctttaaactggttttgcctttatagaaaggttaagtccatttgtgcattacagcttttattctgtgtgtgtgtgcatacttaaattaaaatggaaatttatttgttaggttagtttctcccagaattgctcctggcaaagaggaaga

SEQ ID NO: 33406 - DNA, 370 bp, Homo Sapiens
gcttgcttctttgtgagggtggcccacggaggggcagcaaggctggtgaatcacctccctggctagttcctccaaggcagagctgccaaccaaggccaacttggttcagcacacagaatatttaccacgaatctaagagtttgccaaaatttcaaaatcaggagatttcacgcaaaaagttggaagatgtgaccgccctgggcccacattcccgcctggcctggcactaactgggtggggctgaggagtagctgctctccaagagccctgctggccaaacctgtcctcccatttccaccatgctacctcactcactgctgtctgtgtgcttgtccctttcacatttgcatttgcaaagcctgttctaacc

SEQ ID NO: 33407 - DNA, 600 bp, Homo Sapiens
tttacaaatttattactgtcaaaagagaaatctaggaataacagagtaccatattattaacatgggtgtacatgacactatccatacttttaaaaaattacagctttattgatgtacaatttacatagtgtaatgtaaaaagtgtacaattcagtggctttttagtatatttacaaggtagtataactagtaatacctaatttcaaaacgttttcaacctcccctccccaccaaaacaccccaaaaccattagcagtcactccccattctttcttctccatagccagtggcaacgatttatcttctttctgtccctgcagatttacctattctggacatttcatataaatgggaaaatgtataggaatcatctatatgtggcctattgcatctggtttcctttctctagcatgttttcaaggctcatccatgatgtaatatgtattcatacttcattacttttgatagctgaatagtattccatttcatgaatatgccacattttgtttatccattcatcatttcttggatacctgtattgtttccactttttggttattacgaataacgctgctatgaacattcacatacaaaattttg

SEQ ID NO: 33408 - DNA, 490 bp, Homo Sapiens
ttttttgcacttggggatgggttaagaaacataaagcttttgacctctaggagggtcataatgtgggggaaggggatgacaggacaaacacataacaggtaaaacaaaaataataatgcaaggaaaacagtgttgccctctcacatctgtactgcacttcacagcatgtagagttttcatgtggatctagcaacccctcacctcatccccgaataataactaagcactagagtgatgctggggatgctggggcttggtttaggtggctggggaagttatcttggaggtgagactccagtggactctgcggatgggtaaggtctcagagaggttggggaagttatcttggaggtgagactccagtggactctgcggattggtaaggtctcagagaggttgaggttaagaagagagcattccagaccattccaaaatcagcacataacacacatggcttgaaaatggaaaaagacttagaaagtaagggaac

SEQ ID NO: 33409 - DNA, 602 bp, Homo Sapiens
cagttactagcccagtatttggaatttgccaaagctatattcctcagaatttacttcaagagctcctttgtatcggcggagaatgaagaacggagaagaggaggaggaggttgaaagaaacttaagagatgtggcaactaattgcaacgtgtagattgtatttagctcatgattcacacaaactagatatttgttattaaagaattatggttgtttttggtgtgatattagtattgtgctcacatttcttaagaatctatctttagagataggtgctgaaattcttgcagatgaaatgacattatcatctgagatgtgcttcaaaaacagttaaaggagatatcgataagatggccttgaattcacaattgctgaagatgggtataggccacatggagttttattataatcttttctctccttttatattgtttgtagttttccattataagttaaaatgaagaaaataagtcaaccaacatgaagcggtcagtgagattcttacggacatcccagctttgcctcttatccgcctgacatagtcatggaactagaaagacaagcacaatttgccaagcatcagagtggcatcttgaaactgc

SEQ ID NO: 33410 - DNA, 578 bp, Homo Sapiens
actgcaagtacaggaagaactttgctctagtacttagctctattaagtgtgcctgtgacaaactgaaagctatacattaagttgagccttttctatatatgtactccaatggcacccgaacaaacatgaatttcaaacttcatatcaagtaaatagaaatagtaatgtataattttaggcttaaaatctaatctgataatggtattcttttacaatggtagaaaaacttggtaaaagaaacatacctaatatataaaatcgctaattttgtaaaattggaccattaagctaaggaaataatgctgtttttagtaacaataaaatgtaatccacaaatgaattgtaactgggaaattagattttccctaaaggagaagaaatattgttaagaaacaaatgaatagctattcttacagctaaaaatagaaaataagttcttactgacgattaaaatattctctgctactagttttagcacgggagagaactgactccctattgctgagtggtttattgaacttaatgctgcaaatatttcaaaatattctgtggaattaaaggataaattgaaaaaaatt

SEQ ID NO: 33411 - DNA, 501 bp, Homo Sapiens
tgaagtttaagacatttttattaataaaaaagtacaataattaaactgaacaagattgcttagtccccaagcacacaccctgcatggatgccatagtggagggtctctgaagtagaacagagtaatctctaagtggccatgctaacagaggcaaatcttgagtatctccaggtgcataacagacttgtttatgagagattgctcatgattctagcctcaaagccatgcctctggagcaagaactagtataaaatagaggaaaaacaaggtgttgctctaaagcactaaaataatggggcacaaacataagagttacagagactaaagcttaatatactggcttattatttattttaaccaacctaccattgacaaaaaatccaactgatcctttcactgcaggctcctttccccaacacaaaaaagagaaccagtttctggcactgctcacctgtgtgactgcctgtcaaaaacagggatggacaccactaggaactctct

SEQ ID NO: 33412 - DNA, 523 bp, Homo Sapiens
tttaattgaacacacacccatcaagtaaaatgacatatttttaaagtctttgtgaaatcttttatgccacataaaatcagtctgtgtacaatgctacacaaatgtcaataatcatatatcagagccaaaccagtttcacaattcatggggagatgatcattaggggtatctgaatagtttggaacctcagagcaagcaggtaataattttatttaacaagcttgatgaggtctatagaagaaacattttttccttctaaaagttcagcaaattctattttgaggaaaacaaaactgaaataaaatcatggcaatgatacttctacttcaggcaaaatcttgtttcaattcacctgcagacccactctgcaattatggaagtcacagaacttgaccagtattgtatcaaaattcattccatgccaaaagaccaagtttaatatttttttcataattcatcttggcctgaggctacaacaagtcctattgttatatactctgcctctagagaatgaggctgctaa

SEQ ID NO: 33413 - DNA, 464 bp, Homo Sapiens
cacagcacaaatggcaaacctctttattcctgggagctttggaaaaagggcatacagcactgccttctaacaccaagaaaagagaaggtacataaagttgactatatccaaaaaagcatggttattaatatcatatcttcataataattaacttcataaacattctatgcatgctacagacaaaacaaagttgcagaattatacatcttgaaatgagatatgacctgtgtcaccaaacagtttgtataatcagtcactatggaagatgacttgcaccctgagaaatgggttctacttgccaagtgtggtagttattaagttacttgcaaaatattgctagttcttccacttctgagtaaatggtagggttgcacttccctgccaccttgaagttaaacatgtgtatatggtttcctttgaacaatggactgtgggcagagggacattgtgtcacatctgggcag

SEQ ID NO: 33414 - DNA, 468 bp, Homo Sapiens
cactgtggagtaccacagtttatccttctatcattttctgcttgtgtttatatatttcttttatatccacatgctttttctattagtcagctgcagagttgcctgctaaacttagattctgaagggtaacacatctgtgaggatgacagaagcttaacatttagaactgtccaatactacaccctatatgttccttcctttggctgcgtctaatttgtaatctgctataataaaaattataagtattaaaaataaaacccaagactccaaaaaatatatcctgagactggaaccttctttaagcactacaggggaccaagcaataaaggagccttgttatctagctcctcctttttttcctgtgcctgctcagttaccttgataggtagaactaacaggaaaattagatgacagcaatttctttctctgacagtcttacctgcaagataacgaattgtctcaagtttg

SEQ ID NO: 33415 - DNA, 376 bp, Homo Sapiens
ctccctctggccgcgctggggaaaggggccgccttgcccgtcacatggcagctcgggccgcccgccctgattggctcgtcttcgcgtcaaacagcgaggcacacacgcggccaactcgcccacgcccgcagggcagggcgcagtcgctgcgccctgggcgcaggggcaccgctccggggagtgtcgcccgcccctgctctcaccgctctttcgctttgcgcttagggcgacgacctaaagtcgaccccccaaatccgccctagccccctggctggctcgcacatgctcagaatgctggctcctgccccgctggggtttcagggctctcagtcctcttcccgtgcgcccggaggcggtgggtcagcaggtaggggct

SEQ ID NO: 33416 - DNA, 429 bp, Homo Sapiens
gacaagtgaaactgcatatatttgtggtatataacatgatgttttgatacacatatacattgtggaatagctaaattaagttatttaacatatgtatcacctacttgtttttaaatctggaagctgtcctgaccccagcacagactctggcctgaggtctactctgcacaacagggcggaggcacagtgaggggtctaggaatggagccaaggtatctatccctgcctcccagcctgggactctgcccaccaccctggcctcaatccctttccccactgatgggctaataaaatcagactgaaacttgtcaatagagaggtgctcaataaatgtacaataatgaaaataatcataattagtgagctggggattaggaactaaaaatctctcaatcaggaagaggctgcagcttccccgggctatgcccg

SEQ ID NO: 33417 - DNA, 380 bp, Homo Sapiens
tgtctgcgggcctgtgtgcgagtgcaagctcgtgatcccaagaaaaacactccacccaggatgccccagaaaagaggccaggagagaagaagagaggctgagggagagcagggccgaggcagcgaactagcagagagagtggctcctgccggggtcggctttgcggcaggcgccctgcagccgagggggtcctgcaaacccaggctgaggagggcaaccaaggtacaggaatgaggcagcgggggaaaatgtaccgacttgctcaggcttggagggaggattgctcgcatagccagcaccgacctactcacatcctgccccctctcccacaggagctccttctctccccgccgctggaagctggtgctcccaaggaagcc

SEQ ID NO: 33418 - DNA, 402 bp, Homo Sapiens
attgggataaaatacacataacacacaatttactggcttaactctgtgtcaggtcacggcccactggcaataggtacatttacatggttgtgcaaccgtcaccaccatccaccccaaaacttctctcccaaactgaaattctgcacccatgaaatcccactccctctccccggccccgccatcctgttctccgcaaccgtggatccgtcctccccatgtccacagatcccctctccctcggccccgctgtccgcttccctgcgacggtggatttcgctgctctgggcctttgcgcttctgtgactggcactgtgtgtggtccggtgtcctcaaggtgcctctctgctcatgtccttccatgcatgatgctttcagactgacaaaactcttcaagtattaacg

SEQ ID NO: 33419 - DNA, 443 bp, Homo Sapiens
ttcattaaacagtatttatttgaatcaactatatactacataaatagtatacatccaaattaacatactatatttagtagacacaatacagagtatgaactatatattatattaacattacatagtatacatggtaccatgctctactctaggggtagaaaaattacacctccattctgttagggtctctgctgggtccaagaattaaattgacattgtgtgactaaattatgtggggagacttaaataataaattttagcaagttctgtacagtattctacttcttgtctttgaagcttaggatgttgcctttccttctagtacagagtgcctttcatactggaatttcatcttctctcctaagaaacagcacaaagggcaaagtgctcttcatgcacctgctatttttcgagtttctttacctttaaaaatgtgccaaaat

SEQ ID NO: 33420 - DNA, 365 bp, Homo Sapiens
gcggccgcccctcagacggggagggagtcccctcccgaccggcggccttccagggctagtgtccctgaggtccagggagagacggctgacccgagaccgggctgggcgagagctgtgctgtctgcgcgttgaagcgagttcccccgctttactcgagatgttgttgagcgcgtcctcactcgaggccaggtggggaatcagaagggccctgccctcagggcgcctcccatgggctacgccgaagggcgggacgcggccagggcgcgcgggacaaaggagaccccacttgcttgcggggcggagtcccggcggcggcgcggggcagggccggggttactcggtgactggagaccctcccggcagga

SEQ ID NO: 33421 - DNA, 462 bp, Homo Sapiens
atgacaagcataagccaccgcacccagcccgtttacgatacttatatctaagtggtggcattaatcatgatacttttttgttcaatctgtaatttctaaattctcaacaataaaggtatcttgttttataaagaacagtccatttgttcctttttctaaaactcttgatttattctgagttttttttaatgggggccatgtatgctaaagagtagatgtaccaagaaatgtatttattttccacattgtccccatgtgcacttttattaataacaacaataacaaaagatagtaaagaaatttactttggacagaactatagcttaattcttttagagactgaaagaaaatatattgcaggcctccaagtggccacaaatttatcctcacagtggccaccaggggtccttacccagatgcctcgtccaagtcactcaccacagtaggaagctgcaaggcctg

SEQ ID NO: 33422 - DNA, 468 bp, Homo Sapiens
cagttcaaaataacaatttaaaaaaatgtctctagaaggctacataagaggctggtgagacagttgctctgtgggagggaaagtgggtaacagggaacaggatgggagggattgtcaccatacatctttttgcacactctgcattttgaaacatatgattgtatttcctagtctaacaaaataacattaggtccaactgactgtagtaaattgtcactagaatctttgtcttggagtcatttgattttatttttcacagaagggcatatggttagatagcctaaaacagcaggggagggagcagtgtgtgctaggagctgccacatgccaggcacctgatagataccagctctatctcacgctccccctgtcccttgaggtaggtgtttctgtttctacttacaagaaaatagactaaggcgtaaagtaacacaatcacggtcacacatgtggcaagcagcacagcct

SEQ ID NO: 33423 - DNA, 507 bp, Homo Sapiens
gaagccctttaaggtctgggtcgccgggacaccccgctagggccccgccccggctctgccctcacctctcgcagccagacccgcgggtctcccggaacccacctcggcgtcgggaggagctggcgccgtgacgccaccaccgcgtaccgacctcaccctccgtgcgttggagcggaaagaagggactcgaccctgtgcttcggggcggggctccgcgaccgtcccccgccaatcccgccccagcgcctcaaggccccgccccgcgcaaggggacggaatgcgtcccaacagcctccaagacgcccaggccaggaggacgctgggaacccgctgccccgccccacgcccacccaggaaaagacctgcaacctccatccaccttagtcaaagaatgccccgaagccagatgccccagagctctcacaggggacttgcccagctcaggggaaaatcggaacggactctctgcctttcaaggccagagaagaccggcgcagaagtcgggtg

SEQ ID NO: 33424 - DNA, 421 bp, Homo Sapiens
ttttttttgagttttccagttgggtatttatttttgagcaggccattgatgcctatggtgcaacagaccacagggagaatacacagggaagctgctgtgccccccaccaagaggttcccagtcttcctgtccccaacccctccccagctcctcatccaggtcccttgccctctgctcagcacaaggcatgctggcggccacagacatatctactgacatgaacacacgccccccacctacactgcgctggctgggggataccacaggggcctaactagggaacatgtgaaaggtggcaagaatggacaagtggcctgtggcatgatggatgggctggcagacagatggatggatgggttggtagacagacagacagatggagctgctaggaggtgactacctggctggggaggcctgtctg

SEQ ID NO: 33425 - DNA, 484 bp, Homo Sapiens
cgcagttcaacattttaatttcaatatgaaaattacattaacattcaaatatatagttctaaagatatgacctaagaaatcaaaaaagctaagataaattgcattgtaaaagccaaattaaaagtattagaaatctcagattatttagctgactaacagtcaagtataacttttcattagcgatgggtatttccactcattatttgtaaggcacgcattccatacagaaaaaaattcttccgtgtaaaggacaggaaacaaggcagattaacatttcctgctcatggttctggcaaacatttatgttcacacgaggcagcagtaagacttcagtcagattctctctaatgtggaggctgtgagtaaggccacgctgcacacacactgtgcactacaccgaccacgttgcagtggcttaggagaggccggagtcagcagaagtttatccatagcctgctaggcaccagacccagtggtagaggct

SEQ ID NO: 33426 - DNA, 462 bp, Homo Sapiens
aatttataaagagaagagggttaattgactcacagttccacatggcggaaggcaaggagagcaaagcggcagacaagagagcttatgcagaactctcctttataccatcaaatctcataaaacttattcactatcaccacaacagcaggagaaagacccgcccccatgattcaattaccttccaccggatccctcccatgacaggggggaattatggggtacaattcaagatgaaatttgggtgaggacacagccaaaccatatcacatgtatataccatattttgtttatctggaacaacccatatggacatatgggttgtttccaccttttggcattgggaatagtgctgcttcaaacatgcatgtacatgtatttgagtacctgttttcaattttggggatatagtcttgggattggaattactggattaagtagttctgttactactgttttccacag

SEQ ID NO: 33427 - DNA, 445 bp, Homo Sapiens
ttctaagagttttatagtttaccttatacatttagatggtgattcgagttaattttttgtttatggtatggggaaggggtccaacttcactctttcacaggaggacatctggatgttggtgaagatgattcttttccctattgaactgtccctattgagttgtcactcaactctaaaatcagtaagagtttatttctggactctcagttctgttcagttgctctattcttatgccagaaccattgtctttattactgtagctttgtagtaagttttgaaatcagaaagtataagtcctccaactatgtgtttttcaagactgttttggttctcctgggtcccttgaatttccatatgagctttaggattagtttgtcaatttcagtattaagaaaaagtcagctgggaataataggaattatatcaaatcttttgatcaataaga

SEQ ID NO: 33428 - DNA, 466 bp, Homo Sapiens
ggtggcttaatggtgaggagagaggaataagcatctatcattttaagcatcaaatagtacaaaaagtattctgaactgaaaagaaattactaccaattatagaatatttaatattaaaacacattttactcttccaagatacacagagtagagaaaattaacattcctggcacttactatgtcacatctggaaatatctcagagataaaagatccattttacagattaatgaggttcaacccaaattagaattgcgccaaagtctaagtgtgaatgccagagtgatgaattgaacccaggtttgtctacaaaaccactgttgcgactatggcattcctttgtacttgaaaatatttaataagatcaatttccaggtccaccaatgtttgttaggtaaccaatcaagccagagtgttagaaaaggaataggagttggcatgcctaatgaacaccaagctagtgggag

SEQ ID NO: 33429 - DNA, 515 bp, Homo Sapiens
tttgcttttcagagtggctggagttcaaaggaggtgtgtgtaggattctctggctgcagaagagcctttaatctcataagactaggaatgtgctcagaaagagcaggctgagagtgtacctgggacctgagagccttccctggctaggagtcatcccaggaaagtgggcagaggggcacagctctgggcaggtcatgaggtcagggaggaggaattacgtgggcagaagctgctcctcctcacccgctcccattgcctttcaggagctgacatgagacttgcagttgattcatggatactgcaggccacacaattcgtggatactgcaggccacacaattcgtggatactgcaggccaccttgacgagactgtgcagagcccatttctgtgatttggctggtaactcgagtaaaaaggggtgaaataagtgtccctcccagttgtatcccgtgaccctccagtttggttctctttgcactagaatttattatcaaaaacattatgttaaaactgt

SEQ ID NO: 33430 - DNA, 382 bp, Homo Sapiens
aaaaatccaccaaaattacttaaatcatttgacagagtcatacaattttaaatgactataaaaatgtgcagatcagtgccaaattttttggcaaaggctgaatggcagacagtaatccaagacgcagacaaccttgcttttaagccatccgttacacagagaccagcaggctcccttctacctgtgagaccaaataatcccaaaatgtaaccaaataatcataactccccctactcctaaaacctacccttcacccttcactgtctacgtcagcctctggacagacctgatgcctggggtttggccatttccgccttcccaccctgtgttggtctccctcctccctcctcaggtccctcagttctcccaggcctaacttggc

SEQ ID NO: 33431 - DNA, 493 bp, Homo Sapiens
gtgaccaaatggttgtaagataattcatttactattatggttgtgatttgcatttccataatgattagggatgttgcacatcttttcatattactgttggccatctgtataacttctgtggagatacactattttgcacatttttaaatacttttctttttcctgttgttgagtagtatgagttctttatatatgatggatgttaattcctaatcggatatatggcttgcaaatattttctcccattgtatagggtaccttttcactctggtgattgttcctttgctgggcagttttttagtctgatacactcccactctctattgctgttatttttgtctgagtttttggtatcatatcaaataaatcataatcaaatctaagaagctcttcccttacatattcttctaggagttttgtcatttcagatctttaatccattttgagttaatttttacatgcagggcaaggttaagggtccaacttcatcctt

SEQ ID NO: 33432 - DNA, 366 bp, Homo Sapiens
agtgtgacctttgacatctctgagctgcagtttctacatagttctggaggctagaagtccacgatcaaggtgtcagcagggttgatttcctttggggtctctctccttggtttacagatggctgccttgtagccatgccgtcacatggtctttcctctgtgcactcatgcccttgatgtttctctttatgtccgaattgcctcttctccttggggtccccggcgtgaatcaccccgagtcgcgcacacccgccgctcgcctccgccccagactccgcgcgcctaggaaaaagtttccggtcttcccgaggaagttttctcaccggagagaaatgagcgacctggatggttctccccgtcgcgctct

SEQ ID NO: 33433 - DNA, 467 bp, Homo Sapiens
gtgtttagattctctgttctttgatttttgtgggagcttctatgcattacataagaatataacctctcccagacttgtcagactggcctcatgtaggagaaggatctcaccaatccatccagccaaaaattttaaggtgctctctaatctctgtgtttattcagactgctgtctcttttttgatggtcccctcgagcttaggatgtaccacattccatcaatacccccacaataccgtagagtaggagccagaatctctagatgtagctggagatgttgaggtgctgaatgggttttccatttccttctatcttcacagctgagcctgagcatttatgtcccactctctgtctgctctaagctaaggagaagatctgtggcaaaaacctgtactcaaattcaggttgcaccctctgatcctgaggagaagctcgtagaagtggtcctactgtacgtccacctttttg

SEQ ID NO: 33434 - DNA, 355 bp, Homo Sapiens
aactaatgcattggtagggggcaaagggtggcatggaccctcaggcacattaatcagcaggggaattggccaaatgtcgtctcccgctgggcttcaatgccaaaactacacgtgtcagtgacttccagagaaggggaggccccagaacaacactggacacatcaaatgtcctcccttccttcatatggaaagctcatctcggaggtgtcaggataaaacatgagaacagcatctgtcctcagagaccaagcagagtgattcactatttcatggcacaatgaggggaggaggacgctgtaataaaaactttataaggtgaaatctaaatcctgaatgcagcacacatttttaaaac

SEQ ID NO: 33435 - DNA, 504 bp, Homo Sapiens
ccttctcctcttcagcaaattctctttctggtccccactagaatcccaaggatcaattcatgtgtttggacaaatgtagatgcagttgggtcatcgcctcctccacaaagccctcgtggtcttctcctgtcctttcccctccaaggttcagcctggcaccctccttggtgccctactgtgctgtgcttatcattgtgctaacctcggtgtacagccaatttctactcactcatctgtctccccaactagactaaattcttaggcagcaaagaacccttgccctggggtcctacagacctggatgcaactcctgccagtcaggagtttcaccaaggtgctgaacctttcgagatttagactcttcacttacacaaagaggataatagtactcactgcacaaatcgacacaattgatacacccaacaaatgttcactgagcgctggccacaggcaggcactacgttagtcactggattcaggagtgtgcaaagtagacacagagtt

SEQ ID NO: 33436 - DNA, 516 bp, Homo Sapiens
tctgactgtcttactccaaagagccagtattcaagttctgaaattattcagcttggtctctctcttctgctgttaatacttgtgattgcattgtgacattcttgtgtttttcagctctatcagatcagttaggttcttttttatactggctatttcatctgtcagtgcctgtatcgttttattgtgattcttagattccttggattgggttttgccattctcctgaatcttgattatcttcatgcctattcatattctgaattctatttgtgtcacttcagccaactcagcctggttaagaacccttgttggagaactagtggccatttgacactccgaccatctgtgttgctagagttcttccgttgattccttctgtctgatggttccatctctgcgtgggggtgttcctttaactgctgggctgcctctgattgaagtggtcaggcaagctcagggtagttgtgctacagttccaggttgggtgaccctgcccagggaggagaagtgaggact

SEQ ID NO: 33437 - DNA, 470 bp, Homo Sapiens
ctgtatcaatttcatgcaaatccaagccttttaaagtttaacaggcctcacataaagcttcgctcatataaagtgttcaaagtacgctgcacagattttaagatgttaactctctggagaaggaaaagcatagatcaataccttgggaagaaattatgacaactttaagatattttctgaacaatggctctctagtagtctagaaataaaaccagatatttattatgcatgctcactgcaatagcatctgtatttaaggaagtttttggaggacgggggactgtattacctttggagaaaagcatagcaaaactgcaacacaggaatgtccactaggggcgatttctcatcaccccctttgacttggggtggcctcttcaccacctccttcaccaggtgcagcagcgtgtcagtctgcagggtgctgagtgcacacaccaagtcgacaagggttagctgggatgcacttg

SEQ ID NO: 33438 - DNA, 458 bp, Homo Sapiens
ccggatctgtggaggctctcctgcccctggggaccccgtcctcggcctggggggtagtgtcaggtgtgtttgaaccagagcaattccatcttgaatagggactctctaaactaaggctaagaccggttgggctacattcccagtaagttaaggcattcttagtcacaggatgagataggaggtcggtacaagatacaggtcataaaaaccttgccgataaaacagcttgcaataaagaagccgcccaaaacccaccaaaaccaagatagcgatgagagtgacccctgtggggcccctcttgttacactcttaccagggccatgacagttacaaatgccatggcaacgtcaggaagttaccctatatggtctaaaaaggggaggcgtgaataatccacccgatgtttagcatatcattaagaaataaccataaaaatgggcaaccagcagtcctcgggg

SEQ ID NO: 33439 - DNA, 486 bp, Homo Sapiens
aaaattccgggaaggactgtttattttttaaattttgccataatctatacaataagtattaaccaatgatggatcttttttttacagaaggttaccaaaccagtttgcatttgttgacttcgttaggggaggctcctccacaacgagctcgttaattttaggccaccttgcgtggctttggttgacactcagtgtgggacagctaatgtgatgctccctgaaaagtatatcgcagagtctcgcaaaattaccaggaaggcaatggagctccgcagccctgcgtttaacctttatttatttatccatcataaaatggggggcttctccagttccagacaatatctgaaaactagagtaacaaagattaaggggacacacacagcctctatgcagacacgctgacatacggagctcagccctctatgcagacacactgaaatatgaagacacccacaggcctctatgcagacacgctgacatacggag

SEQ ID NO: 33440 - DNA, 540 bp, Homo Sapiens
gaatggtaacctgatgttggaatgtatatagctatgtctccaagtttaatactcaaagaatcaaattctagattgtatctatctgtaaacctatttctttagccagttgttttctgtctattgccaagaaacaggattctgtgccttgtgcaaatattcttttatgtttacttcttactcttgattttaaaaaatgtgattgtgtcctaacctgtcccaggatgctgttgctgtaacactgaatgtgtgtgaaaagggtatgtttctagttccaggtacagtacccatatggccttgactatatttcagctatttaaaaattaagttggaggattttggcaaaagtagttatgtgtgtgattgctctaacagactggttggcatgtgatgctgaggtcttgtccttttagctgtcctacaggatagatataagcagtgtcacattcattatactacgggtgaaggttcattgcttcaacatgatggtggcaaatttcaacaagatcactcccaggatattaagtgagcagttcttcagca

SEQ ID NO: 33441 - DNA, 476 bp, Homo Sapiens
ttaactattagaaataattaagtttattttagaaagctttaaagaaatggtatcgatttttattcttatagtgtacatatacatttacacctaattttgagtagcacactaaatgattcacattcgctgggagaatgatggtcacatgtctcttttaaacagtattttgaattacattccttaaacattttaagggtatctggaaaattaatgcataggaagaactttttacacatttgttaaaatttcagcaccctctgtctactaagatattttactgatttcactttacatcctgtcctttttatgcaatcactactgttcttatcaggaaaatccccaagatacttccaacagtacctgtataatcccggatctgatacctgcaatcagcccacacaaagtcctagtgttcccaggcttctcactagccaataatacagccctacatctcggcaaagaaaagcatgggttgg

SEQ ID NO: 33442 - DNA, 569 bp, Homo Sapiens
ttttaatgcaagcttggttgtgtgaatattgctggtggctgtgagttgcacgacctgagagagaattcaaatccagatgtttgggttagcacacattaccttttcttctttaaaataaaataaaataatctatctagaaaagacaagatgagtcaagagtctttcagaaaaggtactggctttttccaagccaagccccactcagtcactcaaagcaatgtcatggaggccaagggtccaaggtatgtcaagaactgaattacactgctcccaatctctcttactggatgctctcttcctgccagccagtgagtacagggaggccagttttttgggtcagttccaagagcagacacttcagcttaatacgctggcatcagtgtgcaggctctgatgctctcttcaagtctttcccacaggccgaatcatctcttcccagctctcgctggtaaaagtgcttttgacaaggctaaggcctatgggcaaaactcaccaggatagtgtcccagctggataatttacaatatacacaagttagaaaacagtgatttgaaccctgaagccactca

SEQ ID NO: 33443 - DNA, 481 bp, Homo Sapiens
acagtgttgcatagcttgaacatttttatattgattaaattgtttttcagtagaatcactgacagaacaggtcagaatgaaaaacattccaaatatacagaaaaaagattactgctcagttaaggtccttttccaaataacttcacacaaatcctttggttgctccaaacagaatgagagctatgagaatggtggccatccttgtctttgcattcaacagcgccaaagtctgagggacaaactcttggtgacaagtctcagaaatgtgacatgtctctgtagcagccataaagctttggtttaggattaattttgattctctggaatatcagcctcccagaatggcaaatcttgacctcatctagtccagcccaaccttccctttttacatataagaaaactcagggttgagggcaacatatcttgcctaagtccaggtctagacccaagccctgcctctcacaatctttccccatttctg

SEQ ID NO: 33444 - DNA, 414 bp, Homo Sapiens
gcggccgctgcggggcctcaaggagtggctgcgcgcggtgccccggtgtctcctccgcgctcgggcagccgcgggagtccggctttctgctgtgcggcggcgaggtttttctctccgccaccggtgcttcgggggatgatccgacgatcaaacagaggagccagaaagctctagctgtcatttttgcagacagggttcccaggctctaaaagtgagcctggtcttttgcttgctttctctcccccaaccccttctccacacccccacccccgttcatgctaatgaggggcagcctttggggaaacgggaatcactcgctgagcagaccattggaacaaaaccgagccgcagggatttctccctcttccttcctaaggaggacgagcacatggccttgcaaagttgtccccggga

SEQ ID NO: 33445 - DNA, 393 bp, Homo Sapiens
tttttttcccacttacagcaagtaaaagtggcctgaggttatccttgtttttcttcgcggtttgccatgtgtgaaagtagatttcctgctattgatatattctcattatagacagaatagtggagaacagtgttgccatggacaaaatccagttttggtccactctggggagcatttggacctgtggtgcttctaacaattaaaagtctagatggtccttgactgtcccccagccatactgcatactactttgtgcattctactttgtgtcattaatgaaagattggttctgtccctgtaacttaggcatttattattcttaactcctcattcctgttctgtagccacccagcagtccattttccctatgttcaggccaaaccacagggcttg

SEQ ID NO: 33446 - DNA, 493 bp, Homo Sapiens
cttgattttattttgacatttatttaaaaaagggaaaaagaagacgtaaaacagaattcacacagacctttgttattccaagctcctatttatgaatggtgattaatagcaataattctgtctctcttctctctgtgaaatgctaacacttgctaaaggcactcagattctgggcttaacggagacaaggtcacatgggaccataagccagaacgttttttggtagctacccagaaaggaagtttacaaatgttcctcccattcataacgggaagaaaaagtcaaacagctatcagtagaagcgttttatgagaagctatttacacagctatttgtccattcagccagagtgacagtaactgctcacaatggtaggggttctcccctgccaagaaagcaaaaacaataacaaaacactttttatcatatatgaaactcctgtacaatgatttggctagaagaaaaaaatagttggtaaggtcaaatttgtttt

SEQ ID NO: 33447 - DNA, 547 bp, Homo Sapiens
ccaacacaaattatgaaagcttaatgattaccatagaacgacagcctagattaaggtaaagaatcctacatttttcctcctcgtcccactcaacctccaaattactcatgctagagccatgggtggtgaaatcctggtgtggcttatatcccaacagacacacaggtagctgacagcagagggaatctcaggggctttgttatattcctgactactgggatagatgtttggatgggacacaaccactcatcagataagccctaaataaatgaaaaagtataatgtgttagttacacataagggaaacgttaaaactgtgccattcgtcatgatacgtatttcaaaaaatttaaaacctttgattactgaagatttcaaacatatattaaacaagtgagtataatgaatccctctgaaccattatccaactccaacagtcatcaagtcgtgatcaatttatctactcatcaaccataaaatattttgaaacaaattccctacattgtatcattggatccctgagttcttcagcatgtaagtgtgacat

SEQ ID NO: 33448 - DNA, 439 bp, Homo Sapiens
atgagccactgggcccagccgcattcccttgttttcttaataaggaatacattgatatatcatattaagcatgcttaattaaattaaaaaatgtttgggtaaaacagcatctatgagctgcaaatgtcatttatattcagaatgaatttataacatgtcttagaaaaaaacaagccgattcttgaactttcttgccaaatacatagcacaactgaaagcccctgctagctgcaacttcctaactggattcagaatttcagttggatttaacaggggggaaaagatgacctaatctagatttttaaatgtggtaaacaccattaagacttccacaaaagttttcatgaatcctacagaaacattctacagagctaggcagttctaggaccttaatgataagttagttcaagtgcttggacatgcattaatattctgacag

SEQ ID NO: 33449 - DNA, 388 bp, Homo Sapiens
aagtttgggactttgctaagcgctatattatcatctaatttattcataacaacaacccaatgaggaaggtactaatattactcccatttcacagaggagcgagttgaaagtcacaaaaatgaaacagcaaacgcgccgaagtcaggcagcaagtaagtggcagcaccagaactcgaaactgcctcggagcatgcactcttcaccaccccgttccaccttgaggtcggattccgcacgccgttcgcggcattcccaccttcctacgtgggacagttcccggtactgaggcatggcgctgtccagccctcaggcccgcagccgtccgcaagcaggagaacgcggccccgctgggcgatcctgcccgaaggcgcccgaactgcggcgcgcg

SEQ ID NO: 33450 - DNA, 418 bp, Homo Sapiens
cagaccctgggcacctcacattcccccagggtcagctgaagttactacttgaaggctcatgaagggaatgacaaacctttgcacctttggcaaaagcagagccagttcacaggggtcatggacttttcactcagcacactcattttacattctgtggaaaaagataacaaaggaaggctgtgtcctttagaaaaaggtcgggggctgggggtggggacttgagaagtgctgggggagactgcagctccatcagctgatgccgtattgcctctgctagagagcccagcacaggtggggagctcctcaaataaagcaagcctcggagttggagaccaggctccacagcagttttcctgttcagtacctgcagtctccttcttcacccagctttgattacaggagtcaaacacagtggttc

SEQ ID NO: 33451 - DNA, 385 bp, Homo Sapiens
aaggattcttttacagggtatagttaaaaatcctaaaacaagaaacactgagtaattaacaaagggagcgaatcatcactgggaccagcacgctcctgcgcttgtggagtgggtgtcgctgggaccctcgaaggccgcagagctgtctcctccagggactgatcaagcccacaccccagcccaggggaaagaggtgagacaggttgggagaagccagtggctgtggagcctagcgatcccggggccacctgcaggggcaggactgagcccgctcccagagtcgtggtaaggagggacgtccagggccaaaagcacaggaaggtcaggagacttctgtttctagaatataaactgatacacctttcccaggctaacctctcttctc

SEQ ID NO: 33452 - DNA, 448 bp, Homo Sapiens
agacagcatcacgccatgttgcctacactcgtcttgaactcctggcctaacgtgatcttcttggctttgcctcccagagtacagagattacaggcctgagccacctggcctaagttctttatatacattgtcacacttattcctcaaaacaactctccgaagttgttgcttttattcccattttgtagatgcagaaactaaagcctagaggtacaatcacctgaataggatgacccaatgttgaagtcaaggctcaaatccaaaacacaatgaggctcacatttaaaggcctttcttggaggtaaccacttctgcagagtctgcagctattctctggcatttttaagaacctattgttttacttaatattcagtaagtttgaggggaagttttggatctaatggttggttttttgatgccagtggttcaataactattttgcaaataa

SEQ ID NO: 33453 - DNA, 353 bp, Homo Sapiens
ccatgtcagatggggagtgttttaacatcgtaacaaggctggagggtggcacatttaacacacgcacgtaacacccaaccattatgtttatgaactacaaaaggattggcccctacagtcttctgatgaaaagataatcagttactacaaaaagaggaaaaccaacttcattccaacccagtgcctacccctgtaattgacagtcttgtctgatatatgtgaaactcctaaaacaatgcagctaccttacacctgtatgctgctggacagtcttcaaggcactttcacaagtattggctcattaaaccttcataaaccttcataagcatgtggcaggctgaactagaggactc

SEQ ID NO: 33454 - DNA, 392 bp, Homo Sapiens
gcggccgccggccagagcctttgagagtggaaccttcctcgtgttcaattagaggacccagacttgggaacagagccgtaaccacacttccagccttggacacaggaacaaacgaaaaataatttttctgtgtcagacacctgaatcctgagggcatgtcaggatctattttcagatatctacattctgtcttcatccaacacctttgctgtgaggtcaacttgaatattccactgtgactcttccccaacccagtctcctccctcccagaggcagagccaaatggcccgagagtgtgacaagttgagacctgtaggacagacaccaggttgcctgcccacaagcgattctgccttctttctttccaaataaccctgattccatctgggcag

SEQ ID NO: 33455 - DNA, 417 bp, Homo Sapiens
aataactggggtctaaaattaatcagaaaaatatttcaaatttacaattttacttaagcatggaagtttattattttggcagatgcaaaagctatacataaaacaataacaataaaacagtaacactatagctctaaaatgtttcggttatagagaaagattatagacaggaattcatgaaccaagaatcaacattatcatagatctatttgtttaaggaaccaaataaaaacaaatacattgactcttcatatatatatgtgtgtacgtctcccacatacatatacacacatattcacacgaatacaatcctatgcacaaatacacacaataattattatgtgtttatttcatatactataaataaaaacaaatttagtactcaatcttttcaccagcagaaccattattttctct

SEQ ID NO: 33456 - DNA, 351 bp, Homo Sapiens
tgggtttataaaaagtgggtttacttttataaaatttagtacaaatcttatggaaatataaatcgttcttgaacagtgttcgttatcattacacagtaatccagggcaaatgagtacttcattttgtccaagtataccacacattaattagcccttcatttacctgtggtttcagaacttagcattgtcttaactgctgagtcatcttcagttcacattgttctctcagaagtcttttcatagttattagtaacaacatcaagaaaagctgaaatgagggattcccttccccttaccaattattcagatttctcaccattcaaaaaaacctacatacagttccatgaaagt

SEQ ID NO: 33457 - DNA, 428 bp, Homo Sapiens
cattatcaaaattgtgggaaaatatacttaccataaaatttcatttctacttttatgatctttgccatggtgtctagtctcccttgtgtacttctgaaatggcttgatcatttttctctatttctttttttctgctggttcccatttcacactctactgttgtctggctgtctcttccttgagttcttgtatttcttctttccagtagttctccgtaacttctatgcttcattaattttattttctaatacaatgttgagatataattcatacggcatacaattcacccacataaagtgtacaattcaattgcttctagtatatccacagaattgtgcttagtatatccacagaattgtgcaaccttcaccacaatcaattttagaagtattttcattatccccaaagaaaccttctaccccttagct

SEQ ID NO: 33458 - DNA, 446 bp, Homo Sapiens
tttttttgagatggagtttcactcttgttgcccatgctggagtgcagtaagactccatctcggggggcgagcggggagcgggaagaacatactataatagggcctgctttgtgatcatcaagttaggagtagtagagaggctttttttactgtggcattaaaatgaccatgctcacctgtctgctgggcaaaaggctatcaccaggtaacacaggaatatgggcagggagacctatacatatgaatgacttaattttgattaaccaaatgtttcatgtttagctacctttttgtgaagggtgcaaaacagaattcctaatatgttagccttttgtctagggactgaaaccaaggcatagagagcttaggcatatagacaaaggttggtataatgaaataaaacacacacaggctcatctataaatgccatgaggactgggacagtg

SEQ ID NO: 33459 - DNA, 511 bp, Homo Sapiens
ttttggagcttcggttcatttattttttttggtaacagctttactgagatataattgacatacaataaactgtacacaaaataaaatggcacccaaaataaactgcaaagtatcacttaaataagttttgacctgcataaacccagtaaactatcaccacaatcaagactttggttcacttctaactctaccacttaatatgggagcttgagcaaggtgctcctgtagttctgtcagctctcaaaccactacaatcatgcttttgttgccaccattgtctgaattcacacttgccaaagtcaacagatctggggccatcctactcactctcccatcaatgtttgatagacttggtcgctccctccctcctttgttttcttcagggacactactctctataggtttcctttgcatctaatgggcttctcctgaagtctaaatgttgaagtgcctcagggctaaatctttgacactctccttaatctagacttatcacctatcacctcctgac

SEQ ID NO: 33460 - DNA, 452 bp, Homo Sapiens
gggcaattcgcactataatatgaccctaggtcaataattaaaagcttagcaaaagcaaaatacagacaaaattatcccattatcccgtgtccagaaacctaagtgaaaaagacgatcttaaatggagcttaaatctagtttcctaacactgacacattggtctgaattctgagcacctactaggtgtgcgaggcattcaaaggggtgcaaagataaagaaactgtagaattaaaaagaactcaacagttctttaaagatacagtgaccatatgcatacatactgattctaatcctaagtaatattcacagtgttcccttgaaagtcgcttgactagttaagtagagagctgtgcggttaccaaaggcaagtcagtgcagctcatcctgtcttttaagtagtcttttccatctctgaacaagactaaactatgaacacttttacgctctatta

SEQ ID NO: 33461 - DNA, 414 bp, Homo Sapiens
gggtggtgtattagtttactaggggtgcgcatttcaagttagtacaaactgatggcttaaaacaacaggaatttcttctctcacagttccggaggccagaaggccaaaatcaaggtatggagagggttgattccttctggtggttttaggggagaatctgccccctgcctctctcctggtttctgcaggcaatcctcagcattccttggcttgcggatgcaccactccaatctctgctccatcttcatagtgcctttctctctgtcttcttctcttctaaggatgtgtcattggatttaggacctgaatccacgatgatttcatctcaagatcctagctaattacatgtgcaaagaccctatttccaaataaggttagattctgaggttctagatggacatgaattttggaagt

SEQ ID NO: 33462 - DNA, 510 bp, Homo Sapiens
ctttaaatttactttcttctcattttgcatccagtgggaataaaaacatgcacgtgatttgatttaaatgatttgattaaaattaaatgatttgattaaaaatcaaatcattacacatgatgacatttatataaaacccaaaacactgtgataaaacttcttcaaattaatgtctggggactggtgactgtgttaagcatgcacagtagttagtccatttgccaaaggtcctgaggccagaaagtagtaaggctgggattcaaatccagcactctgcgtctaatgaacacggaaatattgcttatctgtagttgaatcacaacacatttcaggtgatagagattcagggctgtaggaaccatagcagaaacacatgcacagaaactccacacacagcccctcttaccacctgacagcccccaccatcccatctcccaccgtggtgagccaccatgactggcacagaatcacacaagagaaggcgacaacatactcacatataacaaccat

SEQ ID NO: 33463 - DNA, 469 bp, Homo Sapiens
ggaaaggataactttatttcttgagaagggttgcaaactgcatgctgggaagtgacacctccagctgagaccacaaacaggtactttgagggagatagggtgggataggagttttatgccaaacaggttggctaaacagacatattcaacaggtcacagggggaactatgaatattcatgaaagggggtcatatgtgtgcttgataagcaaacatatgtgttacatacatcccatgttcaccttcgagtggagaattaacattaaaatgcagtaaaattaggttctgtatgttaaaaggtgaaacacaggacacgaagacactttgtacacagcctcggtgaaccagccagaaccagcccatggttgaatactttgtagcctagtcagtttgtcacttcaaaactgcaaaaagggctgggagtcaggccgcatcagcaggcagttggttgaagtcagcggaggggtgtt

SEQ ID NO: 33464 - DNA, 537 bp, Homo Sapiens
tttaagtctcctgctgtatgagattgggggcacagcaggggggacacagcacagaagacaggcagcggcacacacttggagacacacagagattcacccatggggactcaacatggcagggaaggggcagtgccaaaaagtgggagcttatagacagggtaagaataccagccactatatatatctaacataagacaccattttaaccttactatgtatgcagggaaggagcattaaatattttcccattattctgctaccatcatcaccatccacccacagaactcttttcttcttcctaaaatgaaactctggtcccatcaaactcttgggtagagctgcccacctgtggcccacagcctgacccctgaactcacctctagacttgctcctggtctcctgagctatttctgcttaaacacccatccccgtcatcacccatctccaggatagccttgaaacaaaaggctcagagaaaacaccccacggttgggtggtgtgggaccgtgcagctgaacggaattcagcacccacaag

SEQ ID NO: 33465 - DNA, 484 bp, Homo Sapiens
ttttttaagcggagtctcaaaaaaagaagtccatgaggtaagaactcaagttattaaattattctcaagctacagataaggaaactaaggcccagaaaggttaaatgacctgcctagggtcgtgaagtagactcactttgaggtagaactgggtcttaagcccggttctggttgacaccaaagttcttaacctcatagcaactccttatgtatctgaaaacaatcttttggacatttcgttaagttcccctgtttatgctactccaatttactcttgccaacaataccctgttactgggggcagggcgtaccctcatcactggtttcgcttatgcttcttcagtggtatgctggtatgtttaacaactggctctctgggtgcagcggaaaccctggtttgtagcacttgccaatttccatggtgtaaatactctcaccatagccaatttcaagcagctagcatgacatcactaagtcggaagct

SEQ ID NO: 33466 - DNA, 467 bp, Homo Sapiens
gggccgccagctttcccctgcgccaggtactcctgcttctggcggtggaggtccgccatcttggacaagtcgtcggcagaaaggaaaagctgcggctcacttccggccctccgctgaagcggctcggtcttcgggcggcaattggtcggcgacggcgaaaggggcagggcctgcggcgctcgcggaagtgccgcggtgcctgctctgcggacttttgtggtgtccccaagtaccgtggtcgcaggtgctgcctgtccgcttgcagtcgccctcccagcgcctgaccctctatcttgttcggagtaggcgcccttgcggtctggctaagtcctgccagcattaatagttggaaggcaggggtgggtgtggttctaaaggggcacaagaagtgacccttttgctgacggaaatgtcttatggcctcactgcgtctaccgtggcggtgatattgtgctaggtgtgcaaca

SEQ ID NO: 33467 - DNA, 503 bp, Homo Sapiens
gccatttatttttttcattcattccacaaacaagttttgagagaagacatctaagtgaacactgatacaaaacaatgaatggacatccatttgcaccaggtcttggaatgcattcagaggcagaggcttccagtttcacaagttactcagacattcctttagccagggatgccccagctccctcacagctgtcttgtctgtcactgggcgccagacctcctgacagaggcttccttcacttcagcctacctgccactggttatcgaggtgcttggggggtgcctgctgtggaccacgagggacttgccctttctccttccccaacaagctcctgggctgagtttgctgtcacagcatcccctccctttcctgaagcatgcgatggatttggtatggccagatgtggcaggcacaggacagctaggccggcagcctggtcttctaacctcttccgcatctatatcacgctccacagcctcatgaaacattagagccagagcaac

SEQ ID NO: 33468 - DNA, 430 bp, Homo Sapiens
tgcgccccgctcactgccgctcacgcgcttattctcactggggggcggccatcagcttttcgaccggtggcctcggctcgtgactgggctgaccctcttcttcttccctttgggaagaccaaacacattggccaggccttggactcttcttctttccttctttcttcgcgctttctctcctatatggggctgcccagcctcagggtggcaccaggcctagagaggctcacatgaggcctgctctgctctgaggactgcaacttggggcctaggcaagcagggtgcctgcacagctgaggtctagagctgaagaaggcatcattcacatcaccctggtcagctgagctctgctcgcttccgcagctgatgtcacacacctcccggagctcgtggcccgtcttacctggcaggagggaagcgcaccatccga

SEQ ID NO: 33469 - DNA, 524 bp, Homo Sapiens
aggtagcaaatattatgcctgtttattttcatctccatttcaggcttgcgcgcctttcccccctcgggacttcccgaggacacccctgcagcagtgagcccgagtcctggctttggctgcatgttaagaaatattaatcaaaatgaatgcgtgccctttaagagaaaaaaactgtgggtccttcagcctttaaaaaccatgccgtggtttaaaaacttaaaactatatttcggcagaacgatgagcatttcttcaaatcactctgagaagcttggggggtttttaatttcaccggtctgtcaaacgtaacgcgtctctccctcaccccacattttaagtttccaaggagcggaagaagggcctccgggggtcccggccgccgcaggctgctgggggtgaggacacgactcggcctccgtccgactcgagggtgtcgcgaaggccaggagggaacgaaagttaccttcgaacttcggaggcgaaagatttcatgtggatcttaaaaagggcaaaacctaccccaa

SEQ ID NO: 33470 - DNA, 472 bp, Homo Sapiens
gtctgatctacacttttccatgaaagaggagaactacagttaaacattagaggctggtaacttttcagagaaacccccaagtcctcagagaggtggccaaggcaggacatgctccctggcccgggcctgctgcgtggtggtgctcagccgcactggtgcctgtccccttcctgttgcctgcgctcctttggcctagttgggccattgagtgggcccaggccagagtctgtctccaggtgggggactccatgcccccgctctctgcttccatgtcccttgaactggcaagtttgccaagtagagtccactgtgggcccctctgaggggactggcaggacccccaaaggccttgagggctgagtttttgcagctcaacctcagactgcattgttcccccagggctccttattttgaagtccacagttatccatggatttgtcccctttgcgaatcctggtatgtagcttctgag

SEQ ID NO: 33471 - DNA, 437 bp, Homo Sapiens
ggtggttagcattctttatttgggctagggcagctgcatattgtttaaacatttttcgaggctggaaagactgctcccactcaggcaattctgacgtggcggcccttctaatttatattctctaaataattcttcatttagagaaaacagtcagggattacagtgagggagggtgacgtgctgacggggacagagcttggcttttgatcattctccccttagctctgcccaggcaagcgtccctaactcagggtatcggaaccgatctccctttaaaggattatgttttaaccaccagcctcagcggtttactcaaatgtccttccagccaaatgcagaagtctccctgggagtaattttggtgaagtcagcttttgcctttttcatcacaggcaggctttagtagttcctcaaaacgtgcaccacaactgcccggc

SEQ ID NO: 33472 - DNA, 378 bp, Homo Sapiens
taacggtgacagatttgctcactatttaatgagcatctggatgggcaggggagtgctctaaatgtttcagaggtggccctgagctggcttcggtatgtgtgaggtgaactctgagaaggggatgggaaagggcattcagaggtactagcttgaccagaggcgcgcaaatgaggaatgctgaggcccagggagcctcctgagtgcatgtcagggcagagatgaatggagagggaactggataggtatgcaaggccagacagagaagaaccctgttatgtcatgtttagctcctaaactaaaacatctcgaaaacttcctaaaattccatatgaaatgcaaatggcgctggatttcagcttttgctggtaaccgtggcag

SEQ ID NO: 33473 - DNA, 406 bp, Homo Sapiens
caaaggtatttgtttttccaaataaaatatttggcagggcagcgaaactaaggtgaaaaaattcaggcaacgtgacgtgaaggaaaaaaatatttgggtctaagatgctaccaaagagggtttgcctaaggggtggtctggagacatcagtcctgctttctcctgttccttcccatgtcaaggctccaaaagcacaagatgcttcacagctgttgtaggtgctccagcagtgaggggaggagggcagctgggcccctgaggcatgggtggagttttcttaagcttaggatcacctgtgccatggcctgaattacctgaaccttgaaacaaccagaatatccttctctttgatttgcccacctgtgatatttactcaatcacttttagaaatggcatcggccccaag

SEQ ID NO: 33474 - DNA, 537 bp, Homo Sapiens
aatttcgtaccaatgcctttattcaaatttggcaaacatcaaggaaaaggtaattagtaccatatacctcacacatcagaaatatgaatgagatgccaatacatcagttacttgtgaatgatgtctctgatggtatgtctatttcaagaatatatgtatttatacacacacactacacattgcacaaaacatttgggcattataggttaggaatagcacgggggaattgggaagtactttttcatctgttaaaacctttaccttgaggcaaaaaatatggcggcacattgttgggaaattatgaaaacataaggcccctgtcccatttttaatagaacattattgaggtacatttttatatgctgtgccacagttttggggagggggaggagataaacactagcttgacttgttctatttataacattgaacgctggagagggtcaacattagtatctataaaaacaaagattgcttggcaaattttcctaagtcccagatatgatgtattctggatatactgagaagtgaaaagct

SEQ ID NO: 33475 - DNA, 510 bp, Homo Sapiens
tttttttgaaagaactgaaaatgctttctctggagaagaaaatggctggtgggagctgtcttacagccagggagccccccactcgggggacaggtggaggtcgggtggcaggcatggtgggcaaggctgaaagaaatgggcttctgctgcaaccggatcttcagttagactccggaagactcaggaagccctctgactctggagccattccgcatctccgtcaacggaggagccattcttccccgttctgtcttccttctccatttctcgcaccatcttgcagcactcccccaagtcctcctgagctcgtgaaccttcctcttaagctggtgcctctagggggcccctccattcctgccttctcgctctgcctcctgcttctcaccaccttcggcgttgcctgaagatttgctgaaagtagttcttggggccctgccaggcacctggctcagagcccagcagagatgccaaagctttagggcttcacattgcaggctggcacaggtttgc

SEQ ID NO: 33476 - DNA, 560 bp, Homo Sapiens
tgttgtaaacatctttatctcatctttattttagaaacatatttttgtcagatacagaattatagattgacatttttcatctttcagtactttaaagatgcttccccagtttgcttgcttatatcgtttctgataaatctattaagataatcatctttatctttcttcctctacacacaaaatgaccatatctctttctctgactgcttttcagattttctctttatcatttgctttcaacaatttgattataatgtacagtaagtcctcacttaacatcatcaataggtccttggaagctgcaacttcaagtgaaacaaagtagaacagaacccaatttaccatggtccaatcgacataaacaagtgttaagttcctacagtgtatttctagttacaaaaacatcaccgaacttctaataccaaaacacttctaatattaaacaatgaaatgaatgtgagctacacatacacttaagaaagattaataaaaacaagtaagataattattcacccaatttttctagttcagggtcacaggtggtcagagcgtatcctagc

SEQ ID NO: 33477 - DNA, 546 bp, Homo Sapiens
tttcagagaagaaaatgctttttgtattttttccaggcaaaatattgataatgggcttaatgtggccttcctgcttttgtgtgtcgggagagagagcttttctgtcctggccgctgcagaagctgttcgcccccctccagcccccgcagcctccatcggcagaccccatgcgcttggccgctgaagcccaggcagggagtgggggcgcgttttgatcgccaccgagcgggttggtgcagcccccctccccatctcgagccctcctacctccgcctgcacaaagccggacgcctgcccgccccaccgtgggtcgatgcaccctgccaggggagctggtgtttcccgcggctccaggctgatacatctttgagttgtttgaaattttgcttcctttctctcatggcgacggggaggcaggaaggcaggggcctctgtgcattcactccttcattcatgcattcattcattcactcactcactcacccagcccccagtcaccatgcacctgctgtgccccaggctctgtgctggatgctggggccaccg

SEQ ID NO: 33478 - DNA, 550 bp, Homo Sapiens
aataaacagcgtgatgttacagactgcagagttaaagaaaagcagacattgacagtttctgatgagcataaacagtaagtgcagtcacaggccaaacttcttgctaggaacagcaagactgggaagaggtcttaaatttagtgatactgttattattctatattctcaatatagtaacacatgcatcttgctgtgtcaaatgctttctgggccatcattaaaaggacattaaaaacgtttttcttctaatgaatgcagtataccacaggacttcaattcactgaatgacaaaatatagagaaataaacttgctacaattaatggggccaaaagggtggttcgaatttcttgataaagcttccaggtgaacatctgacgtgttagtagtcttcttttggtagtgccacattccccaaggtattaaaatgttatgctccaaaagggtatattcttttagattttattcaacccaattaggtctgaggactgaatcacactgaaaccattaacttcatttgaaactcaaaacatttttgaaatcagatgaagg

SEQ ID NO: 33479 - DNA, 367 bp, Homo Sapiens
taattatttctgcgcagagattcttgggaagcggttccccttccgcattcccttgttactcctcccctcggccgcctttgaaagaagtggcacgccacatgattccatcctttctcccacctccaaagacctggctgataatgggcaggagcgtaggccaaccataaaactttatttcctcttccagccaatagcaagaggcgatgagtatatggctcctcttttgtgacttcccccgccccctttgattccgccccctattcctccactcagattccacacttgacaacacatctggccaatgagaagttcctactctgcgtgggaaggatggactgactagatgatagacgtccatccctggcca

SEQ ID NO: 33480 - DNA, 505 bp, Homo Sapiens
aatataaaaataagctttttaatgaaagagtgtgtaaatagccctgggtacatccacaaaacaacgaaaaagcatgatggcggggctgcatctgggtgggcctccataggccatgagtgcccaagctcataggaagtttgatacaaaattttttgacttgtaaataatgcaattgatctccctctcaaccaggaacattcgaaaggaggctgtagtacgtagtaaggatttgggggctcttttgaagtgatgtggattctcctggctctcgtgcagaggatggtggatttactagaatgaaaggacagacaaacctccccccacccacagaggacaccgggctgctatttgaacaggtaagtccccaaacccatctgtaggagattcacatttgctgcaacatgaagggttcaaaaccaaaactgggaccttcttttttccagcttgcatcttctaatgattcttggtatggctaaaatgtccagattcccctgcaatacatctt

SEQ ID NO: 33481 - DNA, 479 bp, Homo Sapiens
cctttgattattatatattataaagtaaccaggatctagttgtttcgttttgttttgttttttaccaattggaataattcacgtttaatgtttccaaacccttctgcctgcaaccgccgtcctggggatgagaaatctctggggaggaggagtttgggggccagcatcttgtgtcggggcatgggttgttgagatgacgctagcaccccccatcccccgcccctgcctactgggccggtttcccctccagggggtgaggtggcgcctcccagatgggacacagcctgctgtccccactttagtcagaaagcaggagtgagacaggtggccgggacgagacgctggggctggtaggcgctttgctgccatctgctggggagcccgcagcagccgccgccgtggaccttgtgctggtggaaagcacaaaaccactgtccacgtgaaggccgcccatgtcctggcagcgcccctgaggggtg

SEQ ID NO: 33482 - DNA, 492 bp, Homo Sapiens
attgaaaagaaatcattgctgattctagcgcaaacaatgtatatcttacaacataaagcaagatataatttacatattacatttcttatgagatctttataccctaaatgtcattcccttttttattaagtcacctcttctggtttaatttaacctgccaagtaccctacaaatcagcatcttgtttgaagggagattgaggacacaggcagatagttcctatgtattcacctgtatctggtatcatgatggtgaggaacagggttatgtcttgacatttgcagccctgaggacctccactgacaactggcttaagatccagaaggcatcttttccaaatcacataccaaacttgtattttaaaaatttgataataaatgaacaaaattgagagcttgtacaacatgtatatttcttgatcaagtgcttagataatacatgcttatggtattggttcaccagcagtgaatgtttctttggctgaccagcact

SEQ ID NO: 33483 - DNA, 486 bp, Homo Sapiens
gtcgggccgcgcgggagcccccgaggcgcatggtcccgcggcgcccggcacgacagccccggaggggggcgaccgctgccgcggctactacgacgtgatgggccagtgggacccgcccttcaactgcagctccggagcctacagcttctgctgcggcacgtgcggctaccgcttctgctgccacgacgggccgcggcgcctcgaccagagccgctgttccaactacgacacgccggcctgggtccagacaggccggccgcccgcccgcgcccgcgacaccgcagcgccccgggaccccggccgcgagcgcagccatacggccgtctacgctgtgtgcggcgtcgcagcgctgctggtgctggccggcatcggggcgcgcctgggactggagagggcgcacagcccgcgcgcgcggcgcacagtgaccagggcgctgacagagcttctgaagcagccgggcccccaggagccactgcctcccaccct

SEQ ID NO: 33484 - DNA, 482 bp, Homo Sapiens
aataatttaattcttaacacacttctgacacataatagttgggtgcaaatgcctgttacatgaacacagcagataataaaatagtataaacacaaatagctttgaaagctattctagtctttctctagtatgttgaagatctacatactgacatgtttaaaaattataaacacatatcagaagattgtaatttattgctccaaactctctcacccttagaaaaaaatctgaagttcctatcatggcctacaaggtcccttgagatctatcccaggggtcagtcaactatacccccacagggccaaatccaacctgctgcctgtttagcaaataaagttttatgagaacacagccaggtccattcatttgcatattgtccatggctaatttcccttataatggcagaactgagtagctgccaagagaccttacagcctgcaaagactaaaatatttactatctggccttttattttaaaaagg

SEQ ID NO: 33485 - DNA, 417 bp, Homo Sapiens
aaatgaaaaactaacttgggaaatacattctttgatggggctagccacacatatgttttacaatacttggtctgcaatgctgtcttttgggtctgagtttcttctcaggagggtatctttgggccagcaataacaatcattgttcagttatacaaactttataatttctgaagtaatttcctatacatcatttcacttagtctttacaaaaaccctatagagaaagcagggtaaagtctgaaataataaataataatcagttaatggaaatagagtatctacatcctggaaatgatggctatgttatacactatgctagctctagacattcttgtatgtggatgaaattagcttcaatacaaccatatgaacagattgggtccagaggcagagggaggcacacacagatcatttgac

SEQ ID NO: 33486 - DNA, 537 bp, Homo Sapiens
aaattatcttagaagctcagaactcacaaaacatctgggctgccagggaccttgccattcatctggttcgatctcttcaatttacattatgctgggaaaccagagccatcaagaaggagtgcttcaccggagctcaaactgtaggcaggaatccaggactcttagctcccagcggggcctgggcctccaagccctgacctgatggcctcctcctcctggccctgccccagccttacctgtcgcccaatccattttgtcaggaccccctcagtcaacaagccctgactgaccaatttcaagccctcctccaccccgcaatgaccttacctttgtctggctcacattctactcaagggaataaaataggaatcataacattacatacttatgagaacttgctctatgccaggcaccacgttaaaaccctgaacagaaactatcaacacatttaatttaatcttcacaaaaccttgatgtggatataattacatcccatggatgcaattatcattcccatttgcagatgagaaaactgag

SEQ ID NO: 33487 - DNA, 376 bp, Homo Sapiens
aattctccaaatccatacatataactgcctgcttggtgcctcctcttggatatttatgaggcaactccaaaatcaaactcatatttcccataaaccctattcaaaataacaccactatcactgctattattaatcatcacagctccagagatacactgttgcttttatcccccaattttgcagctcagtaagaggttagaagtgagtagataattcgttcagtcatatagacagaatggtagaactagaatttgaacgcatacagggtttatccagagtccaccggttgttaaccaccatctccttacccacagttcatggcttcagccctcactgagttactttaagtcaaaactgcagcatcactctctctacc

SEQ ID NO: 33488 - DNA, 445 bp, Homo Sapiens
aagctgagaattttggtttaatgaagaccaaaactggtagtgtccccatgtctgatggaaacaaacacaaattctcccatgaagaatttacatttagggccttgaataatttgcatatagttttaatgagcataaagtcacacacatacataaacatcatgaaaaatataggggaataaagcaccattagcaagagtcagcagaaacaatagaaatatttataaagattattagattactggaactatcagatacagaatataaagctgtttgatatgtttacataaataaatgaaaaaaattttaaacataattataattcataaccaccaaatgacaatgcatttttgaaaaacaacaaaatataataattaaaattgaaaacttaatggagcttttgctctttggacatagcaatagcaagccattactccaccataactta

SEQ ID NO: 33489 - DNA, 425 bp, Homo Sapiens
aaaaacccatggaggccatggggttgggctatggccataaccttgatgcttaaggtgattttttaccctgtgtaaaaagcagtaagaataccaaatcctggagagtgatcagctgcatttcgtatgcccacccatacttccatgcatcagatttatgacaaaagcaattatataagcagcaaaggcaaaacccccacgtgtctgtctctgcttttccttttattgctttttttcatgtgggcctctttcaccctcaatcattgctcacttccaagaaggctgagcctgcatacaccaggcccttcaccaccactgccagcgccattcccacgaccacacacccttcaccccagccctgcagaggcagggttcagccccagggcaatctatctggtcagactggtggggcagcttgctaaggctgt

SEQ ID NO: 33490 - DNA, 495 bp, Homo Sapiens
gcggtggcggcctggggcggcgcgacggctggtgcgcaggtgagagcgctgggactctaggtggaaaagcccgctttgtgtccggccgaagagaggggaaggggcttgtaggcgcctccctctccacccccaaaggtcaccggtgtcctcactgaaggatatttgagggcggggacaaggaggaggctggctctctgtaggaggcgaaagaccgacctctgaaatagctgccgatggtaaatgttgcggtcggcacggatgcgggcggcgaggaggtcttcccgccggtggggagagctggaggagtggcgcctcaccacgctcccacctgcgctgccgccttctacgccgaacctgtgactccccgtcccctccctcgctgggaggggccccgtgtgcccctgactgtctggagggtgcacggtgtaccccaggctgtcgggaggtgggggccgccctccgacggcgttagagacgttgtgcagcgtggccctg

SEQ ID NO: 33491 - DNA, 383 bp, Homo Sapiens
gtaaactagtcttctaagctttcattacattttgttcaaaatcagttggaaaactttaatcaaatcactcaacattaggaaccatataaaagctaccatctatttttgaagctttttgcagactgaaattaattgaaaagtaagcctgaaaacaggaagacactaaggaattaaacaaattcaatgataagagttcaaatgtacaaatgaaattctgtaattattatttggaatatctgaactcatgagaaagatcttttgagggtcttcctatcttgattaaatttatattctgtaacaataggatggaattgagaagtcctataattttgatgtatctaagtattggaaaacatttaaagaatcataaacgaacacaactt

SEQ ID NO: 33492 - DNA, 420 bp, Homo Sapiens
tgtcagttcaatcaaaacaaagttgattatcactctcaatcaaggttcgcatctggaagatcgagaactgcacgtcagagttctcttggaaaagctctaggaatcctgggcttccaacgagttgaaggaacataggatgaaaccatggaagtcttcctcagatctggggagggagcctggcccaagagcccgtggagctaatgaaaacaggtagtaggggacgctctacagtagtcctctcagttattcaattagaggtcccaattttgaacgatataactgggatttcaataccctgagtgatttagacacatcagaaaaaaatacgacagaaaactatagtttctttacagccttagaaaaggaaaacgcgtaatttctaactccaggaggacagtattcgagtacgtgggtttcttt

SEQ ID NO: 33493 - DNA, 471 bp, Homo Sapiens
gtctgtgatctcaaggatagtttattgagacagattaataggaaattatgatgcagtgttgtaagtgctacgatgagtgctgaatcaaatctcatatcccagagtagtcttcatggcgctgtcactaattgagctggtcactctagtcagtcacttctcagggacttatgtgtagcatttccagctatcaaattcctaagtccacttactgtattctactacagtgtggcagttttgattgacaactagaaaggaatcaaggaggtgaagggattggcaaaatgaataagggagtatgcttgttaacaaggattgaatgaaattacacgaatattgagaatattttaaatgcattcattttaatgaaaactgtacttcgaagcatatgttagcagaggttgtagtgacggcaaattatacaaacacttgatagaaattccagaaattctcctgccttttgagaagcagtag

SEQ ID NO: 33494 - DNA, 474 bp, Homo Sapiens
gcggccgcgcgggtgacgcaaatggcaggccctgggaatcccgccgcctcccacctagaattgtcctacctcccccaccccaaacaccagcttttcctggcgccccaggcccagaacgtgggcccagagagccttgctggggtctctggggcaacttggccttgctctgaggctggaaggagaaggaccagggtgcggcatcactcggcctcagggacccctctgccctgcccagcactggccccgacccgtgctcccgccgtctgcccagagcaggacctcaacctcctggagggcacagggagcggctgagtgggcacaaatcctggcaggagaaaggcccaggctgaggccaggcctgggaaacatccaagcagtgaggacacgcgtgtttgacaactgctcccctgaataaatgcgaggataaatgtttgattctttccccgagcaaatattgtccctggagccgagtgc

SEQ ID NO: 33495 - DNA, 577 bp, Homo Sapiens
agattagcaatcaaacaaaaatttaattatcgaaagtcaattaagtactaaaacacacacatacatacactccctctctcacacatttcaaaaataagatgcaaggcacataagcagcattatatcaaaccagaatgcattaggatattgattatatttaaataattatttttctttttccttctgtaggggacgatggcttaatagaatttaccacagttactttagagtctccgaaagcatggctggtggaggcctgactgggaggcaggggatgcgactccttactttgcaaaggctcctctgagccttttgcaacaccaggacttgattggtcagttttcaagacatagcctgatccaaagagttcttccatgagactgcttttcttatctctgaaagttgtatccttcacttttattctggaagacttaccaaatgagggctcatacccactgtcagaatgctctagctccatttcctctctgttactgagatgcttgcctgtactatgactgtacctcatgttgccggcattggctggcccccctgaagcaggaagcccatgatgcaggtt

SEQ ID NO: 33496 - DNA, 469 bp, Homo Sapiens
tttaagatcaaaggtatggttttatttcctatggctataggtaccaaggcttgctacattctcaatatcctgttcatgcaagctaggagagtgtctgacatatcccagccaatccgcattatcttgaatgctgttaatctcaccaatgagaatctatttctaacatttcattatgtcaattagccaaaccgctggtgctgatgggcgataaagagagacgaagcacttgtaatagctgcctccagagggtggactttctgattaagtgctcgctgaccagagctgaaatgtgaatgtctggttaggcaatttgactggcccctagagggtagattgaaccgcctaacttacagataatatccatcctgtctacaagaaagcatttttgaaacaaatgaaagccatcacaacagagagaggaaaagaaaccggccttatgggtcctcggggagtagaaactcagtctcct

SEQ ID NO: 33497 - DNA, 360 bp, Homo Sapiens
ccaggtttatttagtttttattggggtattaaaatatagcataaaatttgccttttaagcatgtgtaagtgtacagtggagcagcgtgaagtccactcacagtgctgtgcagccgccaccaccttttcatcaccctaaacagaaactccgtacccattaaacactaactccacaccgctccggcccccagcccctggcacgtaccagtccactttctgtctctctgaatctgacggctctaggtgccttgtttacggaatcccgcagggtgggcccctgttgtgactggcttatttcactcagcataatgacctcgggccatccatgctgtagcctgtgtcagaatttcattccttttca

SEQ ID NO: 33498 - DNA, 371 bp, Homo Sapiens
tccatccaccgttccagcttctttccacacgaatcatctcttcttccttctctaccatctcttcctgctgccctgcaatcagtctgtccctcttctctcttaaagccttattttgtccttgaacactgtgagaagcccgggcagcaagttacagctctcagctctctgaggacactgtctgggcatttatcctccccttgttacccggccctgcccgaggtcagaaagatccagttcacatctatgtccaccggttactagcggtatcaagtccactggttactagcggtatcaagtttcttagcttctgtgagtctcaggttgatggaaatgaacctcacaagtttgctgttcttctagccagagagcct

SEQ ID NO: 33499 - DNA, 536 bp, Homo Sapiens
ataattgcaaggttcttggaggcccgggaaaggtgaccttaatggcattccatagctggcaagtccctgactgaaacagtgaaggcacagcaggcaccctgggaggcctcggctcagcatagccccgagctctctgcgggaccacggagcagcagagatggcattcccaaaatgccaagagaaaggagggcttattggcctcggaatccctttcttgacccctgtcacgggaccctcactggcctatgtaactgcacttctgctttgtgagctgtggggtgttcactgccttgtcataacctgcgaccgtgaccccacacaggcttctgctcaaccctggcatgcccagacttctcagcacggtgctaccgacttgctgttcaaggggttgtgaagagttctcagccagaagtgatggcagcgatgcatctgctccatctcctccctcccagcaacccgcctttgtttcaagggccagggcaaggaaaagacttgagctgcctctggacctgtgatggcaggaacccatcctgacc

SEQ ID NO: 33500 - DNA, 537 bp, Homo Sapiens
taccttttaaaaggggttttaatgaattaacagttttgatctaaaatctgggaactaacctaatttggggacaagaacctgtatttccaatgtggctgtgggacatttttctttttcctgatctcatatacagtacccaaacaaataaaaactttaaggatgtcttacagtattttttctttcactcagcttcttacagctgcagcttcagttactataatatactctacacacttcaaaattacataggaaatacccagagtaactaaataaataaaaggctaaagaaaactggaacagtactgcgtctccatctgagacgcaatcttctacttccagcatcgcagagaagggctaggacaattttttttcaaaagatttatatacaggcttgaatccagaaattaaggttaaaagcataaatattgataatttcaactaaattcagaatggtttcagaaagatatgatacaacaatttagaataaaacaaagcagaagagcatcatattttggtttgcttgagatatatataagg

SEQ ID NO: 33501 - DNA, 543 bp, Homo Sapiens
gttcctaaaacatttatgtgtctttgaatggatggcactacagatttggtgaatataatcatcttttttgttgcaagaaagtacattgttcccttatttttctgggagggaaaaaaagaagtctctcatgaaaattcgaggttactttgcctattcaattacccaaaacaaaaggctattttactaacggcatcgtcctttacaactgttccctctgctcgcaatgctcttctctgaggttatctctggctttgctccttcactcccctcaggtgtctgctcaaacaccatctgtctctgcagtaaaaggcttccccatcacctaataggctgcatattttgaagaccgactctcttaacactatttcaacccctttctatcatgatgttgtgtgtaatactagaggctgctaaatctccaaaagctacatttcctagactcccctcctgccagcatttctgtaagacctagttttcaccaagatgaaccctcactgaaggcagagtgagtactgtgaagtgactgcgtgattgcatgatcct

SEQ ID NO: 33502 - DNA, 423 bp, Homo Sapiens
tttttgtttttaacgtttattttaggttcagggatacatgtataggcttgttacatgggtaaattgcatgtcacaggggtttggtgtgcagattatttcaccacccaggtaataggcatagtacccaatagtttttctgtcctcatcctcctcctttcctccaccctcaagtagactctagtgtctgttgttctcttctttttgtctgtgtatactcaatgtttagctcccacttataagtgagaacacacggtatttgcttttctgttcctgtgttagttctcgtaggattatggcctccaggtccatccatgttgctgcaaaggacacaacctcgtccttttttatggttgcgtaatgttccatggtgtatatgcacaacattttctttatccaatctaccgttaatggacatttagcttg

SEQ ID NO: 33503 - DNA, 519 bp, Homo Sapiens
tcctggttattttattctatatggttttggggtccttcaggtaaggagcgcttcagttttcactcctgccagtgggcagtggcttattcatgtggcctcgttctagtcacatacatttctgccttcacggggctattttcaggatccagcgataaatgcacacaggatgtctgacatggtctgttgttgctctcctatggatcccatctcggcctgccagtatttccccagaagaagatactcagtttaactttttttctctgagaaggatgcactttctcaccacgatgtcttatttctccaggttccacaatcttcaacacccttttctgggagtgttggaaagaaccacacataagcatgaaacccaagtgtctgatgctagaaagaggaagtcccagcatggggcgagcaggatgcttctgtagtgggagctctgtccaggtcaggccaaaattgtatggtccagggcaaaactgagcaggaaaagtatcaggtgtgccttctgcatgtcacagc

SEQ ID NO: 33504 - DNA, 477 bp, Homo Sapiens
tgtattacatttacctctcctacctgtcctcggcaggaggaggtttttccagtacctacagtacctattgcactgttccaggaagtctattgaaacttcctactcatggatgatgacagcaggatggaattccctgctcaggaggaccaccaagcattttctgctccagaccctccacaccgtggtaagcctaggcccaggccacgtgcagtagaaaggcctagattgtgaaatcagatgggcctgaattaaaatccacacttggtcactagatgtaaagcagaaggcaaatgatgtcaattttgagtgtcagtttccttatatgggaaaagaaatggagagaaatctctccagcaggtatgattgggaagctcggataagtccacacagtgaaagtattcatagtccccatggagactaagcccaggctttgtgcacagtaggcacttatgaagtgcaagtgaacaatcagaatgg

SEQ ID NO: 33505 - DNA, 351 bp, Homo Sapiens
atggtccaatccatacagtttaatcagatttcaccagttacatatgcacttgtgtgtgtgtgtatttattaatctattatctctatcttgaaaaccgtgagtttacaacaatatgccgaattccaattcaacaccacgggggtcatccttgttttttcctctgctgtatttgtaacttccttctccaacagtgaaaaccttgtctttcattttccttaagataattactagtttgatcaatcttctatggaaacaatctccaatttctgctaccacacccactccggcccagatgcccatgttttcctgcttggctctcactctcctttccaggcagttctccgtcgtgga

SEQ ID NO: 33506 - DNA, 361 bp, Homo Sapiens
gggtggcccacgatctaggagaggcctggcctggtgtttttatgggatgggtattatctgttgggataaacgattcctgcagggccctttttccttcccgaagcacgccgagttttgtgttggactcgcgcgctctgactgaggttcggatctgggggtgcttgcctgctccagcagcgcctcccgggcacctgtggcacgttccccatttacgcgagtgggatctccgcgggggggaccctggcgccacggccagggctgtgcagaaaaacacgttcttctgtccggggagaggaggaggcaccgtgtgacctccctgggagaggatgaggaagaggaagctgagctggcacgggtgggg

SEQ ID NO: 33507 - DNA, 360 bp, Homo Sapiens
atgagccacggtgcctggcttcaatcaatgtctttgatgcaatgcatccaggaggcaaacagtggtctgcaggccaggggcattggcactggtgatcaccacatgcctgtagaggtgcagcatggggttctctcctaaggctgccgcttctctgctgcccacatgggtttcagctggccccttagagagtaggcagtaggatgacagctcatcatactgctgacagtgaagggagcaggctggcccgggaaggccagcacctgtaaaccaagctgtgtcactgtatgaaaaatgaagagcttggtggtgctggaccctgaatgcagggtttggttctttctgagtagaatctccattctc

SEQ ID NO: 33508 - DNA, 542 bp, Homo Sapiens
gttttgtaaggtggaggcttagatgattgattttagaaccttctcgttttctaatacatgcatccaatgctataaaaattctctctaatcactgctttaactgtatcccacaaattctgataagttgtgtttgcacttttatttagttcaaaatattaaaaaatttatcttgagatttcttctttgacccagagttatttagaagtgtgctgtttaatctccaagtatcggggattttccagctttcgttagtgacttctagttgaattccaaagcacacaccatatgatttctagtcttttaaattggttaaggtgtgttctattcgccagaatataatttatcttggtgagtgttccatgtgagcttgagaagaatgtgtattctgctgctgttacatgtagcagtctactgatgttcatcatatccagttgattcattgttttgttgagttaaattatgtccgtactgattttctacctgccgggtctatttatgatggaggggtgaaatctccaattatattagtggattcatctatt

SEQ ID NO: 33509 - DNA, 554 bp, Homo Sapiens
cattctttaaacaggtttagcagaagggaaggaatattaacaaggatgagaattcccagggctaggggctggggagaagttagaggctggggagaatttagggaccggggagaagtaggcttgttttgtgttgatttcaagaagcctggggcagacgaaaggcattgggcatcgtgcctaaggggagtggaggaagaggaggggctttcaggagagttgatgggtgccacgtgctcccttcctggtatcaggaaagtctagtaaaggagttggagttatgccggaatgaaccctgcaggactgggtttctctggggtagcttctgggccgggatgccaggggcctgactttctcggagcctcctgccaggcacggtgtgctgggagatgccacatgctaaggtgccttccggtgcagggtgtgtcgggcacgctgggaccgtccgtctacagcctctggcacaggtgtcgtcccaccccaggccagattggccctgctgtgccgcacggagccctgacaaaggggtcggcagtgccaggctctgagccctcgtc

SEQ ID NO: 33510 - DNA, 387 bp, Homo Sapiens
gtaatctttctgatctcaaagagaccctccatagagtcctgagatggtgggggtgagcctggcatgtgggtggtgggagcactgctaggctagagcacaactaaactaatcgttcattccattctttctgatcttatccttatccccaacactgtcatgtttatggaggcagactcctaaagcctttggaaggatacaaattaatagagaaagagaaagaaatcagaatttcagccccaaggcaagacaggctggatctggaggcccagttcctggggcagggcagccccttcaaacgaccctttgtgtcatccaaacagtgatgacacaaagtggtggtcagcaggtcccatactgagctgcaggggtctctcaggggccaccgtg

SEQ ID NO: 33511 - DNA, 450 bp, Homo Sapiens
gtagtttccttacaagcacatgctgcttagtgcactgaacacgtggtggggacgcctctgcagcttttcagagtttctgtgcagcactctcctctctggtcttctgctctgtaaactccaggtacatttatttcttcaatgttccacttccacctcacatcaaggatgtccatgggctctatccagatgttccctccctgactggaatctgttatgaagcagggagtcaggcaatcataggactcatctgtgtcttatttctcatgtcattgtccttaattgctcgatgtccattttcttgagagatagtttctgatttttcgttatttcaagtgggaggttaaatctagtccgttactccatcttacctggaagcaaaagtcctttcttcctttaatcttttgtgccttttatgcatctacccaatccacactcctttgtgataaatgt

SEQ ID NO: 33512 - DNA, 370 bp, Homo Sapiens
tccccctcatttatttcttggggaaaaagaaagccccaactgttaaaaacttaagctagtaacggaaccctgaagagatacccgcatttgctcacgtcgttaaaacgaaatggcacctatggaatctcatgatctacctgtcatctggttgtctgctctgatggacttgaccaagtgatggccaacacaaaggcctaatctcttgttgcttcctaatgctgtaccttttatctaattaaaaatgctgcctggaatttgaggctccagacgctgcttgcagcccaatacaccggtgtctgatggcaaatgttctccaggcgttccttccatccttccagaatttgaaatctagcgtctggtgcactgtgcc

SEQ ID NO: 33513 - DNA, 405 bp, Homo Sapiens
ttttttgttttgaagcatttttattttacttactaaaatttaatcgttataagaggggatcaatttttaaatgcggacttcaggctgctgggctggccccgtctaggggtgccggagccacacatgggcaggaggatgaatggggctcactgtcggcttgagaaaacattggtggaactcaactgccagcaagcccccttccacagccctccctccacccccagctgaaaggacagagaaactttctttccaaggtggcaacacaggccccctcttcaagcaagttccacaaagatgtttaagtcttgaaaccataggctcttgacaggacggagccccctttcagggcagggcctcctgcccacacagaatgcaagtgcacggaggtgggggaagctcaccttg

SEQ ID NO: 33514 - DNA, 370 bp, Homo Sapiens
aatggctctttcattcttttattcatttttcttgtttaactctcaggaaaatttcaaaagtagcagtgcccttagttcacaagtctggctaagctgatgcactacacatgaacagcagtagacatctttgctttctttctccctccctcctctgtaacaagcttttcttggttgtcttcacttctccagttttggccaacactcaaggttaaaccacttgtttactaaaggcactcttcatcacacactgatccagattaatttttgtaagtgcctgttgtaaaagtacacagagagtttgaaaaggcaggaagctgttagaacttgtcacaaaaatcagcacaaaggcagcaggatttggaaggcaaat

SEQ ID NO: 33515 - DNA, 395 bp, Homo Sapiens
aaaccaaatattatttacctccatatcctctgtagtatctagctagggagacagaatcattcattcactctttctgtcgcaaacttctatccacccatgtatgaggtgacgatgggaaacagtgatcccagagccagaaggcctggttttgagccttgggtcaacctgcatgaccttggcaagttaaccagacctcagctacaaaatgaagctaatgatcttccctcataatgacattgtggggatcaaaatgattcaatatatttaatgcattctgtaactgtaaaatacttacacaaatataatccataaaatagtgagttatcttgaaataacaatggactaatttcagtgctgggcttttcttcctccttcctcacctccaagccaatccc

SEQ ID NO: 33516 - DNA, 436 bp, Homo Sapiens
cggccccctccccttcttcccatccgtccctgctgttccttgtggcgctgaggaaggggagacagctttgtaggcctgcgggtggactgaggaaggaatgaattcactggcacgtccccgcctcagtttccccctcgagcacacacgcaggagccggatgttcgcggtgggcggtgcgcggcggggttggactgagcgtgcgcactggggggcatgggggctgtcttagaacctgcgggggtctcgggttctgccgccggcccaggggaggcatcgtggtgacgtaggctccggacgtagcaaggacctgggtcctggcacccgcgcggctctgcctcttccagccagtctctttccctctctgggcctttgtgctgcgtggtgtccaaatgttaagaagccctgccccatgcccgggctacatatacatcgaacc

SEQ ID NO: 33517 - DNA, 492 bp, Homo Sapiens
aaaatatattaatatgtcctttttattaatcttaatgaatttacaagcaaaaaacaaaatatcctttttttaatatctgtatacattattgatattaaaggcaaaacatggaaatagaatcaggtttcctttcagtgttatacatcatggcaatgcgtattatgtaaacgatgtttaaagtgagctataaaggttatactgtgtttgtcttggtttatggatcctatgcctgtatttcttttgaacatttagagaatatttatgtgaaagatcctttacattattaggttatttctagtttcttaggagtaaattcctatgtttgctgtggccacggactggtgaccactctgttaaatgtgggcaagtgtatttagtgaaattcgtcagtagcctagcttcattggggagttatacaagaatgctctgagtgtcctgatcaattatggatacattgaggctatttttttgattgtcactaccaacgcccca

SEQ ID NO: 33518 - DNA, 537 bp, Homo Sapiens
aaagcgctgatggaattaccctgctagggaaccagcatgcatatgtcattcctttgtacagtatttttacaagtatttgatttgtttaccctaatttatccaactcgggaataaaaaggaatctcagatctatgagaaggacctccaatttctcattctcagcttcaaaacaaattagtcagtttaacattagtcaagacacaggttgctgtgaaataagaatgattctaggtcatgattaagatggttctccaaactatcaacaagactgtctaatcacctgttatgaacccaacactgttaaacagcaatggcatgtacaaaagaagtaggaaataaagttcctgtcgtccacacctaacaatctagaggcagccttcaattaatttgctgatagggtgtattgcataataagttttatatatttgttgtttgaagttcaaacacatttcgccataaaaggcatgctatcgtgtttcagttctcatgctggtagaaaactgtcttagcctctaatgtaattgagatatcaagtac

SEQ ID NO: 33519 - DNA, 374 bp, Homo Sapiens
gcggccgccggggggcgccgggcgcatccttcgctgccaactccccgcccgtgcccccgctcgcgcctgggccccgccgcactccagcagaagccattacagagaacaaactaccttcttgtctccgagatgggtccccggggaggaaggcaaattgcctgcctcgtgcataataagccaggcgtggagagcagcgcggaggaggccgcggcagccaccgagcgggcagagcctcccgcccccacccgccgcccgcgcctgccgagccccctgccgagcgggcggcgcgcaggtccggagaatctcaaaaggcttggaacaccgggctgcttcccggtacccccattcctgcacaagtttgtgactgtgggctt

SEQ ID NO: 33520 - DNA, 574 bp, Homo Sapiens
ataggactttttattagtagtatcataggcagtcttctgacaaattaggaaaagtagatagggtctgtccttagagtagtggcttgggctgattacctaacttctctgcacctcagcactgtcatcattacattgaaggggtccctatggtgccttaaagtgctcaagctctattattcaccacactattttgtcatttttaaattatcataggatattcaacctgaagttttactttacctgcccacgtcatctctacatattctcatgagatgcagttcatgaattctaaagcagtatcatttaatgtattattttaaaaagatatttagaaaggtatattcatttcaaacatctttaagaataacagtatatccacttaataccaaaaagcatctctacagcattatttcatttatatcaatttttaaatcagccaaaaatgcaaagctactattagtaatatacatttaaggtgtcgaactatgaagaaagtaaaatgagtaaggcaaaattctggatggcggcatcctctgaaggtggaggatggaattggcaatctggcaggctcatg

SEQ ID NO: 33521 - DNA, 362 bp, Homo Sapiens
caaataggtacccttttaatatacatagcatacttaaacacaaaatagtaccccagaattttaggcagaatagtctccctagcatgacaactcttgatctgcccttacagaagggcagccttacctcctgtcacattcccaattcaccaagcaatcaggaattcaattggtagctaccagttatctcacaattcccccgccttcagatactatttatcttccctggtactcatcttttagcttcatcttaagcaccctcctctggattaaacttttttcttcccttctcttctagaacttcatttccctctctagagccttctgcatacttttataattttcttgggaaacagaaatggaca

SEQ ID NO: 33522 - DNA, 388 bp, Homo Sapiens
ggcacaaaacaacagctattttattatgctcatgaactcaatgggacaaggattcagacaggacaccctggagatggcttctctctgatccatgatgtctggggcttcagctgggaggactcggaagctgatagcatcttggatgctaataccggaggcagcaattgtctggcagctttttcccttacatgtctggcatctggactggtctgtgctcaactagaactgtagaccaagcacctatgtgtggtctccccacggggctggggcttcctcacagcatagtggtctcaagtaatcagactcttgcatggaggctcagggcttcagatgggggtgttctcacacacaagagggaagctgcacgccttttatgacctaacttcag

SEQ ID NO: 33523 - DNA, 502 bp, Homo Sapiens
catgccgcacacaaaaatcaaacatgatgttcatcaagggcaagtctgccttgacagttactacgcatgattttccatccggtagatgaatgttggtgtgcttgatgaacttgtccttattgggtgccatgagtcctgcaggcctgcttcaggtactggcctccccgcataggacacatagtcctgcgattctctgtgactgactgtctacattgtcatgcactggacgtatgctggtggtctccacgctccctctatctctggtacctcccagtgcttctggtccgtgtgtcacgatgaaaaacgctcctgtccgcttcttctcgtcagcctcatcccacagctattgattcatgcattggtcggattatcattagccacataacatctccggcgaggacacactggagtgttctgtaccgtagctgcgctcggaagctgagttgttgaggacctgatgctatgctggcagtgctcggtccgtgattgaacgcagtatgca

SEQ ID NO: 33524 - DNA, 357 bp, Homo Sapiens
aaataaacacagctgtgtacatgcgtgcataggcggtatagaactaatagagagaaaagagcttccaagaaaacatttgcaagcaataaaggagagaaaaatctagggattaatgaatttccatcccacctttcatttttatttcaaacacatgaaagttcactaaacttggtgctgtgaatatgctgtacattagatattatttccaaacaaccattttattaaatggggaactttctcccagtgggggcagaagagtgagtcagtctgatgagaagccatcgacaacctgactgttctgtgatgtcgtccttgcggaggtccaggaaccagctcggagtcttccaatctctagct

SEQ ID NO: 33525 - DNA, 510 bp, Homo Sapiens
ctactttaaaaaattatatacatttattttgtttttctctaataaccacagttatctatctccaatatctcatttccttagatattaaattccatatatttaacaaccaaaaaattataagaaaactttatcttcaacacctcttctgtttggatactaaataaatgattggctctgtcaataatagctagtagactcatttttaaaagggccatttttctttctctaccaaggtcattctttcagatgaaagaatcatttcaaattttgagtccaaagcctttgaaaattttcactctctaacaaggattcctctttctcaccactttccaaaaatccttttctgaatctatagttgatcccagggcatggttcaaatgggagtttctgtaactttttagagaaaggtgagagtttctataacttttcacattgctttagacatcaaaatgtgtagtcttgatctaatgacttagatctaatgattttgattaagattacatatttaag

SEQ ID NO: 33526 - DNA, 536 bp, Homo Sapiens
cttatggtaggaatggccttcattggttgcaataggaagcgaaagaggagacctgaaatcaaatgaaaaagcgtaagcatcctggggagaagcccactggatctcagttctgccctgctcaggaaagttcagtatccaggtgactgagaacagaaccggctggcaccaaagacatgattttgagggggccggagccctttccctttgcctccaatccttaacagggagcaggaccacacactcagtccctgacaagaaaaggagggtggattttctaaactatgatattcaccattaaaattaacaagttaacagaagtaatattttttgaaaacaggttttctaattgtactacacatgatcatgacttcttaaatggaacacatgtacatgaagactgggaaccaaacaaatgttaacttatgagtatcaactgctccttataccctcacacagtgacagcagtgggagttatttagcaggatagggctttttgctcccagcctataatgttccagctcgtgtggttttccgct

SEQ ID NO: 33527 - DNA, 455 bp, Homo Sapiens
cttttctaaacatttagtttaatgagaaaaccattagttgaaaactgggttttggagcaatgaaaagaaatgaagggttgggttttctagtgaagaaacattgcattaattcttctcagttgtttctatgctgaagaatcagtaacttattaatttccttgctggaaaaatcaaattatctgaagcagcaaaggttcattcttgttggtttatgtgacacaatagttcttataaatttacagccacgtacaaggaagactttcctatggcttttaaaacaattaagagtaatccttccctacctatcccactgccatttccccattcctccatctcccaagttttctcattttcagcccggtttaacacagtattagctggccttgatgaagtaacacactaagctttcttgctcaagaaaatggaattggcctgtttctgtttgaaaaaaagag

SEQ ID NO: 33528 - DNA, 362 bp, Homo Sapiens
tgagctaccacaccaaggaatccaaactctttaaccttgcaatttactatacttgtctttaataagtatctttctgtgcctttattgggatgttgatgttctacctagagtattttttgctcttttggtcaaatttcatctagtaccctttgaagccctggtgtatactagttttctacctgaagttttctctgagtaatttcctcttttcacaaatactgttccctgtttttaaatttcaataggattagagaattgtcttccacactttcctatcacatttgaatatttgaattttgtttcctgtatatgactcatactaagcttctttttgtccttcattattcatttattttttatca

SEQ ID NO: 33529 - DNA, 429 bp, Homo Sapiens
tatgtcctctttccccttgaaaatcaaaaacgaagcagaacataaccctcagcgtctacagaaagctcctcggcgtgcacacactggagcaatgcagaccggatctaagaccaacgtttgccctcggaaacacttccttcccccgagcccctggctccactccatttttcaagaaaactgttctattcaaccaggaggcaacatttgccccattttttaatatttcaggctgactttttaaccactcaaaaatgctgtttgttttctgtaggcacagcctgaagccagatgatgatgtaagtgagaggagagagagggtctctctgggtactgcgcttccgtgcttaacggttaatcacccaacaccagcctcagcaactgttgacacaaaataggtggagatcaggtctgtgcaagcagaaaatacca

SEQ ID NO: 33530 - DNA, 441 bp, Homo Sapiens
tatttctgttatagaaaattttatttgcttaatgtttgttacagaaacttaagctaactcagcatttttccatttaagttactgtgaaaaagagaacagagcaggccagagactgctattctttgatcttgcaaggttcatccttggctggagtctgtactttaggttttgggaagtttcccattgttcccagtaatgagaagtagctccgtgtgcctacattgtcttacgctgaacacctcctgttcttctggaggtctacaattgtggtatgtgctagaaagcaagtccaatataaactctgagcaatgggtgctcaagacgacttcctggaacacatctcacgtgtgttgttttaagtcccagatggagcttcaatgaagcacatcctgtgtgatttcattaagattctcaaagattgtgcctggtttcctctggact

SEQ ID NO: 33531 - DNA, 427 bp, Homo Sapiens
ttttaatcactgaaatgtctatttattaataagtggtgcagtatttatttaagatagaacataaaaaatcaggtaagaattatttgcataatatatatggaaatcaacctattaaagttgttcaaatattggacagagccagaatataaattacacatacagtttaaaaattacaggaaatcatattataaagagcactaaaggccacttgtggaatagttgtgttcccctgtaagccagaatgtgaagaaagcctactcgtagcacagagacaaacccagggagcaaggcaccagaattctatgccataaaaaggggttaaaaaatacaatccaaaatcaaatataatggattcatgtcactgggaacctccatttgttcttcaaagactggtgttttccatcactgctacattagaaaaagaagg

SEQ ID NO: 33532 - DNA, 470 bp, Homo Sapiens
gtgtttaaataagcagtgttgtgcttttcttttttaattcctagatgattttgacatgtcactgtccccaatcccactgattttcaaaacatcatggtaaatctattgataaatatttgagtttcataccaaagatagtaatagcatctttatgtaaacaattgtaattcctacagagcagaggacttaggtaagatcacaaagtgatgttacatctcaagaccagaagtatacatcttaaagaatatttgaatttaattttcacacttgccaaaaaacaagaataaaatgatagtagtatctgctaagaaatgacattgctttccatgattcttccaactgctttacatatagtatgttatttaatcatcttaatgctaagtaagttatagcatataactagttgctataacacctaagtttccatggtgacagcttcaacatgaagaattaatgaacattcactgata

SEQ ID NO: 33533 - DNA, 547 bp, Homo Sapiens
aatttcctccacaatttatttttgacaaataaatacaaaaatatctgcacaagggggcatattttgaggtacaagtttcctgataggaatattgtccagaaatatcagtttctgttgaccaaacttccctctcagggaaggacaagaatctagaaatatcagtttcaatacccaggatctcaagtcggccctaacacagaagagacactcctcctgctctcctcttttccttgagctgttctagtgtgcatcctgcagtttgtaacagattgccttttcagtgactttgctctctgattcagaaatataaacactgcttcagagatttattttacaattcatcttctgatttgtcatggctgggaaggtcggctttcatattttctattctaaattactttggaacagattttgcaaacagactaaggaatggcttttgtctggaccggaacaaactctgaaagttgggactcaagtcctctctcttttgttaaaatgtaaacagtcagaaaccccacaatttcccaaagcaattatttggaaaaga

SEQ ID NO: 33534 - DNA, 536 bp, Homo Sapiens
cacttttttatagggatttatttccctgagtactcacagtaagcagcacacacatatgcttgaaaactttcttagaagtcaatgaagtttctggaaaacattgttttgctctttcttgcagattagttagtatagttatctttagccttctgccacttttttcatatgctaaattatatagaatcattgatggaggttatgagctctcttctgtttcttcttttagcattaataagaactattcacatgtattgaacacttattatttggcatccacttttctaagagtatgacatgtatttatatataaataaataaattctgggagattactattattatttccattataaaagggggaaatgaaggagaaagtgtatttacttgtccaagatcatatagctcacaagcagcagagccaagattgtatgctagattgttatatcctaagagaacttgatcttttgaccatcgagtcctattgctccttgacaagaggttggagaataatccatgtgaacttgccacttaaacca

SEQ ID NO: 33535 - DNA, 478 bp, Homo Sapiens
agaagggccttgtctgccccggtctgaataccccaggcggggtcggaaagcgggtcacagaagagcccagtaaactgcaggggtgcagctcgtctccaggaaccggcaacccccagggccgcacaagccggtaacaacccataatccgatcctgtcttcgggatcagaagagaggacagctggcccgcgcgccagctcagttcctcctccgcattcttcaggaggagccccagaaacgcacttccgccgcgcgggcctgcctccacgcagggcgcgtcctaggccggttcatttccgcccagcgctttctgtggctaggggagtcaggggtttccttttcccttattcgggctcttatgttacccccgttttccgttgaacccttttctcccctcttgccctccaaaaaagcagtctgctgccgctcccgacttttctcgctgagacaccgtcagctcactccgagcccagcacagcg

SEQ ID NO: 33536 - DNA, 409 bp, Homo Sapiens
aacaggattctattttttttcaactttggtataaaatttttcctaaatattaaagcattaacatttaataattctgagggatattgatgagaactatgatgaaagattcacaatatttcacttttaaaacataaacttaaaaaactactcttcatatcctagcctgatgacttaaaagttaccggcagagtatcataaaaataaacctaacactcaaaatgggttttaaatatcataaaggctaaacattatgattctaccaagagaaaacactaagaatatgagcagaaataacatttcacaatttctgtttgaagctttcaaaataatacactagtaattgattcccttctattttggctacattttgagtaatagaacagaagcattgaacaaaatgggtgctttt

SEQ ID NO: 33537 - DNA, 444 bp, Homo Sapiens
aatttaaatttctattatgcagcaaattcataaaatggggaaagtcttttttcaacatttccaaaacatgctctgttaaaacatggttgcttcaggtggcttttacttgggatattgaaaggtaaggcaaagtggtgatggttcaggctgaggagggcgagggctgccataacaaaaaaccacacgtttggtggcttaaagcaacagacgttgatgttctcacagttctggagaccaaaaaagcaagtcacggtgttggcagggctttgctccccccgaaggttggaaggacaaatgcgccttgcacatccagcctttggtgccctgctggtgttcactggcattgcttggcctacagactcctcacgccaacctctccctctgtctttacccggccttctcccctgcgtgtctgtgttcaaatgcccctattcctataagggc

SEQ ID NO: 33538 - DNA, 505 bp, Homo Sapiens
gatcagtaagactaccagaaagataacttttctttctttaaagcaatgttatgtttaaaagccacttgaacagtcagtacatttcaatgaaaagtctgaaggctttgtatttagaaaccaaggtcagcaacctttatgccaaaatcctgttttaagaataggataattgaaatgtaagttctgaagcaaaagtttgcagagaatttctctttgatttacctgaaggagtttccctctaattgcacagaaatgaaggcaagcgcacacaaagaggccctctgttctcgggtgtctgtgaatgctgggggctgatgtggcctctcttgagtaggtttctattctagataacagagcggtccctgaagcaaaacgggatagagctgggcagatagagtgaactaaaatgtgtgtctttagggaaaagtgcccttagcaaatgttttccctggtgtgcgtgttcttagtattgtgcctggcatatgtggtaatacacattcagttacca

SEQ ID NO: 33539 - DNA, 520 bp, Homo Sapiens
gctttttggccaatgagactttattgtgaaataaaatgccctcagtttcatttaactgagccaccatagaagagtagagaaatcgagttggccagatgagggagaggccattaagaggtattttagggattgaatgggctgggcacccagaggacagtggcatttggggtggtaatgagaaggaacattaggggcctccgcctccttccgttcctcctgtgctgagtcagtcagcacagaggctgcaggaggtatctctggttggctttggctgcctgtagggggcaccagctttggggaggtcagagggctctctcctgagctgctgtcctgcccacaatcacacctgcctgatgcctgtgaatggccgtctgagtctcttgggccttggtcacttctggcctgccctgcaccgaccagtaactgtgcctgatgactggaggtatgggaattcaccggactttattgttctttgtaggaatcaaagatcaactcccactgaggacaaatggacctgtaa

SEQ ID NO: 33540 - DNA, 412 bp, Homo Sapiens
ctgctgtgatctttgttatttcttttcttctactaattttgcatttggctttttagaaattttctagttccttgaagtgcaccagatggtttttaattggatatctttttacttttttgatgtaggaatttattgctctagtgtttcctctttgacatacttctgctatatcccataggctttcattttctatctccagaaattttcagaaatttcttttcttaatggggatacaagagcgtgctgtttaatttccatgtatttgtaaagcttccaccattccttctgttattgatttctagttttattgatttctggtattatttcattgtgtttagaaaaagtacttgatgtgatttttatttttgaaaattttgtaagacttgtgttatgactcagcatagtctattct

SEQ ID NO: 33541 - DNA, 464 bp, Homo Sapiens
attttcagtacccaaattttcaaagcttactcataattctcaaaatttctcttgttagttgcacgtgtttatttttcccagatcagtgagtgtcacctagtcctggggaatggggagtgattccattaggtcagatattgaactcactttgaagaggggtgatcttcaaaccatacctgtctctcaagatattacaattttctttttgagggatgggttttaaaaatgtgatcctcaatcacattcctggctatttgggtatttaggcttactaaaaattaatctccaaaagattttattgactaaataagaatgattgaatgataaatcctttgtagaaatacttagccttaaaatattatgtgttaagtatgttaaataagtctaggtaagattataacagaaaacaaaaaagtaatagttctactataattgcctttaaaatataaccgaattctgattct

SEQ ID NO: 33542 - DNA, 596 bp, Homo Sapiens
taggatgattcaactttatgatttttcaactttttgatggtataaaagcgatacataatcagtacaaaccatatacataccaccatttttcagtacagtactcattacatgtgtcaacactttattataagataggttttatgttagatgataacaccagcatcttgctcaataaattgaagccagctttttcaacagagaacattattagaatgaaactagatgcaagaacaggaaagtaaacacctgtgtcatgttcaacaagactgaactacggagcaaagaatcacacagtgttgcaagatcttgaactgactagatgataggattacaaaaaccacacagctattgctggaaaattatgtcatgcagagaacagactggcacgattacatatgtgggtttgtcctacacaaatcagacctttaagtgaaacaagtctatccaaccatcttcccataaaacctagtttctatggaaaacaatcaattaagctaaacccccacattttagatgtatattcatttatagaagcccaaaaggacagtggggttacaaataattttatattttagatgctttcataatttaaaaag

SEQ ID NO: 33543 - DNA, 527 bp, Homo Sapiens
cgtgcaatgagtgttaggtttattattaatattttctgctcagactcacattattgtgagagacagggcagattttgccagtgaagaactagggatccaaacacattgtggtggggggaccagacccttgctctgccttcctactcagtatggaatcttcctgactggtggggcgggccggacacgacttgggaccccaggagagtcaaaacggcaaacacttactcggactaagagtgggcagcatctttgggcacagactgtgagaaaggaggtttcagaacccatgggcttctccagccaggtctcctggggccagtgggggttgggtgggagccgggaaggggcctggattagcccaaactctcttcagacctccagacctgcccccacaaggcggggcgggccaaaggaccgagtgaaggctccagctggactctagggagttacaaactggccacggggattagcgaagctgaaaagaacatttgccattggctagcgccagggccccgccccgcataggc

SEQ ID NO: 33544 - DNA, 409 bp, Homo Sapiens
aaagtcagtcaatattgaaatgaatctcggacacaaactgcagcaaaaattctcaataaatattcctaattataatttaaagttgtatctattttgttcaatataaatattacctcaatacattttttacacaattgacaggttcacaaaacagtctttctaacgcttaaaatgagttgaattaaatttcaaattagttaaaatgtaatttgttatacaggacttaagtcgatgaaaaatacatatactattatatcagttacattaatggcctattagtgtcacgttaggtcattatacagcagtatcagaataaaccaaatagaaataactatgtgaataattacattcaagtatttaaactttccagtaaacaacttcgagttgttttatgaccagatctagctct

SEQ ID NO: 33545 - DNA, 475 bp, Homo Sapiens
cttctgggctgcctgggccttggcgtagcggccgaagacgcggaggtccatgccgaggtaagacccccgccctgccctttggctgcgggctgggggcttggagggagaggcgccacgtccgcaggctgggacttggaggtggagggagcggagacgcgccccctgttctgggccgtggcggggaagcaagcggacttggcagtctgcccctccccagctcgccctctgcagcgcacctcttcgcaaaccctggagggcgcagggcctcgctctcctccccgctactcctacagccctgttctgggcactgagcccccaccccgacccccttacattcagcctgtgtcccgggagccgcttccgccgcccccagcccttgcctcccctccttccttccctccagggcagccgattcctcgagagcccggctggcgcgcagtggcgctctttgcgagtggggagggggctgctctcg

SEQ ID NO: 33546 - DNA, 443 bp, Homo Sapiens
tttttcaggcataaacactaatttttataagaataaaacaccataaacaaagccaaatgacaaactgggggaaaaaacactttaaactcccatcccagacaaaggcctcacttcctaactaaatggagtgcacccttgcttccccaacctgtctgcttccagcctagtcagttgtcttggcttccagggcaaaatggggtaaatggttacagatggggaaacccaaagccccaagagggaatgggccaggtccctgcacccacctcgcccaccctgccaggctttggttttcgtcccacctccctggtctcctgatgttgggggccccaggcttggtccatggtccttgtgcatctatatcttctccctgggtgagtccatccaggctcatggcatgagatgcaacctgtgtgatggtaactccccgactttaactccgccag

SEQ ID NO: 33547 - DNA, 391 bp, Homo Sapiens
atctataatctgaccatccactgcgctcctgagaagaattagcatcaactgcactttcttctcctgttgcgacatctgactttgtatcaaaaataggtggtatttgacataactctgcatttcttgaatgggagttttacaaggtgtatgtaactacaatatacactacagcactagacattgtactgtacgaccgactgacaactgcccaagaccgttgactttttcacgaattcatcctgccctcgctcctaattcttgtagcattattatattaggaaacacttcctccaataccttccacaggcattaacattggttaaactaggatactgtgcgcatcgcactctgcagcatgactgtatgaaaacatgagagacgcgccattctt

SEQ ID NO: 33548 - DNA, 469 bp, Homo Sapiens
ttcccaccccacccgcccctcccccgcctccccagccatctgtggcgttggcagcagcagtgccagggggaggagggttcacgctgcacctttaccagggtaggactggccagcctgggctctaccgggcaggtcggtgggatgcttcaaactggagggataggcagggggcaacactggtcctcctgaagccaccttcccttcctgagagctccttggggagaaggcaagccctggaagccaccgactgggggctcgggcagagcaagggcagggtaaggggcagcttggccaggaggcacccttgggagccagggtttcctcatctgtaaaatgtgactctgcgagggcaggagcttggtttcactcgctactgtaccccctggggcctacagcagggctggttggtacacactaggtgtctagtaaatgttgagggattgaatggatggaccgatgaaaaggttgg

SEQ ID NO: 33549 - DNA, 444 bp, Homo Sapiens
cattatatttattattcttaatttttattgaatcaggccacaccattgcagggaaattctgacttagaaagagcttcattacattggatccaaatttccttctccatggcttcaacccatgggtttgagacttgccctccgggctctgcataagatagttccgtttcttaaaaccaatggcgactgggttattctgaccaccttcctccacccattgccagaataatccctagtttctccaaccagacttcctatgatctttgaaagctaagttcagtttcccaaattgagatgcaaattcagtaagaacctagctcttgggtttccactgaatttcaaatggagtgagctgttatccagccttgtaatttgtagatggcaggtgttttcactctcagaaaatctaacatgattcacactgacttacagaagagatcattcatg

SEQ ID NO: 33550 - DNA, 364 bp, Homo Sapiens
gtgtgagccaccgcaccaggcccagtttcctcattttgtaagatgggactggagttgacatggactgaacctgcagtccatcccctcctccatctgcaaaactgtaggtatacatacagctctttgaggaagagagttagctctcatgagcttttggaaagggtccatggtgcagaaaaggtcaagcactacagccaagaggtctcttccatatccagtgatccagtgtgatagggttgagctctccctttccccacccaactcctgagccttcactagtctattgcatccgtccccggaaactgctgcagtaaagtgtatttgattaccttggaaaaggtgggacagcccaagccagaatgca

SEQ ID NO: 33551 - DNA, 519 bp, Homo Sapiens
atctaaagattacaatgagtttaactgttaataattctgtctggctaaaagccatcatataaagaaaagtctttcccatctatctcacaaagacaaactgatctttcatttgctactacagctactttttgcaatctgcttcgtagactcacagtgatcacaaaacaatttcttaaaaaagagctgcctctctcattttgatagttgtagaccaaccactctacactgctgcccacctctaaaatatgacaatacccttcacctgatcaaaacagtaattgcttgaaatacaaatggtgactgattaatcaatcactgaggtcttcacttactaaaccacataataatgggtctaatgctaatccttagagctaattttcaaagtactaagaagaaaatgatctgtttactgaagaagtcattaacctttttaaactgcatagtcctatctaactggccatgtacctttaatatgtatatatttgtgtgtgtatttgctgtttataaactgcatgtatg

SEQ ID NO: 33552 - DNA, 511 bp, Homo Sapiens
gtttgaaaattaaagtttattaggatatattaatgtatgatattatagtattactcatcacatgtaagctttacatctgaagcaattcatgcttactgggagggaagtttgagtacttacttagcttttcctgctattcctaggtaaaggccctcctgtggtcattctgaacagaagagtgagcttactgcaaaccacaggctggacagtagagggtgcatatcctcactgagtggagctcagaaaagaattaggattctgcacacatttattccagactcagttcccactgttggtttttatattgagattattttaaaatcttttcgaaatataatttatttgctctttaagtatgggtggggtgttaagctaaatttaaattgttctgtgaggcacaggcattatacttaagcatgaacctaatgaagccctgaacataccaacaggtagcagtccagttaagctctgtataaggccacatgcctaagctccaaagggaatcttaatt

SEQ ID NO: 33553 - DNA, 442 bp, Homo Sapiens
tcatatactcatttcatcactctccccatgggcttttgtttttcagttctttttagaattccttctgcttttcaaaacttgggactttttatcttcacgggaaatctaacgtgtaggtgaactatcttctttaaccctgaatgcatctcaggaaaagggtatcatgccactattgcagaatgggaagctgccctgtcccaggtacatgtatacccctgttgggctgacaacagctctcacatggaggaaaagattcagttccctcggtcagatccaactgtggccactccgtgcttttaacattataaaatcacctgcacaactattaggcttccaccacctgctgtgcctagaatcagcccctcttcatcaatatttaggttctgctcttgttggtagatttcgggtccagctttctctgtgctcaaagtgccctcttctt

SEQ ID NO: 33554 - DNA, 639 bp, Homo Sapiens
tcattcaatttagaagtttattttgccaaggttaaggacgtgcctgtgacacagcctcaggaggtcctgacgacatgtgtccaaggtggtcaggctacagttcaattttatacattttaggaagacataagacatcaatcaacacatgtaagatgtacaatggctcagtcaaaaaaggcagaacaactcaaacactctaagtggaggctttcagctcataggtatgttagagtaggtagttaggcagatatggacagggcaggagagcacccccacacacatacccccaacccgttgcccccaggactgtcaggcgacaataaagtgatggtcaggtggttgttaaactgtctctctaaaatgataagtggtcacagccagcaccaggaaaagacagtctcctaacagacagaaaacactcggaactggtgttatcctcttctcaaagacctcaaacaggcacactaagaggcaaaatggcctcttatacgacctcccactgggaacgctcgacaggttaaggaaaaaactcctcaagtgaacacgtgcacaacttcagcaaaccccagaaccataacaatgtacaaaaccccaagtcaagggttgaacagggcacttggatcttgcaagtcacccgct

SEQ ID NO: 33555 - DNA, 533 bp, Homo Sapiens
ggcattattgttattttattggaactagagatagcagacaatgtcagcctatgtgtgtaattaccccacattctagcaacaacagtacccagagctaaagttgaagaagtcctacgaggcaccagctatgggacatatgttatctctagtccgcagacccatcccccagttgggtactgttttcccatttaaattagagaagacacaggctgagggaataagtgacttgtccgaggtcacacagccagtaagttgctgggacaggatgtggactcaagtgcgagacctttatatcacccacgctgcccacttcccgggtcttggtctatctcagcacccagacccccctgggcctggctccctccttagcctcagagccctgccccggcttaagcagggaagcccccctcgcccgagctgacggagccgggtgcaggagtgagtcaagcccaccatgcaacacgaaggcacctacttgtctggtactggatgcccagtgctgccaagcaggccaccagtcctgccgccagaag

SEQ ID NO: 33556 - DNA, 506 bp, Homo Sapiens
tttttttagatggagtgtccctatattgcccaggctggtctcgaatttttggccttaggcattctcctgtctcagcctctaattgctacttcctggtatattggatttaggccttatttattaaccattaaccataagccaaggaagctgaggatttacctgtctcctcactcccttactcccaccacaaacatgcacattttctgctctccaatctcctcgctagtaattatgtcacaattttggttaggttgtattcagggtttacactataagattttaaggactgtataaatactcttcacagctatgttattgtgataccttgcctttcctgctgaacattttgtttttcttggagtaaataatcgcatttttagggggatggggctggacttgattttattatgtaattattcccaggtcaacagtaaaggttacttaaattttcttaatctcctttcagcgtgtctggccttctagatattccgtcactttcatcttga

SEQ ID NO: 33557 - DNA, 375 bp, Homo Sapiens
ttactactttttgcaacctaccttggtaccctcaagccttctacccccaccttccctctgcagtgcaaggcttgaaaaacaggccatcccaccaatcagcaggcctccccgggaaactcgctccgcccctcagccgcattgggccgaggcgcgctcccccgcggcccgccgggtcccagccactgagcatgcccagcgcctcgactgctgagtgcccagccagcatcctgcagtgcctgggagcctgaggccgaggagggtcccggcgtagtaaaggggcggcaaccccaaacgggccaggcatcaaaatgagacagcattaaaccgagtgacatctctgtgggtccttagtgccaggcgagcaagcagggacaa

SEQ ID NO: 33558 - DNA, 488 bp, Homo Sapiens
gggttttatagggcaaatgtatttattttggtgggagtaaaggggataggatgtttcttaatctctttaagcctcagcttcttcatcttgcgttgttggaggattaaatgagatttaaatgagtgcaaagttcaataaatcatacacatcaattctccaacagcatacacatttcaggcattttaggagccccatctcatgaaggaaatccatactactgtggcagatgggggtggggaggcactttccactcaacacctcagttcaactctggccagtggcacctgccggggtggcttggggcttgccacctggaggcccagctccagggacacccttcacagaatatcctgtgggaacggcacccccctccaagcacaacagggccccttgagttttcaggtatcaagacaggagacgacacgacatgagcagtgggctaccattattaagcacttagtgtttgcccagcatggtacaacaatctg

SEQ ID NO: 33559 - DNA, 441 bp, Homo Sapiens
ggggataaacctttttttattatataacaatactctgtgacgaagagactatatccttgatgctgagaactttggagaacgctcacctattaattctgtcaatcataaaagaaaagaacccctaaaaagagcatagaggtacctgatgagacccctagtggcaaatatctcctaaaaagggatgagagtcaatgttcaagttcatttctaccaacctgagtgatggctctcttgctatgatgtagttacagcagggggtggagcaaatatctcattaggcagattccgggcaataggtgaagaggggattctggcatctatgatgatgaaatataatagtggcaggcacagactacaaacttttttgagcactttctatttgccaactgcttctgtgcacgttaatgaaggaaagcacaacttcagtttattccacaagat

SEQ ID NO: 33560 - DNA, 465 bp, Homo Sapiens
ttttttttcaccaatttattaatttattcatgtaacacacatctactaataaacacttattatggaagaacgtgggattcaaggatgagatgagtacatgtgttccctacatctggaatgactcactgcaatacagggaggttgatatatgctacatgcaaaacaatgcaattgaatcaagtgttacataatgttaattaattcattgtcaaatgcatattttgtcttaaaagtccctaatagttacccaagccttatttattcactgtagctgactttctctgtagggctcacggagctatcactgaggtggtccatatagaatacaatgtagagaagtgagggagaggatgttctttcctgagtggagacataaaaacatttacagggaggaaacccttttgttgagtcttgcagggcaactgactgacagggtatcatgtctggaatgggaaggcaggagat

SEQ ID NO: 33561 - DNA, 478 bp, Homo Sapiens
caaacaggcctttaggataggtaaactgagatccaaatattcatcccacacacaataaatgggaaaagacaccacaaatgccattaagctcaagcctgccatgccatgtggcttttgcatggctctcagaagagatttgagaatgtccatgtttctttagcaagagaacattggatgtggccaaaatgagtcaagaacataggtgggctctgtccgtaaccagtttttgccatcaatgtcactttgtgattcttttgattattcaccagtaaacttgtactgagtcccagccaccatccaggcctgcagtgggcaccagggctccagaggtgactaagacactgtccatgccctcgcaggaccagcaggctaaagggggaagccaccattcaatcaatacacaaggtgcaatgtcataagagccatgatagaaatgaacacagccatgcaacacacagttgtgcctactatgtgccag

SEQ ID NO: 33562 - DNA, 481 bp, Homo Sapiens
aacattttaccagaacaccatttaatccagctcttcctcacaaacaccagctgaggcttccttggaacattttttgccagcgtgtttcaaggacaaatgctcccctgacgccccagggagggtgacctctaacctcgggtccatccccatctcgtcgcagggcgacgtgagaacaatccctcctttgtgtacacaccacccaacctgggctctgtcccgcggctgctggggtgggggagctgctagcctggcttcttggaagagtgagaacgttccacgggtggcaacagaaagtggattcgctggtacagccgcagcctctcgccatcagagaagtcccaggacacggccttctgtccaggagagaagggagacgcgcagcagtggggtctcctcctcaagtcacacggcgctgacatcactacagagccggcgcctttgagagcagaaccagccaacatcaatgcgacagacggaactg

SEQ ID NO: 33563 - DNA, 390 bp, Homo Sapiens
ccagcagggactgaacaaggcagccttgggtgcctacagaaccggtcagaactggccaggaaatataataaagaagcttagtgagcagagagctaatgcccccagccagaggctcagtgcgcacaactagctagaggcactgactttgtaagcaacaacactatcttcttgaggtctaataattgccttggcaaagggcagccaatgccaacgaggaaccctgtgtacacaagtttctcatcccgaaagtggacactgggtgctcaaaaaatgccttctggtgacagtaacacctgaccagtcaaacaaacatgcacgcatgcacatgcatgcatacacactcttacagcattcctgcctgcagggccaaagctgcccttgccaaataca

SEQ ID NO: 33564 - DNA, 453 bp, Homo Sapiens
aagtttaaaaaagtttctttaatgataaaataatcaactcccttctcacaatggaaagttctacatgatcttaaggaccaaaatatcatgatctgaaaagcaatatggaaagttatttgcagtacaaactatcacatttacttaaaaagcagctgaagttgcttttttccaggtatataggtaacatttcacaccattcaatactaccttccttttgtgaaacattttcttctgatggcttccaaaataccagcctcctgatttttcttctaggtcactggtgggtccttctcagtcttttgctggttcctcttctcctctacttctcaatgctggcataccttaggtctctgtcttttgctaccttctcttctctagctgtactaggtgatctcatccaaagtcatggttattccctaatgactcccaaattaattttctagtcccaaattg

SEQ ID NO: 33565 - DNA, 558 bp, Homo Sapiens
ggcaattgtttctattgctatgtcatcaagttcactaatcctttcttcgacaatgtctaatctgctgttaattctgtccagtgtacttttcaactcagatattgtagctttcatatccataaatacaaagcttttctttttccagatttctacttaatgttcaatctttcctcctgcttcttaaacattaaaaagacatcagagtcatttttgtggttttaattgtttaattattttatcccctccccaactataggtcatatgctcctgcttgtagtttttaattaaatgattgactgtcagacattatgaatattaccttgttgggtgctggatattgttgtattcctataaagtatttttgactttgttctggattcatagttaaattacttggcaagagtttgagccttttagttcttgcttttaaactcttggttgtacgacagcagtgtttagtctaaggataattctgccccactattgaggcaaaagcattgtgaggctctactcaatgccatgtcaattatgaagttttccagtctggtttgtaggagt

SEQ ID NO: 33566 - DNA, 477 bp, Homo Sapiens
atcagcatggactctgcataactttactttttaaaatattgattaaaatatcctggcccttgatggctgagttctttggccttggaggtgagtgtcccgctcccccagtcttgtccccaaggcagcagcccctccttctccattgagtggggagagagaagctgggggcttagtgggaggaggtgcggttggctctgcaggagggcgcaggggaaggagacattaggagggaagaactgcatctttccagaaagttctcccgttgggggttccctccagcctggctcagcggcatgggtgtaggaaatccacattccctccttccccagggacaggtcctagcctggcccccgatccccagaaccgcctcacttggccccgccacagccagctctgcagagagcagagagggtgaccctggcccaaggcgatggctgcgcctcactcatcctgagacgctgggcgtggctgtgcatc

SEQ ID NO: 33567 - DNA, 518 bp, Homo Sapiens
gcggccgcctgacctgtgtggaaggcccagaagcaggctggggagccaacccttggccagacccctccatgctgcagtgccatgcaggagggcctgggagccctgacatccacttagcaaaccctgccaggtaaccctcctccaaggtaaaacctcaaatctgtgggcctgtacaactctgaggaagctgctcttggggtgggctcaagcttccctgaaagaccctggggacccccatccacctggaaggacagccccctcgggccctggacctgagcctcggagcctttacccaccccggacaagcgcacggcgtctacaacaacctgcgaggccatttgtggttctctgtgatttgaggaggcctccatgatgtctaggggccatgggctctgacggtataattgcctgcgcgtgggaaaggggcatcctgaacagcgtgtccaaagccattgcccccgagaacagggaagctccgagtgtcttcacgaccacgaggaacaacactcaccacaccc

SEQ ID NO: 33568 - DNA, 367 bp, Homo Sapiens
attacaaattgttctttcacaaaggatttgtgcagaggacactgtcatggcttattagaccactttaaagacaggtaaacacaggggttaaggtggttcatacagtcccatcaaagcccagactccatgtcaacctgatccaaaacagtggtctttccacagttgcaagctcttttcttaaaaggttatttcaatcagatcacagtagctgagtggagcacattcacatcatgcctaatatgagtgacctacagcaggactccatacagaaacctccagccctgtggggcatctaccagccctctccaggggctctggctactccgagggcctccctccctctcgagtgctgccctgggacaggttg

SEQ ID NO: 33569 - DNA, 403 bp, Homo Sapiens
gagaggcataagctatgcatcccatttttgcttaagctcattcaagtttggttcctgtgccttgaaaccaaaaaactcccaagtaataacagccctcaacaagtgcctgctttatcatcaccaaatcccacccaggaagaaaagccagctgcacacccagggagacccaggaagccaagggagagcaaatatgtacagcaaggtatctacagactgaagtgaggggaggccactgcaagcccctggagcagggcccttcctgggagaagaagttaccgaaaccaacagcgagcagcccagccctgtgcttcctggttgagaacggagcctcagacccagcctcggagccatgcccattatgagaggggaagaagagaaagaaggaagctaaagctgattttca

SEQ ID NO: 33570 - DNA, 350 bp, Homo Sapiens
atttgccaggatcttttatttgggtttgtcactattgagcgacactggggacttgaggcccctgtcgagcacacaagtccagaattccaaataagagactctaataataatatctggtgcagaaccgtccttccatagagaactaaggagccagcgcctcccgtgctccccaggagctggcaggagggtttcctgagcatctgctctgcaggggcatcccaccaggctctggcatgaatcctccattcaccctcacagctcctgttcgtagctttcagtgctccatgctaccaatgaggaaactgaggcccagagagtaagacggcccaaggccacgcagctggaaagct

SEQ ID NO: 33571 - DNA, 445 bp, Homo Sapiens
attccacaatctcctggtctttggctacttcctggtaacttagattttctctgagaaatttatgaagaggagcgagggagctatttcttgtttcaatccagagaaattgtaagaaactttctgcattgctcagacccaccgcaggaaacctaagcagtaagcagacgggaaggcccccattggaagcaggatctactcatgcttgttttcacttttccgtggtcaatttttagggtagaaaccccaaagcaaagggcaagggggaagaatggggacctactcccactacataccaaaaaaacgcaagtgaagtcacccagcccattttccagcagaaaaggacttgggctgcacccctgcacaccctgattccacctgccagcctcctggccgcacgtgtgtgatcctgctgggcaaaaccagaactcagctgcagcagcaactc

SEQ ID NO: 33572 - DNA, 490 bp, Homo Sapiens
tttttgcataatactttgaagtctgctatcacaagttgtgaacctctatctcttgcagtttaggtaaggcaacacatttaatgaattcacatttaagtgaattcctcacagggatgacgacctctgttgaaataggtcaggatgtgcagtttgtggtgaaagttctacttgactttgacctagctgtttgaagctgagagctaacagataataagtgttgcactggttgcaaatgaataaataagtaacattatggggttttaaatgaccaaggagtagattgtgacatcgactgggtatttagggaaggactccttcctgataccaaaagttaggtctgtgcaaagtacaccaagtggaaaaaagtttagacaagagtttaggtttcaagataaatgttctgctctattggcactggttttaagtcttttgtgctactttttaggcattgctgtgtaagttttggtggtgcgtgggtacaatgaagcca

SEQ ID NO: 33573 - DNA, 400 bp, Homo Sapiens
atcaactattacccagaaataccacattctcatagagcaaagctctgtcctgtttgggcatgttcaaagaatagtgccagggatttaatactggcatgctcatggacctgcaaattctgaaattcagggggaggcatgaataaaaagatagctgaggtcccacagttgcctgtcacagccaagccccaccccacccacatcctcatatgatcctcaagaagcaaaacctttctgagatattctataagtgacagcaaggcccaatgtgcagtcttttcaaagcctcagtaaaaatcttatctatgacttcacttagcccagacacacaggagctaaaaggtaaaagcctggttcacacaagccagaactagctcaacagaaccgaaaaaagaaaggaatg

SEQ ID NO: 33574 - DNA, 487 bp, Homo Sapiens
atgtgtgtgtatatgtgtcgccattttttaaggcaaaaaaaccactttattctattgaacaacactttgcctcccataactgcacctgttcaggccctagtcgtactgcttggggctctgcaaacctgtccattcagtattcccttccttccagtagacggactagccacctaaaatgctcattctccagagcaaacaacactaggcacccttctttccctccagaacaggaatttgacaccacgcccgtccctcaccactgagcctgctcccttccccgtttgccagaggagggcattgagaactgactacattggccattttcttgcatttggattcattatctcatttcatttttacacccaccctcctaggtaagtattcccagatttcacagataaagaatctgaggctcaaggagatcaaatgaatttggtcaaggtcacagggctggtgtggggcagatgatactcaaatctatcttggg

SEQ ID NO: 33575 - DNA, 436 bp, Homo Sapiens
cagactttctttacccgtgcagaccatatggaaaactggccattagtgatgtatttttctccccgggctcctgagcccactggcgtcaagttgctccatctgattcttaaattaattttcatcagttgtaaaactctcaagtgtgcacaagaatgagcctgtcttcccgtgtgaatgtgtaagtacagaaagaaggttttaaatgcacatagacacacactcttcaactgccatacgaagcgtctgcttccccagtcatttcaggaaccatcagattattcacggctgggaggccctggagtcttacaaatcttttagaagtaacaaatcagttctatttccttcaagttcttataccacaaatttaagatcttcacaaaatagtatttgtgcacctaaacgtggagatactcagcttgacccaggactccgggcg

SEQ ID NO: 33576 - DNA, 517 bp, Homo Sapiens
catttacagcacattgctatatgtttgtgtgggctaacaccccaggaatagctcatcccaacaactggttttaaacatgctcaggcatacaactaggtatgttaaaaatgttttctatctacccaaaaactcagcgaaaatagtaacaatcttgataaaccagatttttgcctctcctttagtggagaaaaacggccgagctgggttttagacaaacgccttggagtccgaatgttcagtccaactacctgcattcaacttgagcatgcaccgtggaatggccattcatggccagagggatgacctcttttgctctatagttgaaaactagctatcagaagggggttagcaaattctagagctttttctatccagagatcaccgctgaccctaggcattttgctcgagtttgactttatgaagctgtgttggttgaagcttttcaccctcggaatgtactgtttctggtcaggttccttctatccgtgtttgcatttggagcagtgaactgacacat

SEQ ID NO: 33577 - DNA, 401 bp, Homo Sapiens
aaagctcaagaatatttataggcatacaaaagtaacgagtgctcgacaaggtaatactgatattgtctagtatccaacaacaaagtcaccaaatatgcaaaaagcaggaaaatagggcacatcatgaggataaaaatcattcaactgaaacggacccaggagttagaattagtaggtaagaacattagaacaactattatactgtactccatacgttccaaaagttctttacagatacggaagatataaaaaaactcaaactggatatcaacagatagaaattacaatgtctgaaataaataatgtactggctggaacagcagatttttgttttttgggggagagtcttgctctgttgcccaggctgtagtgcagtggaagacagagcgagactctgtctc

SEQ ID NO: 33578 - DNA, 464 bp, Homo Sapiens
ttcttaggtgggccatgatggctaggtgggctggattgggtattgagtttttcccaggtcagttaggctttgataaagccccagcagggtagcttctagttaaaatagcttctcctgaagggagaccttgttgagaactgagttctctaacatatttcaaaatgttctttttttccctcccactgctggaaacggaaggggatttttctcccaatatttactgtaagaactaggtcaagcttctaaagttaaaattcacaagagtgtgggggttccttctatgactggagtttttaactttcagacttgtccatacctaacttctagcagttacattcaggttttcctaccccagcactggttcccatccatgggattttttgctctgatacatcatcattctctgtattggcctatctgtccaattttgggggcagcagtttgctttgtgacctcacttctct

SEQ ID NO: 33579 - DNA, 382 bp, Homo Sapiens
tttttagaataccaaaggatttattattggagtaagcacctttgaaaggaaaagaggaagcaggacgaggcagggagagcaggcgagctgccatcccaggggaactctgggaaaaaggtcactcattggaggagtcctgtgttggactgaaacagttaggtccttgtaccatggccttgcttggtctttggcaagagggccccctcagaaaagcatgctctcaatttccataatttagtgaaatcattcctgagggtcctgagctcctgggagccaaacccttctcagaccagggttgctgcactagtccattcagttacaactgggcaaggagtacagagggtgcctccagtgggtccgctaagttccacacacattgctc

SEQ ID NO: 33580 - DNA, 469 bp, Homo Sapiens
agaatggaagaagcttaaatatgtttacatgctgaagaaaaggaaccaagtgtagagtgaagggccaaaatcaggaacaaaagggaagagagtaagccaggttctgataaaggggttagcttagcaaagggcctcagctcaatgctttagccataagacattaagtgcccctgattaaatctagtgatcacaaatggttactattttcctaaccacatctactttcctcagaggatacagataatttatctagagaaggttacgggcagattatataaactgattcactagacacagtcatggtctccaccctcgccccagagttaagctaagtgtatccctttaattcccttgcctgagccagggaagagtgctccatatcgggagccaatgtcccactccccctgcccaggcagagagaactctaacacaggataggcggagaggggaaatctaaaaataaagctct

SEQ ID NO: 33581 - DNA, 395 bp, Homo Sapiens
cccctgcctctgcgcttcgggcgactcgagagggtctcccgccggggttgcgaaggggacgcggcggcagaagggcggccgaccccgccgggactcacagggacccaggagtccggccgccgggagggccgcgtgaggagagcgaagagggagcccgagctctgcggccccgggtggcgggccgggggcgcccgtgagcagagacctccccgtcgacggggggcgatgttcccctcacccgtgggctcttcgggcagccagggcatcccgccgctgggacctggacccgctcagtgggcacccctcaggctgctccatggagaccctgtgccctgcgccccgcctggcagtgccggcgtccccgcgagggtcgccctgctcccccacgccccgga

SEQ ID NO: 33582 - DNA, 481 bp, Homo Sapiens
aggtttcatcatttttaatggtctgtcaagatattttgttttttccccttttgctgtatcttgaattgagtgtatattagcgtttgcattgtctttttcttaagagacagggttttattgtcacccagtatagtggcatgatgatagctccctgcaacctcaaactacagggctcatgcaatcttcccacttcagtctcccaagtatatgggactactgtggtgtgccactgcgcctggcagcagttgtatgttttatacagataactttctaaaaacataagcagaaatcaaaataaaagataaaatttgcccacagtcctgctatctgcaaattaaattgttcatgtaaaattttttagtgtttttgtttctatgaatttaaaatatgaacatgtcttatatctgaaggtcagatacagaagttatttttctagggtaattgtcctctgaatatatgaagaaataatgttatttgatgt

SEQ ID NO: 33583 - DNA, 370 bp, Homo Sapiens
accaaccagctctcatttgaatcaatagagcgtaacctttttgattatcaaaaggatggtgccaaaccatttatgaggaatttgctcccccacgacccaaacaccacccaccaggtcccacatcaaacaggaggattatattgcagcatgaggtttagagaaaatggacatcctctaaccttaggccaaccatatcatatcaccaactaggcttaacagatatgtacaaaacttaccaggcaaaagcaagagaatacacacaatattcttacttgctcctagtgtgttctgttacgacacataccaagtcttattaaatttatgaatactggctgagtgcagaggctcatatctataatctcaacacctt

SEQ ID NO: 33584 - DNA, 443 bp, Homo Sapiens
ttgcttggtgcagttatcaccatcgtgttttcccagaggaacaatcattctttaggccaataacttctatctctaatgggctttttgctttaaagtctttttcctatagtaattgtttacactcttaagtgtttagtttggcaatcgtttatagctagaatttgagccttaagagttttaactcttaagtttatttacatctactgtgcttttagttctaccatcctattttgtgctttccattgacttgttctctgctgcatctcgaccctttccaccttctaagcccgtcaagctttaactcctctgcaacacatcccacacccgcacgcatgcccctcccctcccccaccagggcccctactttggaagttgaagttaaatcttctggtgctatgcctccagtggtcatccttaaactttaaaccatatacctccaaggc

SEQ ID NO: 33585 - DNA, 400 bp, Homo Sapiens
caattgaacacatttattgagcacctacaatgtgccagcatcttttacaaggataatactccaaacgagtcaggatcctccagagagtattggaagcccttctggatgaggaagatgctactggaatggccaggaatggaagggaaggctttggtaaatgtgttcctgtgattccctctccgtggagggactgccatttccatgtggtctacagtgggcatcctctccctgctcacctgatgctatgggaacattttgcatttcttgctttcaaatgttgtctatgatgtcctttagggtcactcagtttggtagattggactgtgatgagggcgggtccagagttgtactctaaagcagtcctaggcgagcatgtgagcacactgaaataaggacactg

SEQ ID NO: 33586 - DNA, 527 bp, Homo Sapiens
ggggttaggactttgtattcgtttgcgggactgctataacaaagtactgcagacccaggggcttaaacaatagaaatgcatttctgccagttctggaagctggaagtccacgaccaaggggtccgcagggctggtttcttccgaggcttctctccttggcttgcagaggaacgtctcctccccgtgtcttcacctggcctttcctccgggcatggctatgtccatatcttcccttctcgtaaggactccaggcagatgggattacagcccacccacatgacctcattttaacttaattacactacttctttaaaggccctttctccaaatgcagtcacatcctgaggtacaggggttagggcttcaacatatggattttggagaaacacaattcaggtcataagacttcaacatatctttttgggggaaacagttcaactcataacacacactgtgaagcagttttatctcttgctgcaaacatttcctcagctcccattctgtgctgggccccgtgctagaagccg

SEQ ID NO: 33587 - DNA, 402 bp, Homo Sapiens
ccctccagggctgagacaatgtgtccactgtgattttaaggtaaatgaaagcactggggaatcgctggtaaatacgcaaatagaaacaggagtacaagtggggattctcctttgaggaggtgataagctcaaaaccacagatgatacatcctgccagatggcagaggagcagccagacctattaggacattaaattcaatgcctgaccaacagtgttaagaccatgttactaggatttaccacagcccaagcagcgcgtacatctcactgccgagttgtctctccccacaaatactccaaccctcacccaaggagtctgagtaagagaaaaaccatagagcaggtctaagaggacatgcctgtgatacaggacttcaagtgggtgatgtaagaaacgagctc

SEQ ID NO: 33588 - DNA, 558 bp, Homo Sapiens
ggctgatagatgcattttattttaatcctcgcagcagccctatgaggtaggtactgggatccgcttgttatagataaacaaccagaagctcacggctttaggtcccagctcgcaagtggctggggcagatttgaatgcacgttgtcataatgccaaagtctgagctcaagaatttctaaacaatgtctcgtctagttttctcatcaaagaggcaaaaggcattcgctctcctagaaatgaccaaatctcatgccagtcccacagttgctctgctgacactcaagaaggaagtagggtacctcaaaatatggttccaagagaggccatagtgggagtcatggcattttccttcttcctcagagggagaaaccagcaaggatcttcccacttggcttccttggacttccttctgtttacacctgagaccgatgtgcaccagctatttatgtacagatccttgggatgcttttctctccaccatgaaatgttgccaaactccaggaactgttggattcttctgagctgtcaatgaatgtaaatggtccaaagaggtgctca

SEQ ID NO: 33589 - DNA, 478 bp, Homo Sapiens
cttgagatggggtcttgctttgttgcccaggctgggcacaatcagctcactgcagtttcaacctcctgggctcaatccatcctgccacctaagccttccaagtagcgaggactacaggtgcacaccaccatgtctggctaacattttgtggagacagggtctccctgtgtgttgcccaggctggactcaaaaccctgagctcaagcgagcctcccaaagtactgggattgcaagcaggagttactgtgcctggccaccatttaattcttgagcattttcttttatattctaattgtccgcttctaatttggccaccgtattcacatcaaggttaagtgacttaacatctttggggataaataaggtgctgattttgtctatagccatcagtttatcatactagatccaagtttgtcaatttaaatcaggtgtgtttatgagcaaagatatgatcatgctgaatgttccatgtgtactt

SEQ ID NO: 33590 - DNA, 415 bp, Homo Sapiens
caccgatttctctttactctttaaaaatgtggctgctattaaaattacctacgtggcttggactgtgtgtctacagggagctcctctcgcgcactctgtgcactcaaattccgccggtgtcctccgccggaagggccgcctcaaaaaggccgagcccccggcctggcttctccggtttcccgggaaagcgttgcaaccacgggcgagggctccgaggtcggccccgaggggtaagggcagcccttgccttcgcgacatccattcacccggctccgcaggtgcagcgcgcggtcctcagagaaaccccgaccctcgcgtcgctgacccgaccattcattaatcgggggcttcccagggcccaggagcagcctcgggcgccccactcccccattctcgcgtagccgtccccttgacc

SEQ ID NO: 33591 - DNA, 461 bp, Homo Sapiens
tttgccttcttgagtttaaattttattttacaaaaagagaaataaagaaaactgataggcagttatactgacttacaattgttctgtttgcttttttttaaaaaagtgacatgaaacacaagtaaaaataaatacgtcatagaaacagccagttgcccagtctctggggcaggagcgcctgccctgctgagaggagggaagcccatgatcacaccagcaggtggatcacccagccacagatgctcctcgaagccaggcacaggtcccaggcctcaggggcgtcctgaggaaagaagacggaaaaccaaagccaggtgccaggaccctggggccacctcattatcccccactcctcctggcagcagtctggtcttagtggttatccatagcgaccccccttaacccacctggaccctcttcccctgacctctctgaagatggtacaagggaaaaacctgtct

SEQ ID NO: 33592 - DNA, 492 bp, Homo Sapiens
aaatgttttcccaccttgtgtctctagcttggattattcttggacacatgtaattaattggaggggcactcctaagtaggcacaattcccatttaatgtggaaagaagggcataaaatgctgttaggaagaagggtggtggtttctttgatattgtgaaatgcaaagaaggacagcagcacatttggaatgggaaccaaaagagagctgtctggcaatacaccaggacagccaacatcttggtaagttatatataaacttgtctatgacaaaggaaaaagtgttggaagggttccaatagccccggggtttttggatacgagacaaatggtcacatagaccacccagaatctgcaaatgttgggcagttacatcctttaaagtcacataattcagtccatgaccatgtgcaatttacggtaacaatgttcatgcccaggcaatgtatttggggctcagaaaaagcaaaatgtgccactgagagaaacctgtt

SEQ ID NO: 33593 - DNA, 350 bp, Homo Sapiens
agagagatgggggtctcaatatgttgtccaggctggactcaaactcctgggctcaaggaatctgaatagttaggactacaggtgctgggctctggattcttgatactgtcttctactctttacctcctcccaaccattcccattgtatactgagaaacccagttccttagaatcttcagttgcagggaatggatccattctcaggtaacttcaagaaagagaggtttattgaaagctttgttaatggctcctccagtaccatggctctgccgtgtgggtccccagctttccagatccaaagggaagctaaggagaaagttggagcaaaggtttggccttttattatcttt

SEQ ID NO: 33594 - DNA, 424 bp, Homo Sapiens
tttaacttttgcattcctttaactgaacaaacgtgtgttacttgttaactatgtgtcatagttacacacatacatacacgataaagacccagaccctgcccttgagatgagtaactgcgtctcttctctggggtctcggcgtctaacagcgtcaggtccaaagcgcttgttgaacgaatgaaccaaggaacgagtgaatgaacgaatgaatgcccgcgaaagacgtggtgccgcgcggtcttctgggaatcgtagtcccctggttcgggcctgtctttacggcgcaggcgtattcacatggaggccgtgttgctgttaatgcgcatgtcccggaatgcggctgggaggactgcgcatgctcgaagggtgggggttgaggccgacggggcgccgtacggcggaggcggggtttcagtggcttctg

SEQ ID NO: 33595 - DNA, 504 bp, Homo Sapiens
cagcctggacacacagcacccattttttaatttaatccgccattgatgagcacatggattgattccatgtctttgctattgtaaatagtgctatgataaacatatgaatgcaggtgtcattttggtaggaccatttatttttctttaggtatatatatacccagcaatggcatagctgggtcaaatggcaattctgttttcagttctttgagaaatctcccaactgctttccatagggtctgaactaatttatacttccaccaacagtgtataagtgttcccttttctctgcaaccttgccaacatctgtaatttttggactttcaagttatagctattctgactcatgtgagaagatatctcaccatggttttgtcttgcatttatctgatgattcgtgatattggggctctatatttgaccctctctctgcttagatgccatctgcagccatgtctaattcactgcctgtggggttccgtgttagatattttgattctcctg

SEQ ID NO: 33596 - DNA, 466 bp, Homo Sapiens
aagtctttatcattttcatttcagagataaggaaacaggcccaagaaggctgaagatcttgcccaaaaccacacagctagtccatgaaactgaacttggactatctacccctcacacgggaatctctctttgatttgagaaaaggaaccagtgcctttcaactggaacagaaaggaatctgatctcaacacctatgcctccacgtaaattatttttttcagccttatttccctcaaaattgtagagtcctaatcttcttctatcttgtggtgtgagaccttggataagtctcccttccaccttttcctattacttaaaatggtgaatttgcataaaccaggctctaagggtcttttctgcactgttcggatgtgtacaaattgacatccaagtttaaaggaagactctgaaacttaggtcaatgacttgcccaaggccatatagcgagggcctgatgtacacatat

SEQ ID NO: 33597 - DNA, 543 bp, Homo Sapiens
aatctgtgccatgtacatgtattatacagtatattcacaaaaagaggggggaaattccatttttaacaattaaatacataattattaagttttaaaaattctcctttgtgtaccactccaaaatcctctcctgcacatactatttttttggaaacacctagtcgtctcatcgttatcacaccggttgtaactatgtacctacgtgtctacctttccccatcaaactcgggaacaaggagtcgggtttgagtcccactgtcccaagcacagaacgctggactcccagtagaccatatgttgcaaataaagaccttcgtccctttcaactcaggccgtccacgagcccaggagttccaacaaaatgatgtacagcaaccttttccaggcctttatgttgcctcaatatttctcacctgcaaaatgggaatgatccgtacctgcctcgctgtgctgtcggaaggagtcagacgatgggtgtgaaagtattgtaacactatagaaattaattcactcatccatttaacaggcaattattaagtgcta

SEQ ID NO: 33598 - DNA, 517 bp, Homo Sapiens
aaatttttctttttcttagtttccacaacaatttacacaattggttctgatcacctctcctctagcttctttttctccacctataccacctgcaccttatatgcaactgttaccaaagtttgccactagttctctcacccttttttgctctctccctggtaaattacagccactccagtagtctcaaaaactatcaactttttctttggtttcccttcttcttcactttaggtctacattcccaactactggacatcaccacctggatgttcctttgggactaaatattcagcagagctaaaacctttctttgactgtctctctgtcctcactactatcaatcaacttgccactcccagttaactcaatttagttcctagggatatttgactccctagaaacattcagctgtcaactcaaacttgtgatttcagcccattttccttccctgttcagatcctcctgataactggccttcactttagtaataaacagcttttaactgcaatctctcact

SEQ ID NO: 33599 - DNA, 507 bp, Homo Sapiens
cctggcttagtaattccaaatgtcctgtttttgaactcacagatttttttcttctgtttgatggaaactgctattgaaatttgtatgtggaatttttcagttcagtgttgtgtttttcagctccagaatttgtttggttctttttatggtttctatctctgttgaacatctcactcattttctttatgtcttgttttcctgattttgcttagttgtctgtgttctcttgtagctcactgatcttctttaaaatttactatttttaatttcttgtcaggcagttcatagatctctgtttctttagagttagttactggtgctttattttgttcctttagtggtggtgtcatgttttcctgattattcgtgatcctcattgccttgtgttgatgtctgtgcgtttgaagaagtaggcatctctttcagtctttgcacactggcttcagcagggaaagcccttcaccagtcagcttgtccagagattctgggcaggccagctggtggggt

SEQ ID NO: 33600 - DNA, 370 bp, Homo Sapiens
tgcatgggaaactcaggttggccccgatgatgtactgctgtgagaatcataacaccccgatatggacagccattatggtagtggccaagaccacgttgctgcaggccaccagctcagggccctgataaaatctaaccctggtgtagcctacttggggccagtgctgcatgaacctacaaatggactttttgtccttccaacccacgtttcgggggtccttccacatcaggcggacctgtgactctgagaatcctgattgctacaaaactgtcagaaccttaaccgacaagcttgtggaatacttcacacactatggttgcatgccctgctccgccacagctcggaatgtgttagcttgccaatacgtgtc

SEQ ID NO: 33601 - DNA, 364 bp, Homo Sapiens
ctcatttacggagctgcctgttgtggagaaaccgagctcgggcagctatccggccatgggcggacacacaatggaccgccctgggcacaacttgatgcaggacatctaagctgtgatggcgtggaatggtccacattgtcaccgcgtttgggacatggagccctaaactgcccgccacctgtgctatggctactctctgggggctgacatcccgccgttgccgaatcaaagagttaccagctgccttcgcgtgagtgtctacttctgctacgggaacagaacgcgatgaccttcccagcggtggggctgcctagccagcaacgttctgggtataaacacacatccgactgatgattatgactcg

SEQ ID NO: 33602 - DNA, 400 bp, Homo Sapiens
ttttttgcatttttcaaaacaagcttctaaaacacctcgaggctgtgctgtttcactcttggcagaggagtcaaagcagggaaccgcagagccgccctttgtgatctaacgtttgcggagccagggtgctgcttcctggctcctggggccctcggaagtctcttgggtccctggctcccctccaggcccaccctgccctgctcagagcagccccttggctcaggtccgggggagcaggctgttgcatatcggcactttcagcccgaggtcacctcctggaggctccccagacgcttcagctctttcctgctttcatccaagtcggaaatgccactggagcacgtctctgtgcttcctcctgagccagcagagggtcagccccgtccggggtgcctaaggt

SEQ ID NO: 33603 - DNA, 508 bp, Homo Sapiens
tttgttccaaacatagctatcattttattttatttttcatatccacactgaaaaaaatcccattcatctttttcaaaataattgatttgactttggaccaaaagcatataagtttgaaaacatttgcctaagttaggtaaattcaataaatcttatgtaagctcagtactgttaacactgacttcggagttactgagtatactgaaaagcaaccctaaatttaatcaataaagcattttaaaattttttcttattttttacagtaaatttacatgacatcaaatacaatgaaaacttcaagcatactgactcgtgttagaaaaatgagtaaaattaatcttactgatttttatttttagaagttttgatttcaatataaactctagtacttgtctaggacaggcacaagtaagctttttcctatccttggagcttcaaatttggatcattcatatgccataggatattgggtagaaaaattaaactgccatttttggtctttgattat

SEQ ID NO: 33604 - DNA, 395 bp, Homo Sapiens
tgattgcaataaagctttaaaaaaaggtgctaggcatattacaattataaattggtataaagattgatgccatcactacctacacacacccaatgttgtcctggttatttctggtcttcattgattaccatctcccaaggcaagacccctaaacatctgcctgcagcaatgacacattagaagcactgcacacacgatttggttcttgtttgctgctttatatcatctcatgccttccagttcctcttcccttctcctaaacttcaaagttatcaattttctgaccaatatgatgtgcaatggtagatttctaaagttgttttaagaaaaagtcacttttttcacttggcttaatgtatctctcagttgacatactgtggcttctcatagtaatt

SEQ ID NO: 33605 - DNA, 441 bp, Homo Sapiens
tgcctcagtctgtttgattcatgctgctgtctgaggtgtgggtcacccacttcactctcatattccacggctcataggacttgaattgtttcatttttgctggactttgttgacaatgtcatctttgtttttgtccccaaatgctaacactttatacattttgtacatatagggggaaatgtgctgggttgtggattatggataaatttaaatgtgctaggaaaacccgttggcatgtatggattaactggcagaccatgtgtgcatgtgtgtttattccttataaatatttatctccatgtgattagatgttgctttttactgattaacatcggtgttgagcattttttctgtatggcctttcatctactgtgaaataattttcagccattttctcattaattaattaattaatttttaagtcggggtcttgcactatca

SEQ ID NO: 33606 - DNA, 541 bp, Homo Sapiens
agggggtaatttacgcttttatatttcagggtgtgttcaaataaacttacaagctgcaggtactatagacagtgtattcccattagtacagaaagaaaaagtatcttccctatcccaccctccaacccacgaatatctagttggtatgtaaacacagcaggttagcaggaggaacgtggccgtgagaaaaacagtcacgatcagggaaagccaaggagcagaagtctgggtcccagagggaatcaacactcagcttttccttggatacctgtctaaagcttttctacgcctttgcaattgcctgtacacatacacacacactcgggctcagcatgcacccggcctccccgctgccctctggcacaggggcgcccacctaagtctgtcctttgcaggtaatctgctcttctgctctttctctctgtctgggaatagacaggggtttctctttagagctgaaatccatcagcgtcacaagtccaggtccatgtgctgccgacactgctttcaagcaacagtctcaagtagtcttcaggtctct

SEQ ID NO: 33607 - DNA, 423 bp, Homo Sapiens
acatttctaaaaacttatttatttatttttgagaccaaattctccagccaactgtgcttttccccagttgcagtaactttcctttcagtcaggtttctgggtgaatccaaagaacaaggcggcctctcaagcccacatcatgtcacgttcatattttcattcttccttcgttgggccggctctgcggaggccgagcgctggggctggggcgagaacggtgtccctgtcgtcagggagtttccagctagtggccttctcccgcttctcaacccatcccctcccctgtccgccgaggtcgggctctgacgggagcgggccgccctccgtctgataggtgcggtctggggaacttgagctgcccagtctccctccttctttcccctgctgcagaccccaactctgagctagggggacagggaggcc

SEQ ID NO: 33608 - DNA, 608 bp, Homo Sapiens
ctattttttatcatatataattgtgcttaaggggactgtagtaaactgtggctcacatgacagaatgatcttagttattttcaattagtttcttttgtggttaatctaaagtcccaagtaaaataattcatggtagcattgccgcaaagacatgtcgaaactgaaaactgtagacataattcccgggtccgggacgggcagctgaagagagcagcccctctatagatgacacctaaataagccctgtttgagcatgcgtgatccttcatgtctcataatctgtggatccagggctcatggacatttaaaagaaaggcatgcctttttagacagcttctccacatgttactgatgacatgcttcaagatttcttgtgcagaatctgatgattcttaaattagaatcccaatagttttgccagtcagtattcattatatagtcacttagagctaagccttgaggaataaaattccaactaggaataataataaaaaacgggaatggtgcccttgcaatactagttccttatccctaggattttattataatgagaatagtaagtatatagtttaatttataatacatatttttaaatttcattatttcat

SEQ ID NO: 33609 - DNA, 497 bp, Homo Sapiens
agccagatcttgcatcaaaatcacttagaggacctttttttaaaacacagtctatggggtctccctccagagaatgtttttgttttttaaaggttaggctcagtcatatagtatttctgtttattactttttagagtttcccatttgattctaatgtgttgtcagtactataaagtcactaatttacagcaatgattccccaaggctgactgcaaaagaatcacctgagaagctttaatcccagattctcaagcctgcatcacagagattttgattcagaaggcctgggataaaaccaggaaatctattatttttaagctaaattcttgttattttacttctccagatgatttcaatgtacaactaggtttaaaacctctggcttaaagaacaagtactttttttcccgtgtaatgtttaaaggtaatttttagctctgttggtcattatcacggattacaaattcttggagtccaaattaaaatgttagctgtatt

SEQ ID NO: 33610 - DNA, 485 bp, Homo Sapiens
tcagtttcctgactgaaaggtccaataccaagctgcccagtacaaaactggtctcctggcaactatagctgaatccaccatcgcctcccctaagaaggtgggacccttacagcaacatggtgctgtcgttgtgtggagccataaaacggtggtgtgtctggggcagcgggggtccgtgacggctgaaagggaccggcctggataaggaatgggaaagttaaattccccacctttgcgtggagcccccgagttagacttggggtctcaaatgtatacttcaggacacaatcaaattaaaatcctacccatgcttttgcacagagtgcttatcagggcacgttcatccaagagaactgaggaatgaggaacaaagaaaacaagttaacatttaccacggcttccgctacgcgctttacatgaatcatttttgtttcttgccagaacctatgaggtaggtattattataagaaaccagtgctggccgg

SEQ ID NO: 33611 - DNA, 532 bp, Homo Sapiens
tttttgtccccaaacccggtttattcctttgtcccaatgcagtgggctcagacccagagtttgcacgctatgtggcaggagtgagccaggcgatgcagcagaagcggctggcccagcacggtcgccggccaggcaacccccggggcaactggccgcctatggatgacgcgcatcggacctggcccttcccccgaggggcctgtgagaagagaggctccttgcctgtgtgcattcttttcaggcagttcaattccaagcccccatgtgagagagtgacatgggatgaaatctttaggggtcagagtcatgtggctgactgttagatgccaagtagtgtgatgtatccctgtgaacgtgccattggtatacattcatgattttcaaaacagactcttcagccctagacaaggctcttacatgatggtgcttgtgaggtgaaggcatgtttcacacggcctttatactgaactgagtgtggctgcgaagcccacgtgatttatggaacgctgtcattatagcctgttgctcccaa

SEQ ID NO: 33612 - DNA, 455 bp, Homo Sapiens
attggacatactttcaaacaactttcctacaggaggaaaagtctgacagattttcaatgaagctgatatctggaagagcctctacaaagcacaagtcctttgagaaagccggcttaatcttcaacaacacaacataatgtagtggcattcgtccagatactgtgaatgaaggctcattctggctggaacacaagcatcacctgccagtcattctcagacataagacagacagcctaggaggccacattggatccatacagattttgaaaagaaattggtctatcaacatattcagtgtagtctagtcttaattatctacaaatggattattcattttacggatttctaaggccaaatctttaatgcaagaatgactgttcttcatcatcagtgtactctccccaccatcaggtaatataagcttagaaatgcaaatttatttcaatattagtatg

SEQ ID NO: 33613 - DNA, 501 bp, Homo Sapiens
gaagtgagacccctggagttttcaggttcctgtccattctgagactgtttctttagcctgctccttgattccatgacctcactatagcctttccataaactctcttctgcaaatgtgagtcagtttatttctgttgcttacaacccagaaacctgactctctgccccaccagtagagcaaaggcctttctaatgcgaacaggcagggtcaacgaaaaaagttgttttgcttttaatgtgacacatatattagcatctcccatgaatgtttagtttgggaaatgccctagatgttctggattttatttctgaatgtattcaaaggctgtggattccagccatatggtttgcattagttttctattgctgtgtaacaaattgccacaaactcagcagcttgaaacaataccttttgatgatctcaaagtttctgtaggtcggaagtccaggcaatggtataactgggttctctgtgcaaggtctcacaaggctgaaatcaaga

SEQ ID NO: 33614 - DNA, 471 bp, Homo Sapiens
atcataaataaaatgtattatttattctaaacccaaataaaatgatacattatcttttctccttgctactctcttaaaatgtatacaaggaaataaaacattctaagccagaaaacatattttggtatcttagatttttcctttacatttatagaccaacttttcaaaaggaaaaaacaaaaccatggtactgaagcaattcaccatgagctgtacaatgagccacatcattcggttccaatcacagaatttgaacaagcagcttccaatctcagccttttacctactctagatcaggggcagctaacattttctcgaagggccagacgctaaatattttaggcctttgtgagtcacatggtttgtcaccactgctcaactctgccattgtagcacacgagcagccacagacaacacagaaacaaatgggcatggctgtcatccaatgtaactttatttatggacactgaa

SEQ ID NO: 33615 - DNA, 399 bp, Homo Sapiens
cggcgccgaaggcccggccatcagcgacggggaggagggcggcggcgagccaggcgctggcggaggagctgccggagccgcgggcgcggggcgccgggacttcttggaagcccccccgcccaaggtgaacccgtggactaagaacgcattgccgccggtcctgaccaccgtgaacggacagtcccccccagataccctttagggctggtttgccttagttgaggaagaagaccctcctagggactctgtctgccatccaccctgctacagtctgggcctcggagacctgtggacagataagctgctgggcccagtcatcagtaactgtttactcagaaaaacaagggaagtgctctaagattacactaagaaggcttttgacccattcctcgccagtag

SEQ ID NO: 33616 - DNA, 352 bp, Homo Sapiens
tttcctaaataagtagaatatatcagaatatattgcatgtagtaaagatatatgctgctttgtaaaattttggtttcagttacagatatggatagcaatagaaatatatatttcttgttttggatagaggtcaaaacatttgaaagcctccaagtcttaaagggacaccactccctgcccctctccccagattggtctgtagggagccgcccaggcaaagggacaagccgcaggctgcattcaagccttggcagtgagggtcccggaccacccagccccgtgctcattactccatgtcatctgctctgtaaataccctgaaaagccgcatagggcagacatgtggaagcctg

SEQ ID NO: 33617 - DNA, 518 bp, Homo Sapiens
tgtttctttttaaaatgcaatcaaacagcaagggtttattgagcacttataatgcgttgtgcactgttttaaggacctcacctaacaccatctctcttcactcttccaacacccctgtgaattaggtgacattatgtccgttttacagattaggaaacaggcacagacaggtgactggcccaaggtcacacatctaataaaatagtgcaattttaacccaggcaaggtacagaactataggggatgacccagtatcaagtttcccttttgttttagttttggttccctgatagcaagtctgagtacttctggtctctgagaaggttccagaaagatctgaatggtctagaacacctctctgaatcgtccacctgtgacagcacaagactggcatttactcaccggctcctgcccccattagtgaatggcctggcacctctggaatgggcagagctcccacagggatgccccatctatcaaatggggatggagataacagactcgtctcataaagctgt

SEQ ID NO: 33618 - DNA, 491 bp, Homo Sapiens
agaattacttaatcttttatttcattctggacaacaagcagtacaacaaagacattcccctttctatattactcatatgagagcacatactaacctccctggtccttttaacttaatcaaagggcggatgcactggtttctgcagcttttgccgatgcacaaacgttccattccttaacccatcttaatgctgcaggcctcagaaaaagatacggcttatcctggaagcaggttaaggagattgtaaaacacttttctgccggtgaagtcctgcatctgccacatcagggagcaggagttaaccctagaggtctatctccaaattccatctgtcagatggacataacacacattcccacttttggaaaattgtcctttgttcatgtttcagtagatatttattcacatattatctgggccacatatcaaacaggggaagctacagctcatgttaaaaaacctttttttgctttgcagttatgggaatccca

SEQ ID NO: 33619 - DNA, 412 bp, Homo Sapiens
ttgcctaaatattctgctaagagagtttgtgaaacagaataaacagctgtttagacagaaaagctaaaaacagttgaaaacagctaaaagcagcttcttttctgttcagattccaagatcatgccaattttatccatattttaatatctggcatgatccaggatctttttaacctaaggacataattttccacaattattatcctttttacctaaggacaaaaaaattacagtagtgaaaataacccgaaaagcaagatcctgaagttccgtgcttgcagttggctggccctctgtgcctctgtgggcaggtggccgccgggctttgtgtctgaggggctgcatagtagaatgactcagcaaagcagtggcctggggagcatagaagaggctgactaagattatgagctttt

SEQ ID NO: 33620 - DNA, 386 bp, Homo Sapiens
actcaaattttttattttagagatgacataattgacgtacaaagaaagatcgactttctgaagtgatgtgtctaactaatgacagaacttagacacaattcctaaatgtgatgtgacttagtttccagtcccagctgacattatgggtaatgtacacggccatcgacaatcttcactgggacctcatgtgtcagctttatatgctgattagtcacatgtttgactcaaaattagaagaggaaactctttcctagaatgggtattcatgtactgttataaaatgttgcttgctctctactcccagactgtcttctcgcttcacagttgcccagcatcctattcttaaaattggctccataaggaagccctctttgtcacttggaaaa

SEQ ID NO: 33621 - DNA, 517 bp, Homo Sapiens
aagtaatacatgtgtatgttgcattctgtccccatttgttttagtgtaattatttttctcccaagtcttttaataaaactatccttccaggaataagcaccacattgacatagtgacttgccgcagcttcagcgaccttattagagcagcttagccttagtccatctgatcccaaatcccgctctgccagggtttcaggaggctggagcgaggactgtcccatcccctgctgaggtggctgatcagccagaccggcaggacatctgctcccagcctgtctctcaatggaggaaggtgggccttgatgttgatgtcagccccaaaggctatggagggcctgcaaaccccaccacagacacacaccagccctcccacaactgacggtgtgagctgtcatcaacctcaagtcactctcatgacagccaaggccacctcacgtcactcctgacccagaatttcatcacccccgtccagaggtcacaaactaaactgaaggcccgagggacttgttcacctg

SEQ ID NO: 33622 - DNA, 538 bp, Homo Sapiens
agaaaataacaaaggatttcacaccataggcaaatcaaaccagtcttttaacttaaataattctccacagttaaaataacatatatgtacatatatattaaaagcaattaaattagaccttttaaaaatgcacagcacagcctggaaaaatatttgcttagcatgttcttacgtatagcaactattgctgtgatgtttttcccttttggaatgtaaaggagtcccctttcaaaaaagagatcaattcattcatcaattaagaatacacctttcctgtaatttttggactgaagcaatttattaaagctcaatttaaatacagggatgatgcaactgaaaatatccaggtgacctttcataaacctaagcagctcagatacatcaatatttctcttcatacttgttggcaaataaacctttaaacacttggcacacagcataagtaatctataaaacaattttagaggcattaaaaaaatctgcacataagacccatgactttaacacatgataaatactgttgatgtggaagggtcat

SEQ ID NO: 33623 - DNA, 543 bp, Homo Sapiens
tgcaagtgactgccagtctgcatggtttgaaagattaggtgtttggagatcatgtgcccagagggctgggatgcactggcacaaagctgtgcggaatcgctgggtctgaatgggtccttgagaaagcaaaggaactggaggcagcagatagctgaggtcaaattcaggctttacagacatccaaagaaactcttttgctgtctttcctgctttcttcagggccccagcatctatggtcaaaaaagtggttcactattcataggccattagtaaagtcagaggaaattttgacctttggaagttcttgaagaatggagcctcttacaagctcagaatgagcagctcctttctttctcctgcaggcattggaaatacagtcccagctggcaacaccagccagcagcacagcccggaatcctgctcctgacctgcaccatccccaccagcccacgatagaacgtttttgtaggcattcctcctcatgggagaggatagagtacatgcgagtttttgctctcctcccaccctttcacaagagcactg

SEQ ID NO: 33624 - DNA, 522 bp, Homo Sapiens
aattttttgtttttagaaatagggtctcattctgtcacccaggctctaaataaacaaacttttcaaagtgaaatacttccccttgtaccgacactgagctcttcttgataaatatacagaatgcttggcatatacaagattctatactactgactgatctgttcatttctctcacagctcttacccccaaaagcttttccaccctaagtgttctgacctccttttctaatcacagtagggatagaggcagacccacctacaatgaacatggagttctatcaagaggcagaaacagcacagaatcccagttttaccattcgctagcagtgctgccttgaacaaaaacatttctccatgtctcattttcttcatgcctcaagtaacagtgagaatttaacctgtttaactctaagatatgagtcagagaacagataaaactattttgaaatgtaaagaatactttataaaattcaaggtaaaaactcaatgtaagcacactattctggatgccttggcaagtac

SEQ ID NO: 33625 - DNA, 424 bp, Homo Sapiens
aatttttgaacagctttattgagatagaattcacatacaatccaccctttttaacgtgtgtacaatggcttttagtatattcagagttgtataaccattactatcaaattttagaacattctattgcccccacacaaaacccatcatcagtcactccctgtttcccctcaccctcaggcaaccattcgtctagtttctgtctctgtggatttgcctgttctggacatttcataaaaataggatcatcaactatgtgggtttttttgtgactgtcttctttcacttgctgtaatgttttttaaattcatccatgttatatagcatgtatcagtacttcactccttttaatgacagagtaatattccactgtatggatataccacaatttgttgatccactcatttgttaatgggcattttggtta

SEQ ID NO: 33626 - DNA, 414 bp, Homo Sapiens
gctttggtttggttgggaaggatggtggcatgtgtgtgttttacttttgcatttgagtggaaggggtacttaacagcaaaacaatgacagccaagtcttccagtccaggaattaccaggagccttatcagaaccagaaattgcgtctttagacaacgtttatagcctcatagaagataccaggcttcactttgtcaagctctactaaattggcctgcctgtccctaccactgagcaaaacatgaaaaagctagaaacagcaacacaaagtcaagagcagccagccgctctaggcaaggaattctgatctactaaaggtgagtgtggcacgcagccataagaaatggggtagaatcagtttaagcaaaagaatcatcagatagttgtatgatagagcaccctaactcctttgtgt

SEQ ID NO: 33627 - DNA, 559 bp, Homo Sapiens
cggccgcggctcgggacactccctggaggcccagcggccccaagacccgcggcgcgcgcttccggccccggcgcgccaggccgaagttcccgtggcgccgcgtgggccggtgcatggcgctgggcccgggcggctgccgggacgtcgccgcttcccagggcggcgccggcgcgagaccgcggggacgcgaagcagcgaggtctcggctttccgcctgctttaagccacgcggaaactgctgcacccttgactgcactcgttcagctgttcaggcgtcgcgattcgtaaatataagaaatttcccgctctcttccacggcttcccagaacgctgtgtcgctaacaaccagtgaagacccaagggctagggtgcagttctggtagccgggcaggaaaccagggccagatttgctcaccctaaaaacgaagtgtgagggcttccagtggctggctctgcttggagcccagagacattttcatccaatctgtattttagcgcctcgtatcagccaggctaaaggctgaaaagagatttgctactgaacctctcttaagtctcc

SEQ ID NO: 33628 - DNA, 404 bp, Homo Sapiens
tgtttgttttttttagttgtatttcttaggccatcccttttctacagagagaaccgcaagtcatcgtgagggtggaaagaatcgatagtactaaatgtcctttgcctaggctgcaagaggcacaatttcctttttcaatggatgaaagtaaaacggcaaactatttttgtttggactttgttgacttttgtgaggaaaccatatgacagctttaatatctaattttaaaattcagagcatggaaatgaggcaatcccgtacacaggccaagaaaaaaaccgtatcaaaatgtaaatatcaattccacattacggccagttaaagaacaatgggaagaccaagaaggagatggcagtgacagaagaaaggagaaggggaaataatgggcactaagaaagcagaaa

SEQ ID NO: 33629 - DNA, 399 bp, Homo Sapiens
ctccctttggtcataaaaggctttctctgcagttttcatccttttataaactatttttgcaggtaagtttttgttacacatgaagtactcaaacggaacgactataaaatatctgattttgcaaccatgaacattttctattatctttcatcaagtgctttcctttaagtctttagtgccatgccataagataaaggtatttgtggatttagcatctatggtttcttgtgaatgcaagtcaccacgcaggtccaagataggcaataatttgtcattttcctatgacacagatctaatctctatttgttgctaagcccgtgttttatgatttaagttatataaacacaggtacaaagaaaagtaatagcaagatttccttccttaaatagaaaactaaaa

SEQ ID NO: 33630 - DNA, 533 bp, Homo Sapiens
ccttaggggctattcttggtagtaagactaagatagttgcagacttaaatctccaggacttcagagattttcaagggtatacatttttgaaatttacagagacttgctttgtggactagtccacaggcatttcacagaaatgtttcgtgtgtccttgtgaagaatgtggattcactcattattggatacagagttctatatatacgtctgaagcaagcttatttattgtgtcgtacatatcttcaataataaataaatgataaaagctatctatccaaaacctttaaaaaaagtttatggggtctatcaccaaattatgtcctgaatccaccacttctggagtctcactgtgtcccaggctgagccttcatcacctctcgtctggattactgtgatagcctgttggcatagctctgctgcctctactctggtactcagccattgaagagatgtccctattgtgtcactcccttgctggagaattctctattgaattctcattgcagttagaatgaagtcccaactcctgcaag

SEQ ID NO: 33631 - DNA, 413 bp, Homo Sapiens
gcataaagtggttttattccgagcagaggtaaacgggagctccggcagacccgccctctcagcgccctcagaaagtcccaccacccaccctgttcccctgtggctgtaccacattccactccctcagtattcagctccttgcctcagtttccccacagctcctgaacacagtgtgcctggcagcgactccccatcttcccctccacagctctagcagctctagttcggggcctcacccgggcccctcatcaggaaggcctgaccctcgggagctgtgtgtgtcttctttaggatccgctgcctggggacgctgccagcccatcttctgggttgtgacactgaggtctggtgcaggcaatgggcttgcccaagtccttttttttgtttgagatgaaatctcgctctgtcaccca

SEQ ID NO: 33632 - DNA, 497 bp, Homo Sapiens
tctgcctagagaagaccagctggagtgcggctgggccgagaaactggggggcgtacgcgggctccgccgcgggccctgtgggggcggggtcaggacagcagaccgttttattgcttaactcagtgggttggaagctgtaaccccgtcatgggcttgcgctacgtcctgcccgtccgacccccgggaaaggtgggcagctcggttcgagttgaggggctgcagaacgagggtcagtcttaggggatatttggggccagtcactggggatccctacttagccacggagctgcatcccaggcaggcgcggtgtgccgggtgcgcgccccgccacgggagctgggctcggagctggcgatgggacccgggcacagtggccagtggcaggaagaggtcagaaaccactcgtggtggtggggggagggcgcctcaaccctaccgctgcttcctgcctgcgcggtgagcctgtgcccccaggcggccacgtaccctgaataccc

SEQ ID NO: 33633 - DNA, 412 bp, Homo Sapiens
tgccagagaaattggtatatttattcagatgaaaaatacttgcattagtaagcgaaaatatctgtcatcgtcactttacagaaaatggaaaaggatgaggattgcacaaaaactagaaattccatcccgggtgtttttcctcctcagcaacgggcacaggtcgttccagttttggccaggcggtggcgctcgaggcaaacggtgtcatgaaacggtcactggatgcactgaccctgaagatgctctcaaagcacgagtccgttcatcagagagtggacttgacacccatcagaaacattcccggagtgcgttggtgtgaaggtgcgaggagagtcggggaagcatcccgaagccctgctaggcgaatgggtactgctgagattacagggtcagcacaaagcagaatacagga

SEQ ID NO: 33634 - DNA, 465 bp, Homo Sapiens
agtgtttgatttcaaatgaggctccaaaggatgtaagatatgagatttatcaaggcaggaggagagaagccaataaattaccctatttgcaaatcattgctatggaagccaaagccccaactgttaaaacaaaggagataagcccttactatagcttagcctgctcacagaggaggcacagatgcccacggagctggcccagcccccaacaagcccctaggcacctccattgtatcccatcccagcgcccagcagaactctagttcccgtccatgcagggctgtgtggctttccatggcgagggctgcacactccttcctttctttatttctgactcctcctgaatcatcaccctctgctgggtgagcacaatgtgcagaggttttaggggctggggaaacatccctgctgcttccatgtcagggagacataaaaacacactaagaaaccttttggcaggaggct

SEQ ID NO: 33635 - DNA, 437 bp, Homo Sapiens
atctgccaagctggttttgcacttttaactatcagtatccttaatgccctgcttctttcggttgcactctccctttaaaagacagccccctctaattgatgcgtctgggctagtctagactggtagtgattgaaccaaccaccaattatgttattcatttcactgaacttcactgatgggctcggtgaggaagaaggggtgttgagaatctctgcccttgactgaagcagttgcctgctgaaatataaaatcttgtgtcgttctgcacttttaaatgcctgggtgatcagttgtatgatagcaaccttggaacatgagcaatccactataaaacatgtaaaaacctgagagtgccttgaaatacaaattaaaacacttgtattaaattactaccctgttatcactgaaaatcacggaagaattttacctggcatgtt

SEQ ID NO: 33636 - DNA, 433 bp, Homo Sapiens
tcccctgccttgccatttcccttgatctttttcaaaacttcctccaggggctgagaggaaagttccatcccctttccttgcaacccgaagggggaaaccccccaaaaagcaaagctgtccctttaaggggcccatgtggtgggaagaacagttgcgtgcctaccccagtagggccgctgtcccaacacgccaaagaggctacaaataaccttccaggagagagccggggaggggagagcgcatagcggagcggaacgtgggccggccaagctaccgctcttcggagagaaagagctcagtccgcgctagagaggacgcggaaaaaagcccctgaaaacccacaggttgtttaaataagagacatgaaaactctgttttggatttgggaggtaaaccaatctttaaaacgagtgcctagacatctccacgccct

SEQ ID NO: 33637 - DNA, 564 bp, Homo Sapiens
taagccaatgatactagacaacagcattttatccctgggatcactagacacagggccagtaccattctgctggcaaattaggaacttggggatgagagtcagtggacaggtcacttccaatgagactagagcatcaacactggactaaagacgggaatgattcctggaagttcagcaacataccctgagaagtaagaacaactggatctttgagagcttgaaaatacatatggagaacataaaaaagcaaccatgtacttcatttatttacaacttacttgatttacaaccatttatttgatttaattcattttacacatacatacacatgctctcattggttaagatcatctacatatgattcgtgttgctataccattttaaagaaactcatcacaattttatttttaaaaaaacctctttgaaactactgcatacaccagaaaataatttgaaactctttccttattatattttcaaattctttattttgaaattcactgggtttaggctttcaattctgaaaaagttaccttattgggacgtttcctactgtagaatctt

SEQ ID NO: 33638 - DNA, 395 bp, Homo Sapiens
agccggggccgcgaggcctccaacgcggttccgcacccctaatgccccagggcggtgagcaccccgcggttccccgcccgcctcttcctccttccccgcccgcgcgcccgggagaggcgattctttgttccgcagtgccggggcgggacgggccctgcgccctgggccaggaggaggcaggtggccctcctcggcaggaggtgagccgccagggagggatgggggtcacccaagcccctgcaagcgcgaccctgcccagagcaaagcacgccccgcgcctggtgaggaactttttctttccaaaggtggcaggaacaagtctgtactgacttttctcccgccttcgggatcctctctcgtgtgatttgtggtttgtgggaccacaacaaccaggc

SEQ ID NO: 33639 - DNA, 392 bp, Homo Sapiens
tcggatataatctttttattttgttgataaaaaccagtatggaggaaaaacttctggttaaatcttgtaactttcaataaatgcagcataggttaagggagaagcggaggcctatcctacagtaatacttactccattggagatggggcagagagcacagcagggagggagtagcactgtctaacatcaaaaagggaaaaacaagaaccctgaaaatctcccctctccattaaaaacttcagtaggtaccccagttgccctggattaaaggaactaagtgcacttaaatttaagcctgagagatgatatcatccctcacttggggttaaagggtctaccttgccccttcactcacacacccctgcttaactaaggaatttttctgcccattt

SEQ ID NO: 33640 - DNA, 473 bp, Homo Sapiens
ttaaagtctttatttgccccccccgcatttttattttcagtaatacagggtaaaatgagtaggtattacttgatctggccatctatggccattttatggaatgacaaactaagttcaatactttttgagttgtattctgtgtatacatagggtagagtatatactgtgtgtataaaaaattcaagcatatggaaaaacttatttaatccagtaataaacctttatattttctcatcagtttaataataacattttttgccagtaattgggtatattttgggaaatagtagaataaagatttgtagactctcttacatctcctaaaagaaaattcactaagcatgtatgtggaaaacatcttaaaataaagatagataagaacgtttttgtgaattaaaaaagtaatgtgaacatgttaaggtattagaacttacatttaaattggattataagtaacttaacatttttaatgc

SEQ ID NO: 33641 - DNA, 387 bp, Homo Sapiens
tttaaggacgtggaggattggagaggaggcaatacaaagtctgggtttggaaagcagacataagaatgagagctggcttagcacatcagtgggtttaagtcatccatgggaaaggtgaagaatcaacttgatttgcaacacagtattcacaaaaagctcaggaatgggaggcactaggtgcctctggaagtgggggcaaagtgagaaactaaaataaggatggtttgaaatctgtttaagacacagtcagactcttcaatccctttctactccaccctcctttcctcaccccagagttaggcttcattctttggagaagggggaagaaaggctgtctccctacaccagcctggacttaagggggattaagtgaaaacacgtagactt

SEQ ID NO: 33642 - DNA, 449 bp, Homo Sapiens
cccattacaaaaccactttaatacaagttccagtgacaaaaaggacatctcaggagacagtgatcgaggagctcatggagttataaacaggaattaaagcaacagaaaagtattccctcacagttctagagggcagaagtccaaaatcagtatcactgggccaaaatcaaggtgttagcagggccattctccctccagaggctccaaaggagaatccattcattgcaccttcggccactggcagctgccaacaatccttggtttgtggccacatcactcccctctttgcctccatggtcacattgccttcccctctcctgcatgtgtcagatcttctgcttcctacttagaaggatcgcaatgtggtgacatgtagggcccactggataattcaggatcatttctccacctggagattcttcattacaccagtcatacagcaaggtcac

SEQ ID NO: 33643 - DNA, 473 bp, Homo Sapiens
ttaacagcaaattgcaaatcagtttttaatggcactaaaacgaccatttggtctacagtgtgataaatgatagagatctaactacaaaatggaaaaatggcatcaaaacccatctgcagaatctttgccgaaagggagattctttctaggatttggaagagataaatttatttcatcaaggtgcttaaacgttaacatcaaactaattgaagtgtttcagaatgctaaaacttattgaaatttttatggaatctctgctgccaatttctttgtcagaagggaccagaaaccctcactgaccccagataagatagatgtttattgctgcacattctcttcaaatgctttgtctcctcaaaaaggctgtgactgctgcagggcatggagtcctccttccatcacagctgcggctgcctcagatctagccagagaggcagagtagcacggcaggcatgcagtaagtccttgggttt

SEQ ID NO: 33644 - DNA, 371 bp, Homo Sapiens
aaatttcacatttaatgtcatgtgaaaaacttttctaaatcagtcttccagtttcggattcttaagtgagaaaaaagaagacaaaagaggaaaattccgtttcaattatttagcctcctccttttcctagaaaccaacatttctttgggaaggcaaggcacactccttttcttagaacagagatcaggaaactttttgtgtgattttgtgtaaagggcaggttaataaacattttgggctttgcgattctcatttggcttctattgcagctgtttaccttaggctggagtagtgggaaagcagccatagacaatctgcttttataaaaagaagtccaaatttggcctttgggctatagttggccaaccgct

SEQ ID NO: 33645 - DNA, 350 bp, Homo Sapiens
acattaattaactttctcaaaaatattctgtagttgccactttcccatattttctaaagagctactgcctccaatttttgcctcattaatttcctctgtcaagactccagggcttagtaaagtttagtcacctgtaagaatcatttcccaatcttcctatgcaaaactaaattcttctcagtacaaatatagcacttatttgagatctgcctcctattatgtgtgtatgtatgctcttttgatattatttatatagtgtctagagtctaaacttttaaaagttaaggactgtaataatttgatgtctctcttctcagtttgctcccatctatcatttctcagctgtccta

SEQ ID NO: 33646 - DNA, 354 bp, Homo Sapiens
ctgtaaaacatttcaatatttctgactgcataaagttttttaaaagccaaaaaggtaagatggaaggatgctccatcaacaactcatgttgtttcctcccatgtacagggtgttacagttcaaacatctcatcccctttacccctccttcccggggtagctggaacaacttatctaagaggtaaatctgaatagaacaggcattcacagctcagtgacttccctttattctgttgggaaagagctgcttgaaaggaggagggattctctgctcctagatgcttatgtcttatgtaggcaggttgtaaaacatgggaggcctgctccagcccagcatttcctgtgacagatcagc

SEQ ID NO: 33647 - DNA, 395 bp, Homo Sapiens
ccggctattccagtgcttcttacatgcatgtgtctacaagctggagtttctctcttgggtgtataccccaagtagaaggactgggccacgggagataaacagagttttacaatatcctgccgtttcgttctccaaagagcctctaccaatttacactcccaccagcagggctggagtccccgattccccacagctttgatcacacttggtattgtcagcctttttaattgttgccaatctgacgggtgtgaaatgggatctcattgttgttctaatttgcatttccctgattactagagaagctgagccctgtctcttcctacacgtattggccgtttgggtgtcttctcctgaaactgtctgtagctatcccgtgcccatttttctactgagtt

SEQ ID NO: 33648 - DNA, 414 bp, Homo Sapiens
accttcaatctatttgtgtctttgaatttaaagggaatcttttgtagatagcacatacttgaatgttttaaaatatatattctgccaatctctgccttttacttggagagtttaatctacttacatttaataataattagtaataagaaaggacttctgtcattttgccatttgttttctgtagtctctttttttcctcaattcctccattactgcccccttttgtggtaaatagatacgttttccagtgtgccacttcaattcccctgtcactcatcccaccgcgcatttaagagttattttcttaatcgctgtgctgattacaactaacaccctaatttacaacaatccagctcagatcaacagcaacccaacttcagtgttatacaaaactttgctcctatatagttccat

SEQ ID NO: 33649 - DNA, 512 bp, Homo Sapiens
agagtagctttgctgatgcttccataccaactcactttagatgacttagtactaactgtgagtttttgctaggctctaaatcacattcctaaaacgtttctgatatatctggagaaaaagttatgtcttactatatttgctatcatgacagctagaatattttgttgatattaaacaaatgcctgtaaaaattattaatcactcccctggacctaatggtcaaatatttttctacaagactgactcatttagtgagttaaagaatatttacatgctttaacttataataggcttaagtaatattcttaatttaagtagaaaaattgtagagggtaaaaaggagataggtcacatcatctaaagaattaaaacagacaatttaataacagcattaaattaatagttttcttattaatgggaaaaacggacaggcattagggcagcttagaaataactcaagtttgtataaattccacaactagttttctgaacagttaaaactacaaaacaga

SEQ ID NO: 33650 - DNA, 522 bp, Homo Sapiens
gttttatcatgtaattttcagaaaatatgtgatccataaagattaaaagaaagttgtattaagtctggcagctttagtattaacttgaaataaaatatggcaagctttccacgtcctcctttatttccacaatccatatgtacgagctagattccagtcagaacttccacaaatacttcactctttggtagcagcggttataaattacgcctttgctaatttgcgttgatcccaaccaggagaaacattaccacaaaaaaagtcagtttcatcctgcagtgttcccgcagcaaccatattaagctggaagaataaagctcctttgtagtagtagcgtctattgaattacaatgtaaatgttgatgcctgcctggaaacgtcaaatgacaacaggtttacagaacgaattcagtggttgtttgcagctctggaatcccaggctgcagagttgagatcgaagaggtgcgtctggccatcttagcgttcattcaaccaaatctcctcactccatcaaaaccacgc

SEQ ID NO: 33651 - DNA, 383 bp, Homo Sapiens
ctctcagtttcaaagttttacttttttacatgagtcttaaatccatctggaaatgaaataagggtttaattttgttttcttatcatacagtcaactgtcactgaattatgttttaaacagtctttttcccattaattgatatatctcacaagagacattcccataaattaatagatccacagactggttgatttctatctggcttcgcaattttgttccattggtctgtttatccattcataacctaataccacaccattttaattattagagcattataatatatctctagtgttcttctttcaagccttcttggcttggctttgcccttgattattccatatgattaagccatccttggatttctggaaaaaactatcttc

SEQ ID NO: 33652 - DNA, 459 bp, Homo Sapiens
agggtggaaacctgaaccgcggagccgtctgcccggcggatcctggcctcccctcctggtagagcaggcatggggcggcctggaccccacatactgccggcggcggcggagtccctccgtgcccgccccgggggacgggagagaaatggagaaacctgagtttgggggctctctttgagtgctcctagtacctgatgcacagcccgagctgagaggagacagccccttttcctaaatcctgtcctccacgtggaggaaggacgccctaccttccagaagcctagatgaagggcagatggggcttcgcatggccaggcctcagatcggcttcccccagcccctccagggaagaggcaggcggctccctcacttccccttggaaggcagcatgaatccctgtacttcctggacagcccctttgccccagcctggggccaactttcctgtcatggggtggag

SEQ ID NO: 33653 - DNA, 373 bp, Homo Sapiens
aaatattcagggcttcagctgggttggaaacttgaaacatttgatcctaacccaacacagctccacatttacaaggagagcaggtcaggcaatcacgcagatccaggggcctcgggtcatttaatcaccctggaaaccctgactcagaggccgctcctcgagatttattcgtctctcccctcagctgtctgactccccttctctcggtccagggtccctggaaggggggtgacagcctgccagggaagcgctgtggccctcggcgttgggactgcaccagggtctgtgcccctgggctgtgcgtggctggcctctacctcctggccggcttcccctcgcctgccgcactactttgctcatcccaggcaccaaa

SEQ ID NO: 33654 - DNA, 439 bp, Homo Sapiens
ttagtacaaccttttggtcctcgttaaggctcggttttgtgtataacgcgtggacctggctacacacaacgtgccttaggaactttatagcttacagagtctccaacgtctgaacaacctcatgacacggggagaacaaatgatcaccctgaggaaaagggcattctgccctgcaatccaaggcgacaccccccggtggagccacaattcactgattacaccccacctaactgaacatcactttcatagggggactgttacagctagactcaacgcatttccactacacatggtaagctagacctttttatgctttgtggagaggacgccctaaaacatcatcgccaaaagggactagcaaaggacttacctcagaccacctgacatgaagccccaccagagacctgctaatcataacctgtatcttggacacaccttg

SEQ ID NO: 33655 - DNA, 495 bp, Homo Sapiens
ggtagagactgggtctccctatgttgccagctattctgaaaaggcgcctagagacgtccctgacgctggtcacggtagaagggctgccaatacgcttggccaagaggtgctccctgctgagcaagcactgcattggacagcagtgggtgcatgtgtggaattactcaggtgagagatttctgatgtcttgcttcaacttacacaggactgaagacttaagagactcagctgtgtgttgctctggttgcatctctgagaatgtctggttggcccttccttttctagcctgcaactgctattcccgccttgtctgtgggcctagagcagagtggcctcgggccacttcatctgaggcctcatgttccacccagggtgtgactgccatgcagaccgaccacaaaagcctttctccagggggaaatggacgatgacagtaacaagctgctcttttaaagccaggcagcccctgggaatgggaaatcatatctcctgctg

SEQ ID NO: 33656 - DNA, 393 bp, Homo Sapiens
ctaaattctatttttgttttaaaaaatgctcacttcccgtgaaacacctccgggcaagtgcaaaatacaaacatcaattacaatccattgagcccctgagaaaggccgcaagcagcgattctaggcacagaaaactggtcagtggctctcagggtgacaggtgcaagaatgacccagggtgctgttactgaactccaagccccctccccgctctgagagtcatgagtgggccactgaccccagagatggtgggcacataggggccggggaggagagaccctgctccaagccaattccaaaggggaaggatatgagccgggcagtgacctgtgggagccgcagactcgggcagtggacaagcccaccacataggtcactgccctttacaaaaag

SEQ ID NO: 33657 - DNA, 546 bp, Homo Sapiens
tttggtttgtttgtttgcttgtttaagacctcttccacagcaacgctgctccctgccatgcctgtgccccgagaaagcctctctgctccccagtgccagggctgtgggcatccatcctgaggccttgccactttagctgaaataaggagaagggaaagagctcaaggaatctcgtccttgttttcactctctatgaaatcaaattactttcatactgacagccaaatcccagccaaaacagctcccgcctgagtatttaggccacagaatctgcccactactgtcttctctcctcttttctgttcattcagtctcatatcccagggtttcacatgccccttctctccaccggactcctgcccatcccgcttgtaccaaacccagtttttcctgggactggaggtgaagctgcagtaaaactagcacctgcccctcaatacttcttctgactcattttaataagagcaattactggtttgctgttgttgttcatctcaaactctcaccatcatggataattctgggggcatcatgtccccaatccta

SEQ ID NO: 33658 - DNA, 475 bp, Homo Sapiens
aatgggggagggattgagttgttggtggattaaacacaaattaacttgaaaatttggcccaattccatcccttatccaggagaacacaacaaacacctaacggcttttccctctcttttgcggggggatccttccagtgatacctggcaaaggatatgccagggttattcgagcaagggagtaaaccacatttgcctcagatcctcagggaagatgtcatcgcggccccagggggcgcctaattggcaataccctgcagaagggctcaaaatgaggttttggaaatctaaaggcccaagagttgccagcatctcacttggggcagcctgattttttacttcccttttcccaaacccaagcccgccatggaaaacgcggggaggtcagggaagcctccagagaacagagaagaaaaagcctgagacgttctaagattctgacgcctgaggccaaaactcaaaaactgcctcccccg

SEQ ID NO: 33659 - DNA, 373 bp, Homo Sapiens
tgccgacggcatccaagtcataaaggtagatgcttgagggccctacttccttgacccgggcaaacggattcatgcctagcttggacccatttgcaatgaacttttgcacctgctgggggccaaccagctttaggaaggagatcttagcctttgctgtacaagactgctccaggagtgacttacacggatctgtgggcccatacctcaacacccctttaagacgatggatccccaagttttaagacatctgcttaagggttatggtctagacaatcacctactcctaatacttgatttgtttctaccaaccctgtatgtgactgtactgctccgtgggacatatatctacctccttggcgtatactctgtcctc

SEQ ID NO: 33660 - DNA, 480 bp, Homo Sapiens
agtaataacttatttttattaagtacatgttgatgggtctgtaacctcactgatggcaaattccctaagatagagcctgcactgaattcttttctgcattccaagggcttcacaaattagggaacagatgaacaaactggctccaaattcagtgctcttcctattgtatcaaacaacctaaccacacaagcagtcaatctgggaaaatgcctaaaggttttgggcaaggctctgactttagcattttagaagataaatcttaaacataccaggaaacttggaagttactctacattaatcctttacctgatgcagtaatccctgattcctatatgtctctggggtacccctttccattgctggaaaactgtcagaaaccttttcttgaacagaaacaaacagctaccagtgattttcatgggactctggctttctaaagttatacttctacaatgttttattttaagtatttcttttgaa

SEQ ID NO: 33661 - DNA, 352 bp, Homo Sapiens
aaataagcatttaattaggatttcattagtatttaatattgctttttcaattccaaaaagttaaattttcactttttagcagatattttaaagtacaatattaagtttatacaaaatgagcaattaagcaaacaccattatttcacattcttcaaaaatacaaattcatatttattcttttttgggtttggaggtttcttcctttggaagtactgaacctgtaacgttttcacatcgctcagtggaagtccgttgttcccatgtttcacacttacttttacataatccaaataaaactatttgggattttaaaagttgtcaccaagaccccggccaatgattagtgtatgtc

SEQ ID NO: 33662 - DNA, 499 bp, Homo Sapiens
tacagctaaaaccaactaacaaagagatgtggctatcccacaactgaaagagaaaatgtggcaaagctccatcacctagaagcagggtttgcagagggaaacattcctgccgtgcctcaggaaacccagaagctggtttcagatagctaagacaataataccaattaagaaccaccattttgacctttcacatattacaaagacagtgagaattataaagtcctcaaagagctattctaacagcaaattctggatgtactgtgaatcataaatcaattttaagtattttcccattatgtacatcatctgtcaactgactatttaagaaaccataattagacacactttatattaaactaaatcacaaaatggtaacttggctacaccttctgctatgatctgaagtgtgtcccctgcaaaaccaaactgatgaacacacctttcctgggtcggtatcacatccctacctagaccgaagagcccagcgccagagaacccc

SEQ ID NO: 33663 - DNA, 382 bp, Homo Sapiens
gcggccgctccaacagagggacccccccgcccgggccctctgtcccggctggacagccccaaacccggcctccgggcccagtctcccccgccctgcctggctagccgcccccaccctccagccagcccggggcgcgggctgtgggggtttcttcccgggccggcggcgcgagtcctggcgttgggtcgggtctgaggctcgcggggagcgcctcggcgtttggagctgctggggggtccccgcacgtttttcctctcactggggctcccggaggcgggctgggagctcggggacgaacgggggccgggggtcctcccagaggaaagggggcgcgctggcgtgcgccccagctacaggaagccacagcaccttttccttttct

SEQ ID NO: 33664 - DNA, 447 bp, Homo Sapiens
gaggcccttcttatgattgctcaaagaaaaaggagagagtaagccaagtgtaagacactcgtctgccctgccctggatccccctagcagccatagagacaaaagccaaccgacaagggaaaatctacctgcagtcatagaagatggttccatttcaaaccctcagccagagattggcagactatccctgcgctgggccaaatccagctttctgcctgtgtttgtaaaaagttttcttggaataatcatgctcacatgtatatgtattggctatgactgcttttacactacatggcagagttaagtagttatgacagagactggcccacaaaaactaaaatatttgctttctgactcttacagaaagagttttccaacctctgctttaagctatcagaagtgaaattctgagacacaaagaatcctgccctggcacggtctctgctga

SEQ ID NO: 33665 - DNA, 449 bp, Homo Sapiens
cctccgcattcgggcactaaccaacctcccggcgggatcgcccagcccgggtttacctgcaaaaatgcggtccctgggatgccttcgcgtcttctcttccctcgggtgacttgaggtacgttcgttgtccgacgtccacctcgggacttcttcggcatcttaatgtccaagcctgtgcggagagccaagttgttctaggggctttcattgccacaagaaacatatttttcgtttttcgttgcaaaacctttaagtgcaattattgcgcttaatgaactcagtcattagagatagtaattcagtgtgattttaactttcctttgaaagactactttagcctgttgaattgtagcattttgtttctaagagactcgtacgaaatggaatatggcacacccacccggagctgtgtccgttaggtagaactgtactctcgcaatcctcgtgcc

SEQ ID NO: 33666 - DNA, 540 bp, Homo Sapiens
gaactaaatagaatatatattatttctgatatgttgagggaaatttatgttggttttgttcatattactagaaaagtcactcaatatgaatttgtgctcttgtgacgttgtgacaactcagttgtcctagaatttttattaggctgtttctaaatttcacaaatccatgaataggtgagtttacaatatatagactggaagtactttatttttaaaaatttttcccccaaaactcaccccctcttctcagtgtcaggaaaacctctttggagttctattggactaagtgtctgagtctgtgcctatgtgggttgctggaatatttatttaccaggcagaaaacattcttgaagtttttaatttgatctgtctccttgaaataaatatcatgaaaagaatatataggtacctttggtttgtgtcctttaccttgaaaagtatagcagccaatttgaaattgcctaggtctactttgtgaaattcaccacttagttctacctttgatctcatgcttctttttaaaaaattgatgaattcatt

SEQ ID NO: 33667 - DNA, 514 bp, Homo Sapiens
ttgttttgtttgtatttttggttgaaacggggttcagtgttgcccaaaccaatgttgggcaggctggtctcaaactgccatatttaactgccatttcaatattatacattagttttgccaaaaaaattagagaaacaatttgcctcaacattttgatgagcatgtttactctattaataaaaagaagacaatgacttattccgtcactgggcttcaccttaatctcagctactctagaagaaaacaggctgcgggtgatctctcgctccatctctctcttgctctgcttgctctcggcctgctggccacctccaccatagacagcaccagcaaacccagcctcgcctcctgctgtccagtccaccagagggtcgtacacaaaggcctccagcagcgtcagcagggtctctctgccacgccgcataatgtgtaaaacctgctcacatgaaagcctaaatacaccttctactccagttacacccagtgctgtttcaatgttttgtgtcattcgaaa

SEQ ID NO: 33668 - DNA, 430 bp, Homo Sapiens
gacaaactttttaaataaatcctaagcaagggcaatcatttaggttgaatcacacacacacaaaatgcgctgacttttgactattttttatctcccccaaatggtgatttcatgtagttcaatctaatacaaggctcctagtggctctgggcacaatgtggaaaaagtcagaaggagaagaatgttgattttgccaaatactttgcagatggagctgattacatgcaaggtggtgctgcagggaattaaacaaagacgtttgcaggctcaggtgctgcaatcatgccaggtacatgctatcatgaaacatgtaaacctgtggccttacaagatacaaagcccagaccaggcataaagaatgttaaactcacatcaggctctcctagattgtgtgaccccagataactttgctattgaaaacttaaacaaa

SEQ ID NO: 33669 - DNA, 530 bp, Homo Sapiens
gccactttctttttaaaatgaattttatttttcagaacagttttaggtttacagaaaaattacaaggataataccaagttcccatatggccccctcccagtttcccctatgggtaccaccgcaagtgagtatgaaatgctggtgacgatgaatgttcccattacctctagtccacgccccagccgcttccttagtctttccctcatgttctttcctgccccaggacctcatccaggatcccacgtgacatttagcagtcacatcccctcaggctcctctcgactatgacagtttcttgtttctcgtgactgtgacggttttgaggactggtcggacatcccgtagactctcgattgggtttgctggagtctgtcacagctggagcgcccttctcgtcacacgatgtcaagggcacaggccgtcaacgtgacttatggctgctggtgctgaccgtgatcactgggccgaggcagtcagtttgccaggtttcttggctgtaaagtgactcccacccctttccacactgccct

SEQ ID NO: 33670 - DNA, 418 bp, Homo Sapiens
gaggcggagtttcactcttcttgtggttttagtagttcaccgaatttcccaaatcctctctgtaccattgttccacgccaccatgcctgaatctgaaaacaagataaacccaaattcagcatcggctggtatcacaatgaactggaaattgttaaatctctttattctgatacatggtcttgaagacgtggagagaatgggatgtgattagaactctaaattttattttctatctttctcaattggctaggcattcagacaaattttttaaaaaatgcatttattgtttttatgtgccagtgcctgttctagacttttgggcaacagcagagaaataactgtctcaactttatggagctcacattccagtgaggaagagacagtacaaaataaacacatgaatgttcaatttgtcaga

SEQ ID NO: 33671 - DNA, 372 bp, Homo Sapiens
tcatagaggtgcgccaccatgtctggctcctttttagaaatttattgaaagaagccaatattgggaagggtgtgtccttcctcaattttccttggagaagactcagtgtgtctttaacagaactgtcaggaggcatcctggggcttggaggcctggtgaactgaggaagttcctgattcccaggcacttaaaagccactggcatgaactctgggcaccaaccctaagggcagaggcatccctagcccagttggtactttcactatggccacagagggcaggcttggccacagagagcaggctagtttgtgccagtggctgcccattcaccctctggtcacctcctcaatgaacactggcaaacctgtgccct

SEQ ID NO: 33672 - DNA, 412 bp, Homo Sapiens
aagcaaaaagtttaaaagtgattcaaacaaaacaatagaattctgcttctatacatgagaggataactgttacaggacacgctctcctaccataaacagctagaaaagtttacaagttatttgaaataactgttttcagacattaaacaactggcagcacaggactgtgatctctgacagagggaaatacacgaagtacaactgccctacatttctgcctaaaggcaatttccagactacacagacagagaggaaatgcaaatagagcccaactgtctctgaaaagagacaagagaaatctaatttctagggagtagctagaattttcagagcaatgtcctggagaagaagttgtgcagaagaagatattcaaaaatcatcatgagggaccccttgaatgtttgggtgaata

SEQ ID NO: 33673 - DNA, 386 bp, Homo Sapiens
ctatccgcagttggttgaattcacacatgcgggaactcatggatagggagcgtattgtttctcccccatcactagaacatggagtcaggaccgtgcaagtccgtcttggtcattttcttatctactaactcggcagtggtggagacacgtgtatatctgtttatggataaactgaatattttaatgaatgaatgaaacccccatattttttctctgaaacggcaacaggatttgggtatggtcttatcggggaggaagacgagcatgaccttagagggtcatccctacaaggtccacagccctgcaagccccgcggctgttttcacgtagctggcagggccacgctgcacaacgtttttaacgccgtcggagggcggcccccacct

SEQ ID NO: 33674 - DNA, 517 bp, Homo Sapiens
ttcccagaatacccaattccttcattttcctcctacttcactcgttattctttgttctcatcttcctggcctccaaatgttggagagccgcagcattcactgtaagtcctcttcctttcttcagccaaactctccttggttatctctctgagtcctatggctttaaatatcatctgtatatgggcaggtctcatagtcttatctcccgcctgaatttctgccctgaaattcaaactcagagctccatctgcctctcaatgtctccatttagaagcctaaaaagcatgccttacttaacatgtccaaaactgaccaagcctgcctctcctttggtcttacccatcttaataaataactccattttcccagttgctcaagccaaccattttggaatcatcctggaaacttctcttttattcgaaccccatatccaatccatcagaaaatcctgttggcccgaccttggaaagctaccccaccatcatctccctcctggattattactgtagcattctca

SEQ ID NO: 33675 - DNA, 395 bp, Homo Sapiens
cttttttttcatttccaagttttaattaaatatctctaatggttagaaaatcaatgtcaaatacgaacattggtatacagcttaaaatacaaatgtcagcaattattaaagaacatgattaatcattgttccaagtaaatgctagatcattatttgccaggaggcaagttaagcatcaggtgcctgaggggtaagggacaggctggctcactggcctttatccccagctccaaggaaacaccagggctttttctgccatgagaatcgtgtttcagagtcaaatgatccactttaagatgaaatttggacagctcagttccagaatattctagtttaacctgggaagttaagacttcccaaaggctgaagataggctactaggggctgatggacaa

SEQ ID NO: 33676 - DNA, 502 bp, Homo Sapiens
aaagctaggctttaaatgacatctgcattggctgggttagctgaagcacacagcgcctgtgggatttatgtgacttgttaaccttgaggtgccattcatggcaccctcgcttccttctcacagggaggagttttttgatgaaccatgctggatttgggtgcagtcctttacccaccgaagcaactgcgattgcatcagaccaaggtccaccaatctcctgccgctttgtcatacctgcggcccactctccgcctcgtagcagcctgtcccacactttaaaggtgccttcctgtctaagctggctcccttccttgcccaagtgcttctggttgctggcatttgcctgcttgtcctgctgttaggttttggcttgccggctcatgtgtctgtggtgtctcggcattgttttctgggctgccttgactccccagggcgccctccgggttacttggctgttgcacctgggggccctggttcccctcactagaatggctgggctctt

SEQ ID NO: 33677 - DNA, 457 bp, Homo Sapiens
ctcccccttgccgctccggggctgctgtggccagaggcgggagtcccgagcggggtggcggtgcccccagaggaaacagggcgagggagctgagcgagagtaggtcttggggagatgagagaggcgtgctcttcctgcctcgaacaatttgggacgtgtttgggtgaaggggaagcgaagaacctgtcttctgcccccactcgtcacggacttctggaagcgtgtcacgatccagagctgtgttgattcccgaggaggaggctgtcgtaggtgtctagccccctcagcgagagacgtttctccccaggacctggaaaggggaaagactgtgccagctgccggtctagcttcggaaacgatacgtattgtacgatagttacgaacgatacgtactgtcgtttccttgctacctcgtcctcaccccaccccgagtgaaacttttcgagtgtgaacctta

SEQ ID NO: 33678 - DNA, 447 bp, Homo Sapiens
tacggtacaaagaagtttattagtttgcccagcatcacacaacctgtaggtgacagagccaggacccaagcctcaggccatgtgggggcatggtctgggccccacaccacctggcaatgccgtttgcttttttactgccattatgagtttgtggcgcttggcattaagccttttttttgttgttgttgttgttgagatggagtctcactttgttgcccaggctttgcaagtgggcagtggcccttctgggtggcctgaagacagcagaggaggaacggagcctggggcctggctgaattggccctctcctgagcctgtggagtcatgctctattgtagcagtaaagtctttggagataccctcttgccatgcttcctctttttgtacagatgaggaaactgaggcagaccacccagctcccaggctagcatttttccctaccataac

SEQ ID NO: 33679 - DNA, 446 bp, Homo Sapiens
ggattttgcttgttatctttactaaaatatctttacttgttctttttcagtaaataaataccgtggacattacagtaaagtcaaatcactctgattcataacacttaattaccagtgtgaaagtgaacaattatacatatgaaattcaggaccatcagagacgacacgcatgcatgggttgtcccaggcctgacctgggatcttgctggcgtgacgctggcacccatgtttttctctgtcccaggcctgacttgggatccccctggcgtgacgctggcacccatgtttttctctgtcccaggcctgacttgggatccccctggcgtgatgctggcacccatgtttttctctgtaccaggcctgctctggccgagctcactgcaggggcatggaggggaagggctagcagggccgattgttggtgtgagtggcttgggaaggggact

SEQ ID NO: 33680 - DNA, 464 bp, Homo Sapiens
cttgcagttacacagctgctagaaaacatatttttagatttgcttttaaaggcaagcaaaaacggtttccactttgtggatttccatccatgatgtatccgtcatgatccctcagtccctactgcaaggggtcaaccatctacaacatgttctattccgtgccctccttccttgtaagtgactgcaaggactggcactagatgctcattctagacgaagctatcagaccctgaccaccagtcctatgctttagaggtgctgcatttcatgaaaatcatgcatggaagtttaagcaccctacagatcaggcccctgctatttctgaattgccccatcattggcattggtatgattccttattgttgtttgtgtttttctttggtaactcttcctactctatcaagggtgcgtgaaaaggaacagtttcaaagagtgaaatcagaacaaggcaaagcacgaccttt

SEQ ID NO: 33681 - DNA, 369 bp, Homo Sapiens
cttttttttgattttgaataaaggatctactttggtacgggcctcgaaagttcttccgtggtgggaggagcatgttaatgaccatacaaacgccgagggttgcgtgtgtccatgcaaatgaagggcgttgcacgcagactttggtggagctgcctggaatgcagagaaggaccggatgtaggccggacccgtccggcagcaccttggacagagcccggtctgcagggtagggctaggtggcaggactatgcccccgagggtgggtgcccaaaggtacggagacctgggtgtcacgcggaaagcccggatgcacagttctgagggacgcgaggtgccagggtcactctagcgcagcccgcaggacccaga

SEQ ID NO: 33682 - DNA, 532 bp, Homo Sapiens
cctgttgttatatagtttattactgtcatagctaagaaaaggcagtcgatttcaacataatccatatctatgttcaaattctcaaactataggatatctatgtttcaaattgtaatttataacctggtaagtattctaaacaaaatattgacaatccattagctgacctaaaatcttatgaagctgtatcatcagtttaacaaatacacacgactttagcaaaagtatatacagatagtatttataatacttataatacaggcatggactaaaaaatacagataaaattggagcaaattaaaagaggagttgcattcaaaatattttttccatttgatatcattagaattacaaaagcagtaataaaaaaatctaatgttaaggcaatgacaaataacaaagataacagttgcccaaggagcgaggggttgggaggtgaatgcacaatcaaggaggggcacaaaacagccttcaggttaatttgttttattaaggggggagtcattggtagatagtctttacatctttttat

SEQ ID NO: 33683 - DNA, 506 bp, Homo Sapiens
ttgttgctgtttttctctttaattctcccagaaaaggaggtttatacctaaatgtgtgagggttggtaaaatacatgagataaacattttaacaactatgtaatgttaatcagcaaaataaaaaagtatttccagccctggcattccaagcaggcccatcccagttaggcccctgggggcaaagccagtggctcagtgtgcacttgggccagggccagttcaagttcgtcttctctataggccagtaagatgtgtttctttaaaaagatttcttaatctaaaaccagctgttgtctgctgtaggccagaacacgacattttaattagcatgattgttctgcttctgaaaccaggctctatggcatcccgaggacagatgatcctgacctaagcttatgggtgaggtttgctggttagcagctcagaaatacacgaacaataaagtggagtccctagcccactctgaatccatgaatcgccatcacctgctatatccctgtcttgaa

SEQ ID NO: 33684 - DNA, 458 bp, Homo Sapiens
ctcagctcgtcactgaactaacggcttttgggggttcttttttcccagttgagtttctgtgtcttttacacgtttggttttatggtccgttggaggttttttcacgctgagggtgaagattcttagtttcctcaattagcataaaagctgctccaaggctgctgagtcttcagttccattccattcaaaatgttaattcctgagacacgcaacctacgccctactgtcctttgtcccacggcttctcgagattatctctgtgttttaatagataaaacgccttctctccccacccgtggggtgcaaagcacagcgcatggggctggtggcgcccgagagcatcacacaacgcatgcgccagtccgcaggtgtgggcggaggagaaatcgcgtcggcggcaggggatgacgtaaaaaggccgcgctgtactgcggcttgtgccgcttccgcaagaaggt

SEQ ID NO: 33685 - DNA, 453 bp, Homo Sapiens
acaaaaaaatttgttttgtttgaaaattaaaattctataaaatatctggcatgcaaaagcacactttagatgacaccattatgaattattatgtaatctgagaaagcagtttcattaactaaaaagagattattttacatctgccccatgaatcctagctggcttgtgctccctgaaccctaaattctgtctcctcaactcagggagactgttgaaccttgtttaggtacttattccctgtacagcagcctaaagattccctccaagttggggcaaccacagggctcaccccatttgatccttttctcccagggattgctgtcgtgcactgctagtttcccagtgtctgacatttgagttgtttatggcaggaatagaaccctgttactccataatggccagaagcagaagtcatcaggatttttgcttgcttttgccctcctcaggttaaaa

SEQ ID NO: 33686 - DNA, 510 bp, Homo Sapiens
gcaccgtcttattgagatgtttcatccagttctagaactttaaagatcatttgtgttcatggctcccaaatttatatcctcagtcttgacctcactagacaaaagtccagacctttgtatccagttgcctacttgacatctaaatctggatgtttaatagctatctcaaatttagtttccttagtacggaacttttgaagtaccctcctccctgcacactcctcaccaacacactcttttctcagttgcctctatccccaaaatggctccacctgccatctgttttcccatgccaaacatctgagtgttattcttgattttttcattttctctatctgcattcaatctatcagaaagctttcaggggattctttctactctcatggggcttgagaaatataccttggggccttggacatgatctgaatggtaagattgattagaatatatctaggaactacccacattttttttctctctccttccactacacttctcaaaatgatcgct

SEQ ID NO: 33687 - DNA, 525 bp, Homo Sapiens
acttaaacatgtgccttaagcatagataattttatttgtcattaacaataccgaggaagtactactgagcccattctacacatgaagaagctgaggcttaacaacctatttaacaattactgtaagaactgacttacctgaagaaattttgttatcaactcaattccttcagagtctaacctagaaacaacaaagaacaagtaaaaatttatgctctcttagctgataaaacttttcagataaaactattttctaagtgttttaatctgctaaatttaaatgccctaaaatagtcactcttgttgtcttcaaatagacacaaatctgttttagtcttaaaagactggccttgctatttgtttaaggataagccataaataacttggcttcaatttgaattttcaatatccaagaacaaattaaagaattttaaaaatcaccatgctgtctcaaaacaaagaaacttcaatattaagaaagcttacatattgtatcacttttcgcagtctttcactaaacgcaagt

SEQ ID NO: 33688 - DNA, 508 bp, Homo Sapiens
tcatgatctgaagtctaaggtttattcggaattggcggagatagcactggtaaatatatatgtttttttaaaatgaaggatccaaaaatacgacatttccctaagcattaagtcagactgagaaatttgtaccagtgatttggagcctgggggtaacgaggcaaaaacttcatgagcttattccgggacccccacctgagtcaaggcctcaaagcttaaggatacaaagttccagtgacggcttgttgccaataacagagaaggcggaatcatgagcaagccggctgtctgtccaccgaagagagtgctcgcaaatgcttggcaacactccccgcctgtgtgactccctctttcagcctggagggctttccacgttcacagcgtgcatcctcttgacattaaagacattatcccagggcgcttaccctgagcaaagcttcctcttctcagctcctacagtttggctgatgctgctcaagagtcccccacagtcctggcatctggtttc

SEQ ID NO: 33689 - DNA, 367 bp, Homo Sapiens
ttgagttctagttatttctgtatttcttccatttaagaagaaaagcatacattgagtgaaggcaggtgggattcactttaaaaactgttaagttttccccacagcaggcatcctgggccggctgagattgaaacctcacccaggagtgccccagactgtggtcacccaagtcagattcttgacaaaaagggaaaacccttcgcctgaccccaccgctttgctcagtctcacaagtttcccctgctttcctccccgttgctgaaagcagcccctcccaagggaagcaggagcctggcctttgtgtggcagcccgcagggcctggcgctggtgggctggcggctgtcccttctactaagtacccactgc

SEQ ID NO: 33690 - DNA, 383 bp, Homo Sapiens
tgattatatctgatttcatttagggccatgggggattataaatgttcacgcaatcaagttcattaggacttcaaatcgcatttctgattgggatcgctctgccgccgtcctcccagcgcctttcaaaccccagcgcttggctttcaaaacatctttttgaatttaaagcctcacatccttttgtcttccgacgccccctcccgccccacccctcccggcggctgcaagctcttcgggcctccttcccggggcaacagccctgaacccctcttgctgccagcgggtctggggagggtggggctgggctccgcaggctgacggaacccccttccacgccgcgcagccttggggcgctcgtgtccctgaagcctgagctgggcgtg

SEQ ID NO: 33691 - DNA, 404 bp, Homo Sapiens
atgaggctgttatactccataagtccttatttctaagtactatttagaattgcctaactaccttcacaaggagcacctcactggttccataacactctctgggagggtgcaggaattctcattaccatctcacagatgaggaaactcagggtcagagtcacaccataaggagctatttgagctagaagtcaaatctaaaccttcggatcccagagtccactttctcttctcccaggctagtctcagataccttttccagtgctaaggtctgactccaaaacaggacgtaaaggaggcgttttggcaacgagaagaaagagagttggggggtgttggtgggggctggggaccagcagcaaagctcagagcaggcaatgggagtgtaaccagcacattgcagctct

SEQ ID NO: 33692 - DNA, 478 bp, Homo Sapiens
catttattaatgacctttaatggactatcatcaaggcagaagtaatagtaataaaacacaattaattagcttgttggaagtataactataatataatttatgaaattttactcattggaaaccattttcccagcagggaaaagcaaccataaagatgtacccaagtaatatatgggattcatgtaattgattgaaacaggacattttcctcagcttaactggagctggtgcttgtcagccctaggctggagcactctgctttctataccaggcctgatagaagcaggcaactgcacaggcacctagatgggaatgcaccagcccaccctcatagtcactctacaaagaccaggtctccctatgcacttgttgttacgtgtgctttgtcgagctctgtccccagtttcccacaaccttcatcgagctaatgtgaagactcttcatctgctatccttgtgtgtgctccaggttctgcccc

SEQ ID NO: 33693 - DNA, 532 bp, Homo Sapiens
ttaaatagtacttatactagatttatttatgttgaaatgatgggcaaatgcagctacagatctcaatctatgatacttattcaacaaatcaactctttcttgtaatgtcatgacttttctctgcttcttgggagcacttgcagtatcactagaagcactacatgtgggtcccatggtattattcaatgtttacaatactgtactacccacaatgaaaaatacatgagaataaaccacgaaagatcactttttgtgatctgctaaagagacaaactgcttctgcagagatgattagcattatgtgacatcttaaggagatacttgcaactctttagctcaccacagtagcaacatgaggtagctacaaaattattatagtagtacagtgtgtaccacagttaatttaatgcaattatgattgaaaactgcatctttacatttgtttacatttctcttgactgcaaatggcaccatataaagtctgtaagggcttatgttcatatattttgataaatttcaactttgtatagta

SEQ ID NO: 33694 - DNA, 517 bp, Homo Sapiens
ttatgtaagattcatatttattaaatcctgtagcatgtacttttcctgtgaaagtacagattcagttccattatgatttcttcagcagagatcctacacacagcagagagtctcaggtggtggaggagatacaaagatatgcaaaacaatcttcaaggatcttacacataagggggaatacaaagccataaaatacttgcaaaccacaagttatagagtttccaaagagaaagagatatcttccagccaaggtctaaaggaaaaccttcagagagaagctggcatttcagatgggccctgaagaactaaaatgaatttcacaagtaggggaacagtaaaatgagggggctgagatctcaacttcgcccatgctcctgtttccatctttgaaatctcttttagatatgacaacccatgcagtcaacttcccagctatgttgccagccccttaattctgcctctcttcctggtaaacacattctgactatcccaggaaccccctttctgagggctaccc

SEQ ID NO: 33695 - DNA, 388 bp, Homo Sapiens
atctaaaggttctgtaactccaaaaaatttgagcacattcataataggttgtcaaacatgataatttccgagtctgtattcaatgccccaaatagagtctcagagctttcactttatctagaagctctggactggtacttgctgtagggtctcccaaattcttagactctaagccaccatatatgcatgggctctcttagagtcagagacaacttctgcagtggagctctgtgtggcgattccaccctgcaagatctccaaaccagagcactcaggattgttggcaggtcactaaggcagactaatagagtcaaaacataacctggtatagttttctaccaaacttgaggaatattgaatgaaaaacaaacaaaataatccccccaaa

SEQ ID NO: 33696 - DNA, 557 bp, Homo Sapiens
atattactatgtgtttacttatataatcattacaacaattttataaaatggatctcatttaactcattttccagatgaggaaacagtccataaggattaagtaggtttcgcaaatttacacagcagtacagtggcccaaagttctgatgtccagagccttccttccattccaggacaccatcttatctcttcttcagtgtctccttgaccaacaatcaaatcttccatctaaatagtccttggcaatagctcagcctctcaaaaggccaagtgtagactgctgtttggaagaggagagtgcttttgatcccaagtgtacatgtccattcatgggtctttatgtttgaaaagttctgacaacatcactagtctgactctaatttgatttgttttctaagtaatggtagaatcaaggtctgctccccaggaactgtttagccatggagtcaaaaatcccttgtttcagttacttttaggatagctctgaatgcagcagccaacacataacctctaagacagatgttagaagagttcagcggtctgcgctcaccaagcta

SEQ ID NO: 33697 - DNA, 465 bp, Homo Sapiens
aacccacccctggtcttagttccttttgccctgggagaggttttccctctcccagacggaaagaagcatcctttgctttttcaagaacttttcgaactttttcaagaagtcttcaactctccaaaaacatcttctctcccaactagacggtcttgctcctaaatcttggctccaggctgagggccattttgaagccgagttaattgtcctccagcgagatgacttgggatgagatcagagcaagagctgtgtcggttaagtgtgagaaagaggccagaccggctaccgattgaggcttacaccgggtttctaaggcctcttgggccaaagcagcccttacaggattagaggcttcaaccaaggcccatgctgcagcccccatctgggctctttccagtcctggcaattcacaccaccaattccatctggctgggcatcttttgcctctctagggtccccaccctg

SEQ ID NO: 33698 - DNA, 540 bp, Homo Sapiens
tttttttgaagttgtcgaaagactttaatgtgtttgaaaatacctaacaacaaagcctggcccacagctggtatttcaataatgttaatttccttgcttccctcttgaggtccttaagattcataggttctccggactccttgaaagttttgtgtagatgcatgaggtgtatttttcttggaaataaagtccacaatttaacagattatcttggggccagcgatttccccgaaaataaattgtagattctccttccggcaatgctaaggggtgaatctcttttgcgggagactggattctttcggtgtgtgttttgctctctgggtactctttctgtagtcggctaacagaggatgaccaagcccctcgcgggggcgggggcgggtcactcccggacagggcccccatgaagtttccctggggactgtgtgactccctaggggtcgggttacctcccagatgggggtggggtatcacttgcagctggaaggcaggttcattttaaggtctcgcgggcttcggaggcccctccctcactga

SEQ ID NO: 33699 - DNA, 512 bp, Homo Sapiens
caaggaaaatcaatgtttgtggtttattaatactctacatatacattatcatcaaaatccttttcaagtttatcgttaagttcagaaaggagaatgactcccttcccctttgctggaatatcattttcctaaacaggcattttcttcctgtataaatcccaagtttgtccctgtatacacattaaaaatattcctcatgctttttaaaattgtccaggttcccacggttttccccaggactccaaagatacccagagaaggagacttccaggtgatgtaaaattgggtaccaagaaggaagactggattgctggggttgacaaggtgggaacacacagccttgcgtgatttcacagccctgtgaagagggtcgtgacccagcagcacagacacctgtggacacacacaggtgatgagctgtttttgttaagagccacatctgagcttacctatcagggctgtcagaggcacacacagaatcaatcagccccacatccaaggtgccctggcat

SEQ ID NO: 33700 - DNA, 553 bp, Homo Sapiens
cactcctacaattcttttatgtgactactgtcaagattcctgaacacagagttgagagccagatctgaaaccttaacaaaagtgaaggaggaaaggaagcaatctgaccccaaatcccacagaacaaaaacataaaatagcaatctctaagtttccagaaatctcagtgactctgggtagcagcaagagtgagcaggtggtaagcttctcaggaatccaaggctctggcccaagccgtcaactctgcacatgaggtgacccgggaagccagccaggcatctcccactccccacggtcttggtacccctcccccacaacctgcaaaaatccactctcatgacagactaatctgtcagcaggggagaaaagcaacacttctcccctttcctgaaacaggtgccgggggagacctcatgactccttgggatgcagctcccatctttttcccactcaactgtgagcccaaacagccattctgaatgtcccctgtctcattccctccccaagtgcatttagttctacagtaggggttatgctttcttttttaaaaaga

SEQ ID NO: 33701 - DNA, 493 bp, Homo Sapiens
aacatatatttagtactatgtatgaaaaaatatgccaaaactctgagtagcagtgctaaatcaatttataggaggccattgttttggtctaagcttctacactaggccacagaccaaaccaaaatggaagcaactaaatcattccattggacaccttgactgtccattgtaatacccaggtccttgagctattgtacagggctggggccatgggagacagtgttggtggctgtggggtggagtgggtcattcaagtggagcaggagcttcactagctgttctaggttacccccatgaatggtatatagagcatttttagccaatttcttccattgaaattcatccaaaaatgggtttgaacatatgttattacttaataaaatgtgtaacaattggcagatttaaaaaagtaactgaataattctcaataagtcaattaccacaaatttaaaaatctatgcatcaaaaataaacacttggctaaaaaattgca

SEQ ID NO: 33702 - DNA, 405 bp, Homo Sapiens
tttgtattgggaagataacaaatgttctagctattttaaaatatacactaagttattgttgactctagtcaccctactgtgcaaataaaaactgaaacgtattccttctatcttgctgagtttttatgcccatgaatcaacttgtcttcatccctacctgcttcccagcccccggtaaccatcattctaatgcctatctccatgaaatcaacttcttaatctctcatatatgaatgagaatatgtgatacttgtctttctgcccttggcctatttcacttaacataatgtcctccagttctatccatgttgctgcaagcagattttattttccaaaccttaagctttatagatgacttcactttttaaatggctgaataatatcctcttgtgcatgtatacctca

SEQ ID NO: 33703 - DNA, 506 bp, Homo Sapiens
tctattatagtttctgaagactctattgatgtttcttccagttcactgattctttcctcagctatgtctggcctactgatgtgctcatcaatggcactcttctcttctgttagtgttatttctaccatttctttttcattccttcttaaagtttccatctctctgtgcacattacttatctgctgcatgttccccacttttcccattaggacccttagcatataatcatagttgttttaaattgctggtttgatcattctaacatcctccaccatacctgaatctggttctaatgcttgctctgtttcttcaaaatgtggtttttgtctttcatttctgccgtgtaattttttgttcaaagctggatatgctgtattggttaaagcaactcaatactggtttcccacagaaacttccattcctaggcttctgcactaagaagttgggatgctctgtatctgcctgttgtctctcccatttaggggacagtggtttaccctgtggcc

SEQ ID NO: 33704 - DNA, 469 bp, Homo Sapiens
ataaaaaccaatggtcctgccattttttatttatcatagcaatacatacttacagaagaaaaagaatcacacattttaaattctgatcattacactatttttttgtagttgaataataaaagaatgaatctcttagtgactttttaaaataccttcaatgttggaaaaatgcaaattatgatatgataaacattcaataactggagtaagttcacttccaaatgaaagacacttggcacccagtaacagtaatgaaattaaacatcactgaagacagtaaggaggtctgcctggaggtctctaaggaggtctgcctggaaccatatctttagtgtagattcacaatcaatccaatctttcaacctacattttaataatttagctttagaagaataacatgtgaatcagtttttctctaataaggccctgaaaaagttgtatcctgaagcactataaagagagtgaaact

SEQ ID NO: 33705 - DNA, 526 bp, Homo Sapiens
caaaaaagttcttacatttgttctcattcattctctctcattttctctctcttccccctccctggcattaagaatgaccaacttgtaatcaaaccaccagcctgaaaacaaatcttccttgctacgaacagttaacatattgccacctgtcacgtgtccaattcaccaccatgtcaaacacagtcgactggaaatgtccagggaccatcactcagcaataagccgcctgcccacttaatgccagtgagcaggagacgtccagcgcctgtctctagacgtgtccttgtttccactttggggagatatatgtgagtggaaataacaagggtaattggcaaaatcattgtgaaatgaatctgtcctaccataaatgtgactgcaaattttgaagttgatttgcaaaaggccacagacatagctgtgacccatcccacactcagtggcaataccactgggaaaagggtagctactgtctctgagtcatcagaatccctgccagtaaagctggacagccaccagcactcaa

SEQ ID NO: 33706 - DNA, 513 bp, Homo Sapiens
taagggccttgggaatatccattacaccctgtaaaataacagcttgtcttcaaccctgtatgatcttctggctgcagggatactacagtgaggttaacatgttaagaatgtacaatgtactagttaaaactgcagacctcgccaagcaccagctctacaattttggataaattaggcaacctgtttaaagttcctcatctgtgctactggataaagtctaattcacagggtcattgtgaatattatacaaaattatttcagggatagagtaactttcactgttagctattattattatctactgaattaaaaagcagaatctgatttcttaaactaactggccaattcaatattgcattacaatcagctctaggtaccagaagtattggaatagtaagagtattcaaaatcctttaggtcctatttttgtttgagaagagttttttgatagtatattgaaagcaattcaacatgggaaaaaaataagttgaccatgtgttctgttggtatcat

SEQ ID NO: 33707 - DNA, 484 bp, Homo Sapiens
attttattattattatattttaagttttaatgtgcacaatgtgcaagtttgttacatatgtatacatgtgccatgttggtgtgctatgactttagggatgagtaaatttgtcacctgagaagaagggcaaggaaattctggacagtgggaatggggttcacaaagacttggagtcatgaaaaggcatatggtgggtttaggaaaaggaatgttaagcaaggaagaatcatggggaatgcagaaataggtcaaaaactagtttggggccattttataaagggacttgaatggcaagcttatgagcttagattgtgttctgtagccagcagagaacttgcagattatttttaagagttacatgactgaacaattttaaaaattttactctttaaacaaacatgaaggagagtaatataaaaattaccctctgtacatcaaacactcaattatcaagatgaatgattttaaagcaaatctctcacct

SEQ ID NO: 33708 - DNA, 430 bp, Homo Sapiens
aaactaggtcatttgttttcaccgatacaatttctcacagaatcctgtgagctatataaaaatcatttctctttcagtataagcaattctactttcctttctttagctcaagagtaattttctgcttaacatttgttacacttttatccttgtataaaaagtttacttgagaaatagttatatttattttacttagataagtatgtatttagcatttactatgtctcaggaactattctcatttcttcacaaatattagttcatttaattaccataataatattatcttctttttacagatgtgatgtctaagactcatagaggttaagtaacttacctaaggtcacacatctagtaaataggcagacagctctatttagaaactaagattgaaagaatattaaatgttcacttgatctaaccatttttg

SEQ ID NO: 33709 - DNA, 497 bp, Homo Sapiens
ggaactgaaaaaaatatcactgatatgaatctaggggcccagtacctgaatcagttaagcacttatatcaaaattactgcagaaatgaaacaagatatgcaacatacagggcccttgttggctgcacagtaatcacgtaaaaatggcaattagctcctttaaaggatgataattaacactgcctttacataacccacttttaagtttcttttttactgatgttttcctgcatcagcaatcagcaaagtaatcagctcaacgtcaagcattttctctgagacacgaacactttcatcagcaccttcatatatacaaagccattcccatttggaaaacaagaggggtaaagataggggattgaaaggcatagttcttatccttcagcattctggaattccctcgatgaccacagggctgcaggatgaggctctgctcttaaggactcaagacttaatataaatgactacagagtacactgtatccaatatgcagtcttc

SEQ ID NO: 33710 - DNA, 472 bp, Homo Sapiens
tttagtcggtatgatgccatttatgtaaaaaaggactaaaaggatgcatatatatatacatacatgtgacacatacacagaaaaattttggaaggatacaccaaaaacttcatattggttatctctggggagtggactaagaagtcagaagtgggaccgttagtctgttacttaattttcctgttagtacttgaattttaaaattatgactgtattattgcttttatgtttattttttaaacaacaaactagttaaacaagcaagctatttttggatggcaatgagaaaagttaactctaaaagatgcccttcccagggacaggggtggggcaaggcagagtggggcggagagggagggccctgttgaaggcacacattgcccttcactctgtgactcttggctccctctgctttcggtcgctggccaaaccaaacagccttccagctctgtcccgtgaggtggagatgaga

SEQ ID NO: 33711 - DNA, 398 bp, Homo Sapiens
gcgaagctgacggatctccgagccgcgccccgccccaccccgcagggtcctagcgcccgcccccgccggccctgggaggggaccctgcgcgcgaggggcaagtccccagcggggacagggaaaggggtgtatgagatgccaagacagagtgggcggggcgaggaagggccacgaggtgcaagaagaggaattctggaagttaacggtgaaccccttctctccaccacctcccatactcacaggtacacacctctgcaacaacctacagtatttacacacaggcacgctgtccccagaacaacccagagacgcccccatgcaataccccagagatccaaagatgggcacacacccccatgacaatcaagagactaactcgcagggatgacagccccaca

SEQ ID NO: 33712 - DNA, 430 bp, Homo Sapiens
caaagattgttggaaataatccttctcttgtacctagaaacataggtgcaaatttctgatatctttgttttatctgcattcctgcctttcatgaaagtccctcttgattgtgctgaggctgtggctcagcgaagacactgaataaatacgatagccactgttgcttgttgcttgtccaagtcttcctggcttctgctgcaagagggggatatggagaaggtgggccagggtgtgtggacccgggcagaatctggggaagaagcctgccattcgtctttctttcccacaccaccgaacccactgcccttcccacccccacagcccttttatgaaatcagacaacgtggttggtggaaaacagcagggcctttcctctgggttttcaaccagaagtgatattccacagttttaactggttactgtgaagtcc

SEQ ID NO: 33713 - DNA, 558 bp, Homo Sapiens
ttattatcggtcttctccattagattgttcactccatcacaggagggaccacgtctatttcaccagttcctagcatagtgccaggcatggagtcagtgctcatgaaagaaataaatgaatgtttttggttcttgtttgaattcatatgacaaacgcttgcatctgtagctctcgtcatttagtgagttctccagctttcagggagaggtgttattacaccattgtttttctggttgttatagcaacccactggcctctaaaactacaagttaattctgatgcgctcattttcccagacaacgaaacaatactttcaattatgaaataatgttattataaatcatgtttctcacactatagagggacgctgagaggttttcttatcttttatgaagatagcagagagtcagcaaagcaacaaatctatttgaaccaataaatgctaggaaacaaaaccaaagcagtaagacacacatattcactcccaactcttttttatttctttcaaattctctaacctttccacaagcatctgtaaattcgactgggtttgtctgt

SEQ ID NO: 33714 - DNA, 400 bp, Homo Sapiens
gcccggccgggggggtgaagcctcgggaggcgccctgcgctctcactgtgccctgagtttctaagccgctctggggcaggcgcggggactgggttggtcctcgctatttttttgggcgaggtctttgagctgtgggggctctgagggtccctggcgccgggcgggacgcggatcagcaggctgcgcatcttcctcgcccgggcctctcgcgggactcaggcaccctcctcctgccaccccgcaggggctctccagcttttcttccgcgcccagtcgccctaagagacagaggccgtgggggcaggacgcgcccagaaaacggccaggcgcggtcccagtgggcgtcttcgccgcctcccgggtgagggcgggaggcatgtgcaaagcaggtaaaataggg

SEQ ID NO: 33715 - DNA, 472 bp, Homo Sapiens
ggggtccacttaaccgtctcccatacccctctgtgttgtacacaacaaaattcagactccttgatatgaccttcaagcccttcgctctctgactgcttttttttcagccgacatcccccaggcttcgctgggctttgtccttgtatttagccccagacatgattccccctgggtgaaagccacgtagggtcactccatgtctcctgtgccaaggtgttcagaaggaatagttactgcggtgctttctagagctgtgcgtgatcctgggaattactagtgacatttaaaaagcggttttgttcattgctgtgcagttgccaccaccatccctgcaagggcctcctcctgcagaatgaggcagctccgagacattggggtggatggtggtaagccatgatcccttgcaggaggagctgctggctgcacggtcccaggtgagagacggaagttagtacaagttggtggcagacag

SEQ ID NO: 33716 - DNA, 518 bp, Homo Sapiens
ctgtagcaggggcaaagaactcacatcatccttttactctgacggctgagcaagctggctgaatctcagagtcgccttctatacctgccagtaaaagcaaaggcctcagtgcgcccaaatacaggcaaagcctctggccggtctgcgagtttttccccatacggagggcagtgcgagctattgggtcggggagttgctatgaccacacaacgttcctataccttacatggacaaatgcgcacacgcaaagcaaggaatgcatgcccatgacgctagccttcagtgattaaggcaccagacagtagaccaacgggaggcataaatataccgaggggaagaatggtgacaggtcctcctgggatatgggccatggcaggacgaggggacaatgtcggattgggggggtctgacaaactggatttaaatttcagctccgcagcgttctcagctcttggtcttggaaatgttccctgagcttcggtttttctcatcattctgttcgggtgcccgcttgcctc

SEQ ID NO: 33717 - DNA, 370 bp, Homo Sapiens
tcagagaccacagaccacagtgatttttcttttcccttgtttaattaggcaatacccttgttaattgccctttggcaactaacttaaccatgtgcttcccacacagtacatcaggaaaacttacagggcaatatttttaacttggggcaggaagaagggagcagcagagaattgactagatatagcacctattaaaagagaactcttgcttcttctgagatttttcaagctgtgctttgtgtgtgtgccagtagacttacgcaaggacagggtacaaacttagctggaagtctgcccaggctgaatgatctcttccctagagttgattgtcgggtacacagtgtgaacccccgaagacggaacctcacag

SEQ ID NO: 33718 - DNA, 457 bp, Homo Sapiens
gttacagattcagaagtgtaaataagcaaataagtaaaatgattaaaggattccataaacctaccatccagagaggaacacatttaacaccttgtttgtctagtccctaagatgtacagatacattatatatatttatatgtatattcatatgttaagtccatgtgatactccagacataccaaggtgtgccaagagctgcagagatcattatgctggcacccctgtgtgcaaatctgtgaactacggcaccctgtttgggaagctctactctacacttccatacatttgagtttctcagaaacaagcatcatcgacatggcagcaaagaagcttcatttcttggaaagttcccatgtttcttgtatctgtccctcacttccacagagctggcatgagttcaactagcatacgtttagctggagtctgcataaatgacggggaacatagaatttcct

SEQ ID NO: 33719 - DNA, 522 bp, Homo Sapiens
aaggcacagctttcccagtgtttgtgttccttgcttgcgccctgttttaatgttgtagttacaggtgtccagcagggaggaatgcagcccctgtgggcgcttgggggagctgctgggaatccaagttcaaggagcagctgttttctgttttctgttgccccacagcgccacctcctggccccttggtggtgatgattttgaagtcagcaggttctggtgggccgtgtgaactccagcagctctgggctgagctgtggaaacactgcgtcctttgaaataatacagcttcctgagcccaccccagtccctaaagactgcctctggggttgagattctgagatgcttgacagcatggcttttcccggtgttatgtgtcgtttctatccttaagcctgttaggggtggactggaggctggaccaagctccactggctgcaggaggacccttctgtgggctccaggctggccgtgtgcgtgtggggaggtgggatttgctgctaggcttcatgatcactgtgaaga

SEQ ID NO: 33720 - DNA, 516 bp, Homo Sapiens
gcggccgcaattgaggtgtggcgagtcaggcgcggccccgggtaagtaacgccggcatgtggagtcacagtccccggccgcgcgcaggagctaggtcttcagggaagtgatgttgctcgggtctctcctccccttgctctggaaatctggcgtccgtcttaccttttagtgtccaagaacaactttttcaaaaagttcatatattagcttgaatttacaaactgctggcctatttttttaagtagaaaacggccaaacatcagcattcagcagttacacatggttcaacttaacagatgtgttttttcaaaaatgttcttgaaaggaataggtaaagctgtagacccaaataattttgcaccccactggttggaaatgctggggtactttccctctagccctgtaggaaaaaaccctatactgaaacccaaaaagcacaaaacacgggtcttccaaaaactcttacctaataggactttcaccttacacattggtggagagagataacatgaccca

SEQ ID NO: 33721 - DNA, 484 bp, Homo Sapiens
gtgaaatctgatttattcaactattgggccattaacaaccaattacaaacacttatagcaacagagaaaatatatgtttcataaacaaacaaaaaatacaaactacaagcatactcctaataatacttacacatgtgtaagtttgatggataaaaatgagatagcactatatatgtataaaaaattaaaaatgtttcattgagcaggtagaattatgagcatctttttttccctaaaatttctcctaatgtaatattaaataatcatgtgaaaggaattcaaagagtatgtgagaaataaaccatttttccctttaagcagttgtgtctgtggctcacaaccatttaacttacattaagcatagataagaaaggtcctagaatatataatataaataaaaattgtcaaaatgatcttatgcccatttgccataaataaaggcatcaagttaatttcaaaacttgtttttagacttttacatcaa

SEQ ID NO: 33722 - DNA, 401 bp, Homo Sapiens
actcgaggggctcaaacctgttacctgaccagttttcatttctaaggaacgccgatcacctttctaagacaacgccgcagctttctgctgctgcttccaaattgtggtttgttgacagcccatctgaaaaactgctccgttgaagtttctttccctttgcagtcctcctgcagtaaatcctgtaaaagttttagcatccaataatagatgttctgttatttcggtctcatttttcctatcttattcccgctgatttttactctacttaattgaacaaatattttgattatcggttttctcttgcgctgggaatattaagataaatgacatcgtttctgtcatcaaagattggcgtataatcaaatatcacaaaggcttaatttaaaagctacaccaccttg

SEQ ID NO: 33723 - DNA, 462 bp, Homo Sapiens
ctcagcatacatttattgagtgctcactgtgtgccaggaagtaagccaggtgctagaaacggcaaaggagcagggaagaggcgggtcagccgctgggttgaccctggttaatacagggtacggattaacccttcaggctcccttccgagggcctgggcggggtcttggggccgctcctgcccaggtgttctttccagcaatggaaagggattcagtgaggtaagacgcttccccttctcctccattcagagagcggcacacaagaaatctacacagtcttcccaacatgtacacaccctgacatgcccggatgcatctcacacttagataaacacacacgcacacagtcagaggcacggtcccgcagctgtatgaggatgcggtgtacaggtgctgcctacgtgaccgtgccttgagtcgccccactcagcagaaacctcactcagcagaaacttgtccacc

SEQ ID NO: 33724 - DNA, 491 bp, Homo Sapiens
tccagcttcaaagcctgtgtttcttctaatgctttgtttcgttatatattccacatgaatgatgcctcctactccataatatatctgtgcttattaatagaatcccttcctccccagatagccccagtaaaatgatgctgcacggagacggtccatgcccgtcctgtggtgttgaggacccagcagacccctgagaggtgtgctgccagtttgcagagcatgagcttgcatgccccttcaggggctgactcaaaagtcagtcatttaggctggaaacgttcgtgcgtgtagcagagctgaggcacgacatgccttctagtgatggccacctctagttctgcaggtgcactctggtctggagggctctctgtccttgcacagaatagtcccatgttgctgggcctgtgcgttcttgtgtctgatttaatgacagaccttttcagaccagaaatcagacagacttggattctatccctgctccaaacacttca

SEQ ID NO: 33725 - DNA, 499 bp, Homo Sapiens
tttgaattgtttttctagagcttctttattatggtttcaagggcaaatcagaccctttgaccaaaatggaattaagctgagcttgagtccagcccaaacactggaaccccccatgatgttccagaaattcctgttaactgtgctatggtagagacacacaaaccccagccctggaggctgcagccgaggctcctggcagcttctgggctgcgtggctctggccctcagcttccccacccacggcagtggagccaggcggccccgctcgtcactttcacctgactgtgcaccgggctctggggtctgggccagccaggtctgtcctgcccgagatccagtcaatcaaggaagaaaagggtttcatcagcagatcctgcctcaggtaggcagaatgactgcgactggcttcccaggatgaaaacaactgcccaacagggctgccagcagctcttcccagggccgcacggcagttggcggaggaggcaggtcacacctctgc

SEQ ID NO: 33726 - DNA, 410 bp, Homo Sapiens
cagcttttttcagttataattgataaagactgtccattttatacttcaagtgaacaatgtgaagttttgatattcattttttgtatacgtgtatacatcataaatccatcaagctaattaaatatccatcatctcacagagttaccaatttgtgtgtgtgtggtgagaatacttaagatctatcctcacagaaaatttcaagtatacaaaacagtatgattaactataattatcatgctgtacattaggtctctagaacttattcaacctgtataactgcaacttcataccctttgacctacatctccccattccctgcagaccccgggaaactaccgtcctacttccggcttctatgcactcattttcttttttcattccttgaatggacagaaaaaacaagtaaaatt

SEQ ID NO: 33727 - DNA, 419 bp, Homo Sapiens
ctttcatccatttaagaaatgtttattgagggcccgaaccaggccaggcactgtgctatgcacttttttaaatggctttgattttcatcaagaccaagaggcagagaagagcggagggagaagcagagagggaagatgggggctggtcaggtgtgggtcaggagaccccagcctcaggggtctggtcctgtacagaggcctaggaccaggctgctcactctgattataacacccattctacgggcaccttcaacactgcactgctgggaagagggctttccagtttggctgagagttggaaaaggctaaaaggggagaggaccccagagcaattccccaggatgacaggagctggaggcagcatcccgggaccttaggagaggcctcatgagcttcccaagctcctacctgtcttttga

SEQ ID NO: 33728 - DNA, 386 bp, Homo Sapiens
agatggagtcttgctctgtcgcccagactggagtcaggtctgctagacataaattatttcagtatttgcttatctgaaaaaaagtcttgatttctcttcattctttatagatatttttttgctggatttagaaatgctaggtggccagttctggctttcatggtcattgctgaaaagtctgctgtcagtctgcctatggcaccctagaagataatctgtcttttttctctagttgcttttaatatttcatctttggtgttcttcagtatcactaggacaggtcttagaatcagtttccttttatgcattctcgtttggcacttgttgggcttctgaatctgtggattactattatcgattagttttggaaggttctgtctttctct

SEQ ID NO: 33729 - DNA, 503 bp, Homo Sapiens
agcgccaaatacatgttaccaaaaaaagtgacacactgggtagcattttaaactcaagtgttttgccaactaaaactatactcaaatttcataagtatacaggcttagcccgtaaaacagaaaggcacaactattcatagttctttaagttccttttgaaattggtgtgtatgccctggaagttttaagaacaaccactgaaaacctattcaccaattctgaatggcttgtaaagtatcagcctcactttcattcttttcagagcccacagttatctcctccctggatatactttatcttgcagattatgcaaggcaatgtaactaacttcaaagtccctttagttccttttaaagcacaagaaaatctcccaaaacactgaacataaaattaacccttgggaagtttcagattctgagaacaggaaccacctcttaaccattctctctgactgcgatcatctaggtccttcattcaaaatgcattaattggaaatacctaaa

SEQ ID NO: 33730 - DNA, 399 bp, Homo Sapiens
tgtggaacagttaacgtttactgacccttgtgccagtagccatgctaagtgctttgcatatattatcaactcatttaatcttcatagacaaccgatggtgtggttattattttacccattttataaaggaagaaagtaaggcacagagagatgaagtaacttgccccaaggtggcacagcttctaagtgtcagagtcaacatttgagtagagaccatagcaacctggcctccgtttcattctgttggcagggctggcggtctttctaaatgggatatttgtagaggtttccatcgccccaggttctgtaagtcctgatcatcagcccaggggctgcttctcagggatgggagttgggggttcagcttcttcttgggagaatccagctctgggtgtttca

SEQ ID NO: 33731 - DNA, 561 bp, Homo Sapiens
cggatttcaccccaggtttattaggattaaagaggcacatgtatgggaagtaccaggcacgtgtcacatgggcagggcctctgaacacctggaggtcatgacgcatggctgcaggtgttactgaagggtcaaccctgggcgcaccttttttcccccatcactaggagccaagagaacagtgagatctggatgtcattacacgaatatacaccctttttttccttctcttccaggattttaaagattgagttcaaaatcactaaaaaatgaggtcggccaagctccccattgcttggccccaaacattggttttcttaaagtttttgtctcaatttgggattactgtccttagggtaacgtggactcattccagagaccaaaccttcagcagctgcccaaattctactctgtccacttttccacagaccaccacaagcctcattattcaaatagagcagggtagtctgagagtgaagggcctgaataataaatacaattcctaaactctcaaattcctatggatttgtgctcccacatcctttattacaccatgtatacctt

SEQ ID NO: 33732 - DNA, 491 bp, Homo Sapiens
gcacacacatatctttttatttgagagtttaaaaggaaatctgaggtccagaggatcacagagcctcttgttctgctatcaaaggaccaataagaagcaaactgatattacagggcaaatgttcccagacagcccagcctgctccccttaggaatgagtgtccctggagggggagagcctggaaccaaagccccgccaggaactgcttcccctaaactgaggttctctgaaaaaaatgttcgcctggctgataaagccgcctcttaacagagcccagacacttctgtgcttcccctgggttgctaattgaggacactaaagccctaagagataccccaggtcgggggaaggggccccaagacctagacctccggtggcgaccatgcccttgagaggatgggagctgaattggagcacgagattatttatcatcgctggatgaagctccagctagagctcagtatttcctctttttctgggctcagacagac

SEQ ID NO: 33733 - DNA, 402 bp, Homo Sapiens
tcctggattctcactctatcgcccagtctggagtgcaggtgaagaagcagggagaaagtgaaggttgtaatgtgaggaaaggccctgtgtactcagcaaaaataaggacacgcagtcattattttatttacaaacattcagctggagcccagaggaatgtccattccatgtagcagttctgaaaggccgtgcttgttgtacggtttcctggggtgagaagagtcataaagccttgataggaatctgagaagcaaaggctgctgattgggtcagaacccactgcactaatcaaagaaagaaggaaagaaatgggatggagtattggtttgctttttcctctcacccccagtatgtgattgaatagaattcagtgtgttttcaatctaaagtgatgcatgtgta

SEQ ID NO: 33734 - DNA, 400 bp, Homo Sapiens
ctctttgttagagccattttgttctaatagctgtgatgatccaatcaagaaagatgaaatggaagacagtgagatgtcaaggattgaataggacgtagaaccagaagatagaggttgaaggtaccgctttgcccctgaccaggggtaaattcttcaataactgactctgtccggataaggaggataataatgctctaccagcttcagttaccgtgttaggggatcaataatatatgctatgtagattaagccatagaaaagttaaagcttgaaacatttgttgggcagcttaaccatgaagtgaatgaaattaattcgccttcaagtggaaacatgagatccacaagccagcttttacttcacacttccaccttggagtcttgaatacctctctgtcttc

SEQ ID NO: 33735 - DNA, 545 bp, Homo Sapiens
aaactgtttctaatgttttgtgttgtttttcccgagaaaatgtaaggggctttcgagaaacactttcatgaattaatgagtggccttgggcaaatcccttgacttccctgggtcttttcaagtctgaaaaggactgggatctccgttgctcctaccatccctcacagccggcacatctacgtagctgacctcacaatgcaaagtttcactcaaacatacacaaaagcctcttttggtctaaagtagaaacgtccttataatccaagtgacctgcaactcttgactctgtgagactgttcccattcgctccgcagatccaccctccatcctccttcaggcagctctgccccacagaggctctgccctccgtggacagcatccacccagttcccttgccttctggctctgactgtggttgcctaatgggaggcactggcatcaggagatgggagatccaaggggttcaataaggatatttattcttttggctccttcctggccatgctgctgtaggttgattgcattcctctaccagggacacctct

SEQ ID NO: 33736 - DNA, 446 bp, Homo Sapiens
caatcttgtctcatggttttgtcaacatcatttagcaaccacatactgaaaactaccaagttccaagcgctgtgagctaagaactagtggtccaagaagataaactagctacagtcactatccttgaaaagtttatagtttaatcacaaagatttaactcacgaacagttagtgaacagttgtatgaagtaaatgttctaacaaatgaataaaatgtaatagaaacactggaggtagagcagctaaccttgcttgagggtcaggaaacgcttcagaagagctgccatcaaatctaggtctagaaagatgagtcataatgcttcaaggtaaaagagtagaaggtttatcaaaccaaagttagcagcatgcacaaaaagatgaagttggaaagtaggctggcacagaggaaacaatatagcagaaaaagatggtgaggagctaagtgg

SEQ ID NO: 33737 - DNA, 443 bp, Homo Sapiens
gagatggagtctcactctgtcgcccaggggaccgccgatatcatcacacagagaactcccgggtggggcagcagaggggagcgaccagcgtacacaggtacaacagcacgcatatccagcaggaggccatcttgacccagaagatggaccagctcccgctgaagaagctctcgatgttggcactttcgtagctgtggaaacaagacacctagccgcggtcaaagcaggaatatattgagatacaattcactaattcacatccatttataatgtataattcaacggctttcaatgtattcatacacagacttgtgctaccatcaacactacccatttccaaacattctcatcacccccaaaagaaatcatgcaccccttaggtgctctccccttccccatggccccctcagcccaccccccgcattcaccaatctactttctgc

SEQ ID NO: 33738 - DNA, 468 bp, Homo Sapiens
ccattttttatggcagctttattgaggtgtaattcacataccatataattaacccttttaaagtgttgaacctgattcagtgctttttagtatattcacagaattgtgcagccatcatcacaatcaattttagcacatttccatcaccccagaaagaaacactgtaccccttagcagtcagtccccatttcacctcaacccccagccctaaacagccactaatctactttctgcctctatacactttcctgttctgggcatgttacagaaacggaatcatggagtcttttgtgactggcttctttcatttagcgtgatgtttgcaatattcatccatgttgtagcctgtgtcagtacttcattccttccaattgtctagtaatatgctactgtatggatagaccacatgtatgtttttaccagatgatggacatttaaattggttccacttttgggcttttatgaaga

SEQ ID NO: 33739 - DNA, 480 bp, Homo Sapiens
tagcagagaaggcttgcacaattttattttaacatgcatagcacaggtgattctcaggagaatgattacccaataacccaatgaggtacagaagcttatatcctttttcacaggggagaggggagaatggggaatgtggacaatgcttctcagagacagcaaatgattcttaaggagaagaaatggacagaaattaacttgtaaatgattgtctttggaattcgaatgagccagaaaagcaggcattctcttgtgaaaaatccattctagttgcattcctcagtcttcttttctgaaagagacagggggacttcagggagaggaagaaggcaatcttgttcattttggaaataagatttcatggtgaaataagaaaatcccagaaaatcccagagaatcccttcttgtgcttgggcacgaagcggggttgggggaagaagacaatattagagggacctggattctgaggcagcttctaag

SEQ ID NO: 33740 - DNA, 532 bp, Homo Sapiens
aacagaaaaccggcaattgttatttattttaaataagaagtcataatactattaggaatagagagcaagatataaaatcatatcaacccttttagataaatacaaaggacaaatgaaatacacaaaaaacaatatattttaaaaatccactgttagtttttagaaaaagatttagcagtttccattaagcactacatcccactattccatttttaggaaggacagatgcttgaggccataggttaccagctcttgtttggtctttaaaaatgcaagtaagttgctaacattttcaaataagatttcaacataactctgacaatgccacaggacacacagtttggctccatgtacacgtacctggggacagtggcagtccccaggtctctgccatgccaagatcaggccccaaggccattcagcaccaggcacaatctctgctttcctgacaactggcctgctttgcttatttaccttagtagccttccaggtaactgacactggtgtttgaacgcttaactttcacaaagct

SEQ ID NO: 33741 - DNA, 531 bp, Homo Sapiens
cggccgcgctgctgtcactgctgcccgagttgcgtcctcctccgcactggagagcagtgccttccacttgacccctgcgtgggcgggttatgtaggcaccaaggccttgttaccggcatctgtgcagggcttggatgggggagcggctacgggagtcagtgtagatgtgtgaccagaagccttttgctcaggcagctatcaataaggcaggatattgttgggagtgatttggaagggacaagcctgagaaggtaccagtggcctcgggggcctgggagaccggcagggactcggccccctccttggtgcctgtgggcggagaggttctctctggcgcatgcagcaggcctctgtcgactgccctatgccttgtgagcgcctctgccccttagtgctgctgagcgtaggcgtcgggccacaggccacccagagtacgtgacatccggcctgggcaccggccccaaggtacaccgaggggtaggtgccctggcatggggcatcatgctgcgcctggcaagtagggcccgtcct

SEQ ID NO: 33742 - DNA, 500 bp, Homo Sapiens
acatgaaaagtagcataccagtcttttgtatttacttttttcacttaataatatatcctagaaatacttcataatagttcatacagatattcctcattcttttttcagagctgcataatgctccactgtttggatataacatagcttattgagcaagtcctacatatgagcatttaggtggtttccagtcttttgcaatgacaaacaatgttttggtgaatatccttgtactgtatattttcatattattggaggtatatcttcagagttcatttctagatgtgagactggtggatcaaagggtaaatgcgtatgtgtggggttttttttagatattggaaaattcccctataaaatggccgtatcagtttgcattcccaccaataatatataaaaacatctgattttccacagccacaccaataggaagtctggtcacatgaaaaccacattctcaacataactagaagacaaagcacctacttcaaattgcctataag

SEQ ID NO: 33743 - DNA, 379 bp, Homo Sapiens
acaaaatgctatgacagactgtacgttaggatatgattatgtacatgcaaacaaatacctacataattgactaggtgaaaagtcaaatttttaagctaaagattttcaattataaaagcaatgtatgtttattttggaaaggttaaaacagaaaaagtataaagaacaaagtcacctgcactactactaaaaacaagagataactgctgtgaaggtaacttccgttccatctttttcaaagtatgtatatattttttaaagaggtagcagaattatgctttgctttttacttgttagctcactagtatttctctacattattattgacaggattacagtactacagaagcacatatggtgggtaacagtcaatgagaag

SEQ ID NO: 33744 - DNA, 508 bp, Homo Sapiens
tctgatttggattcttatacagctttctcccaaacactgaaagctccttccagaatacacaaaattaatttccacatgctcttggtgtcaagagttaagacaattttccataggaagaaagtgaaatgaaacataaaacaataacaaaataaccaaatctactgagtgtctgttatattccaagcacatctgaaaaacctaatttaatccttgtgataaatctattaggtatgtagtatttttgttcccattgtacagatatacaagcactacagcttagagaggtaaaattacttgttccagatacagggagaggtattagaacaaactcaagagtctccaagactcctgggcaaaatggctgtgccagactgcctcccccaaatacacaatttacctcacaaacaaatgcaagtttgtggctgtggaacaatctcaaaacataaactcatccagatttgaaactgatgaaaaatgcagtattctagctatgaaaatacatccttac

SEQ ID NO: 33745 - DNA, 433 bp, Homo Sapiens
tttttagtttataaagaaaagaggtttaattggttatggttctgcaggctctacaggaagcatagcagcttttacttctggggagacctcaggaagcttccaatcatggcggaagacaaagagggaacaaagagtctcacatggcaggagcaggagcaagaggggagggaggaggtgctatacacctttaaacaatcaggtctcatgagaactcactcactgtcacagggagggcaccaaggagacggtgttaaaccattcgtgagaaatctgcttccacgaccattcaccaaggatccgtccccacgatccagtcacctcccaccagaccccacctctaacaccggggattacaattcagcatgagctatggtggggacacaggttcaaaccatatcaacatataatgctgagcatcttttcatatgcttat

SEQ ID NO: 33746 - DNA, 484 bp, Homo Sapiens
aaaaattttttcacctaatggagaaaatttactgaaagaagttcctataaataaagttcctataaatactgagcttccctagtacatgtcaactacattctgctcatgtctgtgcaggcgtgtggatttcagaaagtaaggtatgacctattatgtcttctgtagatctttgctattgtaacacattttataatgagttcaggtactctgaatgctacagaaatgactgttaaccgtgatcacactctaagtagaactatccagtgcatgcttgctcttctgctcaatacaccttatctttactatctcaattaccttttctgactatccttaaaaagtgatcatagcatattaaaatgtttagtaataatttgctttagtaataaactgttttctacttatgagcattcactaaccttatgcaggcattacctctacctccaattgtgtcttaggaacatttgcaatttcaaagtgcaaattc

SEQ ID NO: 33747 - DNA, 516 bp, Homo Sapiens
ctgaaagccatatattttacatttgtgaaatatgaaaatagaaaaatattgagagccactattcatacagagaatactaactaaaacttttttcaatgatgcatatgtgcactacggaaaagtttgtttttagtggaaaaatataaatacagtaaacaatcttaacagaggacttggctgtcaattcccccactctattaccagacacttaactaaaatgatttccaaggttcccttcagctctatatgagatcctatgattccatcttttccaaactacaattataagcaggagaaattatgtcctaaaatattcagaatttaaaaaagaaatctggctagaatatgaaaaagaaaagatactttacataataaatttttcctacggtccctaagtcctgattgcgggactcttaatatttacaactggcttgttaaagaatgcaaaatctaatcatgttaactcatttatctctattttaaattctgttcaaaataacaagggctgaccactga

SEQ ID NO: 33748 - DNA, 492 bp, Homo Sapiens
aaaaggcccagtgctccaaggtggcacagccaggacgggagcctagggaattgtcatccaccctggagccttttccgtctctcagcggctgtcccagccctgcactcaggcaattcctgcaggaatcggtggtctttgggcgtcctggatggggaaccacggcccctgaggcagagcggcacaaaccctccagtggatcccgttctcttctcccagggatcaatgaagcccagggtgtgggagctcagccttggtgtcccggcccctgtggtcacacagcagctattgctatggggttgggatgcagggaggaaaagcccagcgtacccctttccaccccaggccccaacttctctgtatttgtttatttaccttggaaaaggccccacggcccaggcaggaaatgggccaattccaggaggccgaggcggggaacaaggagctacattgtgctcgggcggtggctccccacccgggcctgccgggagccca

SEQ ID NO: 33749 - DNA, 490 bp, Homo Sapiens
actagtaatgccaaaaaaaagaactgaaattataatagcaatttttaattacttcacttaagtttgcaaacaatgaaaaatgagggcaagatcatgacttttagtcttatctttggtctgttccatataaatggattgtaacccaaaattcgtccaaaaagctattaacatttaatcctaattttgacagtatgattattgactgaaatatgtatattaaatttatcttgttaattttaactttgatttcaagtcacagagatctttaaaaaataatagtagactttattcaaaggatatagagttgcttacaaaatacaaggcaaagctaagcaaaaatctggtctcagaaggagcaaaaagcagagcagaatctaataggctgcttgcatacctgtcactggattcgatgaaatcctgttgtttattatgcacatgtcacatacctcaaaaatcaagttcttgggagagggaatttaattggcctaac

SEQ ID NO: 33750 - DNA, 410 bp, Homo Sapiens
tttttaaattcaattatgaacacctttctctttctacgaatttatattctattgatacagccccctccatgagaagtccagaagaggtacctattttgcaattttcagagaataggggtcagtccttatcttaaaaaaccatgttttagccttagaatcatcatggcaggtttctcaaatactgatgaccccacccattactgggaaagaatctctcagtgcgggggctggcatctgtactatgatgaagctaccttggtgattctgatgtgtacctctggttaagaatctcgatgttcaaacaggctccttgagggaggggagggagggagagacctcaactttgctcatgctgtgttctcagtgccagcacagtgcccggcataaaaaagacgcctaatgcccctctg

SEQ ID NO: 33751 - DNA, 390 bp, Homo Sapiens
agactttccttgtttttaatgaccttaatagtttgacagatattttgtagaatgcctttcaattgggatttgcctggtgtttttctcatgattagactgtggctatgagattttgggaggaagaccacagaggaaaagtgccattttcatcacatcatatcaagggtctataatatcagtatggcatcactaccgatgttgaccttgatgagatagtgtttgtcaggtttctccactgaaaagttagtctgtctcctgctgctttcctctgtatttttgggaaagaagtcactatgtgtagcccacaattaagaagaaaggagttattttctacctctttgaggatgttgtgtctactcaaattatttggaatttttctgcacaagagat

SEQ ID NO: 33752 - DNA, 358 bp, Homo Sapiens
cctgcagggcgggggttcctttaattgtgaaaacctttgcccggattaaggcgaccgcgatttctaggatagtcactgaaattagaattggggagatgatgagtgtcaacggaagggttatgggtgacattggttgggtggcgcttcccattacgggcctgagtagggggcccgcggtaatgttaacggctaggcgttccgccccggctcttggttgtatgtgtaggctgatgggttctataataacactaatgggggtaaagggggttagggtgccctgtgggaaaaaaagggctctggcgctttttaaattttagagcgaggccctataatccgtgcccgccctcataggggaggc

SEQ ID NO: 33753 - DNA, 546 bp, Homo Sapiens
accttattccagagcttttattccacaaatgaggacactgatatcgagacaggtggatctcctccttctgaaggacagctgctaacggtagtcagatgcaacccagctctgctggtgccagggattggggtggttttctgatggcagaggcagtccctcaggaggtgacaaagctcctttcctttctcttagcaagtgtgggtggctggcagctgaagcaggccttgggcaaggtccttcagtctggtttactcatctcaaactcagccagagttgaagcccagccaggtccttggaggcctctagatttcctcgtagattttgtaatagaagatgtcaactcacttcattccactgaaccagtatggatttcatatttatatatgcaaagtagtacaatagttatttggtggatgcaaaaagaatggtcccatgctcaagacatccgcaataatcctgagccctcgcgctggcgccatggcggagcaggagagccctgaattcggcaaggcagacttcgtgctgatggacaccgtttacatgccc

SEQ ID NO: 33754 - DNA, 350 bp, Homo Sapiens
gagtgagccaccacacctggcctcatggacatgattttatcttaaaggtaaatggtgtacacacataaaggaagaatcttacttgttccatagtcataaagctggacaaaactcactgcaaccacaactgctttcagaaattgttttgagaaataatgcaaacataactcctttagtcatctggatagtttatgtgcctgtatttatgtgcattttccacaccaataatcatagacgcttgtaaccagtttggttcttaatgcaaaaattttaacagttgtgtgggtgggtcaagaggggagtgtatgtgtgaagcaaagctatcattgtacatattttactaccatctg

SEQ ID NO: 33755 - DNA, 460 bp, Homo Sapiens
agtttagagtcttttattaatcattttgtgtaaaacaacaattaccacaaaaaagctagatttctgacatacttagaaactaactcatgctgaaattatataatccttaggacaagtttacaaagctatgcaatgacaaaaaacattagctatcccatcaagttaaagaaacgccaagaacgaaactgatataatcattaccatgttaaaaattcatgattttttctctctacttttctgtattttacaaatttttaatgtgaatactttaatacaaattgttttagaaacaactgactcatttcagacgtaagaaataatatatattttatatctcaagagtaatgtagacagtaccaagatatttcttatgaacagttctctatctaggtaatctttggaaggagagaacattgcatatacctcttccctgaaggctatgattctgtctcgatcactg

SEQ ID NO: 33756 - DNA, 439 bp, Homo Sapiens
cataccttggtaatttgcctttatcagcacttggagcttcctcattttttaaatagctacatactattctatgatgtttcataatttcacttaccagtagcttactgatggacatacaggttatttccattctttaactattgcaatgagcaatgaatacttgtaagtatatctttaagataaagtcctggtgatggaattgttagtcaaagaaaatagtgacttttgagaactatacatctcatcctttacaatgcaagtttttgtgctaaggaatgtaaatgttccttacaaactcaacctgaaatactgacattcactaaaagcaaaaaacattgctgtaaataaaaccgcaccaggtatacgcatgtgtcaaaacaagaaagcaaacttcaacactggctctgtcagttgctctgcacccagatgtgcactgatt

SEQ ID NO: 33757 - DNA, 372 bp, Homo Sapiens
aaaatttaagaaatctacctctttatttaacaccaaagctaacatcaagtgtttatttaaaaaaataatggcacctgctttggattcattgatgacaccacaatggggtgaagatctacagggaatttacaattttaggctgacatgaaactaagtagtaactcacaaaatggaaattctgcaacaagcctcacaataaacatttccagtttctactttcagagttgctaactactgcctaaacatatcttaaacacagagcacgttttgttgaaatatttctcttaggacaaacacagtagacatgctttaaataaattaaaattgcaacacataaatcattcctaaaacaatcaaggtgcattactttct

SEQ ID NO: 33758 - DNA, 363 bp, Homo Sapiens
tttttttgcaaaagcagtaactatttatttggagaactctcaaagggatgctgaacaagcatgaggcacggataaccaaacccaattttattcttgtctcttaccaccctccaaattttattcactgggaggtactctccctgctatggaaaaaagctgcagcgaggttgtgatgttcttaatagatagtcctgtgatcagtttaaggaacaaacataatctcaattaattagaatgtctaatcctgtgtaacaataatctgcacctgttgcagttttaaatccctttttcctctcccagctctgccccagctaagtctaggagcctgcactgggaaagggaggagtgattggtatgctcttc

SEQ ID NO: 33759 - DNA, 386 bp, Homo Sapiens
atttctactctaagctttactgttttcttctgccagctctgggtttagttttatcttctttttatagctttttaaagtaaaaggttagataattgatttgagagctttctttttaaacacaggcttttaagggtatacgtattcctttaaccattacttcagcagtatttcataaattttagtatgttgtatcatggttttcgttcataccaaagtattttctaatttcctttgcgatttattctttggcctactggctttgtagaaatatactctttaatttatacatatttgttattttcccaaatttctctgttattgatttctaatttcatttcattgtgtttgaagaaaatacttggtattatttctatctctttaaattt

SEQ ID NO: 33760 - DNA, 499 bp, Homo Sapiens
aaaaatacactttaatctaaccatggaatttcacaaacatttatatacaatcagagactaatttgaagtatgttttccattcatttcagccatgagaaaacacattgcagtaaaaattaaagatatccatccataaattacttttatttctcattaaatgagcacagagtcattagtatattaataacagatatgtttattattacatatccatcagtgcggctttcaataccacttgaaacatgcatatcatcctagagacgatcggttttccagtgcttcttatctgatacacattactgcaaagccattataaattactgaggaggtatttggttaaaaaaataaacaataaatcatactgtccatatgaatcaactcttgttactggacaagagtttaacagtatttatctggtaattcctatgttaactggaaaacatcatggatgtattgccatatttcctttttatgttggtgcaaccttctacattttttg

SEQ ID NO: 33761 - DNA, 384 bp, Homo Sapiens
aaaacaaaacattatattttcctgtggtatgtatgtaagaacttcaaatataagacataatttaaaagtttataattgacatagtcagggattataaataatatcacacaaaataagctcttaatgcaagaaatgaatctccaggatagatcatactaatctatccaatccagccctctgttctgaaagcagcacatgaaaaggcagagaaagaaaaataatctctacgacctggcctgttaaacatgtatttatttcctgagtaactattaggtgctagctgtaatgggctattcagtggaggacagtggtcaaagcctcttatgatgtatggcagatgccagaaagatatgaaagatgtgatggtacaaaaaaggaagttgg

SEQ ID NO: 33762 - DNA, 541 bp, Homo Sapiens
acagaaagatttactgcaggattttgctaaccaataagctcccctacagcgttccaagacacaaagtaatttacagggcatttgagtccaactttttgatcaagaacacatctgctgcactaagcaaaggagttgcagcaacaccaaaatcacacttggctctcacggccaaaatcgccgtcacctccgtatgttctccttggtcactgactctccttcctccaagcagacatagacagtgggcacatatttgacaatctgtgaagcatctgacaagcactcattatgccatttggagggtgtactaacgtaactagcattgtggcatacaaagggcaattctaagggtgaacagacttcggagcgtggaaaagaacatgacaatgccaccacctattactgcggcccccacgaggtgttggaagctaggataagtgtcttaaaacactatctcatttaatttttaaaatacaacctttgagtaggtatcatctccattctacagatgagaattaagacccagagaaggcacaaagaatcc

SEQ ID NO: 33763 - DNA, 361 bp, Homo Sapiens
tttgcaattaaagattacttttaattataaactggccataaacccaaatgaggatatagtcattgtagagcaaaatgatacaatgcacccaacccgatatttacattaaaatatttccagtcacattaactttcaaacaaaaagacttaacgaatttacaaatttttccaagacgtgagaagtgaaaaatgtttttgaatgccatctgagcaggatagtaaaatcactagaatagtctttttaagttctcagttactggactgaaaagataaagctgatgaaaattggtgaacaatttgttcctttccataactactatcagattaatttaaaaaagattatttttaaatctatgccaact

SEQ ID NO: 33764 - DNA, 560 bp, Homo Sapiens
gatccattttaatgggttaatagctgctaatccatctgaagcgccttcaagcacttcagttcctggcattagtgtcagatgtgccagagaagattgaaatatttgttccttcagttgcataatatctaaagtaaatttccagtatgacctttcaaatgtttcttaactctttcccactcatgctgtctttcattatacagatgaggagtaatgcaaaaatcagaagtattccaatcacattgtaactgcattctatattctagactaactactcaatctcctagccacattacagattgttggagataattgatttgattagctagtttctggtctatattagtttgggaattccacagcaaagtagaatttttctgccaattatttacatagtctgctgtttgtactgtgaaatgcaaagcaactccagctgccgcggcagtagctgtgacagcaatcaatcccataatgattaaaattaaagtagcaatgaaacactgagagcatctcagaatcttttgaagaatttcagtaataatatgcacagaaggagaggcttc

SEQ ID NO: 33765 - DNA, 410 bp, Homo Sapiens
cactatgcccataataatttattattaacatgattgtgggttgtgaaggaagacaagaaggtgggggcgtggggaaaaagaaagggtaatccataacaaagagaaaaatgaagaggtggaggtgctgaggccatcatcctcctctgtgttatgactaggatgtgtttccagcattggtctggttttgtttgccttctgaatttcaaggattccacagattttgttttctaatactataacacatatattcatagaaaaaagtcctctgccatgttttgagatttcatgaaaagaggatgaagaaccttagtctaacgttagattcctctttacctgagaaaaatgcaatttatatgaaatgtaataaatttcttttttttcttgagacagggtctggctctgccacccag

SEQ ID NO: 33766 - DNA, 355 bp, Homo Sapiens
attcttcaagaaaggatgcttaggcagaaatagcacatctgagaaactggcttctgtctcaaatttagccctttttgaccccttcttctgtgagagggctttttgctggccagagtctagtggacatcagtgcctgtgtcagatcagggatgggcatcatcctgaccacctgagggagtgagatgtgaagtcactttgaatgcaagctagcagcaccctgggaagtgagcccatctgctccagaagagctaggccgtgcaggctccggaatgcctggctctgctgcagagaccaggctgtgacttgaggttaagccgcctagagacaaagtcaggatggcttgatctggacactg

SEQ ID NO: 33767 - DNA, 582 bp, Homo Sapiens
tttcatgataagaaacatacaaatttatttacgggcacatggacacaggagttcggcaaatatgagacccaaagaagggccagagatttgagacttaaataccctctttataggggagaagaaacatgggggatgtaggtaatcctgatgggtagtaaatgcttttcaggggaaatgcatgggcccaaagagcaaacaacttggctaggacgaagttcctctgagctctgggggaggtggtggcaatttgtgggaagtgagagatagaatttcactgtgaacaaaggtggccttattatgcagatgaagtctcccaggcaatctctgggagctgccctcagaaaagtagatgaaaactctatctgggtgtggtgatgacttttagtctttttacctgctctggtcattaatcttttctgattatttgatgagaattctaaaggagaaagttttaagacaattgcatttcttctggaagaacttcccttaatggcataaagggacttcagagaaagcccctgtctgtgcttcaggaaagaagggatcagagcaggggcagagagagaccttggttctgaggct

SEQ ID NO: 33768 - DNA, 447 bp, Homo Sapiens
gcatggctaaaatttattcttatgttaaccaatatattctataaattgggagaaaatattaaacacatgaaaagtaaggaattttcatcattaatatataattaatatgacaagaatgtggtttatgtttttatctttacaagattaaggaaaatttggtggaaggaagaagaatgtataatcatggggagcgtgtatgatactggagggagccttttgacaacggggaaatggcatcgtgagatatactatggtcatagctatgtaggaacacaactacctgtggtctcccctgtcaaatccactgggcagtgttcaattaccaacattgaggtagagctcactctcccaggtcagaagagaaaatatatactgcagtcagaatccactgagtaggaagctcctttcagatagaggcaagggatatttgactttttatctctagtg

SEQ ID NO: 33769 - DNA, 501 bp, Homo Sapiens
tttctgtttacctgaactatcaattaatgatgggagggatgttgaattcttcaaatataattgcacattcgtctactcttttcagttctatcagtttttgtctcatgtgttttgacattttgtttttaggtatatgcacatttagcattgttatgtctttttggataattaatctcttttctattatgtagtgctgctttttatctctaatcttccttattttgaagtctgcattgtctgaaattaatatagatactccagtttcttttgactcattttattttcccacccttttcttttcatctgctggtgtctttatatttaaagtgggcttattgtagacaatgtatagttgccctctgcttccccttggatgagtcaatatagtttttttaatccgtgatgacagtctttgtcttttaattgctgtatttagaccattgacatttaaagcaatttatggtatatttggatttatataaaacatgtttctgttttaca

SEQ ID NO: 33770 - DNA, 386 bp, Homo Sapiens
ttgtcttgttctttctctgaagcttttccaccactaggaatgttgtacattaacatgggaaagcccaaattaaaggaagctagtggtttggcagtttaaaatagtttagaaatagttttgctaaaatttatttccactgtcatgttttaacttgttttaatagactgaatatatcattttattagttgtagagcagcctgtgaatatttacctgtcggttaggtgcatctattacagggaacacagaggagagattctttaactttagggcgctgttcatttgctgagagtgggttggttaaaacccaagtttggctcacgttagtggaaagtcactcagtggtaagagggggagaagggtgttcctatttattactagtgaattc

SEQ ID NO: 33771 - DNA, 386 bp, Homo Sapiens
gttccatgtgaccatttatccagggtttacaaacaggcaaaacaaaaccagaggtggactctgactggagccatatgccctgaaagtctaaaggaagcatcaggttttcaagagtgggctgctctggggtggagggaaggaggcagaagggaccccggggatctcatctgcagctggagagatgccagctggaacaggccacctggcttggctgttgcggggagccaggctatgctctggagtctttgccggtgttttctcatttcaccagcggccggggaggaggcatcactgctgccatccccattgcacagagggcgcctcgaagcatggggaggcatcatgctgggttggcattgctcccgagacttcaggtccaccacaga

SEQ ID NO: 33772 - DNA, 496 bp, Homo Sapiens
ataagttcactggtttttagtctatgttctatctactctaatcacctgaacatgtttcctagcttaatttcatgtttttcgtctgtgatggagtgataaaatgaacattttctgtttataactttttgcaagcttaaaaaatgccatataaaattgctattgacatctgattcaacatggtgggatgagggaaggagttaaggatgagattttgagcctgagttctgcagtgtcttttgcacctgtctcgccttccttcaccattgtcattccccagaattcaggcctaccttatctttcacatttgtgatgcatttacagaaaaattggctcagtcagggaagtaatagttggtagtgtgtatccagcattgctcacgagttttaaaaataaccatgaaatatataatatacatactgaaagtacatttttctccaaaaaacctacttctcattaagtcatagagtgctaacactcatgtaatcccagtgtctta

SEQ ID NO: 33773 - DNA, 417 bp, Homo Sapiens
actggatctccctctgtctcccaggcggaggggcacagcaacgcaatcacggctcacttcagccttgacctctctgctcaagcaatcttcccacctccgtctcttgagtagctaggactacaggcatgtaccaccatgccaggctaattttttttagagatggggtcttggtatgttgcctaggctgctaatagtctgatttggaagggatattaaataagcacagccagtcagcatccacccattgaagattcaattcaaatctacacttgttccacgctttttatataaagaaacaattcctcttatttccaaaataactgtacctatcctatataactgcaaatttttttataaagtaaatactggtaagtacaattcaaaataagacaaaatcactgcctgatatacttagtc

SEQ ID NO: 33774 - DNA, 530 bp, Homo Sapiens
atgcaaattatattttcaattataaatgagacaagtttgcagatattttagaaatcagagaagggaaacatcacccacagtccctctgctggaacagccacagttggccttgtcctacttacgtccttcagtggatgcttctgggtgctggggttctccattcaggacactgcactctcggaggtgggaggagactgggttgcgtctgtgccgacctgggatgcagtttcaggtcagaatcagaagatgtgcaagttacgcatgacacagctttttaaagtgcttttcccctgcactaatcaagagggaggtcagccctcaggtgtgctggacccgggagggactgtgagctgtaagaagtaacgagccccttgaacttcacaagctggccagggagccatatcccgaatgccactgccacttcctcgtggtgcaaggcttgttgggacctgccaccttgctgagggaggtgctgaagtaggtggtttccctgttccaatgcggtatgcggtcttgcaggccgaggcatt

SEQ ID NO: 33775 - DNA, 541 bp, Homo Sapiens
aactttatcttgttttgattgaagaaacatgtctaaaaataccatctgagtgcaagataaaaaggaaatagcaattcaaggcacaaagctaagtacatgcaacaatatagatgatttgggggtgggacagtacagaattcagaactgatagaagttatcagctccatatttcagaaagacctaatgtcttccttctgcttatactgttctgacagaattttaattttggcagagatcactctcgatgttatgatgtactgattcaaaggtcccaaatcagtaacctgatcctagatagatcctcaaaggtcaactgccactaggtgtccccttcttgatcattcttcatgctgcctggattggggcatggctaagcactcaagtcaaaggattagttggcaatatcctacattgtcaacaaagctttgaagaaaaacagagacagaaactggtatttactaagtacctaggtgataaattattttcataaacattaccctataaaacagacaactctcctgtcccaaatccaaacagatct

SEQ ID NO: 33776 - DNA, 357 bp, Homo Sapiens
taaattttattaagaaatatcatacatacaaaagcacataaacatacagattaaaaaaggaaatgcccacaggcttcagaaacagaccctcaccagttcttctgaagacccctgtgccctcatgatcacctctccctccatcaaaacggctaacattaaattttgtcttaatcgtttccttttatcatgtatttgacagcctgtttttgactttcattgaaatggaaccatagtgatgtattcttctgtgacttgctttttttgatccttctattgttgagttttgtccatgttcacatacatagctgcagttcagtttcacttctgtggaattccactgttggaatataccacagt

SEQ ID NO: 33777 - DNA, 458 bp, Homo Sapiens
cagaataaaatgggaagtcactgaagagtgttaagtagagcagtgacatgactggacaatctatttacatcagtatggactcgtgtacttattctatggatgaaaatgcaatattatcattatttttgtggttgctaaaattggtccagttcttaggagctccttcaggtaggttcccgtgctttgaacaggttttcatctttttaagcacttcattactttctggcaccacaagatgatctaggcttaccttgtattttctctgcaccagtcccgtaaggaactacttctcaaggagccctggttcctttcattgaagagcaatggttggagaccaagatctaagcactaggtattctcaatgctactggggtgtcattgtttctatgccctctcaggggatagaggtaggaaatacacatattcaaattaactcatacatatgcacacatctatat

SEQ ID NO: 33778 - DNA, 391 bp, Homo Sapiens
aatttaaaagagctttacttggtatacaatctccatacaattcagtaaaacaaattataaaagctctttgcaagattttacccaaagggtgttaaaacagaaaatcaattgccacaagaaagtaagacaccctctcatctcaaaagcttttttccatgaacaaacattctcttaggccaaaaggttgccatgtttaaagtatctgggagcatattaaccaagatataggatctgagaatacttaattgattttgagatttgaattaaattttaaaaatcaaatattttgtatgttaattcaggtaggttttggccaaagatgaactcaaatttttacatcttagacaaaatcaatatggaatcagaatagacatttttacttttagttaac

SEQ ID NO: 33779 - DNA, 398 bp, Homo Sapiens
tttcaaataaaaagagttttaaatcacattgaactggtcccttaaaactagagataatagaaagcatggcaagccatttcccagtccccctaagactagagattatggaagccccagcaagtgattctcacaatctgcatacagcagtagagctgacagaagccctagcaggtaaccaccagtcaccctcaaaacaagaggcaacaggatgccagatctccacccctcaatcacttacaaacacaaaagatggagtccaaacatgaagacctccgtcatcgcgaaactactccagcaagcacccctcagtcacgtccaaaactataacagaagtccctgaaatgaccccttcagatgcccctcaacactaaagaatggggactccaagcccaatggcc

SEQ ID NO: 33780 - DNA, 761 bp, Homo Sapiens
tttcatgataatcaatccattttattaaatggggggctcctctaatttttccattttcattgtcaactgaccaagaaaaggtgcttgtcaaactcctagatgcacacaaatccccatcctccttgttaaaatgcagatgtggactcagtgggtctgagatgggcctgagattctgcacgtctaacaagctgccaggaaatgcccaggctgctggtccacagaccacactttgggaagtaaagtttagaaagccatgagaaaaacaggaaaattcaaaatgctattagaaatagtgcttgatttaatttgtttcctccttaaaacatttccagtgccttttcttctttacaagcctttttttctcagataaatggaagtaatatataatacagatatcacctagaaatactgattttacaaaagctttcagttatctggaggactaatcatttggcaacaaagtaacaaacataaaaataaaggtgattccactcaaacttcatttggtgactcgtgcatgtaattttgcagtcacatattttctgaagtaactcaacatcttcttatacatcaacatcttcttattgtttgacctgggtaaaactctctcgccagtcccaagccttcctgtagggccggtctcccctcctggttctgtcccagaacgtgctgattaagcccactgctttggcttctttgccatcgaggactcgcgccagagatatgagctccctggccaaggacattccaaatgggcgtgc

SEQ ID NO: 33781 - DNA, 390 bp, Homo Sapiens
atattttcaacatcattgatttctgctcttatcttttctatttccttccttttgcttgctttgagtttattttgctctttttgtctagacgagagattagacaattgttctgaaaccttttctgtttcccaatgttcatttactgttataaatttccatcttggggctgctttaattagatcccacaaaattaacaatgttgtattttcattttcttgcagatcaatgtattttttatttctaccaagatttcctttttgacccataatatttagaagtgtgtgtaatttctgtgtttggaaattttcttgttattaatttctagtttaatttcaatttggttagaaaacacattttgtaagattccaattcttttaagtttgttaagat

SEQ ID NO: 33782 - DNA, 522 bp, Homo Sapiens
cactgtgtttcacaatgagaaatatattttatatcaagaatgagtacaatcatatatgcatgagatgcctcctgtattttccattcattgtctcctcttttatcatatcctatccagagtgattcagtttttcacacactttgaaaacatggatctaggcatgttataggaaccaagatagtatgcaaacttatccaaaggattaagacataactcatcttttatcactttgtctttctctacatacaggggctattgtttctgtcacctcagcatgcattcacctactttctggtaatgacagcataattttccttttggaaattttccttctccttgttttagtccataggactcatgtcaatgccctgcccacctctcctgtctccctcccaccccataattctgccagctctggggaggcatgccatctccttctgggcaggcagagtagctatctctctgaccacaaggactgtctcagtagtgggcatataacctaggcaaggccaaatcagttct

SEQ ID NO: 33783 - DNA, 428 bp, Homo Sapiens
atatatatttattatagatttatgataaatttaaaaatgctattggaattctatatttacacatgctccatttatatacacgcaaacaaatgtcaatatcaatggtaaaattttaggattttaaagaggcacatttcctcctacctacccacttccacatattcattactctaagatgagttttcataagcaacatttagatttgtgaaggaaaaaaatgaatatttctagtacttatcctctttcctttcatgcttttgtttgagaaaggaagcagcacataaaatctaaaacagaaactaaggctgtaagaccttctgtaatacatgttcacactcatgcatgagttgactgtaataggtcagaagatatttgagcaaagtaatgcacttacatgtatatgcactgcatataagtgatactcttca

SEQ ID NO: 33784 - DNA, 401 bp, Homo Sapiens
ggcaggattttaacacctttaatgagatataagttacatgccacaaaattcactcatttaaagtatataattcaatggtttttagtaaatttacagagttgtgcaaccatcacccccaaaagaaactgccagactgttttctaaagcaagcaaaccatttcacattcccaccagcagtgcgcgaaggttctgatttttccacatcccctccaacactgaccgtgtccttttaattgtaaccatcctagtaaggataaagtactatctcactttgagtttgttggcagtttctcataaagtgaatcagacaccttctccatgatcccagtaggggtcccatgggtgcaaacctatgcaaaaatgtatcactatgcatttaatattagcctactagatacact

SEQ ID NO: 33785 - DNA, 380 bp, Homo Sapiens
gcagcttttttcggcctctttatttagaacccgggggactaggggccggggcagtggtacagacggctcaggaaccattttaacagacttgtcttcaagtttcagataaacacagtcataataagagagacagcgaaagcgcgaagagactgcaagctagatgggcatgtatggcagctacagcttgtgagtgacccccttccccagagtccgcgatgaaaataaagttacacttgtcaataaccagatgtgggagatggagagtgcctttggcataaccaataaccgagctagtgcgtggcagagcggtccacgcctggacataaatagaaaatataagttagtataactttaaaaactttttgtacaaatatacatgg

SEQ ID NO: 33786 - DNA, 463 bp, Homo Sapiens
ataatgttctattcattttaactctctcaggcggcattggacatgtgtaatatattttcaccataacagcatcttttgctgagataaaaatgattgtaaatataataagcaggagagcatatatttagctatccttaaatggatcacatttaagtggaaaactttttccccaacacacgtactcaagtatgaaaccatgtctttgtaatgcaccctctacttgtgcccaaagttcagtatatcaggaggacagaattgttttgtgtcagttttgtgtttgatgttaagatagcatggggaggggtggtggatcccacctggaataaattttgagttttgtttgatgcaataactttcatcacaaaagcatcttgcccattccgaatctgtttgcagcatgaccttgaacgatgtgcagtctctgatggactttataggaatagtttagagcagcaagacttta

SEQ ID NO: 33787 - DNA, 517 bp, Homo Sapiens
aaacaaaaaaggccagctaacattttattggaaacaaaaaaaattaaaagataatgaagcaacatttttaaagtactggaagataaacattgtcagctgggaattgtaaactcaaaaaaactatttttcaagatgtaggggaaataaagattttgttcaggcccttagaacctgaaagaaatcatcaccagtaaaacaacactttaaaaaatgttaaagaaaatgtttcaggcagaagtaaaataatatcaaaaggaaatttggatctacatagaaaaatgaaaagcactggaaatggtatcaacatggttaaatatataagatccttttatttctgtttgaattcaattgattgtttaaacaaggggtcagcaagctatagcttcatgggtggactgcctgtttatgtgaacaaatttttactgagacacattcatgctcatttgtttatgtattatcaatgggtgctatagaattacaaaagcagaattaagtagttgtaacagagcctaatggc

SEQ ID NO: 33788 - DNA, 447 bp, Homo Sapiens
ctcaagtttgaatgtatttctacctgtcttactcatgaacattgctggcattcagatactgatataatgccaccatattccttatgctgggaactgtgtactagggagggccggggtgggttacttttaagcaatgcaaatactaatgcccaagtttgggtcagactagggctgtccaagccctagatgatgagccttgagcaaggttgaagagacttgagtaaggatgagaattaatgaggcagtgtagagggaatgtcttttcccaatacacaatttaggtactatgactattaactagaagaaggtaagagccagagggcaacagtaagaaacagccaagaggtaatgaaatcttaaaagagatgctggtgttcaagctatatgtgtgaacagacatggaaaatgaattcctaaagtgaaactctaatgcaaagactgggtgga

SEQ ID NO: 33789 - DNA, 407 bp, Homo Sapiens
aattttatacaaatttatttgcttcgatttatggaaaactgccacctgttcactagtctcccccacttaattcacaatgttctaacattttaaaagaacaaaagcaaaagaatgaaatcggggaataaaagtttgttctagttcatgtttgttcaagcactgtgacagatgccaaggcaacagccatgaatgagacaggcatgattcctacctgctacaaatgaaaagaacatgacatgtgaagagccttgacacccatacgatcactgatggggccaaactccctgagaatccccgctaaagattcccttgccccagactaaataatacattcagataatttccctgggttgctggaaacagagttgctatttcaaggtctcatattccaaagctattccctggac

SEQ ID NO: 33790 - DNA, 358 bp, Homo Sapiens
gcctactgggacccagaagcggggtggctgccaaaaaaccagaaaacaggtgggggaaagtgggaaaaggcccataggcgggggttataatttacccagaaaacccccggccatgcaaggcattgacagcagcaatagctgcaccaatggaggggcccttcacatccccatggccctgagctgaattttggccacaaaaaataggaaaaacccctccatgtttataacatttttaaatcacataatccttaatctggggatcccacccaacttctttttcggttggagggtaaaacatgttaaagagttggaaccattgggtgccaaggggctgacccaaggcaactgcaactaaagc

SEQ ID NO: 33791 - DNA, 406 bp, Homo Sapiens
tttgcatgttaaacatgtatatttgatatgggcatgtcacattttatcatatcatagctagctctgaagatgcagcataggaaagagacgagaaggctgtgccctcacccgtgtggagagctgtgtgaaacggagtggcctccagacacagcttttattgccagtattcatccactgatggacatttgggttactcccaccttttggctcagctgtgaacatgggttacaagtgtctgttccagcgccttatttcagttctttccagtatatgtcagaggcaggatcgctgggtcgtttggcaattctgtttagttttgtgaggaactcccatactgttttccccagcagctgcgccattttacatccccaacaacagtccacaagggtttcaatttcttcacatc

SEQ ID NO: 33792 - DNA, 454 bp, Homo Sapiens
caaatttttcattgtttttttcttagttttgttgggggcatttcaacaactgatccatctagaaaatttctggggtaaagtatgaggaacagattcaactttctttcaagacaatgacctagtggctctcaatccattcatcaatttctccagattttaattaaaatatactcataaagcattatgctcatttagcctgttggatttattttacttaataatcacaaattatttatattacttgaaaatttacattcatttataatctcctaacaaaattttatttcaaaaaccttaactggcatttaaaatactattattataattatcttataattatctatttccttacaataaacataatatactattacaatggttttgctgaaaaatgttttctccatctaagcattcttatagtcagataatttgatttctaggctattacatgaat

SEQ ID NO: 33793 - DNA, 372 bp, Homo Sapiens
gtgtgaaccaccgtgactggccaaaagctgtttagaagattttattccatgtaaatataacatatataacatggcctcatttcatttatcatgtaagcatgataatgcagaacaatctctccaaaagttatgctccagagaacattattgcagaagacatctttagaaactagactatctggggttcggggagacacaaacactgtcttcctacatcgtctcctgaccttagagtaagtctaaactgcaaagaccttgccttttgtctgacagcctctcagacaacactcttcacactctgactatacccaaaggattagtgaccagttatttcttctgctaggacctcagcctcccttccactttcacact

SEQ ID NO: 33794 - DNA, 463 bp, Homo Sapiens
aaccctctccaacgcagtcatttatgagccggttggtgataatgtgtggacagagacaactcagctagaggtggctgtgtcaggggctgctggtgccaacctcaacgggatcatctacttactagggggggaggagaatgatctggacttctttaccaaaccttcccgactcatccagtgctttgacacagagacagacaaatggccatgtgaagccctatgtgctgccctttgcaggccgcatgcacgcagctgtgcataaagatctggtgttcatcgtggctgaaggggactccctggtgtgctacaatcccttgctagacagcttcacccggctttgccttcctgaggcctggagctctgccccatccctctggaagattgccagctgtaacgggagcatctatgtcttccgggaccgatataaaaagggggatgccaacacctacaagcttgaccctgc

SEQ ID NO: 33795 - DNA, 541 bp, Homo Sapiens
aattatccaaagtgtctggagggggagggctggccattctctgcctcctataagtggggacttgggtctcagcaggttcaaaccaggttccacctgggagatcacaggggctatggggcagaggcactgggccgagtcgaactggcttctggtgtggatgctgctgagcaggcatgtcccttggtctgggcctaccgtggtggcctggagggcacactcgcccatgaccacattgtgtgcctgggagcgacggaaggggcttcctcctttgctggcagattgctaggcaggcaggctgccaggaagctccaccccactcggcacagatctgcagcctctgctaatatgaagcatcattttgcacttgcttttcttcacctctctgtttgcctcccaaagacttgtaacccaagcttgtgaattgagctggctgtggagaagcagagcttctcgtcatgagagtgtcgcggccctttctttgcagcactgaggcaggcctgcgggaggtgccgagtgctgtgctcatagggtgttcgatgga

SEQ ID NO: 33796 - DNA, 555 bp, Homo Sapiens
acattttttttataacatttatttaggcaaaaaaaggcccaaaacaaaaatctgtacacacaacattaatacttaagtgatgtcctgatttaaaatacagcatgattcatgtacagaatactcccattcatctggccatagtgagaacagtgccttcagtccagataattgagagtctttgaaatatacacactttccaatgaatttttttatatccttagaaaggagttaaactgttctatcagaattcaaacaaaagataacttctctcacactcataagtcagtgagaatttgacagtgggaattctacaaaagtcagggatttcttaatttttgttgttgcagattatctgagagtataaagtttttaaggaaaaacaatgctcttaagatcctgcttttaataaagtgtctcagctttcattagctaagtagcttcttccttctaggctgcttaaaataagcttaaaaggacccaatttgaacagtttttcccaaaataagtccaaaattaaacacataacattaataaaatagattgatgatttcccac

SEQ ID NO: 33797 - DNA, 452 bp, Homo Sapiens
gtgctagtggcagaaaagtaatgagagatttattttagaggaaaacatccacagaacttgatgacagggagtaggaatgagacgatgcgtgatgagctcagtgtgccacttacagaggaagttgaagacaattaattttcaaacctgggtgactaatggttaggtttttggaaatacggaatttatgctggttttagacacactggttggagatgacaaggggacatttaaggggaaatgttgagagagttgcagcgtaaagctggagctccagtgggccaggagcagaagagaaagatgctagctgctcacagaagtgggaactgaagcatctaaggcaagtcagatgttgcggagaggaagacacctcattttaagtgacagttacaccatgcaccagaaacccagagaagtgaagtggttcgctcgaggtctcatggcaagttagagac

SEQ ID NO: 33798 - DNA, 569 bp, Homo Sapiens
caattttagcagattaggttttattttaactgcatggggaaaaccacatagataaaactatcttattgtttatcctttacaattttaaagcaaaacaaacacaacagcattttatttatttaattgtagggcatccgtattttcacatattggattttaaaaaatctctgcttacaagaagaaacgaaagcccaaacaagaatgtagtatgtaagtgagtacaaaatgagatagagtagaaggcaaactgattacctaagtccccaagaaggtcaggaaacaaagtgtaactcagatccaagcagggttaaccaggaaaggctgcatttctgtgtgcacctgctgctttcttcagcactgcactgtacaacattctggggcagcctgagagatgcagactatacaaatatagtctcacatctcaccaccaaagcacaaacattccagaggcatggaagccaaagtgtaaacacttctgcagtcaactcttaactattcacatttacagaaggaaagagcaaaggcaccactaatccaagaatagataaatggaaagatcactgagttag

SEQ ID NO: 33799 - DNA, 447 bp, Homo Sapiens
aattgtacatgatttaatatacatatattgggggataattactacaatcaaattaacatatccatcaccttcccccacaacaagttaactctcagatttgttcacattgagcttccagcagtttatcaattatagcttaggtttttcctactctgccctttgttcccacggaggtttctgcttgttcccagtaagttgtgattctctgtatccacgtgtctttctccaatttggggggcttcagtttgctctgtgacctccattctctgatggatctaagaagagttgttgattttcagtttgtttagctatttgttaggacagagtgacaactttcaagctccttacatgctgcatcagaaaccagaagtccattggttttttacaaatagtatttatcaacctttaataaatcataaaatttacttagtatatttatcttttgct

SEQ ID NO: 33800 - DNA, 501 bp, Homo Sapiens
aaaccctaatcaatagatggagacagacaaatattaatcaaaccacatttacccaatgccactaacacgcgaagggttcgaagtcaaaaggatgtttggatgtaaagtgaattcttaatcgccggatcaaacatatatagaggaaagttgatccaataattacccgaaatccgtggaagcctgtggctacaaaaaatgttcaaccgtagaagccgccggaaacggtgaagggagactccaagtactctccggcttgtatgagggctaaattcagaccccctaaaatcgtataccgcatcgctcaactaatttggttcacgcgctttctattacactattgcgagctcagatgattgatactcctgatgccagtaatacggatgtctctacgagtgggacttctaagagatttatagggtagatgcctgttgggggccaacgccctcctattataggggtctgcgctaagctggactggtacaaagttccacaaaatcctgc

SEQ ID NO: 33801 - DNA, 351 bp, Homo Sapiens
tttccatcaatagaacagtaaaaactgaattatgatggatggattagtaaaacactacacagcatcaaaaataaactcagccacatgcaacaatacagagaatcttaaagacatagtattgagcaaaataatcagtacacacaaaattccacttatacaaagctcaaaaacaaaattaagcaatatttttagaaatgcacttataaatgatgactgacccactatcaaggaaagtatttaacattgctctgaaagttctggaaattcttgattttcctttctcaatttctacacccatcaccacgcccagtcttccccaactcactaaacagcaccgtcatccatttagca

SEQ ID NO: 33802 - DNA, 406 bp, Homo Sapiens
cccggttgcggttcttcacactaaacgacacggaagcataaacagggccgactgccgtgcccaacgactgagcgaacacccatgacccgttccaagctccctgacggctcacccttactgaaaacagaggcggcatgatggaaaaggaatcgtatacctctcgacccttagtgaggaggcgtattgaccgctcttccaataacttaatcactgactcgctgggctgggcccttttggtgcccagagtgcaataaacttaataacaccccacattatggccatgcacaaaaggaaatggtttcgcaccaaagaacatgtaaacagccaggcagtggaccgtgatgttccgtgtaaaggacatgttgctgatgaaaatggataggctgcaaacgactgacgagcatga

SEQ ID NO: 33803 - DNA, 361 bp, Homo Sapiens
ctgaaacggaagctgggtctgtatgctgatcctcgtttagacccttgaccaaggcattggccttgtcctagggccggaacagcctgagcccctcggtaatacggtcgcgagcactcttgccattatcggggtgggcaacgaaagcaccaacagcaagctgggggatgacaccctttgttacattgggctcaacctaccagggctggacgaggcctttgataacattaccacgtgcactgatggcctcgacattgccggcctgaatgatctttatgcctttggccaagggatcatcggcatagcgcatgaaccgcaggaacaagatgtacaccccgccaagagattttcattttggtgatcg

SEQ ID NO: 33804 - DNA, 569 bp, Homo Sapiens
atttttaatagactttattttatagagaaggttgaggttcgcagcaaaattgagaggatggtacagagatttcccatacactggtaccccacacacccacagcctccccacttgtcaacataccctactagaatggtacatttgctacaattgatgaaactatatcgagatatcattactcaaagttgatactttacactacgcttcactcttggtgttaaacattctatgggtttggacaattatataatgacaccgttcccaccattacagtctcatagggaatattttcactgtcctaaacatcctctgtgccccacctgttcatccttccctccctgctaacccctggcaacctctgattctttttctgtctccacagttttgccttttccagaatatcatatagttggaaccatagcgtatgtagatgttcagattgtcttccttcacatactaatatgcatttaaagttcctccatatcttttcatggcttgatagctcatttctttttagcaataaataatattccattgtctagatgtaacacagtttatccattcaccta

SEQ ID NO: 33805 - DNA, 354 bp, Homo Sapiens
tttcactattatagtcactctggggaatccaagcataagcggacaaatccaactacaactcaacagggtgcaaatggggagggcagggcaacatctatgtatatgttcagctgctccagcaaaacagacagcatggcttccagctgggactggggggaaagaaccatttccaagggggtgtgttcccctttgtcgggtgtggagggctgatactatgcatgtggagctgagcaacgggctgggctgtctgggaggttggcagctacaacctagggtgcaagtgggggacagcggaactgtgggcctgccctgggtgccttgcccttccatcctggtgccaccactgacaaccaa

SEQ ID NO: 33806 - DNA, 508 bp, Homo Sapiens
caaaattatgaaaatttatgaaaagacgaccagggggggtttttttccatttctactaaaatgcaaacaagaagaaatgtttaaactgcaatgagtcaacatcagacataataattatttgctgcaaaatgaactaccaacagagtttcggaaatctcctctcactacagagcatgaaatatggtcaatcacaaaaccaggatcagttaaaaacagctcaaactgcaggtaacttataggctaaaaaactttgctaaaaaaaggctttttcccccaatttttaaaattctgaattcataattatgtgtagaataacaatcaatttataaactgaatacaccatactttaaaaacagatggcccatatctgctgatcctacctcagcatcacttttctaggtattttgcagaaacaattacatttacaaaaggcccatttcataatgcaatctggttactaaaccaaatcaaactactcgaagagcagaaggtctgctgttgaaatatg

SEQ ID NO: 33807 - DNA, 559 bp, Homo Sapiens
tttacaggaatattttttataaattttttataagtaggtacaaagaagtaatacccccttctcgcacctcactttgagcccactgccctgcatgccagctggggctccaacggggcacatcacagtctgcactgaggctatcaggttgaaatgaggctctgggctactctaggggaaaatgaggggaccttaaggatgaatacattcatttattcacatggcaaacttttacccaacacctgtcattaagtagagttggtggtcgttaggtcctgtctaaactccaccctataagccaaaggagaggtgccgggtgccccgccaggagacagaagatcataaggaaatgaaatgatgttcttgttctgtgcctcgcaccatcccgagacaagaaatgttaatttccatacaatttttgaaacaacaacaaaatatataaagtatttcctctgtgtaaaagagaggggaaaaaacaactatgtgtatatatagttataagcagttggggcaggacaggtctttgcagtgtgagagtcacagaaagaatctacccctttgg

SEQ ID NO: 33808 - DNA, 419 bp, Homo Sapiens
gttgggagaggaggtagattgccaaattgaggcattttttttaaactccccgagattttcttctttattttatattttcatttttcatcctaatttactgaagccattttctttggttagctttagaattatctttctttatactaaccagcttagcatgtaataattcttgcccatgtgactacaaaacattagatatctccacaaataaaaacgagattcacctacacaaatattccttctctttaagttcacaaaatgcaagaagaaaagaaaaatgatgttaggttgtcagtaaggaaagcatttctagatgagaaaaagaaacttaagtgttatttcccccctacagttttgaagacccggctgaacacagcataaaaattgtcaggaccagtgcattctctttacagtaggag

SEQ ID NO: 33809 - DNA, 455 bp, Homo Sapiens
agttggaaaaggacccctaatggaaaggtttccctttggcctaaacggggggggcattccacaacccccctggggaggtcctcaataatgtcatgaggaggggggccatcaacataacagcccactgacggggcagcccccagaatcttttaaagggtccacaaaaagttccctgcctaaggatcggggccccatctgtcgagcaaggtggacaaccccaccaaaagggatatcccccaccgggtaaaaggtttttccgttctcttccgcccctggggggccccctgagggctctgagaaccagggcaaaggcaaaaggccccacccaaatccgggcccggccggcttaaaggggcagtttcactgaaaccccaacgccctcccacccacccctgggctggggaagggcataaccaactttttttggacacccaccccgggggccgcttttgggg

SEQ ID NO: 33810 - DNA, 365 bp, Homo Sapiens
gctcaggtgatcccacctgtgggaaattacattatcaatcctaatttacaggtaaggaagcccagacacagattgttaaggaacgttcatgaaatcaacagcttctcagaagcagggttgagatttgggcccaagtttacccagctcgaaagccagtgttttcatccacgatatactactgcctttacaagcttttcctccaccaacctacctatcatagtacccatcccattgaggacctttaagatcagagtacatggatctgtagacatgaacccatttttgcccctgttgaacttttacaaaactaaactggcagtttggtttctcagttaccactagaattaagtcagagggactataat

SEQ ID NO: 33811 - DNA, 456 bp, Homo Sapiens
gggatgttacatacaagaaatttattaggagaaacacctgggaagcataaaggggagggtgccaggagagcttcagagtatgccaggagagcttcagtctgtgtcacaggtcttaaacctcttgtcagggcctggaacacactgtgctgtcccttggggaaagccctttaggaccatgatgcctttgaaaggtttttgtgtcattgtaaatgtctttaccttgaagattttctttcaaatgatggaactgccagctggtgtattgtagggtgcagagacgcataatccttgaatccctcatggccattgttgcttcatttcttgtgctagcaaactcttgatcacctcaccaggtagggctactgacttcctgaggaaagactcacagtccctttccaaccacaggcagaaaatggctttcagaggacgtgcttctaaaagtcctgttgccatgat

SEQ ID NO: 33812 - DNA, 350 bp, Homo Sapiens
ggattccaaagcatttgttatttatggccactatatagggcacacacaattgccaagatgatgaaaaccatgatgggggtaaaaaagggttcctgctgcccagctcctcatagagatgggcatcatccacctaagggagggtagggagggcttttggctggggggatgttactgttctaacagttggctaataaaaggcctaaagggcaataaaagcccagctacttgagaagggcctatatggccagactttaaaatgtaggattgaggggcaagtgcatgggtgaggaggatagggaactggattcttatggctggagggctctaaggaccacgggtcaggggcctta

SEQ ID NO: 33813 - DNA, 457 bp, Homo Sapiens
cattcaacaactttaattttattcaaataaattattttcacagacattttgtttttagtagatgttattagggattaggaaaaatgaaagagattgacatctttcaattgacagagatgccaataattttaagtataattttttaaacactttgttcttaaaatgagaaagaaatgtaaggaagggatcactagcctgggcgttagcatgtccgaatatgataactaaacctgctgcaattatcttgcaaccagggaggagctagcttgaaaataaagccaacacagatgacaagcagaaaggggaaagaacctaagtcgttgatgatgctattgagctgatgaattaaacctggagtgtatgttccatgggcttctgtaaggaattaaaatatttttactgtttaaaccagtgtttcattgttttctgcagaaatcctaattggcataaagaaact

SEQ ID NO: 33814 - DNA, 455 bp, Homo Sapiens
aatgactggccttgacctagcccaccatctccaatcccagatgtgacctgagtgatcaaccagacaagaaagcaagaggtagcaggagacatgatgagggggaacacaatccaggatcactctctacccccaaatctactgtcccattagactagacacctgagttgttttccctacatcagccgtgagctgaggaggaactgaggtttgactattggggcccctggccttactggcttaaagtagatttaaaacttctggtcctatgtggagacagaggaaagggatggaccctgaggcttgtgtccctagaaggactcttttttcccagacctcccaagccttgaaggcttcaggaactggccactgaaggggtggggtaggagggacattaactgccatcaactgagcggcaactgccatcaactcaatggccatcaactccacctgtcctg

SEQ ID NO: 33815 - DNA, 358 bp, Homo Sapiens
gagacatattaaacaagctttatttaataatgctcaattggacttttccaatttaaatatgggctctgatcagcaaccatttgatcccggcttcatttcaggctgaagaataatttcttctggttgtttttcttcggtgctgggttgatcctggggccgagtggctgctctcgagttccctacatttctcgagtctgtgcttctcacttgcagggtgggcaatgccatttctgcagccgtccagggctctggcaaatgttaaggctgtcactgtagacagaatccccatggtctgtctgtgtgcctcgatagagtccgaagaaaaacattcctcgcattcctgacggttggtcctatc

SEQ ID NO: 33816 - DNA, 497 bp, Homo Sapiens
cgtttacaattttggcctttattaagggggattgttttcttttatattaactatgctttttaatgctaagatctatacatcactgttttttatttcttttagttttaaaccttatgttacaattttttaaataagaaagggcacaatgatggaagatcaaacttgttgattgacacttacgcaatttccatgacaaatattacacaaaatcaggcattcaaaggacaaaactatttctgatcatagcatgaaaataacgttctaaaactgggttatgatgataacactgaaaataaattttatcagtgtcagtcgtagaacagttaataagcccgtttacattgtgggtattgttaacaaatgtggttagtgcaatgagttccctgacctgtgatggtgagcttctgacatctggccttgatggttctctggattgagtctgccattggctggaacggcatcaacttggaagccagtgattcgctagtctggttctc

SEQ ID NO: 33817 - DNA, 415 bp, Homo Sapiens
ctctacccagtaatttatatccaatgtgtcatcttggatattgtgaagatggacttaaaacagcttatttttcctttccttgagggatatgtagctaagagtagactttaacatgaaccacctccattcccaatcacagtatgagtcataatagccataatgttagttactgtaatccaagcatgataactcatgatgtggtatcagaaccatcatttgtcttttgatcatatactggccctgataacataattttgctatttgagttgtatgtatccatttctcatggtatgaaggaaacactaacactaggatcagagccgttctcacacagagataagagtttgttttcagcaaaaccatctgaggaagcttctaaccttctaattacatctctattagaaggcagttaagg

SEQ ID NO: 33818 - DNA, 402 bp, Homo Sapiens
tttgctcctcagcccctcctttgctgcattgcccttcatcttcccccgaacccctcttggagccaaggaacacagcaatgcaagaaagctcagaagggacttttcaattttcggaaactcagtgtctgtcctatcccagcttccagcacctgttagagagggctgagaatatgcttctatgatcagaggatgctctcttaggtcagggttaagcaaacattatctgtaaaaggtcagatagcaaacattctagggccataaggtctttgtccttgcatgcccttgtacacaagaactgctgagccaagcatccctgcagcctttgtacttctggctatgcaagatcttgtattcctttattacttaagccaattttagtttgttttattgttacttacacct

SEQ ID NO: 33819 - DNA, 400 bp, Homo Sapiens
ggataaagcatcatgagagaacgggccctaaccctagacgcccttgctttacacactggaaggccatggataactataccaaggattggtcaaccatatctggcttaatgtgcacatagatgaaaggattgacgcctgaaaccacaaccatgctttccaccatgtgggagaagaagatcatatcctgaaggtgctggttgaccactttcggattttccatgtgcggctgctactatttgcactggacaaggcgcttcaccaagaaaggatatttccggcatataaccccttacagacgccgccgttgcaccgcactatacagttgtatgatgtgttatgaagacatgtgcagcacatgcccaaggaccacgcctggaagagggaactatgggaagggacg

SEQ ID NO: 33820 - DNA, 479 bp, Homo Sapiens
accctaatgctttataagaattgccttatattaagtaaagagggaggaatagagacagccctaagaactgggtcatgtcactagccctcttcagttgcagttcacggatcctccaccttgacaataaccatgattctatccatttctcctcccttgtctgctgctaccaccaactcctcagcacctcctctatacatgcattgcaagctttctcctttctcataactttggtatgctgaagatttatactggccctttctctatgaatccttcagcttcaactccagctctgtttggcacatgggaactcttgaaagacaatctgatcctgtccctctcaggggagaaacttttgggccacagcttttttctcagctatagcaaggaaagcagatagggaaaagaggtgagttggtcactatgtgcagaatatggccaatcagagaagttctgctaaaggagcaagcaggtgtggcagg

SEQ ID NO: 33821 - DNA, 358 bp, Homo Sapiens
ctctcgcaagggcgaagggggatcggttggtctccgctacgggggaaaaaaaccaaaataggcccaacggccatgatggcagaagaaaaaacacgtcttcttttgtttgaaaacgggtggaaaggtaaaagcacccaccaattaccaacgctcatcacataagaagggttagggggactccatacaaaatacgttgggctaccgcttgcatcgcccccaacagggcgaatccagatttcaatgctcaccctgcacacagtattgagtaaaccgcaaggctataggcggctaaataaaataggacgcctagcatgagctcaaccagcggcatgcggaatgcggagggggcctctaacaa

SEQ ID NO: 33822 - DNA, 429 bp, Homo Sapiens
tttgctcaccagcttgggctttacttgagtttattactgtttttatcagacccgtaactgctggctctacttagagtgacagttttgctgaagattcttacccccacctctcctgacatcctctaagctcttgcctggagccaagaggcctggtggtgaagtaaggatagggtgtggatcaggagattctcaactccttggcttctaggcactgtccagctgggaggcagaggggaacttgtactctgaagcctgtgactcctcttaagcctcacatctcttcaccactactctggtgccctggttatctgtcccacagcgagaggtattttatgtccataaagtgcccgtggtaagtgctcagaattcatctcttggctgtggcgggtgctgtcatttctcattccattgaggggaagaaactgaggc

SEQ ID NO: 33823 - DNA, 365 bp, Homo Sapiens
attaaaattttcagtttaattctttaaagtagtgctcttcatggacaaatacaaatgttagcactaagagccattttcatacacaaaactgaaaacttcacgcacatggagatcagaataaaaaatgatgcaaatatttaatatgaagtgacttttggcatctgcgttccctcaatagaaaagagggttccctttatgtcaggctttgcaacagccagaatgggacttttatgaattcaggagttgacccacaatgcatctattctgagaataataagcatgttaaacttggaattcattaagtattctctctccatagtagtaataacaaaaaacaacagcaacaataataataataatagcta

SEQ ID NO: 33824 - DNA, 406 bp, Homo Sapiens
tttgaaatattcaggtaaggtctttattacgtttttaatatacttgccttatcagaattataatgaagactgtatttctgttttccataaactttcctccagtaccttaaagttacaaacatttagcaaatgaaatatagggaattagctcacttttgctaagaccatcttccagattgggtactcagagcaacaatgcatgtcagggattattcacaggtaatgagcatggtaaagtaaaacaactgagaaattcttttccccctaattcttgttgacaatctatatattagactgtcttcaattaggccctaacatagatgcttcagaaattacatttcagtcatcagttttgccatatagggccaaagtaggacatgcttctgaacacatactgatgctctga

SEQ ID NO: 33825 - DNA, 364 bp, Homo Sapiens
ctccttcttccttaaaaattcgggccctcttcaaaggaccaatgactgctgtgtaaaactccatggtcaaaaagcgaccatggccaagcttggagggggggtcaatgaccttaccgcaaagcttctccagagcccgccgtttcccctggaccagaaaggacttggggaaggtgagcacccgcttgtggattcccaccacacaggctggaaaggggacaaaatcattgctcactggaccataggggacaaagccacccaaagggtttatgctcttgtcagacacgacatactcaggggaggcattgtaattgatcagcttggcgacctttgataagggagccaaggccaatttaaaaaacttctt

SEQ ID NO: 33826 - DNA, 447 bp, Homo Sapiens
ttttttagtttaaactgtatggggaaaaaacacacagatattcaatgtacagtttggcaggtttccacaaacgtatattccatctgaccaacatctaaagcaaggtacaaaatatttccatcaccccaaaaagtttctttgtgcccctttcctgccaattctccccctctccaccaaccagaggtaactggtggggatggggagaatctgaatttgaatttctcctaccgtaaattagtttgtttcttctacaacttgagaaaaatggaatcagggcaccaactcctttctgcccagcttcttggactcagagcactgcttttgcaattcattcatgttgtggtgtttatcaggaatttgttccttttcatggctgagtagtattccatttatgactataccacagtgtgctgaatcattcgtcagtggatgggtatcttgacagct

SEQ ID NO: 33827 - DNA, 484 bp, Homo Sapiens
ttttaaatctttcaacctttcatctatgtcaactgtttcattcactctcacctacctgggggtttgactaccgtactgtgtcccttcatattccagggatcttttccttgctccaaacaggtgaccagatctggcttaaagacagcaatacctgctttattaaaaataaataacatgaatcttgctcatattctctaattacctacctagtaccatgcttagtaaagaggatgtaatagaatattctagaaaatttatcccaaaatactatttaatgacagaaagttcttaacatttagaaaatattttaaatttgtaggtgcttaattttgccacccagtattcatggataaaaaattagtggtggcatatagattttaacatatggacaacaatattttatactactaaatttctgaaattaccactactgtagagtgaaggatacagaccggctcagaaatgtaaaaagatcaggccaaga

SEQ ID NO: 33828 - DNA, 541 bp, Homo Sapiens
actagtaccattctgttttggttactgtagccttatagtatagtttgaagtcaggtaacaaggtgcttctgggtttgttctttttgcttagcattgctttggccatttgggtgtttctttggttccatatgaattttaaaatatttttttctattctgtgaaaaatgacattaaaagtttgataggaatagtttgagtctgtatattgctttgggttgtatgagcattttaacaatattgattttttttccagtccatgaacagggaatgtttttccatttgtttttgtcatcaataatttcttttagcagtgttttgtagttcttcatggagagatcattcacttctttgattagatgtattcctaggaatatttttgtgtgactattgtaaatagaaacacattcttgatttggctctcacttgagcactgttgatgtaaagaaatgttaccaaattttgtacattaattttgtatcatgaagttttatggaatcatttatcagttctaagagatttttggtgagtctttcttttttat

SEQ ID NO: 33829 - DNA, 456 bp, Homo Sapiens
caattttatttttatagcagctcaaataaaatatgttttgttaaaaattagttccatttcccttccaaataatattggactaaataactcagaagtttatctagattttaaaaaaacgaatgcatgtcacttatattcacatcattcttgttaaaggcatttcggtgttctcaattttctaccaatttgactattgatgtatgcagttctttctgctttggtaggacataattagaactactaagtgatgattctcattcacttaccagaaagaatcgtaagggaaatgatcaaaaagcttaaagataacgggtccaagataagcacatattttcttatagttgaaatgagaaataagacataactctccttttttattagaaaaataattatttaagtaagaatgtttctaattagagaattaacaatgagctaaggaaaaacaactgtggtata

SEQ ID NO: 33830 - DNA, 380 bp, Homo Sapiens
tttagcatttgtaaaggatactgaagttcttaccaagggggacatcctacgaggtggccattatggaggctagaaagcttaacctcgggctaagaccggaggcaggcgcttgtggggaaggaagagtaagacagaaatttaaattgaatgggttggccaagtatacatattcaacaggctacaggtggattcatgaatattcatgaaggcagtcctgatgcatgcatgttacaccttggggtggaggcttaacatttaaatgtattacagttaggccctatacatgaaaaggtgaagcagtaacacgaaggcacacaatgcaccatttctgtaaacaggccagagccagttcacagtggttggtctcttatcatgagaaa

SEQ ID NO: 33831 - DNA, 474 bp, Homo Sapiens
aaaagctcaagatgacatgagtcccctttgacttaaatcctggtgttgggtggatgacaaagccaggccgactgtgaggacaggtgaaccatcccaaatgcctgccacatttgtttacatcgctccgttaatgacccatccttgaacaaaataatctgtggggtcacaccatgcttacggtagtccaatggagcgagccatgccatctggactcgtgtgttcgccaataaagaactgggagttcgtgaaattggcaaggatgggcgtgaatcggtccgtctctcctgtcatacaaggttatactaagtcgggctctctgactggaagtttccctttgggggttatctgtaatctttgatgtgctggtcgtgggctactttggtgaaactggtgtcctgctggtgatggtgtatgccaatatcgacaccatggatgtcggtactttatgaccatcgccctctgggccttgcgcgg

SEQ ID NO: 33832 - DNA, 445 bp, Homo Sapiens
ttcttagattaaaaaagattctggctttattatatatatttatgttgtgatcattttcaaaacatttttaaaagcaggtagagtataaattgtagtctccaaacataaacattgtaacatcccatgcagcctaaaggatacacaataagcctggtttggattttcatcaaagtggtacaccaagttccattagcattatttacttattcaagccttaaaatgaaatgtagtgagttgaaattcaaacttggcctttttccagtttctgaatttgatatatggtccaggaagaagaaacagaagacctcatacaaaatgtgactgcctttagtagcctatttattgctagagcctatttgtacaagtaaggcacaatattagatttaaaagtctacttctggtttcaacacataaattcccagggatgaaaaagatgcagtggaaa

SEQ ID NO: 33833 - DNA, 571 bp, Homo Sapiens
agttattcagaaaacttcctttttatgtctatgatctttaattattaaaaggatggaaatacttcatgtttttctgaataattttctgtagagttgtgatgtgacatggattgaatgagtggtaaaaaatccatcccttttgaaggtgctatttatcaagttttaagcctctgatctaatcccccctgttccatttatgcctcatcggttaccaagccttcttgattctgtcccaggctttctggaactgccttttctttccatccttttcactgctctaatcactgcctgcctccctgctccactccacaactggattatggccactggctctctgcatttctagcagagaagttctttccaaatcctaacatccttttcaggctaaaatactgatctgatctcttcactcatgtgcacagagaccttcactggcttctcactttcctgggacaaagtcagaattctcgacccatttcggaaaggcttgccttaattgggctacccaccttctctgtgctgtatgtgcttctccacaggcagcagtggtgccttccaggctggtcacctg

SEQ ID NO: 33834 - DNA, 471 bp, Homo Sapiens
atgggttggcgggcagggagagacaagttctacttttttctctcaaatgaatattcagttggaccaaggctgtcctttctccactactttgcagtttcactttttgttgaaaaatcaattgttcatacatgggtagatctctttctgggcactcttggagtctattggtctgtctataagttgaacaggatcagacaggctgtgctttgtttcaggtaacaaagaaccccaacatctcactgatgaatacactaaagtcatttttgttttccattggcagttcacttctgatgcaggagatgcatcaggccaaccgccctttgcaaggtgaagtgtctgcaccattggaagtactctccatccaggggagagagactggaaatggtccatgaggttttcatcgacccagaatgaaagcatcacccatcattcccttcttgttacagcctatttgtcagaaccagtcagagt

SEQ ID NO: 33835 - DNA, 471 bp, Homo Sapiens
atggggtgggatgcaattcatgctcccgagcctcacctgcaggaagtcagtctccaacggagaccacatttttgcttagcatccccccatcctatcctgctccccaacaataaatcacttgaacgagaaactacttcagactctctttctaagaaacttaagagagcagctgcataccctcaaggcaacatgtatgcacgcttgaacacgtgaaggggagtacgtctatatgcacatatgcatgaatgttcactcaatggctggggggggatgagtgaggccaacaacacttttccttcctctcccctgaccaggtggtgatcacagcagtcgagggaacattttgaaagtggagaggagacgggtcgcagtggacacaggagtcaggagtgacttgttctggccccacagcaagtcactctatgcactggaaaggactatactgcatactctcctaatattcatgggact

SEQ ID NO: 33836 - DNA, 511 bp, Homo Sapiens
acccactgctggctccagggtatcgattagcgatcggaatccattccccacccaggggcgggaaacagccgccgcctccaatggtcatttcggggacgcacctggaactcccgccacagccccctcccggggcatccgcccaccccggcttcacctacgattccgtagagtagctggcagaacaaaagcaaaagccggcctgacttccgattgctttcctgatagagagcaacccgggaggaggctcagggagccggcccgggacccagctgggatgtcaaacccgagccgctgccctctccggcaggctggggctctgggtcgcccagcggcgaaagcggcggggtccccccactccccctctcccaggggctacctaccgccagtgtaggcgcctctgtcgggtggcgaggggagaggacgctgtattaacccttcaacgagaaagggagaggctggaggggaggataatcgggactgcgatccgaatctgaactcgcagtgtgaactg

SEQ ID NO: 33837 - DNA, 515 bp, Homo Sapiens
atcttttaaagtatccattttaattcatctttaaagtacaccacgtctggcagcgggagaattttaaacgtacttaaaactgcccaagagtcaagtgtgtcctggcgctccccaacagcagcctgaggggttctggagcagcagtcagtgtcagacaaacatcagtgatgaatgcggaaaagactcaacaaggaccattatatttggttaggactttgccgtttacaaggtcatttcacttctatgatcttgtctcccagggcaggtggaacaagcattaatgtccccaacttgacacatcgtgtgggccaacttgcaggtgaggagctgggtggattcagccacagtggggccacttcactgaaaactaactttccaggtgttacatggagaggggggttctgggacagttaaacttggaagccatactgttaagtgataaacacctttagtctccacactatgggaagcacctcataacaccagggaaacgggtggagacaccttactctgca

SEQ ID NO: 33838 - DNA, 482 bp, Homo Sapiens
gcggccgctgccgggagacgctgcccagacctgattgtgcgggcagcggcgcagccgagggcgggcggccccgggcgcaggcggggggtcgcgccgggtccgatcccgcgtgatcagttcccccgtcccgcgccacccgctccgtgggggcggggcctgggctgagcggccacccattggctgtggggccccgatgaggaatgggctggccaatcaccgtccggccagagccgtaattaccccgctgcgaggagggtgttggaccgaccgtgagtaactgtgtgtgtgcgcgcgcgtggtgtgtgcacgagtgtgcgtttgaatggctgtgtgtgtgtggagggcggcgtggagaccccggggctcccaagaaactgcaagaggctgggccacatttttttatttaagactttgtgtgtaatttaaaaatgggaacactgccaaaacaggactgcgaaatgtggcatatcttaatatttgca

SEQ ID NO: 33839 - DNA, 453 bp, Homo Sapiens
ccttggagactcttccatggcctctggatcaccatcacccatgggagagcagctgcttggaagtgagaggcagcagtcagctctgagcaaattggaaggggagcaggagcgcacagacacccgcctgcaacatggagaaggtgccaccccagctgtgacccagtgcacgcaggtccctgcaacattcttccccccacacgcattagcggacgctccacacgcagccacggagacagtagagggaaaaccagtcgcgtttcccatcctaactgagccaagcctgttgacgccaatgtgcaggctactgtgacctgatgaaacggcagatcctggcctggcccgggacacctgatccagcatccttgaacggccctgcacatacaatgatggacactactgtccacaccactgtcgcttcaaggatcaatccactggtatttatcagaggagata

SEQ ID NO: 33840 - DNA, 435 bp, Homo Sapiens
attttagagaataactcaggagaggggggattaaggaccccatggcagcagggccagatcattcagaagcagaaagagtcttcttggtttgcccacaccggctcggccaccaggcttgctctggggagtggctgccctgctgcttagccggcctgtctgggggccattgctgctccagatggcatttcaaagggaacctggctgtgcaggggacaggtcgggaaatgaggaaatatggtgagcaaaagaagttccccagaggccccgtatagtgccacaagcacaagacgtagccaaatgaaatgctgtccagaagcccacagatctttccccagatgtgagagagccctggagggttagggacaacttggtccagcataggatggaccagccacagcctgagcctcgccccggcagcttccaagagagagcaga

SEQ ID NO: 33841 - DNA, 481 bp, Homo Sapiens
aaatctttctatttatttcaagaaagaacaaggcaagtggacttggacattttctatgaaaatagacaaacagaaaataggaccaagtagttaatcacattcatctcaacattgaagtttcaaggcacctacaagaaggaggccaaagggcggttcgcagtgcactttggtttgtgttgttgtcgtggtggtgggtgtttgcgtgtctcggttttctggaaacccttgcctggtggtgaggttgggagcgaaacaagtgggcacgaggccaggctggtctgggccctgagaagccgggccgggtcagccatctggtcgcatggcagcaggcggtagcggggacggtcaggcccgtcactcaggcccctgagacggcttccaagaaaaagaaaggagatagtgctgcacctgggcggctgattctggaggtgaggaaggctggggggcgtgggaagtgggggtactggcacaggggcccctt

SEQ ID NO: 33842 - DNA, 460 bp, Homo Sapiens
gcggccgccgccgtccagtcccacccgacaaggacttcagagcgctgaccgcagggggcacagggtaccagaaggttccgccctgcatgcttccagcttggctgagaaaggagctgccggccatggaggctgtcgggaaagcgccctgacgatgagagatgcacgagggtcctcgggggtgtcctcaggaaggagctgagcaggtcctcagctcgccccacctccccgacaggtgcacacccggcgggggctgaggtgggccctcctctgtctccgtggcctccttggtaccatgagcacagggcctggtcatggacaccttcagccaggagtgtcccttccagaaagggggagccgcccgggaaggtgttccggcgtgctcagtccttcagtgacagcactgtgaccactccaggtgcctggcacaggcagaggtggtggccgccagagctgggggacg

SEQ ID NO: 33843 - DNA, 476 bp, Homo Sapiens
taaatcccaccaccatggatacaaagacttgaaacgtaaagcaagaagacaccagatggtggacacagcacaaatgtcagggctgaaggagccttgacatcatagaatctattcacaaaacttgaccagctgatccgctctaggaaccttaaaccctctgctcttagggtaaagactcctataccagctccacagctggcctaggtttcacaaatttcccactgaactccactgaggtaccctaaatgctagcccagagcaaacttcaggctgggaacccacttttgtcatctctagaccagatggtcccaaaccaggacagcatcccagtggggaacttcaaaaacacctccaagctatccccagtgtttaaaaaagtttcacccttgtagtccatttatctgggaggaggtcatacaggctaactctagatttctttctttgttttgggctggaattctaacagcttcagtggt

SEQ ID NO: 33844 - DNA, 444 bp, Homo Sapiens
tttttttgcctggaaggtgttggcagccactttatcaccatgagggaagcagtttgaggactcacctgacctacagggagaatcacagataactccacctgcatcttcctaagagtgagaaccttggagaaagtcaattcaaacacttgccttccctcaggagtcagttctgagagctgccaaggagagggcaggatcagggtgaaaaatgacttgggtctcagacccagaacattctactggctgcctccaggactcagtggggggctaggaagggttctccatcttccaagggtgtggagtgtgctgtgggtcactcagaacctccctctcctcttctgtgatcagcggatcttgtccagcccctctccactgctggctcactcagcgccctcccccacccagaaactgctgggctcacctattgagctatgtgatccctaa

SEQ ID NO: 33845 - DNA, 458 bp, Homo Sapiens
cctgccagccagccgcgggcgttctttttcgcggatgccaggggttaccgtcccgcgggcgggcggagctggccgtccagagcccgccttcctggaactctggttggctgatatagctgtccgtcgaagcggcattgccgcctattgagcaatggccagcttcgcacgccagacccgtgccccgcccagccgcgccgcgggccgcccccactcaggagggacagtcggggaccggcgcgggcactcaggagcccgcggcccaggtggtgcgggcggccctagcccggctgcggagcgctgcgcgagcggcgggctggctgaccccgagggacccccagcgcagcgggtgcggcgatgatcctggaggagaggccggacggcgcgggcgccggcgaggagagcccgcggctgcaggtgcgcagaactggcgcggcggcgggaggaggggcccggaatcc

SEQ ID NO: 33846 - DNA, 403 bp, Homo Sapiens
taccgcacagctcaggggtgtcaagctcaggactcacccctaggtagggttcgacctcacggctgggttgggctgtgattatcattcccatggccaggctcaaccctcaaacacacacgcacctttcacctcaaagccaggatgtgccaaaagctgcaacgtgcacagctttattccagccacatgtcaaacagggacagtagctgggcgtggtgggagaacacctggcaatggcaaccaagttctcccctggtacggccaagggtcagtatcagtaacagcagttctggctctgactggaccttgtcaggctccaggcgctgatcccagggattcaacctgtgcgaacttactccatccaccttggagttaggagctattctcatccccatttctcattcga

SEQ ID NO: 33847 - DNA, 400 bp, Homo Sapiens
aaagaatcagatccttaaatacaaacagccattgacctcggatacccttgcactctattgcatgaggccacgtggtttgattggcacactgtgccagcgtggccaggcttccttctttctctgcctcaagtgacagcaacacctccctacccccaccacatcaagcagcctccatgtgttgaagccagtgaaaccagttatttggggaccagtggatgtagtctgggggccctggcacagtcccatgacctctgcgtcatcagaatgtgggtgtgtggggccagccctggacagagtcccatccacacctgccatcttgaaacaggtcagctcgccaaaaatcaaccggtggataaccaatttggccaaccaacaaattgtcaaattttctgagttttaa

SEQ ID NO: 33848 - DNA, 477 bp, Homo Sapiens
cgcatctgccttcagtttccactccagcgcagcggctcgggatgtgaggtgtctgctcaggagttccccggctgttcttccatggagcggccaggtcacaggtgggaggctgctgggacatcctgagggtactgctaatggccgttacggggacctggggtgcgtcggaaacacgcctttaggttccctttctcagaggcactgtctggacggtacctgtgttagaatggcctctcccttgtttgggggcgtctgcggaggtggtatgaacttcagaaccccgaggcccatcggactcaaacaccactgagtgtgcccgcatgtgggccctgaggtggccgggctggtggaagctcttttcgcactcgatgcagacgaactctcctggccgggcctgcgtccggagtgtccctctgtgctccacccaagggccctgacaccccatccctgtgagagggtcgcaaagcccttcggaat

SEQ ID NO: 33849 - DNA, 409 bp, Homo Sapiens
gacgtcagtcgccgcggctgggcgggggaggggagccagggccccaccccgcctcacgccccgcaggctcccgcccgcgggtccgtcccggctgaggtcacaggcggcgcgaccacgtttattggcaacagttgttttctaattggcggcaggtcagagaatgagttagacttttgacctgatgcttggaggtcggagcgcaacttcttcaggaggacagactttccactgctaagtgcggccccggcgggagggtgccggggtccaggtctaaggagcggcgccgggcggcggggctggattggggtggtgcaaattcagcgaacgcgcttaagacgcactcctttccggtcacctactctctcttcatggtggaactgttttgtgtccagaattaagctatatttaa

SEQ ID NO: 33850 - DNA, 387 bp, Homo Sapiens
ttccatatatttctaaattttttaatctttttaataaaaatataattacacaacatttatataacattttcaaaaacgaaagttgaatgacaattttgaacgcaccaaaaatgacaaggagaattaatatcatttacaatcccatcatgacctttcataaatgaaaatctcatctctgtgcagtgatcaatgactccccattccctcccagataaatggcaagtactttagcctgtagtgcttatatccctgtctccttcctagcttcatatcctattctccccaaacttgcaacctaacatctgaccaggacttgaaatatcctgaatacacgtgctatttcttctgcctgaaatacaatcttctacctttgtctggctagcatac

SEQ ID NO: 33851 - DNA, 376 bp, Homo Sapiens
gttgagagaacatttattccactcagtcagctcccgcaggagtcagcaacctgtagaaatatccaggctggacgaccacttccgtgcactcctgcagagccggggtgggggtggggtccctgatgctcccactgccccaaggaggtaagagcctgaggcctccgacatccacttttgacccaggggagccagcccacagcccaagaaaaggcacccttgagttaactcacataccctctccccacgtgcactgcccattaccggccaccgacaagctccagcgcttgaggcaccagtcagccgacaagtgtttcctgagagttaggagcccagtcctgtgctagaccctggtaggactcaagaggaaatgacagtc

SEQ ID NO: 33852 - DNA, 380 bp, Homo Sapiens
aacttcaagagatgtttaattatccagtgaataaatatttgggagtctaggaagagctattcagtgggctgaggccacaaataataatgggaggaccactgcatgttgaagtgaggccaagaaacaggtagaaatcatcatccctcatagagtttgtaagtatggttaaaaggttacagggtaagtgcacttcgttttcaatctggcagttataatgctgtgttcctttgaaggaaatgaaatggcaggtgagaattttcagcatacacagagcttcctcaccaccttctctctcccctgtcgttctgcagcacccaccgcccagcccagggaccctggcagggactgcgtcgaccagccagagctggccaactgtgatt

SEQ ID NO: 33853 - DNA, 398 bp, Homo Sapiens
ctggtgacaaagaatccaaaacaaaagagatataaaaaggatagatatttatttctctcacacataaaaggattctggtgagaagatttaactctcctcccaggcacagagaaatggtggtttctaagtttccgaaatccatccacatctgttaagaggaaaatttgaacacagcacggggctcactgagtagagtgaccaactgacctggtttgcctgggactgtcccattttagcactgagaggctacatccagggaaaatcctcagactgggggaccgtcaccccaccaccaagggcctccccacagtcaagggaacaagacacatctggcagggtgtcttcgcttaaggtccccctgtcctggtccacacctggtgttagctcttgtcaactca

SEQ ID NO: 33854 - DNA, 398 bp, Homo Sapiens
ttattgaatttgaagctctgttattagtacatacacatatatattttaattttttaaaaaagttgtgggtacatagtaggtgtacatatttatggagcacaaaagatgttttgatacaggcatgaaacgtgaaattagcacatcatggagaataggttatccattccttgaagcatttatcctttgagttacaaatgatgcagttacactgtttttattttaaaatgcacaattaagttagtactgactatagtcacactgttgtgctatcaaatagcaggtcttattcattctaactacaatttttatacccattattcatccccacctcctttcccaggcttgcaccactcatcccagcctctggtaaccattcttctactctctatgttaataag

SEQ ID NO: 33855 - DNA, 361 bp, Homo Sapiens
aggccttcgttgacacgcgcagcgtgctgggcacactgaaagaggggatgccctgtctggcctcatgccgggacgtccaagcctcgaacatctggcctggcagcaactgcgacccctggctccaccacacctgcacattcttcaaggtgaagccacagacgccgcccaataaccagaccaatttgaggacgtccagctcctatcccatccacggcctgaggatgaccgaggcccggaatggactctccgatgatgagaagcacgaggttaccgacctctagaacaccacgtaggtatgcttgcacgtgcttgagctcccatggcaccatgactcgactgaccccagctagatactggacac

SEQ ID NO: 33856 - DNA, 437 bp, Homo Sapiens
ttttattttaacagacagaatttaatatagagaattattaatcaaaaattggacaaataaaatggcaaagaggggacccagaggaatcacagaggtggtaactacaggaagcaactaccacccttagaactggggaaacaaaaagcagtgttaggggttattgaaatttaaaaagttagaggaggggccccagagcgcttcagaattctgaggaggggtcccaggctggacagtgcttgtatctctaaggggagatgttgaggctggttctgggaatgtggataaactgcaaacagtaactcaacactgctgctggacccagctgtctatgctaggtgatgtggacaaagacaggatgagcccaactcctcttcctccaccagtcccccaggctccctctagcgccctccattggcagaacctaccagggacccagc

SEQ ID NO: 33857 - DNA, 444 bp, Homo Sapiens
gaaatgagacagttagttttgatttattccacttttgttctaggtttcactgaagaaatgttggtttcacagtgctgcccaaattcccctgggctgttatctgcatattactttctgtctgatgggtcctctgggtagctgatacagacatggagttcaaagagcaagagatgactaagcgtgactcctgggaaaaataaaagtgggtagaagcaggctcaggtatggaaaaccttctggccactgtggaggtctgacagcttaaaccacattgcaggtcacaggcagtatcggccaactccacagggagttctagggtgtggagcctcatgttgggctgaatcagccatgccctgtgcctttctgtgcccacgtattggctggggactgcagagaaagaccatggccttaacttgaaagccaaggccgaccttaaatgaacta

SEQ ID NO: 33858 - DNA, 413 bp, Homo Sapiens
gaagaccgggagagaccacctcttccatcctgggggggtccctgggggacggtctcccaccggtgctgggccgcggcgccgggctgcgcccccatgacagcccagccaggggcaggggctggagagccctagcgatcgcgcaccctggaaggggcagtgtggtggggagcgcgggcgtgtgtatgcgcgtgtgcgtgtgtctgtctgtccatctgtctgtcccaaggatgtatcgggggagatgatgacgccccctctttgcagtcgcttctaggcagtttacccatgccaaagctgagggcagacttttccacgacggacttgaatggggctggcagattattatccggataatgcaggaagggataagcccaccaccacctgttgagctgggctgtcggcctatgcgggtc

SEQ ID NO: 33859 - DNA, 432 bp, Homo Sapiens
ggagctcaagcaaggtttctcaaagtgctaggattataggcatgagccactgtgcctggcctgcacctcctccctttaagagtacaaatagcttcagttatccatgcatgcagtgagcagctcccagcatccagtgggcagggagggggaaggaaaggtaagacacagtcctggggttcggggtgggtgactgtgagctcccctccggagctcactctgaggctgacaggacagagccagcaggagaaaaccaaaaacctcagagactgagacggtgccaagaggaaggggctggggctctctggggcttcaggaagggctccgaggatgaggctgcccttgcactgagccttaaaggatgagaaaaggcctgacaagctccaactaaagcgtggattccaggcagaggccacagcaaagacagagaacaaa

SEQ ID NO: 33860 - DNA, 391 bp, Homo Sapiens
ttttttctgtttcatcattacaaatagactcatagctctttaatttttccatttaacactttaattttccataggcctagattttcaagaagtccaatatctctcacttgaagtgtcttttccctggagtagattgggagatttgagggatatctgtccaaagatgagacagtctgtttctagtttcccatccagcctgatggggcgtctacagtttttaccacaaggtgtcgctgttgaacagattctggtgcagtctagtgcatagctgtccacttctagagtgatcacttgctgggccaagttcctctccttaagtggtgtctcacattaaggttcccaaattacagactcattaattcaccctaataagctcatccaggcagtttag

SEQ ID NO: 33861 - DNA, 382 bp, Homo Sapiens
tttttttgaatgggttcatttctttttattaactccagcatcagagttttaggcaagttggctattgttcgcacctcgcttctcttctctctactccccacgctttgaagcagcaggaacagccggaaggagatggcattgagcagcagaagtggctggtgtgagaccaggttgctttgcagtcagatggaagctagagctggagcattggtaggagagtcagggagggcaagctctctctgcctggaacccagtgccgttcagggactggcacaggtgcctgcctgggctcacttgccagcatcctgcaattagagagggacctggccagcctcccaggtacccgctgggctatagcataatgaggcacaaaaacaaccaa

SEQ ID NO: 33862 - DNA, 424 bp, Homo Sapiens
gatagggtgagcgacgcagccccatgagcaggccagcggcgcggcccaccgtgtggtagcggggactcgccacgtgcttgtaccacgcgccggagggcagcggcagcaggagcagaagcagcagcagtgccagccgcggccggctcgcgggagccccccgctcccctgggcgccacgccagggcgctcgcgtcgacggccgcccggcggggcgggccacgaaccggctcggctgggtttgggcgcgcagtggagttgggacgcccaggtaccggagcgcaggaggctggaggcgagccgtgggtcccctgcaggcccagctataaccgctcggtggccccgcctcgttccgccccctcagtaccgctgggctccccagatggggggagggacggagggaggagagggaaccctggcagctggcg

SEQ ID NO: 33863 - DNA, 463 bp, Homo Sapiens
tttttctttccagctcatctttattgttttttagctgaagaaaatttggaggcaagaaaacccaggagatttttgaaggtggtttcctggaactccattgtatagggactctagtgtgggcagaagcccagaaagattcttttgcatgaatttaaacctttatcccacaggaaggagccagtggactaagtgattagtctgtggtgacaggatctacgattgcaggtcagaaacctcagcagcagcagacagccgacagcctcttgcaggtgtgtgccacccctggagcaaggcatcaggagattccctccttcacacttcctgcccgtttaggaaagctaactgggcttctcctcgccatgaaaattgtctaattcggttcctgagtccctgtaatctgcaacagttgagtatgttgtagagaagtggttgacagtcaatggtttcagttttgcaggccgta

SEQ ID NO: 33864 - DNA, 524 bp, Homo Sapiens
gccagggtcatgaaaaaaaactagttcattgagtgccagggagccctgcccaaggacatggcgtgcaagatgttccaccaactctcctcagccattaaatactgccacgacctggacatcatgcaccagaacctcaagtgttagaaccttctcctcgacaaggacttcaacatcaagctgttctacttcaggttctccaagctctgcctgcgggatgacagtggccaacagagattaagcaagaacttctgcgggttggtggcatatgcagcccccgagctgctgcagggcatcccctaccagcccatggtgtatgacatctggagcctgggcatgatcctctacatcatggtctgcagctccatgccttacgactccaacatcaggaagatgctgcgtatccagaaggagcaccgcgtggacttcccacactccaagaacctagtgagccgtttgtggcccagtgtgccagcggcgaatgagatggagctcacgccttcaggcccaagctctgaagaagtcaa

SEQ ID NO: 33865 - DNA, 416 bp, Homo Sapiens
ttttttttaaaattttacatacagtttaatcacaatggagcttgaatacacaaacacttgcggcctgagctctggccttggatgcatgctgcccgcaaacagttagaaatgttgtttctaaatgatgaaattctggatgattgctctcttctccttgtctaatgtggagggttttgttgttgcttaaataattactgaaagataactgttagttctttcaagccctcagaactcaggctgtgtgcccgcgccctccccccaagtgttaggggaacatagcaccagcatcagttgctccatgagggcagggattcttgcctgcttcctttactgctgggacagcgcctatcacacagcaggctggctgagcacttcctggtgaatgaatgaatgaatggtctttatctgcccgtgcg

SEQ ID NO: 33866 - DNA, 499 bp, Homo Sapiens
gatggcagtttcgtgttaaaaatcatagaatcggttggctaaacaggataaattgtgtgtacgcaagttatacctcaacagactggattttatttaattgcctgacagatctttcacttaccctggaataagcaccgaatggtttgtagaaacgctctcatattggccctttgtgaacaatctccatgtacacatattctgagtgcagaaaccctgggagcagcatggtggagtagaaaagtatgagctgggcattagacgggctgggctttgagttttggctttgttgcttgtgtacttcagttaggatttcttagttgcaagcagcccaaaacagctctggccagcctcaccatgccttggctatgataaaagccataaagaggaatggcaccgctccttgatgcttgttggcagcaagtacctggaattatgctcccaccaagactgcatgcatgggagggatgggattcccccagagaaaaccagggtgctctta

SEQ ID NO: 33867 - DNA, 500 bp, Homo Sapiens
ctacaagtctcccaccagtctactaaagaatatcacttccctaaggaacagaatggtctgcttctgatactaaaagtaagatgtttgtttttgaagcaacataaattcaaatagggataacaactctttctttgtggaaaatcaaagcatctttatatttacttgagtaaacagaaaaaatatctcaattgaaatgatttcccacctgccaaacaaaacagttttcttttgtaagtcctattccatatatgcgagtggtcaaagcacaaggctgcacaaagggaatagtaatgaattcagctagtgcaagccactgtacccgccgagagctcactcgctccatcctgcaacctggactgacaggctcagctgcttactaagtgtcagttcttttctcaaagagccatgtttttcctgggagttaatttgtgggtgtttcatgttggttgaattgggcctaaagtcaaagcaaaactttggagaagctgtgatgcatccca

SEQ ID NO: 33868 - DNA, 402 bp, Homo Sapiens
ggcagggtttcactctgttgctcaggctggagtgctgtggggccttctgcttcctcctgccctgaggagtttcttcctctgattccttggttttgagcctttgcccctaatgccagcaccatacctactgcatctggatcttcataatttggccagaaacctgcttggccaacaatctccccagtgattcttacggacatcaggactgaggtcctggggttctgtcatgtggactaaggtaggggtgagcaagctatggaaacatttagtgacatcagtgatcttgtgaaagccactaaaggtatcatggttctccaaagagttcctaaaggaaaagactgttgttgaccaaagccattagctcctaaaatactgggaatgagggaatcttcaaaatcactg

SEQ ID NO: 33869 - DNA, 428 bp, Homo Sapiens
tttttttaagagaaaaatggcattatatttattttaaacaacagcatttaaagttatacctattaggggcacacagaagatatatggagagttttaagaatgaagatggggtgggacctgcccaccaccctacttgaaaaacaggattttaccacaaggctcgagtggccctccacatagtaggttctggcccctcccgttcagaggtaactggcatcctggttttcatgttgatcagtggtgtttaaagtacacctgttggaagttccaaagtgcaggaagggaacaaagcctccttgcagagaaatcttgtactttggtgtttcatcatctgtttgtgtgacaaatatacaacgttaatgttgaagatgtgggttagtgaaattgagacctggcgcttcctgacgctggcagcccggttgagcctg

SEQ ID NO: 33870 - DNA, 485 bp, Homo Sapiens
ttttccctaagagagagagattaagtaacttgctgagggtggcacacggccagtgtgttcacagagctagaattggagccgtgtcccctggctcctgagtctgctcctaaccactggcccatgctgtacatcactctgtgcctcttccagcctagggctgtgtctgttcccagttttcccgtcataaataacaccgatgtgccccctctagatttatgtgcttgagataaatttctagaaatggaactgcttgcttaaggaaaaacaataaacagagcaatagatgctgacgcagccatcggaatgggttgaatttaataacgccaagatgctgctccagatcattatgctgctgcttacacttcggggctgattcagagccttggtttctcgttatgaatttataccaggctcttggccttttactgcctcatgcatggggtcggcaaactgtagcccacaggatcaaatctcgccgctgactg

SEQ ID NO: 33871 - DNA, 481 bp, Homo Sapiens
taaatcactgtatgttcaaaatactaactgtgactttgctgaaaatcactggaatgaacagatgaggatggctgaagatcctttaagaattatttccaagattcaggtcctcatgtggtaattatggcaataattaccataatcaacctgacctctgagaagtcatgcatagcaagccctgacccaagagaagactgcagttacctggcctggtcagctcactgaagagctgaaggagaaagcaggggtcatagaggccatcaagatccaccctgcttttgtctttgaatatcagctcctgtgtgtcctcggggggcagcagcctccggttctgggggaagtgcaggatggtctgcatcatccggtcccggtccagcaggcgaaggatgtccccgacactcggctgctgccacagtgacctgcccaggctccggcacgtcttgtgatgctccacggccgctgggccccacagcagcaccct

SEQ ID NO: 33872 - DNA, 370 bp, Homo Sapiens
taaaccctttgatttattttgaatcttttcacttttacctttggaagggacccttagtgaaggtcttgtcttttcatttgtagcatcttccaataaaagttggctcaacaacagcccatctgataactcaagagtcggagacaagggcttgactagtgaatgaaatgttctgcttttgtggataagcagcaagtagaaaaggaaggtcagtggaacagaccagaggcatggtgagtctttggcctcctgttgatggggtagaactggtccgaacaaagccagcctttcgttcctgagcagagttctcgtcattactagaacctgaaaccttgagggtatcttggtctttttcaccttctctccacctgtt

SEQ ID NO: 33873 - DNA, 438 bp, Homo Sapiens
gttctccatcttcaaagtctaacttccttgttctttgcgcctccttgcccttagttacccgctctgtaactgcccttcccgccgaaactattcttcctggcgaaaccgctcatccagccactgtaacccacatccctgttctatttgaaatagccaatcgagatcagcttagattgtgcggtccaactccagccagtgggacaagacacaggaacctttcctcctttgttccgtgtgctctggtggccagaagagcgagcagcacagcacctttcttctgcagaactaaatgtgctaagtttacttctgcagaagggtgctgctcgctcttctgtttgttcccttccgtctagcgtcagctgctcctcagaagagctttttgtttcaggggtaaagggagaaggatttagagcaaaaatcttagaagacgcagagttc

SEQ ID NO: 33874 - DNA, 515 bp, Homo Sapiens
tacaattataaagttttatttttgaagaaaattatcatgtgactggcaaattcaagaaaaaaacattagagctgaaaaaaagttattttaatccatcaacctgttccaagaaaagctgctacacatcatcctggctaaatctgtggtaaccctgttttagagacttcttgaaggctactagggggcaaagaggcatggagattcagtctcatggcttttattatgcattccaaataaatagctgttttctgaatgcagttgcccaaatgcctaaaattttctgactggactgattctcactcctgatagatttctaaataccttatagaagtgtcttcaggaaaagacgccaagcaaccctttgaaattcctcaaagctgcacactcatcacctgggaattattcacaacctctcctgcgattgccctgtgggccacaacctctgcctgctgtccctgtcctcgcgaccagctctccctcagggcccccctaaagttactgccccaaagtccaga

SEQ ID NO: 33875 - DNA, 463 bp, Homo Sapiens
tatgggcgggcccgcgtgcacgcgcttggctctttcctgtgtgtgccgccgccgacaggcagaagtgagccctcacctgtgcgcgggaggcggacgcgctgctcacctgtctttttggcttctcccatgactgccggccagtttcctgcacttgtttctctcgctttattgctggacggtgggagaagggcaagtgcaagacggaatcgagggcacctctgggtgttctgtacctcttttcttcttgcaccttgggaagtggaggacgtgggatggaagaagggcctggacctccctccttcctcctccccaccttctcctaaggagcttgccctgcagtaagccccaactttcccttcctcttttccctctatcagagtcgtcgcccacccccctttcccaccgctcccctacccccgccttcctgccaagccgagggcgacggtgatccccagcttagtaa

SEQ ID NO: 33876 - DNA, 379 bp, Homo Sapiens
gttatgtgtgggtttatctaccttcaatttttgaggctgttgatctatggatgaagttttttgttgatgttggcgttgatgctatttgtttttcttttaacagtcaagcccttcttccatagtggctgctgtggtttgcttggggtccacctgaaaccctattcgcctgggtcaccccccaacccggcgcctgtaggcatcaccactggagactgcagaacagcaaaaatgggctgctccttcctctgggagctccgtcccagaggcacactgacctgatgccaactggagaaatttctgtttacagtgtctggtgactcctgttggaaggtgtcacccaatcatgaggcacggaatcaggaacctgcttaaagcaaca

SEQ ID NO: 33877 - DNA, 470 bp, Homo Sapiens
ttttaagcgtggatattaaatttaatatccagaagaaaagcacagaataaaaagtcccaggcacaaggcaacaagcctttccaggtaagacgagacctgtgctgatgggacctcagagcgcttaaagaacgagactgacactgcgcctggagacaaacggagctggtgcagcgggagcagaagtctcaactctcacctggcacctcaggagaggcacagcagccatcacggggtcccggcaaccctgagccaggaggggctggctcttctgtcctttgttctggggggcccagaggccttgagctgggggagggagaggttcacgctgccatggcttggatgggcttagagatgtaaacttggagtgagtctgaaataatgtacttgtgaacgcaagcatggctgaaggccgcgtgctccagaaccactggcgtcctcttacccgaaattcagtccccaccctttccgac

SEQ ID NO: 33878 - DNA, 523 bp, Homo Sapiens
agcactcctccgcccaaagcgccaggattccctccagcaggaccctccatcccaatttccccaggccggcctcgccagatgcccggtgcgaattagcgatcggaagccacacagccgatgataatcatggtggaagtaccctaagtatgcctagaggtttccaaaacattttaagggctctcagaggccaagtttccagttcattccagtcataaaagccctcgttgctgtcccctcccataggtcagacagagttaaaaggggccttgagcaccacaacaaagcctccaaaatcccagagaagcacccacaatgagtcaccgggcccactcgctccctaccgtcccctccaccccaccagcgaggctgttgtctgaccagcatgccccttggggtcgggctgttggaagaatgaccccagcctcatgttggacaccacttgggcttttccagggaggtaaattagaagggtcagagtgggtggaagccaggtggtgcaaacacactatcaccagattcggag

SEQ ID NO: 33879 - DNA, 460 bp, Homo Sapiens
tcctcgagcaggggccgcccgctccgggtccacatctccggctcagttgacggactggacaaagcttctatagcaaactcagatggccccacagcaggttcccaaacacctcccttcaaaagaaaggggaaactatccaccattggtaaaatctttaagccttggaaatggaggaaaaagaagaccagcgacaaatttagagaaacctcggcagtattagaaaggaagatatccacacgacaaagtagagaggagctgataagaaggcgagtgcttaaggaattgcctgatcaagatggagatgtaacagttaactttgaaaattcaaacgggcacatgatacccatcggagaggaatctacccgagaggaaaatgtagtaaagtctgaagaaggtaatggctctgtatctgaaaaaacaccacctctggaggaacaggcagaagataagaaagactgtt

SEQ ID NO: 33880 - DNA, 351 bp, Homo Sapiens
gaaaatatactcttccagaggaactttaaaataattagatcaagtggcaaaacaatgaaacaaagcaaactgtgatgagattttgattgagatagctttgagctgctacattcattagggagagctggcatctttgcagcactgagtcttcctattcaagaacaaggaacatccacttgcttatttatgtctctcaactgatgaggcttctgcagtgtgaactgccacctccctttctcacagagctgcaagccctgcagctttggagtaatggcattgagcctgagggaatgactcaagagggcactctgggctaaaattccagtgacagtggcaggaggcagccaaatg

SEQ ID NO: 33881 - DNA, 429 bp, Homo Sapiens
actgtgtccagcacccatctggaggcttcttaaagcccaggccccacgccgagcttctgagtcaataaagaagtctgcatttctaacaagcttctaggggatgctgctgctgctgctggtccaggggaccccacttgaagaaccactgcactggtgtttcctttgggacccgaatgcctgtgcttctccccggctctgccacctcttccttgttaacatagcagggagtgagctgacaaccctggaacacagctttctcattcagtgaaatggatactgtgccaacagatacttcactggatggccacagaggagcatacagaccagtgatcacctcctcagtgggcagtacacaggcagaaagcaacctctaccaggttcacggacacattaggccctgtactttccaactgcctgacctgcaagctg

SEQ ID NO: 33882 - DNA, 374 bp, Homo Sapiens
cttactttggacccttcatcagggtttgctgaaaatggcggtttttaggctgaccaaaagggggggaggttgaaactgccccatttttggcattgaaagtttcaagtcacaaaaaaccccttatttccaagcaaactgggacagttggttaccacctgcataaaaatttttcccagggggcagcttacaggacatttattgctactgccaagcaggccttctttatggccaggcaacagggagtgctgaggaagggaattccttcgccctgaccaactttttgctggagtaaaagtatttaacaaagttcttcatattcaggcccctccaaacatattttttttatttcctccaaaaaacaggctttagtactg

SEQ ID NO: 33883 - DNA, 353 bp, Homo Sapiens
gtaggaggcaggcctccactccacaggaggggctcacatgacacacaccaaattgaggactagctagaacagggatggctggaagcagcttttcattagaaacacccaccagtgtgccacgtgagtttaccattgccatggcgacacccagaagttaatgccccttttcatggcaatgacctgatgacccagaagctaccatccttttcctagaaatttctgaataatccacctcttaatttgcatgtaattaaaagtggcaataaatctgactacacactacctttgagctgctgctccgggcacactgcctatggggtagccctgccccacagggagcagcccttctgctg

SEQ ID NO: 33884 - DNA, 621 bp, Homo Sapiens
gcggccgcatgctgcgccgcgcggccgagcgcatcgcgaaagcccgggaaatgcacggccagcgccggcagcacgtcgatgcgcagcgcattgcgcgcataacgcgtgtcgccgttcgattcgtcgtcgatccatgcgagcgcatgctgctccgcgtagcgctcaagttgcgcgcgcaacaatcgcagcaacgggcgcacccgttcgacgctcacgccgtcggggcgatagcgcggcgccatcgcggcgagcccggcgatgcccgcgccgcgcaacagctgcagcagcaccgggctcggcctgatcgtccgcatgttgcgcgagccacagcgtggccgcgccatggcgctcgcacatcgcgtcgagcgccgcgtaacgacgctcgcgtgccgtggcctcgataccgaggccgctgtcgcgcggcacgtcgacgcgcatcgattcgaacgcgacgccgagccgcgcggcttccgcttcggcatgtgcaacccatgcatcggcgttcgcgctcaggccgtgatgcacatgcagcgcgacgcaacgcgacgcgcccgcgacgcgcacggccgcatcgagcagcaccgtcgagtcgaggccgccgctgaaggcgatcgcgatgcg

SEQ ID NO: 33885 - DNA, 526 bp, Homo Sapiens
caggaagatcaggagtccccaggggcttggcggttgagaaaattgcagcaaaattgctgtccagagcacatcatttatttctacacagtagaagacaaaggcaacaaggtgctaaaagagaatagccccaagaattgcctgcaatgcccccaagcttgagattgctttggtcgccacctttcccgggggagagctgcagaggttgttattaattaacacaagcaaagctctttcccttccattcccctaccaactctgctgacgaaatcaggagggctgcaggttcctgctcctttgatcctctcctagcttgctaaggataatagcgccacattaattacaaccttctctgtctcttttggcaaggctatgcagtgctggggagacagagcgtagggtccttgtcctccatgtcacacctaggaactgggaagaccttacaggcttagataaacctagttaactctgacctcaactcagagccatgacaattcggaaaggaattcttcactcaacacatgtagat

SEQ ID NO: 33886 - DNA, 371 bp, Homo Sapiens
ttttcagttggatgaatccatgaatgcagaagccatggacatgaagggccactgtacatgcatggtattaatttaatccttactatcgccctgtgttgtaggtgttagtaggtgtcctcatccgtttttgaagagacttaaattcagagctgctaatacagaactggggtgccagcccagctctgcctggccctgcccaggcatggagcctgcctgagtgctgagccactctcaggtagacacgagcacaccatgccctttgtcgctccttctcacagcaactttttcaatcctcacagcttccggggcaggtagcaaagttgctcccattcgagagttgagaacatgaggagccataaaaataaaatatt

SEQ ID NO: 33887 - DNA, 377 bp, Homo Sapiens
tggccggcgcaatagggaggcgccaatggccgggacccatggtccggcggcggcctcgagcaacaaatgcacctacaggctgcgcgccctgtcccaagcccggtcccggtcccgctgcccaatcctggactctgcctctccccaatctcctttcccctgagcccccaacgcctaccttccgcggcctccatccccccgcgcacacctaagctggtcgagcaaactcaccgcgcgcccgccggggatagctttccatacaggtaaaaccgaaaaccgaattttccaaaaatgcaccccgacggcgcctgctcttagtaccgtggggatgggagggaaatcctttgtatatatctgtaaaaaaattattgactttcctt

SEQ ID NO: 33888 - DNA, 380 bp, Homo Sapiens
tttggagacacaaatttttttaatgtaaaataacattgagagttcacctaaacatctgtcttagaaattcaggttgagggctatgaagggaagagatgctgttagaacagagggaagtgggtgacctctccaaagacagacgtgctccgacggagagctggggtgttcccgcggtagccaaaccttccactgaacccactgaccagtttgacatcagcattgtagtggccacctgctggagaggatgcccttgggggcaaggagagagaggcctgagcctgcttccagtccacctgttggcttccccattccctgggtgtggtatgggatgccaccaggttgtagtcactgcattccccatgcccacagccaaacacgca

SEQ ID NO: 33889 - DNA, 459 bp, Homo Sapiens
tcctgcttactagaaaaatgtgacagtgcctctgtgttagctgaggggtcttcctagcctgaagcctctggtaagaggcatgctgaattaatggaacccagtcaagatctgaaacagcagctgacccaaacggagcctccaagagtgagagcacgcaggcttacatgggagaaagcattcatgcaggggacacagtatcgtgattatggacctgacattatttgcgttgagtatatggcagctccctggaattgcaacttgttcagggtcatagaaacaaaaggccagacgataaattgtcagcaagaaattaacttctgacaaattatcccctaaatgtcagcgtccaaaatcaaaaagaaaaacacacttttattatatttaggttgaatctaatccaatgttactttatggtatttggtatgacaatggcctttgttaaataagatttgattctcc

SEQ ID NO: 33890 - DNA, 389 bp, Homo Sapiens
taaaacataaagtgaggtggggtgggggacacaaaggcaggcagtgggagagaggcccgggcgggcaggcagcctccctttccacatccctgagaaggtcaaccagctgataatcccaccaaaaataacattcccactcttccctgtggcagaggaagaaaaaggaaagtccacaagtacaggctgtttctagaatttctcagtggctcatggaaattttgagtttccctgccatcacacacatcctgaaatgctgggggagggggcccagtgctgccaagagggagtgatgccagagtcaccatggccacagccgggagctggccagcagagccactgcacacaccagttcacccacggccaaggcttctgccgtgggaggcaccaca

SEQ ID NO: 33891 - DNA, 406 bp, Homo Sapiens
tgagccatggcggccggccaataatttccttttgagatatacttgctgtgtcagtgagttgacctgttagcctgttcaacaacaaggcttgccaactgcagaatgagcccatcttcccgggtgcagcaggaaagccataagaacaagtttcttgaaatgctcaagagaccgccctattgcaaaaaccggcgcagagaggaggagcttgaacagccaatgctgtgctatcctcagggcgagatacaccttttcctctgtccacactgtggtacagtgcgtggggggtctgccgtcaaggggaactggcagtggggttcaggagcattgcccaatcccctaacccccaccatccatcacccaaccacagagggtgaaattaacgttctcaggtgtcgacctccaactg

SEQ ID NO: 33892 - DNA, 371 bp, Homo Sapiens
ctctcacaaggtaattggctggcatggtctcttgtctttccagagcccctgtgtcaacagtatctcattcttccaagatttcttattacatagctaattgaaatctgtagcctctggcttctgatgctttttaaagataaggctcaattaaagaataaggggcttggggttttctgattccacaataggaatattcttccaatgtgctgttaccagggatagccccgagtgggatggggggaacccttgtgcaggctctgccttttggacaaagggctttggctttttgactgactccttggtttctggcctcacctggcatcccaggcctgtcttgacctcccctgactctttttcacagcgaggggtat

SEQ ID NO: 33893 - DNA, 498 bp, Homo Sapiens
agatgctttgcgtcttttgcatttgaggttggtatttagctatttgctagatattagtccttttctatcgctgtgaccatttttactttggcatgaaataagagatgatcttactgcatttgtctcgaggagaaaaaaagaacctactttggcttcatttttaccaattctgtggcttctctgggtctggaatgccagtttgacccctctgtgattttacaagtggacattccagcagaattcttagagggatttacagcaaccacgtggtgacagagcaatggcatgtgcaggccatagaactctggggctttaattcttttgtacctacttctgtatgtctatgacgttgatgagatggacaggtatgagggtgcccgaccaaattctggaggtctgttccttctaggggagatgccagttgttcatgagtgctccccctggtggatgggtgatggattggccgtggcccttggaggatgatgccaaggaggacag

SEQ ID NO: 33894 - DNA, 467 bp, Homo Sapiens
gggagatctctggctgattattattgtaatcaggccccagcagcgcgcccgggtggcgcgggagcgggaggcgcttggtgcggctgagacgcgctgaggacccgctctgccagccaaaggagcggtgcgggggagggggcgtgggagcttcccgcgctcctgggacacgcgtggcctgttctggcccgggtgcccgggtgacactgttcccgcgcagggccgatgggctgagctgcagccggaggggctggggtcgcgcacggaaacctgggcgcccaagtctgggagttcattttcggccggaacctgggcccttgatatcagcggtgctggatattttcagtgcaattaaaggcaaaggcagtggggttcacgccaccaccccaggaacagaactggggcgtgtaatgagctcaagccctgtgtactgggcgcgtgtactcggcgtccagcaccgacctcagggc

SEQ ID NO: 33895 - DNA, 386 bp, Homo Sapiens
ctccatccctgcaggggcaccgtctgccctggtccaggtagcagagcacagtcaggtccctctgcctggcttgatgccgtagcgaaagatttgtgcacccctatctttatttttgtttgtttgtttgttcaatttgttcaaaccttgagtgaggaataaggtgctatttattggggaggtgttcagagacctcaatatttttctgcacagtcacccacaaagtcaatgtatcacttggcataaggcacaacctgcctgtccataccagaactgttaaaagacaaccacacaactattaagaaccgatctggactaatccaggtgtctagaaattaccaaggttaaagcgtgatgcccagagtcacagccacaggctcttgctgccc

SEQ ID NO: 33896 - DNA, 436 bp, Homo Sapiens
gcactgggcatgggcatttctgccaggtgcctcagtggccctgagggcacttgcatataaaccaaatgacttgatcagttttgagtccccactgccttcttcttatactcgtaagttctcttgtaaggggcccccatcatttctctatttttctcccagcctcgttaattccttccaaagagccccttacccttttggcacctcattggtccctggggatcagagctgagctggggaactgtgaggtcagagaaggtggcaccttggcacccaccttaaccatttggggcaaacttctcccagctatttggtccctctagaccttttcagacaactgccctacattctagaccgtttccatttctccacaccaaaaatacaaattaaatttttaagatttctcatccctcgaccctctgctgaattcctgttcatc

SEQ ID NO: 33897 - DNA, 482 bp, Homo Sapiens
gcttgggttgagataaggggggtgggctgtgattcttgttatatagatgaagcctcaaatagaaggcttcagagagaatagatggtaaacgtctcttttggaatttcacaggtgtcagactcttagttaatctctgctagatctgggaaaagcctagctgcattaataaagatcctctacagatgcaaaatttctttctcaaaagatggcttctcaggaccatttcaaaatatgccaaagaaatatattttgaggtaaaatattttaattttcttcaaggtctgttatctgtcatgtgatattataccagttggaatttggtatcttcttaccaaagagtctgttttgtcagtcttatgatctctattttaatattaatgctggtctgttatacctaaactttaaaagggagagagtataatgaggtacgtccaacccttccttcccatcatggcctggaatttagtttttcagcttgctct

SEQ ID NO: 33898 - DNA, 475 bp, Homo Sapiens
tgtaacagcagtaactcatgaccttttaaagtcacagtcaagcactgtgttaggatcaatgcattagtgtttatatgagttcctcaaacaaaaagcactgtataagccttagtatcttttattattatttccagagtgtatatagtacctctgaaaagctcaaaatgtacaagtggaaattttcaactttttccattttacatcaggcacattatttaccactgatgagggtggaaatatggagaagttttaaaaattaacactgaaactgttttatgactttatgttcacaattcttgcttcagggaaaggaagaacaaacttttatagccccaagtaagtgaactgaaatatttcccctccactggaaccaagggaagaccccagttatgcaaatctctttcaggactgtctaaggaagctaaaatatatttcaatttaatattgcaattaattaagcaagatttttcttctc

SEQ ID NO: 33899 - DNA, 581 bp, Homo Sapiens
tcttgattaccaacaaggacgttttattgaacaaatctatgtacagtacaaaaaatttcttgaaatgagacactattgttgatttattgcagttcaatggctcagttttaatttgtactcttataaaatgcaaagtaaaataatttaacattcaacaaggaagcacaaatttcctttcttgctgaatctgtaatatctttcacatattaacaactccaaaatgcatatgcagcatttactcattctgaaaaggtgttttacagtaccaaataaattaaaaaataaacactatcatcccttttaggtttttcatccatacaacagtattaaaccaaacatgaaaggagtacggctgaaccttcagtgtgatttgaaaagaatcacaagttcaatgatataaattatttaagtattatataattggtggtttcaaaaaaatgaatatggctaaagcccaaagtaccagtgtccttgtccacggagattcccctttttacctcctccataatatctgagcagcaaaaattcagatttgctattttcttcaccttactgacacacagcagaaatttaacatttaa

SEQ ID NO: 33900 - DNA, 539 bp, Homo Sapiens
tttgggattttatcacatcacatctagccataaccttggtgcattcacatgtgcacacacactttaaaagaaactcagtaatttcaacactgaagaactacttcagttttattgtattatctactcataacaaattacattgcaatgagagatttttgccatgctactaacagaattctggcttataatttggccactggtggctgtagcataaaatgcattaaaaacaactcagtagctctttgtaggcatactgtgaatgcaatgtgtgaacctcttgctcctgaaaagatcagacaaagctgaggttcaggtaatttggaatgaaaacaataagaaaaagctctgttctgttttgaaagctattttgtgatagcaaatttctctgatcagtattaagggccctgaaaaacaagccaggagggccacagatctagtcatctaaatataaaggacatacttcatttagatctctcccctaacacagggagaaccaaggtttcatctgaatggatgcaatggtgtcatagtcttggcgc

SEQ ID NO: 33901 - DNA, 527 bp, Homo Sapiens
cctagccaaggttatatattagaccttctagctgggctgctggtcccgaaagccacagggtgttgttaatattcatgtgaccgcagaggctcatcaatattcatgaggtatctgcagtcttccttcaggcccttagtttggagaaaacaggaatgattagagtttctagaacttaaaactaaccctatttcctggagtctattgaggaggaggcaaatcttaagagtaaatgtctgggccaggagaaaaagcatttttcatgccaatatcctaaactggtctgacaacttagtggagttgtgctgaatggctgttattaatgttatcatccttatccagcatttattgaataccactgggtttaggttcttgtaccagtactatgggggataggaaactaacatatttaagtacttactgtgccaagggtacagagataactaacatgattcctgcccccaagaagcatatggctcagaaaatgagatagataggtgtacacacacttatcttaccaaagtaagagt

SEQ ID NO: 33902 - DNA, 488 bp, Homo Sapiens
gcacaaaaaggaaaaaaggatgggaagaggttgtttaaaatggctgaatcatgtaaacatgatttaaagctgtctacataaagaaacaacacaactagctggaaaggggaaaacctagtctttcgagcagcaggttatgtacacagtattaaaaaaggaatatagattggggttgttttctttttttaaaaaaaccagtttgagtagcttatctggccttgtgtcaaaaacaagccaaaagttttggaactggctggaatgtgctgaggggcaacttgggaaaacggcagggctcactcattcctgggagtatctgattgacacagaggacgctgttgaactggggccttatctgaaaagagacaaaaggatcatccgagtggcaactgatgggcccttctagttctcagacactctacataggtatagaaagctttggtcagtaaaaacaaattagtgaactgaatgaaattttaaatatagaatcc

SEQ ID NO: 33903 - DNA, 473 bp, Homo Sapiens
tttttgttatttttaattctgttttattttctcagcattaacttagataattctcagaaagcctagcataaattaacagcagagtgtagcatggtggttaacagggcttcttcgcagtgttttattacagctaacttctactcctcagagtctgattcaggggccatctttcaggctagtctagcttcactactgattattctgtcttaggatttaataatgactgtacattgtaagagcagcaaacctcatagttgcccaagttctgatgccaggcaacaatcaccttgcatcatatggttcaggcccttctgcttcccatctcacctggaccagggatagcaacactgccaagtgggaacagcatacttatgatgcacttcacccaccagatttgaaactgtgggcggtttcaataatattttttaatttgagggggaggcacaaagtagagacatcatttttaaatcttg

SEQ ID NO: 33904 - DNA, 438 bp, Homo Sapiens
ataattcaacagatttaataaaagcacacaaagggagaaaaagccttctatgggcaaagaagcacaaaatcctttgaggatgtagtctatacaaagccataagaaaatatcattatcagcaaactattatttcatagattttcccaagcctgactccatgacatgagtatcatgcattttcactggaaactgaaaaaagttttgccatatatttaataactttattgaatgaagaaaaagatcacaccaaaaatggaggaatacatcaaccctggtggtcttagtagaccgagccaaattaaactatatgataaagcaatttctcttttttcatccaccactaaatgagagttcatttttatctaaagaaggctcatcttagcaaatattgccatgacaataagactgttaggcaaaccaataaatttaggttctggc

SEQ ID NO: 33905 - DNA, 414 bp, Homo Sapiens
ttttttgactgttgcaatagctggtatatattagattatgaatttgtatgtatacatagcttacacacacgcccagagtgttgattattcatgtaggtaaatgtttccttttgtagctgggaaagagcatagatttgtgttcaaataaagacctgggggaattacacatcacagacactcgccaccttctttcttacactgactagacatccccaccccccatcatggtgtttcatgcagacagactggcagtgacttgcgcacaagatgcccttctaatgggctcaaatgtgtcaacatccaagcactgaggcaacaagcgaacacttttttgctgcaggaatttgcataaaccttcagagaatgctttgccatcccaggcagcacttttcagccctgaactgcaccagtctg

SEQ ID NO: 33906 - DNA, 436 bp, Homo Sapiens
ttttttttcctcttgaaaactttaatgaaaccaataagttaataagttaacaaagtgaggtacttgcatatccgagaaccgagttgatggcggaacctcgatcgtggaaggaaggagggcttcttcccatgtctccttggtcatagggtaatcccattctcctggccctctccacagctgtctttgagtgggtggaggggtggctctttggggacagtgcagtgcaggtggggtgagccaggagtggctccatccagggcatgacggtcacatgcatagggcatgttggggcagaggctgggcaccatggactgagtaagatccagtccaagccctggtgctggcgcatgcaggtccccagcacgagatgcaggcagcgtggcctcggccccttgttcccacagagggttgccattggtccactacccctaacctt

SEQ ID NO: 33907 - DNA, 425 bp, Homo Sapiens
tcattatcattatatttgctgaaatattttttaaagaaatgaaacattaaagatacagctaaccatgctctctgcatccattccattccctcctggcagtaagctttatctaaagattggtgttcatgttcttatagttttattagtaactacattgcatatttgtgtctcataaagtttattatagatgtacaaaaatagcatcatatggcatataccattttgtaacttattttgtaacatttaaaatgaattagatctacatgcatcagtattaacaaatcacttattaccattttaattattttcagtatttattcagtacctgtatccctgcttaattgcaaacacaagttggatcatacttgtctcattaaccactcactgcatatcctaaacacttcacggtttctggcacatattag

SEQ ID NO: 33908 - DNA, 609 bp, Homo Sapiens
ttagttctttcgaaagttgccaaaaatgaagccactttgagagtctgcctcacttatcagcaccattctgacagcaaactgtattcgactattttattttattcagagagttttgcctaggccaacttttttcaaataaaggaatagtgccttgcacagtatggttttgccctccatcgtttttttggagagggataaattgcaggacagtaactctgtgcaagatctaactagtcacttgttattctcttccactttccctttagtaacatttgcctaaacttccaatttactagattaacccaatgtagagcaatctaatgcaacatttttagtacatcgagctgtgtggtgcagcgccaaccactcttaattaagttttctagtccttttttcgggggtatggcttttttgagtctaaatttatgcgatagtgggacacaccaccaaatcacttagttctctatacctgttagtgtaagtttaggttacttagccctggtgccacactttgtgtgctacacccagatgccttctagtacaggtaccaccattctcttgcttccctttatacctgcatctcttgcctgtggcatctatagttcgctt

SEQ ID NO: 33909 - DNA, 363 bp, Homo Sapiens
tgtattggtggtgctcgcacactcaaactgggcttccagtcgcagctctgctgggagctagcttgttgaccttgggctggtaacttgcctctgccagcttcagcccctcgtccgggagcctcgcattggcctctcgaggttaccgcagcgatcgcatgcgacagtagatgcacggcgcccggcgggccggcacagtcgctgctcggaaatgacgccggtggtgattctcctctctgctgggtggctggtttggctgtccacactgaactcagcagagatgtttgtgcagcgatgacaaattgaggcgctgccccagggagcttcttgaaaagggcttatttttaggccctttgcctcatgcac

SEQ ID NO: 33910 - DNA, 474 bp, Homo Sapiens
caaagcgccaaccaaggttggcacctacctgagcgtcacctcatccagcacccacatcgccgggcgcgtgtcgccggtgaagttgatgcacagatcaccggtgccctgcgtgcccttcggcagcgtggccttcagggtcacgaagccatcggcatccggcttggccggcagcggtacttcagccagcaccttgccgctgcagtcgccgcgacgcaccagcatttcgccatgcgcccgcttggctttctcgaagcgacgcttgggttcgtcgtgggccagctggaagtagtacggaatgcggcccgcgcggacctccacgctgccgatgccgtccagctgtgcctgcggccagcgccagcacggctggaagatgtcgacattgaacaccgcacgcgttccctcgcgcgggccgtcgtcttccaggcgcagcaccaagcccttcgtgcccacgcagctgagcagctcatcgctgcg

SEQ ID NO: 33911 - DNA, 363 bp, Homo Sapiens
tgccaccagcgaggctgggatttgaacggagactaatcaggagctcccgcgtccacccccatgaccacagtgccgtacagcacgaacacacggctgtgtcacccacagccacctttggcacacactgtcactatgggggagatgagtcaaaatcagtgaaagcaatgtggttacagcgtggctgctgagggtggagctctgtgtggtctaacagcccagaaggcttgaagcaaaggatcaggaagctgccctgccagaggaaggctggcaagaactgaccgcctgccccacacacccccgggacacatggccacggctgccaggagctcctcttggccatcaaagggcagcaccaccaataca

SEQ ID NO: 33912 - DNA, 484 bp, Homo Sapiens
ggctcagaggtcgtacacctgttccaaccgtgctgacagaatctatcgttttcacgcctttaagaatgaacgctgatataacggccacgagcgcctgggcgatgaacgtgacggcaaaggtctgaggcggccagaggtgcatcgttccggaaaccagcataggaccaaccacgccagctatcactcctccccccataaccagcgacagggcccgggcccggcgttcgggcgtaacgccatccgttgcggcaaaacgaaagcttagcgcgaccgccgcataggcaccgcccataaatgcagcaatgcagaacagcaggaatgagccgatgaagacggccagagcagccgtcagtccggtaatgacgcctgccccggtgccgaccataaaggcggccttacgaccatttgtccgcgccagtgaacctaacggcaagatacaggccgccatccccagaaacaacatggtgatgggaagagtggcagc

SEQ ID NO: 33913 - DNA, 432 bp, Homo Sapiens
tactgagaggctgtcatagggttaggtccataggggctctgcccttctgtacttgtatacccaggaagaaaaatctctaccttaattaccgacatctcatgctgggcagagaggtgtggttgctaattgattagatgacagtccttttcattgatgtggcactgttggggtggtttcgttgtgctttttcaagcaagacaggatagatttgggccaggtaagttgattttggagagatgatgttgctgtgtatgggatttccctttattaagctcatgtctttactgccacttttgtgtcctgattttctaacttgatagtaagaagtactaagttggcttgtcttgctatttaggtgtgggtggtgaataatgtctcttctaccctgctctctggtgcgttcctgttctgtttggtagcaccaccaataca

SEQ ID NO: 33914 - DNA, 589 bp, Homo Sapiens
cgcaccgtattggtggtgctgcacatgggctgacctgagccatcctcagctcatctaccaaaagcactccaaggaaagcatcatgaccttcttcatccaggtggggaaaccaaggctctgaacagtagggtgagtttcccaaggtctcttggcccacagttggaggagccaaggtttgaatccaggtctggttggccacaaaccctgctccttcaacctcctggccatggctgggtagactccaggggcccacctgtcagccatgaacctctgttttgtgttcacactgggagctgagttgtgtggtccccactctctgtgatccttaatccagtcctggagggtaggcgcacaggccttgccctcagagggggcagatgtcctgctggggactggaagcatctccagaccagaacaggacttagttccaagtggattaccacgagctcaggaagacaagtctgattcatagcccatcaaacctcactgaacaggctcatggtgccgagctccactatgttgctgggctcagccctctagcgccaaacgcttcctttagtaagatcctggtgccagcaccaccaataca

SEQ ID NO: 33915 - DNA, 454 bp, Homo Sapiens
ttggaacacagtgtgggcctcaagaaaggcagatgacaactgctccagtgatctcccgcctcagccctcctgcagccagccctgagggaggagcacctcagacagaagaggaggccccttccctcttggaagtgggaggaggagagcccttgtttccctgaagagcccaggctggagccgccggtgtgacagcgtggatggcgtgacaggtgcgaggggaatccccgagcctatcccctcaccaccatcacacagctcccctgttcttagggaggtcactgggcatgccacatgggttactgtctgtccttcccccacaacaatccgtgtctcctgtccaggagggagactgtccttacacaagggaaaggaagcgtgatgtctggcttgctatgtttctgatggagaatgtgggtaaggtccctggggaggggggcgctgtaactagacgtta

SEQ ID NO: 33916 - DNA, 514 bp, Homo Sapiens
aacatcagctcggtacctgtattggtggtgctcgcagatgggaccagaagtgatgctggtgaatgtcacgtccaggcagagagtggaggagggggcccgcccagtgttgaatccagcttggggaagagaagagaagggggctagggggcagactagcctggcctataggaggcccatgggggaaatgatggcccacttgggttatttggttccccatttgagggttggagggtagagctggcagccaagctcagctgtgtctacagtggagtgggcaccagaaggatttccacctgggaggggctttgggggattgattggattgcaggggtgggtattgactcttcatttgcaaaacactttatgtatgatggaggtggggaccctaagaatggggaggtggcaggctttgagagatgtgtctagagaatctgccaccaccagccaccccttggcagggccaccagtctaaggccaaagactatgcccttccccagccagcaccaccaataca

SEQ ID NO: 33917 - DNA, 398 bp, Homo Sapiens
cattggataagcggtaggggaaaaagagatcataagtgaaaagatggttgaaccatgtttagataccatgtgcatagcagattagaaaggtctgtaggaggaaatctggtttggggttaaaaaaacaatttattaactccacattacctttcaatagatgtatctaattattaaaggaagagggatatttacagtgttgtggtggagagcccatggtgtggggtcagataggtctggacacaaaccccagctccacatcttactagtatgtgacactggacagcttgttgatgttctgagcctcggttttccttccatagtgcagaaataaaaatggcttcgtctcaaggtgcttatactttgttacaaggattgtagaaattaatgtatgcagagct

SEQ ID NO: 33918 - DNA, 374 bp, Homo Sapiens
ttgggctgggtgttttggtctcattgcctcctcagaaggggggtgaagatgtgagcggcctcccccaagtccctggcctggaagccactcacagagctgagtttgagtcctggagctcagcagcaggttcaaaactcagttctcgcactgctaactgtgggagcaactaacaatctctctctgcctctgtttctccatctgcaaaatggatcagggtaggtcaactactgcagcaaacaaagcctggagctaaataccatccagctatgggccccacctcaatgagccacacagagtgctcagaacagcgcctagcacaaatctgtgcccactgcaggttcgcgaggatggaaggctgtgccatccacaagaga

SEQ ID NO: 33919 - DNA, 454 bp, Homo Sapiens
gctgcaatatttatattttaattcaaagggaatcgacagtaatacaccataaattcttattttgacactcaccaaaatagtcacctggaaaacccgctttttgtgtcaaagtacagaaggcttggtcacatttaaatcactgagaactagagagaaatactatcgcaaaccgtaatagacattacatccataaaattttcccagtccttattgtaatattgcacagtgcaattgctacatggcaaactagtgtagcataggagtaaaagcaaaaacaaataaaccaaagaaagaaagccacaagtctaaaattgttaaacaattaacagttcaaacttagtaatcaaatctgtatcattggaatcattaaaacaaatcttcctacaccttgcagtgtatgatttaacttttacttaacacagtccaagtttaaaattagagattttaaaaagga

SEQ ID NO: 33920 - DNA, 393 bp, Homo Sapiens
aggttcctggtctcccgagttcagaggtcacggtgggggcggaagccagcatggcctgggtaaagagacgcgagcagggagaggcaacaggcgtcccctctggaagcagactttggaggagagtggacatggagggtcaagtgtttacccatctgaattagaggctccaatgggaaaaggattcgtgccagtgagggctatggagatggtacgctcagaaagccaccaagctcatgtccgagtggtgtcttttcaggtggacagtgttgctgagggggcgcaggaaggaatgttctgaggagcgccctaattgttcagagcagcccctgaagccgtcaagccagagtgtgcctgggcagccttgggccccgcgccttagatcacacagccctg

SEQ ID NO: 33921 - DNA, 456 bp, Homo Sapiens
gcaatctggtgaaacaaagcaacagaaaaaaatgaattcaattcttccatactctgaatccatatgttttcatttactgcctccaccactaaagatgtatgcctgcacacatctgtacaaagacaagcaaccatcatcagggtagttaacacactgattgggagaggttatttatcttctgtaatttcaaaacgtgatttctgaagagcatatcatgcccaattcagagaactgaactatgtactttgactaaatttccaagaacttgcagaaaaagatgaattatgcatattatcttttgtcctcctcttttggcaaataattcttccatttttcaactcccaagtgtagaaaactaatgtacaaattccactgctgtgaaacaatttaccagaggtcttcatcttttcactgttttctaagggagaaagaaactatattttagacaatcttaaa

SEQ ID NO: 33922 - DNA, 390 bp, Homo Sapiens
gggggggccccgcccaaaatcataaaatgttccttccaggtttgtcgggggaaaacacgctttgtgtgccaagcacataatgttagttcacatttaaaatcacctgagaataagatagaatatctattgctcctcgtaatatacattccatccacaataatattcccagcccttattgttaaattgcacagttgctttgctccatgttaatttagataagctctggctgtattgtcattacatataatcccaattatgatatcccccagtctcaaattgttaatcaattaatacgtttacctttgtaatcaaaattcgaatcatgggaaatattataacaaaatcttctacaccttgccagggaatgttatatcctttatcttaaccaca

SEQ ID NO: 33923 - DNA, 430 bp, Homo Sapiens
tgttaatatcaattacctttaaattgcaagctactccagtgcctttaaaaattaatttgattgagaaaatgtcaatgtatctgcaactcgtcagtaatatacctgttgctcaaagcaaatgaggctggatcccgactcgcagttttaattgatgtgtattattaggatgactaacgccatctgtgggcttggggttggtttgttgttgttgtttgcaaagagaagcagctgaaaaattaaataaagaaatcatgactctaaggctctcattggttcttacttaattcatgggcatttatccaaatactcaaagaagtggaatgaaatcttgaagcacaaaactcaaattattttcactccaggacaatgaggttttctcatgaccccaaatcatgattgtagaacaccaaaacaatgaaaaacagtgatt

SEQ ID NO: 33924 - DNA, 408 bp, Homo Sapiens
ggtgtaaaacaaaagactctgagagcgcacttagctgtaaaacaatcattcctattcctaaattgagtgtttttggttacatgttctaagtgccttacaataaaccaggcaatgtgctttatctggagaaagggagccctaacttcaaagtttgagttcctccaacttttttaatagttaaatttcaagtacgttagactgaaaataatttgggtttccaagtcaaagattagaacaaataatcattaaagatcataaaagaagttcaggtctctaaattctattttcatttgttaaccaatatttcagttttcatgttttaattgctaaaattcagtaggagttgtgcacgtaaatgaaacacttgatttacagtgtctgtgtttccatccacactcaactctagta

SEQ ID NO: 33925 - DNA, 474 bp, Homo Sapiens
catttatagcggatagggctccggcgaggtgaagaagtcgtcgatggtctttctcggaatccgtgaccatacttatttgctcaggaagaatgcgtgaatgctggccatctgccaggagccgtgtagctcacgggggttgaacttagagactgagcccacccctgtatgtaagtggcctgaagcttaacagctcttagagatgccaacaggaagggccgtctgggcccaggaggcccatgaatgagaaagcagcctgctctaagcagtcaccatggctgtcatcccagtctctctcccctctctcccttgaccactatgcatgggccacatccacctcctttctgtgctttctacattctgggctcaccatagggctttcgtgcttgctattcccactggcgggaacaccctgaccctctgtgtttaaatgtctcagctgtgacatcacagaaactttgcaatcccctacccctc

SEQ ID NO: 33926 - DNA, 363 bp, Homo Sapiens
gcttaaaacgcgtgtgtgtatgtacgtacttgaaatcagcctatacgtaagatagtgtgttgtgttttctttccctgtcgtatcatgtatctttctcagtatctactacaaattttgggaactgtctaaatggcactgtttcaactgtacctaagcccacatattatagatgtctagagtaagcaacggatttggagttgcttctccagatgaattggaacgctccctggggctcttctaagagaggcaggtgggtagcagagtctgttcaggaagctgggcagacgccctggctgctgtccgtaccgcttgatggccacacagaggcttctctttctggcttaggatctgcctagggagggc

SEQ ID NO: 33927 - DNA, 408 bp, Homo Sapiens
agttagaaatatactgtgcccatcttttctaggaaatagaaaacggtcaagttaagtgtatattttttcaaactaaacctggctccgagctttgcactgggcattggagaggccttcaatggctcttccccggtctggcacttcctcttcttccctgaccctcgagtcatgggcagcagtggagggggatgaaccctccttctgcagcatctgccccatctcctcctgggccgagtcatgccttgggagagacagcaaaaccctgaacagcagttcaaggtcttttcagccttggggtgatgcctccagtgccactccctgaacttgatcccactgccagggcttgctgcattcgcccactccctcagcaggggtttttagagcatgagtttgagctaggttttctgc

SEQ ID NO: 33928 - DNA, 412 bp, Homo Sapiens
tgtcaaatgcagaggcattcacattttccctagtagtttcaaactcttaccttgtctaagaaaaaattaaaaggtagatttaaggagggaaaaaaatgggctgaggttcttaatgctatcatttaacagaccatgttaaatgcccatcatataggtaaaacaggtccatcaccattgccaccagattccatacaggacaatgagacttagatccttaggtattcgactactaccaaagaaaatatgtcaagttggctaacccaccaacatgttgtatttattatctgaactagagaaactaaatagtactttctattgagcatatcctagaacttgtaccatcttttccccaaaagttaaacattaaactaccatctatttcctctggacctacaaacttcctataggtaca

SEQ ID NO: 33929 - DNA, 434 bp, Homo Sapiens
gtggcctaacatcagttgtctaggttgatgtagccagtcagccaattccaaattgcactgagtttacttcattatacttttggatattaaaaactaaatagttttctgcagcatcgtagactagattagaaaccaagacttctgtatcacaatttataaaataggacaaatgtattctcagtgattctgcaatgtttctgcccatttttccctcttcaggaagtagtagaggtaagataccctattcctgctatgcttatgttgggcattattccagaaactgaagattcaaaggtgggtccccactcctagaagcccttcaaggggcagaggttcccagagaggaccataatccagtgtgaaaactgttgtactgtgtgtggatcaagtgtcaagaaaacccacataagagcatggctgattcttgttgagga

SEQ ID NO: 33930 - DNA, 521 bp, Homo Sapiens
aggctggtatatccagaattagatccagaaatcaacactagcactaatctctgaaagtgtttcagaatggcaactattaactgctgaagaagaatcaagtagtaacctggagcaggccaaatgagttacagacgttacagagaaagatcgatcactttggcagagcctctctgtgagcttaagctagttttcctaacgccagctggtatgctacgttagctacccaaggcagggggactatggtatcacagtgaccacagaactaagcttttccaactctcctggggcacctgcacaagtgctagcatttcccagaatacctctaattaaggaacaaacctttttccctactggaaatttcaaaagtgctttcatctctggtccctgcccccgaccaaaagaggttttattagagttctgatgtcacgctctctgctttcctgggtggcatctgaaaaaggaccacctgtgccttcagggtagatttgtgccagttagaaaacctcagcttcaggaattca

SEQ ID NO: 33931 - DNA, 359 bp, Homo Sapiens
aaaaatggggtttgaaaaacttttgtgtctagtctcttctgatatgaagtaacaagtgatttagcccagcttttctgctatcttataggtaaaattctccaagcaaaataaacttgccaaaatcaaaacatagttatcaatcactatggaaaaaaagaacattgatacaatttattgatttatttatttactcattcattcactcttttagcatatatttaataaatacttgctaaaatgccagacaccaggctaagtgctagaggtaaaatgctgagcaacaaatgaaacatgatccatgctttcatagagcttaacaaactaatgaggaagctaagacattaacataattacacaca

SEQ ID NO: 33932 - DNA, 545 bp, Homo Sapiens
cctagtgccacagtcaaattaggcaagcgagtagagagactattaagtgccattagtttcaagggaacaggtgctaaataccagtctgaagtagctctgccagcacacagccgctgctccaagccaaggggatgtaaatttagggggagtacagaagcataaggcctctggaataacaacagccccaaagtgtcccaaagcctcttttttctcaattctagagcttccttgactcttcatactcagccaatccacactggcttcagtgcctccatgtacactccttcctgtagggggttaagctgggtttttccagacacgacctctgagtacaactgaggcaaagaatcccagagttctttgggaagcagtgtgttctgacttcaaaggcattcccggtgcatcagtcagaaaatgaaaaccacttatgccatggcttacatacaagccagctcattatggggggaaaacacgtggagaagaatgctcgctaggattgctctctgaatagcagctgtgggaagcaggccccagcacagaatgcc

SEQ ID NO: 33933 - DNA, 484 bp, Homo Sapiens
atgattctagtagaattttttgacttacaatggtgtaaaaccatcgcaatttcaacataaattacagtatacaataaattatatgagacactcaacaaccttattataaaacaggctttgcataggctaatataaatgttctgagaatgcttaagataggctaggctgagccatgatgtttggtaggttagatgtataaatgcatcttttacagtgggtttatcagaatgtaaccccatcataagttgagaatctatagtgtgaatcgcaagtattcagagaagggctcttttttaagctcaaatgtgggccgtggaggtccgtgctccagttcaggagaattacatgagttttaatgtcattatgggcaataatttgtttgctggctttcctctgtgtttcctgagtgtgaaccggaaatgggagtgagcacaggagaaattgggagggggagggtgattagactctgggggaagtcagggcc

SEQ ID NO: 33934 - DNA, 384 bp, Homo Sapiens
gcctgttctttccttagagttcatcgttgccgacggtgactccccacgtggattacttaatgctttcgcttgagagcatactgtatatcgcatactctgagtaatcatagtttacggcgtggactaccagggtatctaatcctgtttgatgcccacgctttcgtgcctcagtgtcagtagtagttttgtaagctgccttcgcaatcggagttctgcgtaatatctatgcatttcaccgctacactacgcattccgcctacatcatctacactcaagctaaccagtatcaacggcaagactatggttgagccatagcttttcaccactgacttaatcagccacctacgcaccctttaaacccaataaatccggataacgcttgta

SEQ ID NO: 33935 - DNA, 412 bp, Homo Sapiens
cacaaaggatgcttagacatattacaggctgcctaaggtagcatctgtgcccttgtagggacacaatgttgtacattcatccctgacaactaccagaacataacgacagctttacaagtggtgtcacgggagattaaggtgattgagagccttactgaccaccccctgcagagatagtatgcatctctgagctctggtctaagttgggctctcataatcatagatagcatagcaggaatgttagtagtaggttggtgcactctgtattgtggcctataagtccagggtgcttccctatgtgctcaggtccccactaagaggatcctctcggcctagggagtggagcataaggaacatggctgcactgcagccaagcagtcataggccgaggtaggcatcctttgtggcagca

SEQ ID NO: 33936 - DNA, 424 bp, Homo Sapiens
agatcatgataggttttgactcctggggttttgtatttttagtagagatggaagaagaagcaaacctgaggctacagaaggatgactgaggttcaaattgtgcttttggaggggccctggggaaaagagaaatgagaaactaactctcaggtcttgtgcatttaaggaccatcaggtctggaggtaccagaggtcctgggttggagaaataaaggatcccctatctgtagttcgaaatgtggggatgatctaccccacaaagtccccaagaccaggtttaatgtccaggtctagccctgttgcacccagactctggttgagtcacagggtccgtcctgcagaacaaggtgctaaagaaggatctcctattgcagtctgtttccaacaagcagaagcagaaagaaaaccatgcaagcactcaaga

SEQ ID NO: 33937 - DNA, 421 bp, Homo Sapiens
cgctaggcgactctcgaggatccctctctcagggggaatctgtgagaactgtacaggaaaatacaataatgctcagaatggtgcctgacatgcagttagtactccaaatgtttgctattctgataaacccctgcatgatcttccaaaggtttcaccgatcactgtgacctgagtcaccacaagctctctgtggttagagcagtgagaattggagcccacctgagaagtattcagtatgtcagttatctaatgtggcagaaaaaatgacccccaaaacttagaggtttaaacaaacaaacatttatgatctcacagtttctatgggtcagaaacccaggagtggccacaccctggctcagggtgtcttacaaggctacagtcggcgtgtcagccgacgctgcagatgtctccgtttgactag

SEQ ID NO: 33938 - DNA, 352 bp, Homo Sapiens
acaagacccccaagcatcgctgaccctgatccctctgacctaccagttgaccgagcagccaccaaagccccagggatggagcccagtggctctgtggctggcctgggggagctggacccgggggccttcctggacaaagatgcagaatgtagggaggagctgctgaaagatgacagctctgaacacggcgcacccgacagcaaagagaagacgcctgggagacatcgccgcttcacaggtgactcgggcattgaagtgtgtgtgtgcaaccggtgccaccatgacgatgacctcaaagagttcaacacactcatcgatgatgctctggatgggcccctggacttctgcgaca

SEQ ID NO: 33939 - DNA, 380 bp, Homo Sapiens
tgaccttgaggctggtctcccagaaacattctgtaaagcatccttcaaagaagtcctggggagctttacggaccatcccagagcccctggccccaccgggtgccactctctgcagcagcagaagtccctttccccccagggcacctgggcagccagcggcctcccttcctcagggctcctttgtaacacagtgaaactgagagagccactgctcgttcctgtcaagcactgagcttccctgattctaagcagaaaactcagaagatgcagagatctcggggaattgatcacagaactctctggttgaagtctcttgtccctaatcttgttatagtcactttgctccctccttagaatccctccattctctctataaatac

SEQ ID NO: 33940 - DNA, 424 bp, Homo Sapiens
gcctgggagtaaatattctgggacaggcacagggggtgtacagggaaagagtctttcctctctgtggcatctgggaggctttaggatgtgggaaagatggtctcctcatctcagttgcccctcattttcaggcagacacgcatgaaatgattacactcccctgaaagatcagcttctacataattcaggatcatcctcaatctctctcatcagagaggaagaaaagccgcatgaattatttacagaacactaagttatttccttttatgagctccaactttgtttttgtctctgcaaactgagattttgtttatccatgaatagtttccccaggggcatgaaaaatatgactcttaaattatgaatgaggttttttgtttcagtccatgttaactaaaacatgcaaaataaactatgttttcat

SEQ ID NO: 33941 - DNA, 597 bp, Homo Sapiens
catttctagagcgggaaggaggaaaggactaactaacacttgtttagtctttgttatgcaaaacctgctttgcatttgttgatttatttcattctcacaatataccaaagtgtacagcatgctctgctaatgcccacagtgctagttcatataacccttacggtataagggctggatggcggtgctgtctttccatgtgacagccacgaggcacagggaagttccttgctagtcagtgacagcactagaattcagacaggagcagactccagggtccagccccacgctgcccctttgcctcggctcatgcggttcacgttgcccgcacgccttggcttctctcttcctttctcccctttgctgttagaccatccttcgggactcaactccaacgcggagcccacccaacgccgttcttgagcgttcagccctttagatggcgatttcctcgctgtggtacattttcccctggattttcttcagatccctctcacatgactttgtaggagggggctggaatcactcctgcacccccaggctcttactcttagtagccacacaaatatacctgtgatcagaatggagtccaggccgctg

SEQ ID NO: 33942 - DNA, 800 bp, Homo Sapiens
ccgtcgatttagaggatccccgccgtcccagcaaccatggcatgggaagcgttggatctgtgggcggacagcatatcctctggggtgttggtgcagctgtggcagaaaatcaggcccctggggaagtcctgtgaagtggatgcttccctgaaggcagcagcagtgtgtggctcagggggtcctcagaggccggtggtgcccgcgggttggacggggcactctcatgggcagcacttggtcttgtgtttacagtattggagggattcacatcgttattttctgtattaagctgctaggagtatcatgtacttagaaattcagtgtttatagtaagatgtattaaacattgctaatgatgtatggttacaatgtataacaggttttccattgtcataactgtatggaattttcttggaggatgtcattagcttctgtttgcactgacttgtgagctgtgtgtacgctgtggtcagatttctgaatgctgtagagcacttaccagctctgaccgcgtcttgctggggccagcaggctgcgtgtgcagcggggccagctgtctcagggctgatttgtagacgtgtattctgtttacaattagttccccaactccgtggggaagaacttaagcggtttaatgtttataattggtgagggcatagggtaagggctaatagtaccgagtcaattcaatcagggctaactggtctggggaaattttcgtcacatccaaatagacggaataatgaaaggggggaaaggagaccctaagggtgcctacgtcaaaaaaagcgatataaacg

SEQ ID NO: 33943 - DNA, 649 bp, Homo Sapiens
gcgacctagaggaccctaagaggtggatgtctccctcagaacaggtctacttaggcttgtagactagtttataagaaactgaatttttgtccttcatatgtggccctttttttatttcagggaagcattaagtggataggattccatgaagtgggatgagtaatactcaggctcatataattgttccaaagccagtatcatttgagattcactgtggtttatgagatattactgatgggggatgagttgtcactgtgagcagtatggagattgagaatctagctcattctaaatttaatttccttttaatcacaacagacattttttcttcttatgagttagtgtgttctttatgcttatacagtaaactgccacatcctaggatacaacaagtgctacgaagtttgtttcaatgcacacaaactgtgaatcacttggtaagggataattaggttaaaaaaaggggaagggaactaggccttgggcgtagtacagagctgcaaagcccattggtttagggggttgaatgaaatctagagaaaggcacctgacgttagtaaactagacttagaattgtgtttgaatcagaaaatgtaggagcatatgagttgtggagacacactctcggtacggtcgatctactgctccg

SEQ ID NO: 33944 - DNA, 431 bp, Homo Sapiens
tttctggaattaggtttgtttcggctgagatgagttgtcattaaacagaggtcatccaaggcgtggcaggaaccacaaggccctggttttctgtgcactagaggacaagaaagttatagctcgatccactgggccaaagcagccctgaccacatattttgacaagctcagtctgcagaaagcaaaagcattctgacaagccagtcactgaaacaaggagatctttcacttaacccttggcagttattagcttgataatgggcatctgctaggtgtagctgaatagcgaacaagacattactaggcagaaaaaaataaccttacagcggggtagaaatatccaggtccccctggaaacactgattgagcacctattccgtggcaggaacgttcacacgcattaactcagccctgggtgactcgggaatggca

SEQ ID NO: 33945 - DNA, 377 bp, Homo Sapiens
tggtgagcaggaccaagcccatgagtcatgggccttctccatgttcttcctcaacattggaaacaactttgttttggaaatatgctcttgaggaatccaaacacatagtgttgaatggtgaagaggagataaaagatgagatagcacagtaggctgccttcccattcacttgcctaggccagtgatgtaggcgttgatcaatgctgtgtgagtgttttgtggggaaagtccggcaactccctctaaccatagtagcagactttgatcctcctgaaaaggttccctctgacctggttgttaagcattgtggatggtagtgcttgattatttccccccaccctggaagtacttgctagtataagagaatatgctgtctt

SEQ ID NO: 33946 - DNA, 545 bp, Homo Sapiens
tatatctcaagctgctcttgaggacacagttatcattgagccatgggggtcttgtcttgaacggatgaactgccgcctcactccagtcaccagtggaagtgtttcgtgggtgtctgaggattggcacttggaaagggggccagatgtgctcgtggaatgtgctgtctggtcccgccctcttagtttacagatggagaaactaaggcccaatagtacggaccagacctggggaggttggcatggccagggcttgctggcagcaattgctggcctccatgaggactgaaggcttgaggccagggcaggcccagtgatgagtgaggcatgaggaagggtcccattcattcatccattctcctggccctgctgttaagccccaggctgtcttccttcctcactggcttccagaaagagtagttgaggatgtccctgtccctgcttccccttcagccccagcagccccacttccaccctgagacccgggatgcccaagccacaagcagccccagcttacaggccacgcagccatttgcttcatgtaggtt

SEQ ID NO: 33947 - DNA, 567 bp, Homo Sapiens
ggacgtttatggtgaggctactctagtgtgcccactaacatgaaacacatggctttcctcaaaatgtgacagtggaacccgaattgcatggagtccgaacacggctggaaaatccagacctagacagtccaatggcttagtgaggaaataccatttaaatagggtattcaaggtaatgatctgacaggcggtgatggagtggggaggtggggatttcagggagaaggaataacaggagcaaatccgaggaggattgaaggacggggcaaggctgttgtgctgattgcctcctggggcgtctgcagatggaaagagtgacagaggagctgctggggagccaggggaagtggcagggcaggaaagccagccctttttctgatatttatgccagcttcagaaagctactgtggggtgaggtccgattcggcacattgcatccctattttcaaagctaacttaagggcaggtgggacaccattcaggaagtaaggatcttcaaagcctttctttcctttatgggacttgttagtgtgctctactgggcactgccagcttctcctcaatgtc

SEQ ID NO: 33948 - DNA, 456 bp, Homo Sapiens
gttctgtggggaacatggacctggaaataaacattttgtccagtggtaggagaagcttgggttgtgagggactggttaagtgctttactcagttttctgtgtacactcagtggcagagcgagggctgattggaactggtgcccacccttctacaggccagttttcattttcatggcagcatactctctagttggagttgagcactttttcctaaccaacctttaaacttattttctcccattacaagagtgatgaaagtagcataataactattagttttctactgttggctgtaacaaattgccaccaacttggtgggcttaaaaagtacaaatttattatcttacagtcctcttggttacaagtctgacacaagtctcactgcactgaaacatcaaggtgtcagaagggctacatctcctttcaggaggctctaggggagaattcctttccttg

SEQ ID NO: 33949 - DNA, 374 bp, Homo Sapiens
tgagtgggtcatcacactcctaaaggtaacagatgccatctagtgatggagaacagaaatgcaagtttttcaattaaaatgccggacgaaggcatggggtattatgttgtgtggtgtttagaaatatgtttcagtgtaggttacttaaggtgttgcacagagatacagttaatgcattattattgttagatcatatgcagttagaatggaattaagcaagttgttgacgagtaaaactttaaaagattttggcattagagagtctcattttataggcctttgtcttgttctgagtctggtcattgaggataagaaacacctcattgtaaaaaagggatataattattaataacagattgaattaatttttgggt

SEQ ID NO: 33950 - DNA, 754 bp, Homo Sapiens
ctagaggatcccaccacatgaagacatggcctttataggtttataatggaacaaggaaatgtgtctcttggctaagtgaaattttattaattaaagagaataaggagtggttagcagattaaaaacagcagtctctgccacaatagttcactctcatagagggagaaacgtttcatccgtacataaaagggagagtattggaagttttcatggagtgtttgtggtaaaatctagatttcaaggaattgagtgaaggagtgaagattacagaaggggtgaacgtggcttttgagaagtatggtgtccatgaaagaagaggtgattctgggatgttagtggagttaaagaataaattctttttaggtagcagaatctggagcagataatagtctcagaaaaggaatatcttagaaggggagaaactgaaaaccagtacatagccatatttttagatggtatgagggcactgaattaatatagaaagtggataacactttctactccaaacacagggaaaagaaggagaggtaaggttgaaatataaacattatgccatggagaagaaaaaaatcagaaaaatttatgatgtcctcattttgaagtcaaggcagccaatatctcctggaggaagtgggcctgttaaatagggcgtacgaggaatagttttgtgactaaacaaatgtggttttgggcctaaatccgggtatacatcttcctgtttccccaattgccttttggatatctgtccctgtca

SEQ ID NO: 33951 - DNA, 671 bp, Homo Sapiens
aaaaagatcagctctcaaatgtggagtctatgtatgaaagggctggcagttaagcactgaattcagtcagagacagaattaagtctaaataactctagtaattacctacagctatccaactgaagttgcctgtcatagttggtaaaagctgccaaatccatctgattatctcctctagctatgccaaaatggaaacacacaaaagaaaccctctcctgagcggaattaacttgctctacagataatttgggggtaaagagcttaccctttgaggaatagtatactgaagaaattcctcaaaagagataatacaaatcacctggagtactgttccaagcaccgaagttgctgctttggcccttccattgacttaccatgccaccttggcaaactccttaattggcttggggattcatacagaaaaccgatatagctgtgtcgtccagctcatggcattgtaaggatcaaatggcatgctgtatgccagaggtctttggaatctatacacaaggctgtaaaactatgtcacactgtttggatggaaagactcttgtttcaggagccaaaatcagatatccgagacaacacaggaaaatggtcctgcagatatatccccatttctgtgttcctaaatataatctttctacctaaaaggaaacgccttcatcgat

SEQ ID NO: 33952 - DNA, 568 bp, Homo Sapiens
ataaagcataaacaaaggaaacgcaacaaaagacttcatctcgcagaaatgcacaggcaacacgataaagtaagagggggcacatttcactcccaagtttaaacggtcaaggccaaaggtaaagccataatggcccgctctgaaagatcctttccaaaaaacaatcgaaggactggttggatggcggaggtgggggaaacggatactaaagccctatactacaagttcacaatctaacaggcatgtcatatacagaaaaccaaagccagggaccatatgtcactacattcttcttagatcacatctagcacctagtaaatagcttgcctgtaccctggcttagctccatagacagcccacacggcacttggggctaggggtcagggacttgctgtcacaggttctctggttccctaaatgccccctacctctcagttctcctccctgtatgttggtcggttggtggatctctcatagacgtcgagcctggaagtgcatgcctagctttggagcttgggccggtcgttcttaccatacatgcgttgacgtgggaaaatcgtatgggcgg

SEQ ID NO: 33953 - DNA, 541 bp, Homo Sapiens
aaatttaatggctctgagagtgggtcaataaagataggtttggctctgaggctctcatgagattgccagtcaggatgtagggtgtggccgcagtcaatctgaaggcttgaatatgcctggaagacccacctccaagatggctcactccaatggttgggaagttgatgcccgctgtgggcaggatgtctcagtagctccctgtgtagatcctccatatggcttcttgaatttccttataacccagtggcttgcttcctccagagcattcaatccaagaagagctcggcagaagcagtaattgtcttttatgacttttgtttttggaagtcatacactatcttatccctatattctaatgctcatacatgaccaaccctgacgagcttgtaaatgggtgactacacaaagtcattattattagcaggtgatcattcactggggggcatcttggatgctgactactgtatgctgtaaccagtattggtgtaatatttggtggagtaaatccaccagtattccattttttatttcaataacctct

SEQ ID NO: 33954 - DNA, 704 bp, Homo Sapiens
accaccatctgaaaatatatcatagtatattaatatatcaaaaatggcatatacaatataataataatattcaagcacaagctaaggaaagtaaagcatctaaaaatcatacatgttccaggatagctgctaagcggataaagaaaataatagtattatagaggacagcgattaaaaatgtagaaaaatactgtcttattagcaacttatcataacacatattacatttggaacccctgaagagcaataccatgtacttatttgtctgaataccatcaaacctaataaagtacatttaccaaaagtagacaataattgtttcccagataccccagtactgtatgcattggatatgtacaataaaaagttgctgatccattgaaagaaccaataaacaaatttaagtttgtagaatgatcagggtatgctcagccctgagacattataacaagaagacacaaaaaatcgaaaatacattcatcatccttcatatacaaaaccgtattaaatcaagtaatgaaaccagctaaaatgaattacatgcccacaggaaacataatgaagtgctcctgtgcattctaatataactgttctttcccatgtctcctacttgcgccaaatttcctccaaatctgcaccaaaattcttcataaggcaggtcgctataaatatatcaacctcatgagtcgtgagaatttacccta

SEQ ID NO: 33955 - DNA, 741 bp, Homo Sapiens
aaacatagatatgtgatatcagcaaagttaagattattgaaggctatactggtagagagggctggtaaaataggccaataattccgtttactacattatctaggattttttccaattaaaaaatcctcataagctgctcaagatagcatctccttttaatcaatgtaccaggtcaaactaggtcaactacttccctatagataactttcccactgcaacctctagacccctagggtttccgtacatccatgcctttttcaggaagccttgaaaaataatgttatcccaaggaaattcttccgatctgtcataaatatgttgttaccacacatagcaaatttcagcacatgattaaagaaaaggcaaatcataccgtctgactgtaatagaagtgacattactatataataccatagaccactttcctaattacaacataacccttgcaatattactaataccccaaaactcttaatccttttaaattaggataatcgagggttcttaccttaaaatgtaaaatcgggattcttcatgtcccctaacgcggaaaatatggtaaaaaagataaatcctaaggcactaaggctaggcctttccctacagcttaaattcccttagaacaatgctgccactacgctcctaaagccaaagttaatgccacctttttcccacactacatatgtcactacccgtattcttctgccattaacccgatattagaaaattggatgaataacc

SEQ ID NO: 33956 - DNA, 469 bp, Homo Sapiens
cttccattttaatacttactgagggagtgcatagattacaaaacaccaagtaaataaaaaaagataattacagagtatgatatgtgtcatgaaagaaataaacgggactaagaagaaacaatatgttaggtgttttgggaagaagaaggctgcatttaaactaagacctaaaggatgagaaagagccagccatcttcaaagtgcatttaacaggcagagggaaaggcaagccaaaagtccctcaggagaaaatactttaaaaccagtatttcagcaaaagaacattatatcaaattaaacattttagttagaaccctcaattatctaatttaaaggataagagtttggggtattataaaattcaaggaaaattaaataggaaagtgtgtctatggaaaaaaatagaaatgtcacttctataacagtcagactaatatttgccttttctttaatcatgtaagaattacta

SEQ ID NO: 33957 - DNA, 532 bp, Homo Sapiens
ttagcccagagaattatatgctagcactttttaaatatatactacttctatgaaactgaagagctcagcaagtttggttcaagtctagctgctagcggtgggcaccatatgcagtgttttatgacttctcatgagtctggtctccttacaaaccctaagtgtgtggtcctgagctgatttacatatcctacttcaaccagagaaacttcttgctaatgagaactagcctaggtagctttagtcctgaatctaatcacatggaaatatattcttgatccatgactgtattgtcaacatatccccatttgcatagtatgatccacttgagagctgagttgtcggcaatatttttaaaatcgccctgaatcatgtgttaattcacactcactaacagcatatgcttgcattaatagcacccgtctgttcaacatcataatcttctaatggtgtctgtaatataaaacttctcttccaaatataagtttcgacttaaagtcagctccttagtatatcccttaccgatggaaagacg

SEQ ID NO: 33958 - DNA, 419 bp, Homo Sapiens
tgtcgctggcgctctagagatccccgctctcattgtaaggtcactgacttgagttgtcagttgagtggacaaataacctttaaaaaccaaagtgtaggcctgacgtcacatgaatgtagacagcaaattcatctaccttcaatgaaacagatgactgggacacaggcattctgtgttaccagattaggcaaatgcaggttccttttggcacccctatctctagtgattctagatttgatgacagtatagtgacagtataatgatgaaaattcagaaatttaacattgatacaatgctactgtttaattcagtacccatagtcaaattttgtcaattgtctcaatgtttttccctttctcaacacaatttcagtccagaatcactgtgtttaagtctctttagcctcctttaatctggaa

SEQ ID NO: 33959 - DNA, 353 bp, Homo Sapiens
gcatgctgcacctaaattcgtcacagtaacatgattttcatgctggaaatgaacctgtgcatgtctcccaatttcctgactatggaggagtaaaatatatgttgctgcttatcagtttttttaaatgaattacctttccataaccacttattttacttgaaagtgacacaaagtctataacatagtagatacggttacaatatgcctgttacattttatagtgacagctgtataacttttaaaaagtgaaatgtaaatgtgtcccttcaggtcaacttcttatagaaatgtttatggtataattttattcaaagagaaatatgagacagattttttggagtggacacacaatt

SEQ ID NO: 33960 - DNA, 565 bp, Homo Sapiens
ggcttgatgccctgcgctctagagaccctgaggcgaagcaatcaggatccccgggtgctgaggtggaggtaagggatgtttcaggcacaggcaagcttccactctacacattatctgtgggatcaagtcatcacacaagcatcattcactttaaccaggctgctgcaaatgcctctttttcattccgcctctttctcttgcattagactttgacctccttaagaccagaacccctgtggggtttatctcttaatctctcatttccatcacaggacatggtacagagattatagctgctcaatgtttgtttcaaataaacttggacatttacagagcacttcctggtataccaagcactatttaagccctttccgggcatcatgtctcattatcctcacaataatcctaagagatcagtggtatccccattttacagataaggaaattatccctattttatagataaggaaaatgaggctcagtgattaacaaacccaaacttaaatagctagtgagttcagaagctgagatctacaaagcccattttatggcaaaagacttagta

SEQ ID NO: 33961 - DNA, 371 bp, Homo Sapiens
taagccaagacctaacaaacccgcaaggcttaaactaccaaacctagataaaaaatttcagtgaggacaactcggaacaaaaccaaactcggagcagtacatgctaagatgcaccagtcaaagcgaactaatatactcaatgaatccaataagttgaacaagggaagaagtgacgtaggaataacagaggcatccctattctagagtccatatcaacaagagggtttacggacctcgatgttagatcagagcatcgccgatggtgcagccggtattaaaggttccgtttagttcaacaattaaagtcctacattgatctgagtacagaccaggagtcctccaggtcgggttctatctaagttaaattcctc

SEQ ID NO: 33962 - DNA, 616 bp, Homo Sapiens
aaaactaacaaagaattttcgtgtgcttagatccggatgaaacagagcaagaaactgacaacctgtgacatatgtccatactgcatacatgctgctagattgtcatcagtatatcaatataaaattaagaggtgcaacgttccacactttatgcggcatcacaaagataaaaacaagttatgaactgaggtataggggtacagtacacaaaggcaatactaagactaacttataaacagaatcatgaaaagaaaaatccatcccttctgatttcataacatgaaaagaaccggtgtagaagtacagcaatggtagcatcttcattcagcccacagctatgtaatttgtatgcaaaagtgcttgtcttaattatgaaaaggaacatcctgaattgctgaaagtatatacaacgggcacacatccagaactaggaaagaggtaccactcccgcatgctacgaagacttgggtcaaaaaatttttctcatgtttggtactataactaaagtctgtgctaaaataacctcaattgatcctgaggagatgaacttctggaacaaacaaaactgtaaagagtcacagcattagactctacctgtccagccatctttttaaaa

SEQ ID NO: 33963 - DNA, 525 bp, Homo Sapiens
tgctgactatttgccgctctaattggtgattctctaatgagacatgtttagcatctttgcatatgattactttccatttgtagtatctaataaggagtcttttcagatcatttgcccattttttaattgagttgtttgtttgccttttgttcagtgttaagatttctttgcatattttggacacaagttctatatcagatacgtgttttgcaaatattttctcccaatctctggcttgcctttttattctcttaacagtttctttaatggagaaaaacagtttttaattttaatgtagtccaacataccgatttttctttcatcgtgcttttgctgtcatcactaaaaatcatcaccagatgcaagtcatgtcaaattcatgctatgtcttttttaaaatttttattataggttcagggtgtatgtgtgcagatttgttacaaaggcatattatgtgatgctgaggtttgcagtacaatccatctcccaggtagtgagcatagtagtacccaacatatagtcgca

SEQ ID NO: 33964 - DNA, 628 bp, Homo Sapiens
ggtcagttcggtaatagcgttgttaccatgcccacgtcgacgaaactccggcggctctaggaaacgagtctcggatcagaattcttcaagtgtgaactctttctctttcgcgtccgaatcggatctttctttagtccgcggggaaatttttatccaaagggatttccgcgatgaggattgagggcggccaatgctcccaggtcgtgggccaaccaagcggggatagaggggctggcaggaatggtaagttgggcggaattgatgacggcgaggatgtcagtcattcgctcgactggcatcgagagcgccgggggtgggccacctagagagttcacggccggattaatcgaaggaatcatcgtgataggaattgcctcagcggtcgcagttttgtaactggcgtcttctggatcgaaataatggagttcgaatggaggcacgacggttttcattaccagcggtaaaagctccctgatgaaacacggcggtgccggcaattttccgccgctcatcaccgcgcgggatactgaccgggctgttaactttccaggctgtttcattcggcagctttggttgatgaaggctattcgaattccggtaccgcgcgcggggagatttccgcgagtgt

SEQ ID NO: 33965 - DNA, 388 bp, Homo Sapiens
ccccgaggattctcacaacataggcatcgattacaacctgagggaaaggatctgaatgagaattaaagacccatgagtgccctcagtcataccttgcaaatactggtgactcaccacagtttttctgcctatgaagaccttgactattatgaggataacttttatcttcattgatttggttaaaatggaacaattagagtcaagaaatttgtgaaaggtttaatttaatctaaatctctggagaagaccactggcaaaatcaatggtactttattaattcattaaaattcagatattcataacaatttaaaatcatgtttgcactggctaggtaaaaaaagattcttgatcctaactagtaaatgccagctttgaccctgctgggaag

SEQ ID NO: 33966 - DNA, 655 bp, Homo Sapiens
tacgtcttaacaattacagaagaaccatgagatgtgccaagataatcactagggagaaagatgccacaccacagacagacgaaagcagatctgtactggaggggaactcaagggccactttggaggggaatgggtaatagaggatggttagaatcatcacctaacacaatgtagaactatggaagagaaaataccataaggctaaactgtctccaacaaaaagaaaactagctcctcaatagataaacaacaaatgaaaaatactaaagaccacaagtctaatctacaagctatccactgccttgctcatagaccttgggacggactcttccttcctacatcacaatatctacactgcaaaaatagaagtataacatcgctattccttacagggaagtaacacacattactaaaagtgactataagctatacttcaaattgcaccagagaactaaactattatacaaatattacatcctcaaagggtaaacttacagctaactgtctcccttaaagaattttatcataaagaagacttacctgtaaaaaatgtaccatcttaaggaaaattgctaagccagtactaccaataatgtcgggcataagatacacaagaggatcacccctccagttatctggtatatcacatacccat

SEQ ID NO: 33967 - DNA, 355 bp, Homo Sapiens
agaaaagttgggctccatttctcactctcacaccgaccaggactgtaataatcaatgacttgttgaaggcttgttggcttgctaaccctgagtcctcagtgcctagagatgtagtttgatatttgatgaatgaacaaatcctatttcagagaatcccaggaagtcagagatggaagggaactagtattttaatgacatattttctggttataaaacttggagaattcatacattggaaaattacaaaactgttaaggaggatgaggagggcattcaccatgtagtgatggggaataatcactaagacaaaagagcaaggtgcagaatagaatatgctgccatttgcctatatata

SEQ ID NO: 33968 - DNA, 674 bp, Homo Sapiens
ccagcgcgttaatagctatagatgtcgaataccaaggggtggacaaataatccctttccctctttggaattctctaggattaggagaatccacagagcctatatgatataatagctcaacatttagcataccaaaggcatacccgtgtaaatctaggagttatttccagagattgttttaaggagcagtcttatattcagggtagaaagttatgattggatctgctgttaaggagaacaaaggagcttctaaaggtttgggaggtttactggtagtaactattctaggaaatatttatgtttgaaggtgatgttcacatgggttctttagaaggaacatagtcaagtgtgatggattaactctatatagtctttctcctcttgtgcgtgtaggaaatctgacctgccgtgtcagttgatgtgacaagagataaagaaagcacagtattttaaaatctaaagcagattcctttcttagaaaacaataggaaaaaattatagatggatgtctttgctgaaacctaacaattagctcatattccatgagaaagagtggctaagaattatttctgttacctacctctaaagctctcattgatgtccctacatttgaaataactttcttcttgtctgacgttatccaatatacatttcctgtctgtaacctccttgcta

SEQ ID NO: 33969 - DNA, 613 bp, Homo Sapiens
tacgaggagtccgtcacgcggtatccatcctatcaaagcctatagagtacgctcgtcatattcagttgtagggctcaggagtatgctcgctcttgggcagtgcgagtgactaatagcctagttagtgcgcctagggtgtagtgagtgtcaattagtgcgctaagtaagggaagggagcctacaagggagtcgactcggacgtatgtgcctgcgtacaggcgtactggctgatagcctcatcgggtaatgatcagccaaggcggggataagtgtgatttcgaagacgatctaaccttatgcttagttctgtggctgtgactgttctcattccaggacatttgtagggcagcttcagtcatagaacggtccagtttattttcgtgctcaatggttccctggctcaagtggcgtaggcttacccatgaatgtgaggggtacgagtccggtcgttcagtattcgccggggggtcgtacggcggtcggcggccccggttgaggacccactcactagggtcgagtagctatggttacccacataataggggcatcatcctattaattaagctgtggatagagtgttgatacccattctgtgtcccagccccgccctgcg

SEQ ID NO: 33970 - DNA, 378 bp, Homo Sapiens
cggaacaccctcctctttcaaaaaatcggaataatgtgattatgatagtgtccttacactatcaattggctaggcatgtaattcacactcaaaaattcttaccagtttattagtgacttctactataataaagtatattaagcaacagatgccttcatatgaatggatcaaaacgttaagtgcaaatgtatcttaatcaagatgtgtttataagagcttttgtgctaatattcggcaatactctcaattatttcaatgcaatttcattactcaattatatctcactcacttataccttattttgtagaaagagaaaaccaaccacaaactattggcccaggcttgcaaatttaaaataaaaactgctttgctagtagc

SEQ ID NO: 33971 - DNA, 399 bp, Homo Sapiens
ccaggaacgtatcaatgttacagacggaaagctgggtggggttgcggacacactcccatagagaaggtggtgtgagcttgtctggcaggccgtgaataacttttcatatcaataagggtaaattagtctccagaatatttgcgagatggaggcctagtatctatatgcaaaaaagaggggttcccagtatctcgactgtctcgacaagtcacgggtgtgccgtggcttccagcgtctcttaaaggactggtgatgcagatctcggaccaagaaggttttccagcaaagtcccatgctttgccagttgccttgagcctgggtccgggccctcaagttgaatattaatggcctataatgaaaagggagaggtgtcctgaatcagtatcttatatgagagat

SEQ ID NO: 33972 - DNA, 669 bp, Homo Sapiens
cgaggtcttagacaccctcctctttctctgaaaaattagtactatctaagtggttagctcccagcttcctttaggacagaaaaaagagaaggagagaagtgacacttgttcttttactcacaaagtcttggagataggaggtaggaggttggggtggatgtagcttggactttggaattagaaccaggttcaaatccccaattaggacatttctcagtattttgatcttagataggtttacttatcaaagtgtctatttataaaatggggtataacttaatcagatttagatgtaagaaatagtatagtgcatggcagctagcaggctttcaacgaacgacatctctcattactatcattttgacatcacatttatctgctcagagttggttactgttctgcaatttttcccaaagtgtcactgtgtgtcaggcagggagtatctgcctggaggagtttgaagtatgcatgtagggtggatgagttgtgggggtcggcacccaggtaaatcactagcgaggctttagtacccgtcttttctctccaggattcttgaccaaaagttacactctaaattaaagtccaaacaggtacatacctaaggggaatatggtggaaatgtcacagaggagggtggtcgtctaaccctagccgacagctaaactattc

SEQ ID NO: 33973 - DNA, 498 bp, Homo Sapiens
cccgagacttgaagatcaagaatactatgctctggcctgaggtatatgggtgggctctgggcagctcaaggaaggggctggggactctaatcacttgtgaaaaagtcaaggcattcctctaacacccatttagcaaaaagttcctacagtgtgccaggcatgtggtttataggttggggattcagtagggatcaaaacagatgacgttcaagggagacagagacacagcattttcagatgctaacaggtaccacggagaagattctaacatggtgatctaggaggcgatctaacagggctagggcctagaaggagactttagggcgtggggccagagaaggctgcaatgatgtttaagccaagatctgagtgatccaaaggtcagggggaagagcattccaggcagaaggagtaggcagtgtagaggccctgaggcctgtgaggtcctgaagggcagcccacgtcaatggggcaaggagaagggaaagaggagggtgg

SEQ ID NO: 33974 - DNA, 501 bp, Homo Sapiens
aacaccctcctcttcaaaattaagatttgtttagtgtgttaaataatttatcctggttggatatttttataattctatatattcttttaaaaacctataatatatctgattgatctgatgtaaaaacaagaagaaattctagcttcaaaggccaaaatgcatataaaggtcataatttcacaatagcaactatagaaacacattgaaggcattgggtctttctcctgtagcttctggagaaagaagaagaaggataaatgaaggaaacggaggacgcatggcatttccctaatccattttttgtagcaactctgacaggcgagcttgcaatggaaaattgtgcctcatccttgattcttgaaacaaatttccccaaaataaacttttactttagtgatgggattaaactcagtaaaaacagtcaaggattagtgaagaagactccatattctatcagaggatttgtaaaaaattctaattctttgacactttaatttgtgg

SEQ ID NO: 33975 - DNA, 396 bp, Homo Sapiens
ccattctataaatagaactgtttactcatcagtattagtaatctactcatcagtaaagagtaaattattaactacttagtaatttactaactaatctcagtagattataaatcaatagctattattaagttattgataataattgaagccaataaaaacaaagcccaactatgggtcaagcacttactacatgccaggcattgttctaggccttggcagtgagcaaaacatacaaaaattcctgcctttgtggacctgacattctggtggttattattaccaccgtggtctaatgacaagatacacagcacatcagtccagcgcactctcacatgacgctgagaactgcagatggtatctacctgaattcaacagtgaccataaaagcacttggca

SEQ ID NO: 33976 - DNA, 433 bp, Homo Sapiens
acatgtggtacccaccgtttgtggtgggaggactggtgtactctgtgatagccttttgctaaccaggaaaagatttacaagtcaagttcgtccttgattcacaccactttataggtgacctcgtgtactaaatctcttagcaggccaccaagtagttatttgtaggggaacactataccgtgggccttggcaactagtcttgggtgaaacatttgtgccagcgtttgccaaaaggagtcaaataggtgcccttgaaagtgaaagcagagttgcacttagctcaggttaatgtagtctgcgtcaaggcttataaataagcagactaataacactgaggtgtccgccctggaaagcagttagagttgccctaagttgtctaacttgtcttccagcatcttgcccaggtgcacctgcagttgcaggtcctcccacc

SEQ ID NO: 33977 - DNA, 610 bp, Homo Sapiens
ccgatgaaaagaaacgaaaagaaaaattgtgtagtgacaagttggctgtgaagattaggcccaccacacaccccaccctaacccgtttaatgggatgcaattctgtttgcctccaagtcctctaggcctgggttctattggtggagtctgtgtgttgtcctgtggcccctcaaatgcactaaagagaggtcccaggcagaaactagctgttaaaagtttggattgtgggattgaatgtagtaaccggtgctttatattactactctctggctaattccacagggttctttttgaaagatacagcaagtgttttgcttggttgtttgaaactgtactttgagaacccatttacagtacagtgcctaccagagccctgctggttctccatgcctagttgtttttgacataacacacacctggactgaccccaccacttatcagtggcctctttgtaagtttaattagcaacagacaaaatttatttctagtacaacaaacacctttctctgctgactgctttggccctgtactttcaataataggttttacagttgattttggaacttcacactagctacagagagctagatagagaaattggcgggtgttc

SEQ ID NO: 33978 - DNA, 360 bp, Homo Sapiens
gaggacctgttaactactgagtgtgcctggaaactgttaaagttagggctgttgttcgtcttgtcaaataattcataggcgagggacaacctgtgtgcaaggctgtttgtacagtgtggttcgtgtattgaggttgacctagaaggttgtttggttggctgtggtgcgagtggtagtttggcaggttgccacatcaagactaacactgggctgaggggaaaagtggctgttagggtcatgcaggaaaaagaaagtattgggttgtgtacccaaagaagggtgtagggggaagccatgttaacaattctccctgcagaggccaggtctgtaggctcaagagtatttgtcctcccaccggga

SEQ ID NO: 33979 - DNA, 366 bp, Homo Sapiens
agacagccaagattttcatagaaggcctaccacgacagcatccgtgaccaccatagaacacaaagcccaagatggaattgtcaaaatattttcaaactccaagaaagaggattgtgtctggttaactccaaagaaaccacctgtctgacaactacaccggccacagctgcaccccagcacctggcaaaagctactgtaatttaggatcctaccacaaccctgaaacaattgcctttttagttgtcgactaccaagtcaaagcacaaacacactagctcctaaaccttacctcaggcttttactagaattaagccctcccacgggatccgtgcacgttaacgattactaggactatgcagaaacctg

SEQ ID NO: 33980 - DNA, 520 bp, Homo Sapiens
agacatgtgtaccccctgctgcagctgcagcacgggtgctgataggagtaggctgatagcggacatactcctcctttcacatagtcggcaacctgatccactccttcggctactagagtctcgcaccactgccctggtgaggaggggggacctgggctcccacccatgtgggcccaagacagtgtttcccctttcctggtttcccctccatcccttcctacctcccttgggtttaggttggcttgtttctcgttggtactagaggattcagcgtgtgcaagcagtggggagggtgtgcctgcagaggggacctgtcaagaaggggcaacccagccccaccaggacagagactgataatcctcctgtcagtcacctggtcactcagcccacctgttttctgtggagtctttagagtgggtctcaggggccaaacaacaccaagatggggacacactgtggaacaaacctctgtcctcccacgggatccgtgcacgttaacgattactaggctatgcggaaa

SEQ ID NO: 33981 - DNA, 540 bp, Homo Sapiens
aatgactgtgtacccagcgcaagctcagatggtagaaatcggcgacctagtccacatcgctcatgtagcaggatgcaacccaaccccggcagcgtcttccttttgaagcctaagctaagcctttagacaccaggggggcttttacgtgctcaggaagtgttgcgcagaaaactttttctaccaccagccccctactaagacaaggagagcaaaaatcctaaaataattgtatgtcctgtaggacttcaacccttctcctttagctctagatagcctgctatatagcgagacacaaagctggatacagctagaaccaggtgcagtgtaggttaacctcggactcaggtggtcgaatgaactgaaccactgcttgaaattggacttatatactgatccgattatttttttccagacagataacttgcagaaacaaaaccacctgctgtttcctacgccttataaagctgactgaaaaagttgactcaaacaaaatttgcaggtttgttacaactccctggtcctcccaccacaaacgtggga

SEQ ID NO: 33982 - DNA, 378 bp, Homo Sapiens
tgggaggacttcacagatagtgtttcggaaaggcccaatcatctcagtgcctgactaagccgggaaggtcccgttgtccaaattgcccaactaaagcacacatgtccactacggcagcccctaggagtcagtagtcaaagaggactgaggctccagcgccgttctttagatcggttagagagtgacccacagggtgcccttctaggtaccggtactccagaaagtttcctacacccttgcctagcagttagcagaggtccgggtagctgagactggctagggtgactaagacctctactacgtgttggtcttttactcctcctggtctcagttggcccgttaggtcattcccagaaccctgtgtcctcccaccacaaa

SEQ ID NO: 33983 - DNA, 722 bp, Homo Sapiens
aatgcgctgacgtactgtgatatcccgttgactgatggtatgcatggtaattagtacatgttagttgagcattccagctagggatgtattctgagcaagggttctgcacgttctgaagcctaacatatactatatcaggaatcagtggagtgctaggcgctcatacatagcgtatataatttttatctatcttagggatagaggccttttaagatacgaacgtaaacacgactcaaggaaataatgtaaacaactatagaggtcagtgtttatacatctttctcctttactaatagcaagggtacatccctaccatcaaaaagtggtatcctgtgcatcgttatccgataacaacggactataaacggacctaagccaggtactctctaaagtgagatatgggaggatgcagtagccggtgctggttgaacccaaatgattagaggtataatcatttccccactaaaatatttagtgttctcattggcccgtggtttactcgagtagagcccttggactagccgaagacagtttagcaaggctgcagccagctctctgcagaagagttaccccaccagccccaactatccgagcctcagacaaggtaagtccctcagagtcagagagctccgacaacatattggtttcccctgttgtctcccgactagtttgaactcttaggtgtgtggatccggaggggacaaggcaacaaccagagtaca

SEQ ID NO: 33984 - DNA, 491 bp, Homo Sapiens
agcatgagactgtagacccgggaggacggtcactcaaaggcagttaagttggggcagcagaacgggtggaaactccaccgagtagagaaacaagtgccagggagtctgcgaggagaggcgcttggaggtttggtgaaagaagcagtaggacagggggtcgctggccaaaaacccctaaacatgtagaagaagataacgaaaggctcagagtaattaacaatttttatgttagtgaagcaacatgtgggttatataaaaggtcccgggttaactgaacagacaaagggagcaaccaactaggcagagaaagctgtgaaacaactatagcataaaacagagtctatctatgccaagtttaggtaaaaaatttgatcagtgacagtattgagtgatgaaagatctaggagggaaatgcagcagcacctaacctctgcttggtatcacaactaaaacttaagtttacacccccttccaagtggaaagggaactat

SEQ ID NO: 33985 - DNA, 640 bp, Homo Sapiens
agtaccccacttatgtggtgggagagacaagtcaagtatctttcaggctgagagagcgtgcactaattcattttaagtctttcatgaatactagagatggtgagcgctagattaacgtgatataaatgatggcagttgttatttttaggcaagtttgcatactggctgttgaggcagagtgcagtgtaagagcctaagctcgcactgccaggacgtgagtgactgtaacgagagactttttcgtttaccttcgatatttatgtagagagccctctagttccagggccacgtggttaagtgtaggacttgtaggatacctggctgacacgcaggtgacccaccagtattaattcggacagacgagccaataaggtgtcatgaaactcgtggatttgtgaggctcatggtggaggttgagatggcgaccctcacgttacacggtccttaccatcaatcaaaccgtggcatttcgatgacaccgttaatcgaggactggacactatgagggcaagctttgcaaacgaccctctgatccaggatgactctggagttgaccctggctcaacagcacacatatcagtgttgctttgcttaacatgatgcacttggtcctcccacgggatccgtgcacgttaacgat

SEQ ID NO: 33986 - DNA, 393 bp, Homo Sapiens
tgtacccacgtttgtgtggaggactggggaatacagaaatgagtgagcaactagagaggtttaactaaaacaatcagctgagggtcaaggggaagttgcctccccaccatcacagaaggcaatgcccagtgtaggagtctggcaggccagctgactgctactaagagctagagtctgctacttagagtaatgattaaagacagaaccacccaagttcagacagaaatgacagtggaaaaatttcaagctggctgcagtcagagtagacctcaagaacccagtaaaaatctctactagactttgtattctgcagaaccctccctccttgaaccacaaattgcttctattcaacaaggcgaaaaaaacaaaggaacattttccttaacccccctt

SEQ ID NO: 33987 - DNA, 744 bp, Homo Sapiens
tatcgggtgcaggcactgtaggtgtaggagtcaatagggttcagttgctttggagtcacaatagaaactgctttgtgtaatgaggctacaagccccagcccatgtttaaagaggttcaaagttcaagtgtgtgtattaaatgggatacagtctgttgtataaacattgctgctttgctaacttgtggagtccagggagcagaatttggctaacctaaaattttgggtttatgtgctattttgaaaggttttagagctgccagtcttagcgtcagttttgttttaccctaaaacaggggtgtttaacttgcctgcagctgtttaaagcgattgattcttggtgcatctagaattaccccttgtattagtgcttttagacacctgggttagactgtggccaactcggttaccccagcctaatctgaacctgtggccatggtggttttttaggaaaccagggcctggccctggtaccccgcggagagagctgacatgggtcaaggagaccatcgagcctggagcacctgtctagtcattttgtggccttggatatgcacgggcagaggcaaatgtgggaggttgccccttgacaaggctgcaacctcgaggagaagtgccagaggagctcgttgactgtaagtgccagagtgcacctcatgtaacgtggagcaggttagcagtatcctgcagtaagcgatggctgccacagtgtcaagacggctgagtgtagaaggggcaccctgga

SEQ ID NO: 33988 - DNA, 647 bp, Homo Sapiens
tggtacccactttgtgtgggggccgtcttgaccgcgcatatggtgacgagagttcagaaggcgagtatggaacaacagagcctagcatctaaggacgctccacatatgtttcccagtgtataacacgtttccccgcagggcgcgcaggtccaagcagacacagatcactgcaggttaacacaccaccatacaaggccgtggcctgttcactgtcctgcagtgctagcagtgtttcttgcagaacggatctgtaaaccaaaacacactgccaaacccctgccaatgacaaaacagacccacagaccatacataccctggtccccaggcaacccactactacagacagaggcatacagaccctctgggctgttcagatggtcagtggtacctaataagaccagggcagtcaactcattggattcacccagttaccagaggtgcagcaggtacatgccctctaacctttatcaggccaaccctcgacccaccaacccatctcctgtggcttcaccactgcaaaagcatccaaacctaaccaccacctgcgtgtgtgcccaccaggcttgaatcctaacaggtctaggcaggtcttttaacaggtgaaggatctagtcctcccacgggatccgtgcacgttaacgattact

SEQ ID NO: 33989 - DNA, 688 bp, Homo Sapiens
atgactcgtggacccacgtttgtggtggcaaatcaagtcaagtacagtaacaacagacactcacgctttggctctgacacttagcgcatcgattcacaacagaagatgctgaacagtggaagttcagtgcacaagactaaaacctagcacacaggcactaagagactacacttttagataagtatacatattggttatgaccacttagaagggttttctgtagtgcttccctcatcccagttgactacctccgagatgaggggttgtcggtgtactctgattggagtgaattgatagagcccactggagagttggtgctctggagtgggggagccagcagaggctctgtgcagggttggccaatctgttgtggagtctaaactgcagggcctgtgtactgatgtgtgctgcagttgttgttttatgggacctggtgtggttacagctgtttctaggtgcctagtctgtaggcaaaaaggcatggtcagaacgtttgctggcgtggatttaggtctgaggtctgccgccacgcctttcagaatgacaaatccacagttaaactacaggtctagttcccctttgacctgaaaagattcgtatattaaaaaaacactagtggcctataaaagtgaacaatttatcatgcttcccagttcgacactggtccttaataacttcttttgtgtac

SEQ ID NO: 33990 - DNA, 360 bp, Homo Sapiens
tacttggtcaacgtttgtgtggtttaatagcattttttgtacgcttagtttcttactgatgctctaagctacagaattgagacccggcacccagattaggaatagaaaccttcggaagaaacaaaccttgtattaggagatggagaatctccccttacaactagacctctaacagctggaaccaagacactactgcagactatttcaggacaggtgaaacagtcgtcaccaagaactcctttagctcctaaaccagtgtcaagcaggccacaccgaagtgacctcaaggcaaacagaccacctctgcacctaagcctcagaagtactcatgcaaaaacaacagtcctcccaccacaaacg

SEQ ID NO: 33991 - DNA, 642 bp, Homo Sapiens
tggtacccagtttgtgtaggaggacactacaccagcactgttttgccagtaattagctgtgggcttagagtcgcggcgcgagtaaatcggctcaggacccatgccattgccacgagcaccggacactacccagccacacagaatcaacacatgattgccaccaacaaggacccgaaggacctttcggccaccctttagcacagtttatgtgcactagttatgttacaactcaactacacccaccacaaggggatccgtgcacgttaccgattactaggactatgacataaacctccagccttactttggtgggcactacttccccactgatctgcaggttgtggatcttctaccagttacaggtgccgacccagggcctgcctgacactggactcgcagaaacccacgttgttatacacctcatgtctcctacgggaatcatctacagaaccacctgcaaagtggaggggtcgctgaacagcctctacccggaggccgactgtacacccacctagtacgaggcccatatagagggctacgcggagggcagagaacgctgcccactaatactaaggctactactacatcagcagcagcagccgtgggttggtcgtcttctcagttgtcttgtggtagctggcc

SEQ ID NO: 33992 - DNA, 640 bp, Homo Sapiens
atatcgacacctccctgtcgcgtgggcgatagatgttgtagtgaatgccgtcaacgacgatatcgttgtagtgttgtgtgatggggttggctctgttcctcctggatggaaagtggggtattaccattgtgcttctccctaacctgggctgatggtttggtttgctgcctgggcagacacaactttgtggcctttatacttgtacaagagcaactaccccagcaggttgtccgttaaccaccaggacaatctgtagtccttgacggtcctcagctccttctcgtatcagtcgttgttggcagagaggctggagttcacctcgtaaaaccacagcactatggacctcagcagcccgatgcagacaacctctacgaagtacctgcggactaccctgacctcacggtggcccttctggagttatgggtggttgccgaacactgcctgttactctttgattgatttgttgccaccctgggccaggtactaaccttacagccctatggcctagcagtactgccgcactaactcttgaaagacagataagggtaaacagggcagacacaactagtagactcacactgccagcactattgcctgggtgtaggctggttcctagactgagccctttgactagctgtgg

SEQ ID NO: 33993 - DNA, 622 bp, Homo Sapiens
ctgggaggaccaactgatacctcgctatgtagctttactcctttatcctctaggtggcgtattagaatggtgccgtgctcacagggtgtgactggcccactatctagggtagtgagcctattttgtggcccctgtgtgcagtcaagccccaacctcctggcttggtctccgcttgttgttggctacctagttccaggttgagggcccactcctgtagttacagccccgtcaagtacacagtcaaccctgccacctgtccagagtgttatttatcaagaggatttatcgcagcactgagatagtatataagaatatgctgccaatttctgtcattgtctttgacctatctgtttgtgtatcctaatactccgcagcagcggaggcaatcgtgagcgccctcccaccacaaacgtgggatccgtgcacgtcagcgatcacgaggactatgcagcaaccctcgcccgtgatgaagggtaacctggctcgagcctcatagccaggcattattgagatataatgatgtgtcggggcactcctagaaggccatgccactgaggacagttccccaggcactgagtaccaccagccaggcacccttaagcagggtaacggagatcctcag

SEQ ID NO: 33994 - DNA, 621 bp, Homo Sapiens
agatacccacgtttctggtgggaggacagtcagattgcagtgggaggttggggtgagtgatgtctcacgggtggagacaagtgtaatactaccgcagtgggaggttggggtgagtgctgtctcactggtggagacaagtgtaatactaccgcagtgggaggttggggtgagtgctctctcacgggtggagacaagtgtaatactaccgcagtgggaggttggggtgagtgatcgctcacgggtggagacaagtgtaatactaccgcagtgggaggttggggtgagtgctgtctcacgggtggagacaagtggcactgggtgaatactgaatatgttagaagaagtgaaggtggtggaggcaggaggccctaccagaaaaaatttgcaactgcagagtggatgggcctgatgggcttaccagttgttagtcgtagcaccgcagccgcctaacagtccagatgggcctttggtgggttagaaaactctctataactaaagtaggtcttttaatccgcctccttctctgacagctccaacagaagcaggagtatgtaaaaagctccaaacctaccacctggaaactttttatgctgatactgagactattatactcccaacctc

SEQ ID NO: 33995 - DNA, 363 bp, Homo Sapiens
tggtgggagacagccttccccagttgcatatggtacactattcgctcaagctgcctaagcataacatggtaacagatgctgccgcctagcgaggaggtgcaggttcccttggagaggtaattaatcctgacggcaaagtagccggacttgtttaatgctacaggcttaaacattagaggaagctaccctaatgtgtgctgtgggtttaaactgacaaaggattccttaacagaaaaacaccaagatgttagcagtgtagatatttcagacaactgtgcttaacctagtggctgccactttgtaggtgtgctcttatttgattgttaaagaaataataacaaagatttcaaggtcctcccacca

SEQ ID NO: 33996 - DNA, 452 bp, Homo Sapiens
tggtacatcgtttgtggtgggaggacggcgctcggtttaggggattagagaactactcttgtccctggctgtcacaggagccacgagcttgtaatatttcctctgtatgtgaacacccacaatctggtgcacaaagggcacacatattggagggcctggttgtgtgctgggctaattgctgctgcagtttgggtcaggggaggtcccttatgcagaactgtctcccttgtactgcctttaaggcactcctgtttctaggcgtgcccatcacccacagcaggtccactccagatgtgcagctgtgtctggtgtgcctggatgctccttaggggtgaagctgcatcagagctccctggcagggcagtctggatgagttctttgagttggcctctgggtccgccttctcgggatccgtgcacgttaacgattactaggactatgcagaaaccttg

SEQ ID NO: 33997 - DNA, 490 bp, Homo Sapiens
agatccgttgagccagggcaaactatgtaccgcacctatatggcagacctgccgatggatgcaggactcttagctgcttggagttgtctcttgacataaggtgtaagactccaacacttccaacaatacattgtaaccaaactagtgcaagctgtggatcactttcaaagccaagcacacaacctacaacaacaacaccaccactaccactggctgcacctgtcccaccaaggattcagtgtcctggcacaaccctactttaaccaagtgcagcagctctctgatcacgacttagggcacggactatatatcctccacgttgccccgaaaccgctcacgcacctcttttgcagtgaagtcctcccagggatccgtgcacgttatcgattactaggactatgcagacaacctgcctctcccgtgttcttctttttcttttttctctttgctggcgctgcgcgcccgtcgcgctctgtggcgggcggcgcgg

SEQ ID NO: 33998 - DNA, 588 bp, Homo Sapiens
acaggcggctcacccgggagcagagaagtgactgctggctaggggagtgtgccaggatatagcagggttctgggagctggggccttgcgaaccaccaactgccaagtcaaaggcctagctcccccacaccccctttctctttcttgctcaacacctgataggagcctggtctggagacccaactgaccacaggaatagtccacttgaccatcaagggcccagctgccctgccagagaagattccacagcgaccacttgtcctctccaggttgtaacaacaacccaaagttggtgttactactaagatgcaaatactcaacattgtctaaaagatcggctcggtcttgaatttctgttagagcaacccacccaggggacactctcgcaccctcgtgttagcctctggggccgagctcagggctggcaacacagatgttcccctggggcaacggccctgtcctctgcgacaagcccagtgccatgtgctgggtgacccgttaaacagctaactctgtcctcccaccatcaacggggatccgtgcacgtcatcgattactaggacatgcagaaattcttgtcttttttagt

SEQ ID NO: 33999 - DNA, 664 bp, Homo Sapiens
gtacccactttgtgtgggaggacccagcctcactcgtgaaggagagagcggcaagcaagagtccatggtggaccacgcagctgagcacagagtccgctccgaaacacacaggccattccgtagtagtttacaaaaaagaccacccggatggacagcggtgacacagcgagacactagccagactaccctactcacctgatttacgcgttgctgtagcatgtggtactctatgttctacgtgatagtctcctccaccacaaacctgggatccgtcgcacgttaacaccttaacaacggtactatgcagataccctactaacaagcgtctaggaggccgtaaggggactgtctaggccgggaagtttgttgtgatagcccgggccttgcaaaggttttaggcgactacaggggtggtgcagatatcgagtgctcatcctccaccgtcgacactactataggtattaaggcctcttggacaccacctagggtgtaaggctgtttgctcttttggttatacctattaccttagttagtctgccaaggacactggtgcttgcaaagagaaaagtacctcttaaaacaactataaaaccttctgtagtaataaaggtcctcccaccacaaacgtgggatccgtgcacgttaacgataccaggacatagag

SEQ ID NO: 34000 - DNA, 629 bp, Homo Sapiens
aaacactacaatcaggcacagcctaaatctccctctaacaaatcagactttggaagtcttcagtccagagcataggccagagagagcaggaacaccagggttgtccttagcataaccagttgcaggttatttgcaaatcttttgctaggtggagggctgctcgagtctatttcctctgccacaaatttgagaggactcagccaaaggtcacatggtttctatctgacaccaatatcggggccacaccccacagactgcagcattgttgtgcaaaccatgttggctactgtcccctaagctggcaataccaatccacgggtggtgaagccactgcacattatcctgtgttgccctgctgctgattcttgaaaatgcttgctagcagcattccaactcgtctctgtaaccaggctttgactcgaaacgctttacacctcagcctggtataaacaagaccctgatcaaacccaactctcaaaaagcaagttcttgataaacttggttgcctccggaaactgaggggcacaggagctgtgtgtgttagccctggtgttagttaacccacagcaggccctcttactaaacagctcattcttgcactttaacatctctccttgataaccgtgtct

SEQ ID NO: 34001 - DNA, 375 bp, Homo Sapiens
tcacatgtggtcccacgtttgtgtgggaggcccactagttcaacaaggactccacttgctctactgttggctaagaggcagtctgcttttcatccagggagaagcagaagtgcaaatggttatagactatgtacaggaccaagttacctcggcaattctaaacgactgcaactacctgatctttctacaagtagataaagggggtctggatacaccggaattgctatactttctctcggcctggggatccctcgtagtagaggggtgcaacctacagctgaaacagctccactgctcgctcgaaggagcccccgtatctggcgagtctggtggcgccctagatgacaccatgagcctagtcctcccaccacaaac

SEQ ID NO: 34002 - DNA, 470 bp, Homo Sapiens
ggaggactgtcctgagagctggtgcattaggtgcctggccagtcaccatggtgaggacctttggccaactgccatgtaggagctttgcaggggcctgccagacaactccggctcccactccagagtctccttgtccctccccttaccctgtcaactctctgataacaccccctcgccgaccatagtcctttggccccagcctggagatggcctctgctgttggttctctggattctggattgagtcactggaaagggttgcatggcccattgtgtgttcagcgcttgtttgtttccaccaaatctcggaacaatgctcaccctagtctgcatgtccagtttcttgacagtattggaaaacacagctctctaatgtgtattctatccagtcggcttaactccaattccctgtttagatgactcggagaaatcgttttcagtggctagcggaccataatgaccttggccgta

SEQ ID NO: 34003 - DNA, 517 bp, Homo Sapiens
gacctgtggtaacacgtttgtgtgggaggctactttcactttcatcgcccagtacggcgctcagcgtgctgatgccctttcttacactatagttgactcccatgcctactaacatcatacttctaatcattattgaggcaccaaattccacacctcccaatactcttctcttgttctccacagtaatcaccagcctactagtcccaaggcctattatagtaaatacacctctcatgctgtgtccttccgttcccccaacgtccaagccgttggggtgaccgttcatgacactgtcaacttctacgttatcgccgcgggccccaacgcccataacaactatgccgttatctctttctaataatattatttctcccactcctcatcttacaaccatggttcttctatagtcgctcacaccccagttcacatctcttctataaaagactccttgtcccatcaccattccacccagaacaatagttaacgttctgctatcccccgtaaccgcatcgtcctc

SEQ ID NO: 34004 - DNA, 701 bp, Homo Sapiens
agcgatgacgctctgtggaacccacgtttgtggtgggagggctaggtgctagcggtggggttgacctgggtctttaaccaggacggcttattcgcagccctctacggactgagcagcaaggcacccaacaccgagagacgacaaagtgcaggggacactctacctactcagcgaggggacctagcaaggctcaagacaggctagccgcaagcaccgagatgaagtggcagccccagttgctagagaccagcccagctagacctgttttggggtaccagggtgtggctcgccctctgccacttactcgaatattctgtggtggctgctttttaggacccaacaccaggggcccagcagcctggtgaccaggggacaggtgcctgcacagagtccaagaggatgcctgccacaacccagtggcaaccaacagctttcctgttcctgagtccccagaagttccgaggcccagacattaccccatgttatgccagattttagggtccagttgcccatttaaagacacagtcagagtcacgggcatgaaccagcccgtgacacgggcacccggagtaacttctagtgggaggtcttagggtacagcccgaccacgcagcacgtgcgcacacggtgacatggcaagcaaccagcacctgagccaagtgcacaacctcagactgactacgcaacacgaggaaccagta

SEQ ID NO: 34005 - DNA, 374 bp, Homo Sapiens
acacggtttgtggtgggaggacctagaatttatggtcgtggatgtctgagctagtaagatggtgttgggaagttgggtggtctagtaaccttttttgtacgaacacttagagacgacagtcacttcctgcaggctgtaatctcaagccttgacgaacccaaaccaacattgactgaaggcacctataactcaagttatagccacagaaagggctttgcttgtatccacctcaattccaaataccttggttgcacaaggagaccacaaggactatttgaagacaccatccattccctgaaaatcctttaggttgattttggggtctttcataggttgtaggtcacctagcctaagctgactgcctcccaccacag

SEQ ID NO: 34006 - DNA, 645 bp, Homo Sapiens
atggtacccgatggtgggagagaaggcgctaatgagaagtaggacagtaagatatctaccaggaccctagcagaccaccctccactgccagccagggtcatcttgctagagcctctgaggtcgcaccaaagcaaacagagcgggtgcgacatgtacagtggtgcgcagaggcaggacccaattggagtgcagaacactacctaatatagctgcaacaacatcaaaggcaaactgatgcaaagcaagcttggtgctcacattgttattctcttatttagaatgtcccttggtaataaacccctttccagcaggcccttctcagaagctgactgctggttcattggtgttattctgtgatgccttggccacacttttgttagtgtatttaagaatttgtagggtcttcatcacatgtcctgtttagtcagcctatgaggggtactgaatttgtggttactatgcccatcaggtcttctgggcaccctggtcaagggctgtttgattgatgctttccactactcgcagcaaaggttttgggtaaagggaagtgaaaggattccagtagtctgtcatggaggtgggatgtaggctgagggagaaggatcactacaagcacagcaggaagtcactggtgtgaagaaccct

SEQ ID NO: 34007 - DNA, 652 bp, Homo Sapiens
agcactctggaaacacgttgtgtgggaggcagggcatttagtactgagtttctgtatgcctgggtggtacagagcattaacctctaacatcttaaacatctcaatttaaattttctcctttctgaaagataaccacctgctgttccatctgtttaatacatcagtaaaaataatgataaatttacaaaacaactgacacaaatgtcaagtcttgttatcgttgtgaaactgttctgactgtgttgccaatttgcaaagctactgagtgtggtggcccgacacagtgaagttctgggaagtgacctcctggtgcatcactttgacactgagaggcttttcacggggctgtttatcattgaacctgtgcagcagacttgtttcagagaattgtatcacaccccttgagcatccttccacagttccttcgaccccctggggtgtttgagggactagaggtaagatcctcgttttgagcactcggtttgagctgccaaaatgtgttgagctacctgcaaccaattctgagtgacattccgagcaccatctctcgtttagttgccctttactttctactctcggactgaaaacttccaggtagtcctcccaccacaaacgtgggatccgtgcacgttaacgatacagcagaaaaaaa

SEQ ID NO: 34008 - DNA, 552 bp, Homo Sapiens
gggaggcagaatgatgatatgagagcctgctgcatggtcagggtgtgtatggtgttgatggtcagcagattaatggtcggtactgtcgttgtggggcgaaaggataagggaataggctgggggaaaatataagtattaagaagagtagtttaagtaggccccattgtatgtggtgtctccagcatggagattggtgttgtaggaatggacatcggtggcacctgggagggtgatgaacccagcattgggtgggatgtcagaacttccagaaccagcaccggccacctcatatgctgtagcgggctggtgatggtgtgtgggtggattgtgactgttgcaatagaagaaatagcggggtttcgcctatacgggggctccgtaataatggggttcatgactgaagcctttgccaccgtaatagtagggataatcatagttgttgtaataatctttagctagggcagagtcgtattcgaagatgtagaggacgaatccatgttggaagccaggcaggtcctcccaccacaaacgtgggatccgtgcacgttaacg

SEQ ID NO: 34009 - DNA, 485 bp, Homo Sapiens
tatgacagagtttacttgaaaaagggtggcaggccctttctcattaagaaaaggattaggatcattactgtccacattttttaggatcaaaaacaatcttatgatatcctactgctgtaaaaatcttggagttgggttttattctacttagttgctgagttagtacgtttgtcactgataatagtgcttaagtcaccctcaagcatgatgtctaagtgaagtccaccctttcccccgctctgtctataaggagggcactaagggctcaaatgatactcagcagctgctaggctgactcagaagacaggggaataagagtccacctatttcagttgaccattgcatttatccagcaggcggccattatttaacttgctggtaatatgagcacttactgttcaaaacaaacacaatgaatgtgcagtataacaggctgactctggtggcttcccagcaaagggactatttgcttttggaagagacca

SEQ ID NO: 34010 - DNA, 403 bp, Homo Sapiens
accagggacatacttaaacagaggccactaactataaacagtgaataggtacatgtccttgaaaaaggccatataagattcaatgaatagggtacatataccagacccggtgtcacatctaatatagtgtgtgaatccatatctttagacaatgccaactcggaataagaagctagagccatgtccttgaggaaggacatctctgtttcttaaaatattgccatataagaagacttccgtcccataattatatacaatgattgtggtggtgacactctactaaagcagaatcttctccaggataacacaaaggaaccagccatgatataaaggactgcataggccctgggaacacagaactaatatgagattaaagtacacagaccacaacttaatccactca

SEQ ID NO: 34011 - DNA, 439 bp, Homo Sapiens
ggcgtgtatcaagctggtttcatagtaagctacctcacctttgatttcccactgcaactggtttcaacttacacttcagtactctagttgttagtaccatacaattgccaagaggctttttgttaaaggctacttctgatatcaggttccagctaagctactcagtaaaatggctcaaaccccagcctctctattttagtcttcaggagtactcttacttcactgttttttgtaacatcttacaatttaggattgtccatctaccttcctctctctgcaagttcttgagatgtaatctgctgccaactcttcacaaaataaaataatatttaatcgttcttccttaatagtcttgcattcagtgtgtcaaattgatgtactaatgaaaaatacctaaactgtggggaataagaattaaatctatttcaagcacatgcag

SEQ ID NO: 34012 - DNA, 356 bp, Homo Sapiens
aaagaatagaaagtaatgatggttgaaaagattaggatgatttaggtcaacatgttaaatttaagaagagaatgtgacacaaacaaggagccacctggaaaccactgtaaatgcaagtagcacatacttagagtctgcttatttctatacacgtggaagctactatgtacagatggtacatgtgtacaggttgggacaagataaactcccccaaaccagggggagtctaagatcatggttagaagactaaaagatttaagctttattattgaggcactcaaaatgagaaaaaagtttgtgccgacatacgcattttttaatactaagacagacatttaagactatctagacaaaaa

SEQ ID NO: 34013 - DNA, 388 bp, Homo Sapiens
cctcgacggttggtgagtaggtattttgctgcaagatatggaagtcatggatcctcattttgtctagtcactgagttatatgaaagtctggttgaatgtctgtcactttttctgatggagaccgaagtctgtgggaatagggagattcttttaacaaccttaaggatctagatactgtatatatacctcaagctgatatattagccctgatatgacaggcaataagacaaggggaggggcaatcagtaattctagaaggtccaccatgggctgggttctgtgctaggcaccttctacatgttctcatctaattctcctttacaatctgtgtattatgagcctggttttacaggagaggtactttgagattacagcttgagacacgcga

SEQ ID NO: 34014 - DNA, 445 bp, Homo Sapiens
atcttggttctttgctgacatgtgacatttccaagaatatactcagtgtgcttttctggacccttaaggacaaacatgataaataatcatttgttaatcttccttcataaggccatgcttaataccatttattgagtttcctactaaactcaatagctttctccttttcattcagggaaacaggatatttttaggtttcagatagagtcctgcagaaatgtcctctcagaggcaccttcaaaagcaagccaaggatgagtattttgggccaggctttgtacaacacatgagtgtgtttctgtctatttgcatgactataggggtacagaatcactgaccagctgattatctgctccaaggtcagaaggaaaagcgggacagaacaaagaacagaactgaattcctgaggctaacttaagacatttcaatcaacgttgagaaaaac

SEQ ID NO: 34015 - DNA, 415 bp, Homo Sapiens
tcagcccagcctatgcagtctcgccacattctggggacttctgttcccatccccttgcctgtccttggccagcaggaagttcccaggttaataatacacatcgtttattgagcatctactactgcacgggtctcgtcagtggtcgtttctgtggccgccgtgactggcaggccagctggggcctggacggccggcgtctccttctccaggtaatcagggcccctctacgtggcctcccggggcccctctggggaggcagcctggcatctcacaggcggccggggctcccgggaagcagagacgggctgtgccagggctcctaggcccaggcctggacccagtgccgtgccagccaccaccccaggggccctgccctggttcgcagctgagacacgcgaccagcttgagacacgcg

SEQ ID NO: 34016 - DNA, 410 bp, Homo Sapiens
tagccccttggacatctgaccttgatcacataccctttctctcccactcccccagccccccaccccattaccagcactgccaacgtataagcactatcctgaggttagtgattaatcttcccatctctttgcaatgagcatttgactgccttctctgcctacgtctgcttccacctctcacccagtattgcttccctttagtctaaagctagtgtgagaatgagaaaagcgtttatagcagaaagagagaaaacccatggaaaagtcttccctaccctcacagattagctcacatgagtatctgctcttccatttgccccctttccatctctcatcacatagcttattgactaggaataaaagggctggtcatttgagctacatgttggtttggtgcctgaagaaaaata

SEQ ID NO: 34017 - DNA, 369 bp, Homo Sapiens
aaaaagtgtgtctgtactgatgtcattcagcctaaccatatatactcggtacaggggcatccaccaaacatcagcaaagcagggctcacggtgaaaggaaaactctccattcctggttcacacagttttcaacgcaggaagtaccctgcatccaatcacctgggagaaatgcctgatctctcaccgtaaattgttcacagtcttcttcttctccaaacccctgtacccacctgcaagtgcacacacagctcacagcatcagcaaggtatgcatgaagaggcagcgaaacctttggaaggggacgatgcagacagacctggtgtcggatagcagttctagccgcgcaaccctcagcaagtcacttagtct

SEQ ID NO: 34018 - DNA, 433 bp, Homo Sapiens
gactctgtctccaaacaaaaaacgaaaagacaaagaaaagacagaaggagggaaacacccttccacacatcaggccttgaagaccttggggcctctcctgtatgactggtcaacccactccagcatccagcgcagcacccagcataggtaaagggtgggcttacggaattcactgaaagaaaccaacactgctcagatgctttccccaccccgtgcaaagggacatcttcacctcaaagacatagatccctatgtaagaaatcatctcaggcaggccctcccagggcttggaagattcaaagagatggcactcgaagtatgagtaacacagtacctggcccacaataagtacccagaaatgggtgctttagtaaagatgtcagacggatggcaaatctgatgcctacacttaagcagaagaccattaagcaca

SEQ ID NO: 34019 - DNA, 658 bp, Homo Sapiens
ctgtgaaagttaatatcccctgacaaatacacatcttagcaccaggaattgggggctgctatcaccaagaaactagaatgtgcagcattatcctagcagccagttactgggcaatattaacattgatattggaggtagaagctaagatgacccatattatacagtggttcaccatttgttaaagctattacctaagaaaacttggaagacaaaccttgtgcctacttaactggtagctctggagaaagtgattggaagatatcagtgttcgaagtatgttgactaccatcggctgtctttgacaaagtattgcaattaatagatgagacaaggacctgtttataagcagaaatgaaacactcagtcctaaaatttggtgcgctgaaacattggaaagaccaattgctgctaaataacccaacagtaagatgtagaaacaaaaaaggctctgagagataaagaaccagtaaaacttcttgattaaacaaaatgacttagacttagagaaaagatcaaattaaaatgtggctttcccacctattgtttcagataaccatggatcactgccaacatgttgaaaaatagaggcatggagtgagaaagcttgggaataaatcaggcttgagaatgatccctaagaaagaacgatgagtgtcct

SEQ ID NO: 34020 - DNA, 665 bp, Homo Sapiens
ccacgcgtccgcggacgcgtgggcggacgcgtgggttacaatgaacattcaatccctcagcaaaccctatttgttctcaagtaaatccagaatccaaccccttcccaccacctccactgctacagtcattgcttctcacctggattatttaaacagccccctcccaagtgatctttctgcttctatccttgattatccaccacaatcccctaaccccagtggctagtgggatttttttaaaataaatatcttaattcaaacctcaatggcttctatgctcagaataaaatccgaagtccttacaaggtcctgtatgtccctacactattgggccctcactgacctggtttcctgctactcttccccagctcactaatggcctccttgctcttcttcaaatgcaccaagcacatgtgtccactagatatagcatttgttcttgctggtccctctgcttggaaggctcttctcccggatacccccaagctttctttctcattttctcaggtgtctgcttaaatacttatttgcaagtgacactttctctgaccattgcatatgaaatagtaataccccctttcctgaatttttctatatagcccttgaattaattgaagtagccatttgctattgcaacaacttcaaaatttcagtagtttaataca

SEQ ID NO: 34021 - DNA, 612 bp, Homo Sapiens
atgagccactgctgtgcccagctattcttcattttgtcaaactatattcttgaataatttttttgaaaatggtctgtcaattataaaatttcattttgtcatctcctttgttttcttgtctgccatattctagaatcaaaattattttccctcaaaactttgaagatatagctatgttgccttttatattcagtatgttggctgagaggtttgttgccaatatgattttatgtttttgtgtatatggcattttttggaaacaggatttttctcttggatttctgaaaatttagccctagctgtgtaaagtatcagtttcatttagaggttttcttgatcttagatttttaactttactcatttctagaaatttttgtttactattcctttgttctagtctacatactctctagaactacttttaggtagacgttggtgcttttctgacattgctctgtatttcatctcttactccttcagtgtgttcagagaacattcattttttcagttttctaactgtaatgtttgtctatcatcagtcatatagtgaattcttagacttcagggtttttttggtcctcatatcagcctaatgtttaattgatgtgacat

SEQ ID NO: 34022 - DNA, 487 bp, Homo Sapiens
gtattctttttctatgtgtctctccttcaatattttgcacataattttgacaatctggattcatgatagggcttcctttttgcatccacagtggtttctgtttcacctgaggtcatattaccagattacattttcaagcttgctgtcatttcttccttagtcatctcttctttaaaaaactctggtcataggagcatatcccccctttgctcatgtccatattaactaggctaattgaaggtcctctgcaactctgttgaatgaatagtgaatggaatctgatttcctgtaatacccaactttatccaacattttattcattgcctgttaaagttcctagaagtttattacattcactttctttcaaggtccccatcttttttgctttacaagaataaaattcaggtcacagattttctggatagttcattccatcttaaaatcaatgaaaatggaggcaaggaagtcaaagttttattagattatc

SEQ ID NO: 34023 - DNA, 660 bp, Homo Sapiens
ccacgcgtccgggaagagcccgatttcctcaggaggtaaaggaatgttcctgtcccccccggggaaagaaagtgaaaatgaaagcgccctggctgctcctggtgtggtcccatttaaaacgaggttgctgaaggccaggatgcgtgctacccggatgtgtgcccagaaaccctgcagccaagagcagccgcctggaccaccagcctccccttcatccacctggcccagcccagagcccaggcccacgtctggtggtttgtgtcttacgagaggccaggcgggggctgaattctctcggttctcagaaggtcaagccctctgttagcatctcctcgaacagtgggccgggggcaaggtggtgactctgttcagtccttaggatggctggaagccagaaggaggagattatgccgccacagcagggagtgcctttccaggaaagcggctgctggggcagcatgggagcccagtccagggagcgttctggcagagaccattccggaacatggatctgcgccggcggctcccaggagaccttccatctcggagctcctgtggagaccacgtgcctggcaggtccttacagttgtgggttgtgtggcttcttgccaggcagctgattggagtttgcgactgtgggttggtgagagtggagagcac

SEQ ID NO: 34024 - DNA, 680 bp, Homo Sapiens
ccacgcgtccggttaagtaaaccctttatcagccataaaattcaattacttttattaggtgaatcactatgacagatccagagggtaatacaaaggcagtaatattgttcctgttgtcaaggagctaaacattctagccctcctccccaaccctccctttccccaaattctcaaatcataaatgtaattagaatgtgaatgtgcttggagaatgtggtgttggtaacaacgaattccaacaagtaagattggagaaggcgttgagacatcatttagaccagtacatacttgttcgtatgttacgtatgaacaaactgttgtttagtgtggttaggtaattgttcggtttgtgataaaactagaagaaactgttttagtttagtttggaagacaggacacttgacagatgaacagagatggggaaaaagacatttcagatagtatgtgcaaaagttcaaatgtttaaacagcgtcatgggttagttgtttcttataagtgcatataatttacttacggaatggttggagaaaaggcaggagttagatcagggaaggctacgtatgctaacttagaatatttataattcattttgtagacagtagagaaccagagttagtatagactttttcctttctgaatggtaaaagttggttagaacaatgattctgatatccattat

SEQ ID NO: 34025 - DNA, 682 bp, Homo Sapiens
ccacgcgtccgtttttcttttggatttttaatgcttttgaattaaaaatgctagaacatgaactgattcttctatcgctatttagatagagccctgcaagagcagagcacgcatgctttctttaagaacaggttggtttgtggtcgtctgaggactgttttaaggagacttattatacacaatcatcccccacaaatgatttctaaagagaggctggtatgaaagaaggagtttccatgattctgtcctgtggttctggggaattctgaaaatgaactttagatatttttgtgaaattcttattttcatatttttggtatctcagagttttcttttctggcttctgtttaacatactcttctttgccctaaatctctcttatttttgctccttgggacaactgaagaatccttagataattaatagtatgaaatactgcccttttagttgaaaaatgtcacaataatgtaataagataaataaggaggtgtcgctttaacctgtatcgtgtagtctcctctacttactaacacttacttgtattactagaagcattattttttaaatcatggaaaattggtggcaagctgagcatacagttgtttatttctgtttgactgattattacaacttcattatttgatgaaggttctgtacgttttcctttaagacacatagaaat

SEQ ID NO: 34026 - DNA, 651 bp, Homo Sapiens
gttgttgttttaattttaaaaaaagctagaaagcaatcaatctctcctgtcctggagaacagacagaacaatcagacacagccactaaaaacagggaagcccacctctaacttctctccccaaagcttgtcagtgtgacaaactttgagatagacaccctaaggggaactgccaaacatcatggaaaaccccaatactcaaagatccaaatttatacaaaagatagattagggagtgactacacatagcattaaatggttggtgatttgagagaaatgcaaaaaccttccatccattgtaacttaccagaaagatttgtgatttacccacaagtttgcagacacacatggtataaaaggaggtataatttgggatgaatagaaggctcattgtgatgcaaatctcccttttttggttcctttcttttgccatgagttcataccttttcctcctgggaacccacaaagcctcacttcctcaacaggaactaacagcatcacaaaagaatgacaggcctccaggttccctggtgtagcctgaccggcaccagcctagtctggtgtccggaaacctgcctctccccgcctgtatgtgtgcctgattaaggcagcataacactgaagggtgagagtcctggctccgatgtgagac

SEQ ID NO: 34027 - DNA, 550 bp, Homo Sapiens
tacagacttaaaacagaagccaaagacagagctctgaaggatcacagaaaacagaagataaattagcaaagccttccaagcaaaagtgctttaaagggtattaaacgcattagacccatgacatttgtgaggaataatctaaagatctgtaagaatttccatgtttgagaaaaatactgcatactagataagcttactcactaagtgactcattcctgcaggccaaccttttagtgtcccaatgtttaaattcatgataaatacctatacctattttgtcacatttagtttttacaagagctctataagaaccaagatcattccctttatggattactatgcttcatgagtctttagggttgcttataaactggcaaaatctcaaccattaaactccacaaatggcaaaggtctgctatagctggcaaattaggaaaagaaaatgacatgaaattggaggttagagagtaaggtgagaaactgttagtaatttaaaaggtcagagataggcatgattagagaaaataaggatgggatggtgtagtgccct

SEQ ID NO: 34028 - DNA, 676 bp, Homo Sapiens
ccacgcgtccggggccagcggtgctgcttgcagctgacattttcttcatgcctcaaaactttacttccctcattttcttgggctactgctgctctccttgtttgatcctgcccaggaagggcctggactctgtttcttcccgggctgatttcctcttcctgatggtttctgtgtgatcctggagccaagggcagtgagacctgttagagagggcaggagcaggtgcagacgtgaggttgtttcatcagcacaagtgcactgctgtttaacgtgcacgctctgtggcagtttcttcatcccggcactgtggacatttgggaccaggtgattctgtgtgtcggcggcatcctctgcatcgtaggatgttgagcagcagccctggcctctcagggcatctccagatgccagtcacctctcccccagccctgggcatgacaaccagaattgtctccagactttgccaaatgtccccggggaggaaaattgcctgtggttgagagctactgctctcaggagacaatcaggagatttcgtttctagaccattgttggttttcagggctgactgtcctcagctctgactggaacgtgacaaaaactaaccttctgtctttcctcagactacgccatctccaagtccgaggtcctctcccagattgaacaagggaaggagccct

SEQ ID NO: 34029 - DNA, 392 bp, Homo Sapiens
atgttcactacagatgcaagcatctgattttatttcaaatattttgcatccaagtttgcttacatacacagatattaaacctacagatacaaaaagctgagtgtacttacaaattaataactgtacacaggcagcataaaattctctttgtacatgccaaaaacattccgtgtccacccagggtgaacacagccacttcacaaacagggtgtaaataaggaggttcactaagtacaggaaagttacaagaccatattggcattttaacagccattcctgagaaagagaatgggaaagggcttaagagtcagaggagaggaaaagaggaaaacagatgacctcctacatcagaagatggagcagtgagaatacagaatagggaagcaatagtt

SEQ ID NO: 34030 - DNA, 524 bp, Homo Sapiens
ccacgcgtccgaaaattagtattgcttttatcatataaatgaatattcagagaaaattatacaatactctgataaggaattttcaaatgcattaggaaagagagtttgtagaaaaatttaatgaaatgttatgtttgttcttttgttattttagatattcaggaaccaacactgggaatgtgcatattattgctgatttatatgcagaggtgataggggttcttgcccaatcaaagtaagttttgtaaatcacccatttagattttctttgcattttagaatgcttcattaccaatgaatacaatagatactgatagttcgaaatccaccattttccatagcactaagtcagctccaccttttattactttactgctctgtttctcagaagctctttaacactcatacctgaatttcaccacttgttttaattttatttggggttttctataaatgtctgaatcgaacaaatcagaaattgccaaccatatttaggacactatctttttgcctatttttaacaa

SEQ ID NO: 34031 - DNA, 409 bp, Homo Sapiens
ccacgcgtccgcaaagccatgtactcctgtaaagcagagcacagtcatgagctttccttcccacaaggagcaatattttctaatgtgtacccatcagtggaaccaggatggttaaaggcaacttatgaaggcaaaacaggactagttccagaaaattatgttgtcttcctctaatactatttagtggatggcagtatcttcatggtatccatggtaacgaataaatgctatgattttatctgacacagatacacggggatcagcccactaagtgaaaacagtcaatttctatcaagttcttcaccagcagactatgtatctccttattaatggaaaaaaagatttaaattgttggccattcttttttggttggttagttattttaaaatatcttacttgtgaaaaatgt

SEQ ID NO: 34032 - DNA, 608 bp, Homo Sapiens
gcttataatgatagggacattataggagctacaggggtatttttgttttaatattaaaagtatttctactggaataggacaaaatgtctcacagccaaagcccagggacttaagggaaaagtctaatagccagaccaagcagaaggttcccatttccccatatgcccaactttaacagaggccctagcatgtaggaaatatatgaatctttgaatgatatttcctgtgataaaggcctgttttattccaggttttatatattagaacaaagaaattgatgcagatattattagagtgtttagcaataatatggaaagaagtcacaaagtctgttaagttagccatacatcagagcaggatcagaacctgatatctgaagagtgggaatcccacctctgaaaccagttgtacctgggagagaaacaatattattaattggaaaatattccctataatgctaggattaaataaaaatggataaaataaaaatgtacaagaccaaacacttcttcatttctatatggacctgaatatcatcctgtctggatgaaaaagagtaatcatagtagagtaggtacattcatggcaaattaagcaagatttgattt

SEQ ID NO: 34033 - DNA, 626 bp, Homo Sapiens
atagaaaaagataagttatttatgatttttcccctgaaattgttatttctttcttagaggctggaaaaaattcaaaaggtccagttaaattgcactaaggtgaagagtaagcaaagtgagcccagcaagcactcagggttttctacctcagacaacagcatagccaacactccccaggattacagtgggaatatgaaatcatttccatcccggagcccttcacaaggcgatgaagattctgctctgattctaacccaagacaatctgaaaagttcagatccagatctgtcagccaacagtgaccaagagtccggggtggaggatttgagctgtcggtctccaagtggtggtgagcatgcaccgagtgaagatagtggcaaggaccgggattctgatgaagccgtgtttctcactgcctgaagtttccttcacaaccttcttggagctgtccactcttagaaactctgttgcctaatattgaggatgtggctttaatttcttccgtttgacagtgtatgtctggtttctaggaacctgattgttggcaaaagattgagactgttctatctcccattgctgtaactgctgggaaaattaagctctggtggccagtgcagtataaggaa

SEQ ID NO: 34034 - DNA, 459 bp, Homo Sapiens
ccacgcgtccgacccgtgtgtgttatcgtttaaactgtattcacataatgtcatttgccttgctcacttgtaaccccttcctcaggtccaagagaatgggaggagggtcatgttgaagtgtagccactggaactttcttgcatttatggagttgctttttctttcccaaggaaactgatgtttgcctgtccgctttatctttgtagtacatgaacagttcagccttagactatgtaactgttttctcatccttagctgaaaatgaggggcctactgtattgcgagactgttcaggggtaggggtggagggggtggtcccttaatggcccctgaagatgttggatgtgtttctcaaaagctgctttgtctctttcctgagtttaatagtgaaactactaaacattaatagatttgcacagccacaaagaatgagagttgataataccgaagaagtgatgc

SEQ ID NO: 34035 - DNA, 638 bp, Homo Sapiens
ccacgcgtccgctttgagtctactccattccactctggtgaattaaattaagccggatgcattcaaggccaggagtcagctagcactgtttaaatttcattaccactatgtcatgatgcacgtaaaggaggttcacacaactttttatagagaaccttgtccatttcctggaacagagtaggagactgggatgcagaatccaaacttctgtggcttttttcatacccatacttggaacagaagaataaaagcgtatgtgttctggcactcaggtcatcagcaataaggagagattgctaccttgggagcagttacgtacttttttctttgatttaaacttttagtaaaattggtcatttaaaaatagttttaaatcaacttgaattatctacagaggaataactaagatgaaagttactttagttacacgattataataaaacgtaaaagcatagttagagtctaattcttggtaaagaagtggttcttaatctttctgtgtgtcacatacttcattgagaatctgagaaaagtaatgatcgctctcctcacaataatgcatatattcatatccatgcacaattttttttatcaattacagtattcactagtctacccctctgtaagccaacacatgg

SEQ ID NO: 34036 - DNA, 669 bp, Homo Sapiens
ccacgcgtccgcttgttttatttacgtatatatttttctgaaccattttgaaagtaattggtagccatcatgagaccttaactgaatctctttgaaaaataaaggacattctcccatataaccacagcaccatcatcacaatcattggcaaatctttatgtttctttccagtcttttacacacatcaacacatacacaatcatatattccaacttgtaaatgattagttaacttagtaagttcaacttaagagttgaaattacagtactcacttattaactgacatgtttgatcttctcatttctactgccgccactccacctccctctagtgtattctgcccacagcagctaaagtaatctttttaaaacataaatcaagtcttatcactctcctgcctaaatcattccaggtttcctgttctgcaccatggcctgacccagcccctggcctcccttgctgatctcatctcctgccaattcccctgagtcacacaatgtattttcagtcccttgaacaccttcagctctttttaccatggtgccttgtgcttgaaattctcttggctttttttccatccctcagacttggtaaaacatctcttactcaaagaggccttcagcaactgcactatctaaacaggtcccaagttaagttctgcccttgccc

SEQ ID NO: 34037 - DNA, 489 bp, Homo Sapiens
cttttgattttgttgtttatatacttaagaaaggaaccagaaccctccccagtagtcctacactttctgtggcacaaagcaggatggagacccccaggagaagctgagtctttatgttactgttctaaaggagagctgtatactgctcttggcccctctgaaagccattttactctgtactttattctttcagtcatcttcctcagagcattttcccctcaattttgttgtcagttccatatcatatttgcttagtctgagaagtgtttacttttataatagtgtcaggcttcaacacctcatgacttccagatgctcaactacccacctaaattgaggtcaaagttgtattccttgtggttttataatatccctatccagcattcttccattaaggtggctgacaaaagtggtcatttatgaatgcctactatgtgccaggcactctgtgtgttgtatttgcaatcctcatactttgtaagggtcagc

SEQ ID NO: 34038 - DNA, 350 bp, Homo Sapiens
aacttctgttaaactctttcacttgaaattaaatgtagtaactagcctaacaaattagttgtaaaaagtacacaatgtctagcacagaacaaactctctctggaaatgactgcaattactattattaataatagccccacattttagataacagaaatggttgtagacatatacattaccgtatttaaaaaaattttaaggcataaataaaggatgtcatgaacattctaatggatataatgtttaattggaaaatgagttttgaaagcaaatatattgtataaacttaactatgtaaaagtttacatataggagggaaataacttcaaatgtagttatttctatatgat

SEQ ID NO: 34039 - DNA, 602 bp, Homo Sapiens
aatcttggagaatatgataccatttttcatgactatattctttagcacttcattaagaaaatttttgtaaaatggataaagtctttccattgaaatattagaatccaaggattttttccttttgttaagctacttacaaaaattattagtcactacaaaccaagaaaatacatacaccaagattcaaatatacctccagcctttatctccttctcttccccactcccactcaaccccaccacctgcccccttaggtgctatcagcctaactcaaagtggatcctttcacgttttctcccatgtttattacatgcatgagcagaaaacatcttagtattgctctaaagtggcatttctcctacaactagcaggtgaggctgagtaccatttcatacatttactggctgtttggacttactatccttgccatctagagttaacgtagccatgatggagtgttctcctggatccaacttgctaatatattatttagaatttctggtctacattcctgagacagaaactcagttttgacaaaaataaaaataacataaacaaactgtcataaagagaaatacatcactgctcatatctatgttttt

SEQ ID NO: 34040 - DNA, 361 bp, Homo Sapiens
ccacgcgtccggggttataccacttgcaaggacagagctgggatgtgaatctatacttttctgactacaaagtcactgatgtttgctttagaacaaagactccacaatgacagttgcagctggtgccaggctggctatatctgaatctctagagcaggttcttggtaaaaatacagctccacccagatctaataaactcttggaggactgagaatggagaggaaggttgttaggatacctggttttaaaaaaattcagacctgtggttgcatttctaggagtctgtcctccaggaataacacacagatgcatatggatatagtacacaaatgttactgccacattatttaagataaaaagt

SEQ ID NO: 34041 - DNA, 599 bp, Homo Sapiens
cagaaaaagaagaaagaaaagtgactttgtttgggctgcccggcaacggatcccaagatagtgattccagagcaagttgtttacgtggaggtgaagaaaaccctacaggggctgaggttgggagaagaaggcagtcctcacagaaggtgttattaagcaagtccccacatggactgttaaactttcatcccatggaggaaatcctggaagccaccagagaacacatacttcagagttacccaagctgaggcgagagtgagcctgaaaataatactgcaccaacattcaccagtcagccattgaggactgctcctggggatgttataataactctctcaactttccagcctgcccctgggcaggcaaatcaggcatctgtacccagagaaagtccctaggcagagaagcgctgtgtgggcagttggcagtcaggctggtgtgcactaaagtagtaagggctggggggaaagaggtgagtacaaattgagttcatctgtgaggcaggaaatgcttatcaaaccccaaattaatcatttttaaataacccatgatctattgacttgtaagagtgcagaaatttaaaatgaggctacattatt

SEQ ID NO: 34042 - DNA, 675 bp, Homo Sapiens
ccacgcgtccgcccacgcgtccgcccacgcgtccgattagtttaagtgttgtcttaagaaaagtctttgccaagtctctgagaccagtgtttctggttagtgagcatatgtctgtttcaaatcaggatgtctgatctgttcaggacgtctaatctgtaagttgaggggattgcttacttacaggtacataacttgggtataaattggaagggccttctcaggttgtcctgtgaataggagaaaacatttatgattgtgtttatatattgataactgtattttgtagtttaaaaaatacacacgttaaaacaattatcatcatcaagtgactgcatagttattgccttgctggttctgtgtaattaaattgcaagttttttcattttttgtgggaatccttggagacatgggcctgtgctgagcagatattcccatgcacagaagagggcagaatggggccccttggcatcaccccctttccccctttaggcagtttctctttatcaaagtggcaccaagagaggcccaattggaactatgatatgtggaacatgtttcttaatctctgttacaatcgaaatcacttaagggcatgtaatctttctcttttcatgaaaagaattctgtaagaaagcagttctttaggaatgatgacccactgtgagcttgatataa

SEQ ID NO: 34043 - DNA, 650 bp, Homo Sapiens
caaaagtgatacttccaagcttttcaacattctcgatgggtccattttgtaaagagtaaagatggtggcagtttgggtagcggctcgtccagttccttgatgcagaatcctcttgctgggtagcccgaggggccgcaatgaagctagacataccaacttctccttccagaatcacttctccctctccttatacaaaggaagccaatggcctctatgagggggaagacatcagctctctacattccatgttgccagtgttccatgagggtgttccaaccgctcaatttcatcaacaatcctactctgtatacacattatataaaactatataattagggattttcataagtaaatgagaaatttgaacatcaaagaatccaatctgcattcttagatcattaggtcgtggggaatctctggaatcttcaagtttaacgcagaaatgcttataactgtcaaggggtacagggatgttttacgctgctcttgggaacctggcactcctgaccccaagcacactgaacccgaggctgctgaaaaggcaatatatccagggatgggaatggagggtatgaggtttccttccttatacactcccttcccttaattatgcccccacccaggaagaccaaggtgtttgggctccttaa

SEQ ID NO: 34044 - DNA, 623 bp, Homo Sapiens
gtacatagttcatacttagtaaaagtatccatactgaatgaatggctcttacttatactgtaaagaaataaggcatacagcggaagtgtgtatgcttaatacacatacaatacacaaactgttggatttaaggaaagattttgatgacatgaagaggctaacactgccgaacgtacttccaaatattgccttgcccctcaactctccttggagtggtactggggggagcaagacacataagcaacaataataacaagaatcataatagatatatttattgagcacttactttgcagttgatgctcttctagctaaggtaatcttcacaaccctggtcttttcaagacacactttgagagacaggtacagtatgttttccattctagagataaagaaactgacagaaaaatcaaatactactttttttattagttgggtgaatgcttagtaccaccaaacaaacctctttttgcaatccgtgctaaagcaagtaagtgccttaggctcaccaccaaagcaggccttcctttttcccttagtctaaattttattgtgggttgaccacgaagctcagagcaacttccaaggggcccctagctgagcttagtcatcaccagtcctga

SEQ ID NO: 34045 - DNA, 641 bp, Homo Sapiens
ccacgcgtccgggggtgcatgaggaggcatggaaatgatttcaaagaactgacctgtaggcagattagagaaccgacctggaccggatcacatgagcagccaactctgatgagttttagaagactgtttgcagggctattgtagaccatgacagggaagatgaggtgctgaatgaatactgtactggattagaaaggtcagaagccctggattttacaacaggtccagtcccaactagttatgactttgggtaagtcaggtaactatttcttcaccattaaaatgcacaccagttgggatgaataatctctctctctctgtgattctttatgatctggtacctaatgtataaacagagaatagtctctgtgctgaaaaataaatattttcctccttctattaatattttcttagagtttataatttctaagtaggatataccattcaatgtatgtacctcttctgcttccaccctcctccccactctcatggaatttcctgataagccaatgaaatgtcagaagtatgctatggtctgcatttaatccttctaagtggtgagtaaaattcagcttcctcactgagacagtcaaggtacaagtgagcctcctgggctccgtgccgctgtcagttggtactac

SEQ ID NO: 34046 - DNA, 495 bp, Homo Sapiens
ccacgcgtccgcccacgcgtccgggagataatttaaacggccctgtggtttggaagtcacaggttctgctgcttcatgttcatgcacgagactaagagcctttgaagaagatcacttcctagaccaaggctttatgtttggattaaatgcagctcctccagatcatctcccgaggagattcagccagcctctgttctctctactatccccgtcttcttgcctcatcccatgcacacatttatatgtgttcacatttatgcatggacatgctctagtgtgccctctagtgcagacattttatgcatgaaactttaacccctcttgcatcaaggcatataagcagaagagatgagtggaaagattttagggcttggaagggcaaacgtgatagtcactgtacattataaagaacaccaaatgacagtgtgctttggaatatactactaggaatgtttctgctttgcaattagaaagtaatgacattgaaaggaagtg

SEQ ID NO: 34047 - DNA, 381 bp, Homo Sapiens
ccacgcgtccgcatcagtattaaaactccccttcagagagcaaaccaccatttggagggaaactgctttggaaagcgagtgaactttttctggaaattaatgcaagtcaaaaatcttcaaagaaagattttaattgaaaactcaaggttgtgagtgattttgccttaattccaaggggaatgaatgctggctagtgcttgccatttcagagctgctggaggctagttaagaaaacagaaccagagttttttaaaaaactgtgctgagaccaggcagttcagggcattttctcgtgaatgagctttgcacaatcagctcaggaagttgctagcctaggatctgaactgctcaaatccaaaatttgctagcctaatagccaat

SEQ ID NO: 34048 - DNA, 612 bp, Homo Sapiens
ccacgcgtccgcggacgcgtgggttttaactggtacatattttgagttaagttgaatgtatgaaagcagcatcttatcagttttgtttattcgatttctaaaatgtgctgatccttttaaaactcctgcttatctctgcaacaaagaaaaatattcaaaaatactgccttcattttcacacacagtgctgaagatgctgcaagcaccaaatcatagctcataaaatcaggtcctgagatagttacccataaagaggaatcctttgagtgtatgccattggtgagccgatgagcatggaccatagaagggctcaatgtagaaggtaaaattggcaaatcataattgagaaatatgaaatgtattcccatacataatatggtatagggtgtaatgtacctgcttttgatcacttttcattttaaagtgctattcacttgatcttaaatgttccatgaactgttaaatttcttaagttacatagttactacaccacatttatgtgtatgttatgttttaatagtcaatgataggtatgtacaattgataatataaaggggctcattgaaacttgagagcctgttgagttttggttagttgtagattgcattttta

SEQ ID NO: 34049 - DNA, 477 bp, Homo Sapiens
ctttgcctccaagccactttctggcactaacaaggtatgatttcaaaaggagccatttaagaatttgtagaagggagattgaagagtgctttgtatatttactcagtgtagtacaggaaagagagtaatctagacctgtaagtaacaatctgggttatgggttagcagaaaacaactaaatttttaagcctatgctctttagcatttaatgactaaatactaatgatgtgatgaagattttgttaaacatggatgaaaatttttctactgtagagcacaatgtacaggctaaatccaattataaacttcatggaactaccagacttttaatagcatatattaatattgctggaagccagattcctggtctgtttgctaaattagcagacatttggatttttttgtagggctttttaaattttaagactattttcacccattttgcctttcaaaatcctgagtactcttttttttaat

SEQ ID NO: 34050 - DNA, 607 bp, Homo Sapiens
ccacgcgtccgataaaaggatatcctggggcctcaaaatgtagaacacctttagaccatttataactgttcctagaactgttgagaatcatgttctttagtaaatgatctgtggtttacacttaagatggctagaagcttagttacagggtacatagaaatacatagatcaagtaaaactccaactactgtagctggaatttgtaaactaagtttgtaagacctcttttatttcctatggagttattctttaatttacagtttattctgtaagttgggaagtaaaatagagaaaataataaatctagatgttctcagtgtcttattcaggaactttttatccctcctcactaaggaattcccactgtgactttaaaatagaactaaattacttgtgtgcatgtatatgtctgtattttttacacacatgcaaaaatatacattgggggcacgtgtgtgagagatatgaatgtgtgcttatataaaaatagataaaggtaaccgaatgtattgtagaaacatgatttatttagttgagggtattggagttactttctcattgcctctgttgtataaatacaccaaattaatcattatgttatcttatg

SEQ ID NO: 34051 - DNA, 497 bp, Homo Sapiens
cgaagtctcttttgccatataaggtaacatgtttacaggttccagggattaggatgaagagtacatctttgggggccattactcagccaatcacgaaagtagcattgtgttcccagaggaaaaaaggcatctcatggcagactgtgttgcagactttgagaacgtcactcatgtagaaaacttcacagaaagagacatcagcatagtgtgcgttcaagagcctgtcttcccagcacctgctcgtggctcctccttatggccagctgcggggctggctccagtgtggagtctgtcactctgctcaactcagcaatgttggctgggagaggctctggctctaggatgctcagatccggtttcaaaatgaggcgtgtttttgcctgcatttttcttttgttgccaccttactcctcgcaagcacgttttgtctgtgcaattccagcagaggcgtgaattccagcccaggactaagagttcataaaattgagtaaactact

SEQ ID NO: 34052 - DNA, 638 bp, Homo Sapiens
ccacgcgtccgattttaacttaagataaaagttgaattgggtccattcttactagtgaccattttgtcctaaagaagataacttatcaattacttgtcaattatggtaatatagcaacacatttattactttatttaattacaagactttgttacttctataggataaattataatacatattacataataattacaattacaatgcttttcacagtatgtgcaattcccatgtaattcataagaacgtgtaattataatattcttgggatgtcgacagatttgatttgtgtaatttatatgacattctgatgggaatgaaatcaaaatctttctaacagcaaagtttctcaaaagtatttccttcaattttgtttttcaagataaaaaagtttaaagttcccattagttctaaaattgagcaaaaatgaaaatacgaggtaaaagatgttcacccaaacatgtcaattatcttctttctcttaagccaggatactaaaaattcatgctgtcgcttttagtgtttctaactcaaaatatagctattagaaacaaattaatttcttaaatatataaaccatacattgcttacacctagttcatatatattcataggatagttctataaaaataggcata

SEQ ID NO: 34053 - DNA, 594 bp, Homo Sapiens
caaactggaggggaacgtttttccttggtaaacccccggcgctgaagtcactcaggtgagcctcggtgaagaagcctcagacgctcagcaaggcccagggaggatgagctcatctctggaggccaagctcacatgccccagactgcagcaacatgccctcccgcccacgcccgctcccttgccagggtgtgtcctgccctcagcgggccactggcccccaaatccaccacagaaggccaacaggacaggggagtcccagtgacatgccactgcctccccccacccaggaggcttgctttagggtcccctgctgccctgggcccacgttaaatcagctgttccatgcaaagacttgcagagccaagaggagaggtgcaggcgagttgttaggagcatgagtttcacaacggtgtggtctcactgctgcccctggccactgcctgtgccttccgggcagcgactgcacctcctcctcagttaacaagcacagtggcggatgcccatgccatgggttccgtgcacggcggtcaccatcaccacacggagtccaagagcaagaactctgccaagacactgttattatcaaaagcaaat

SEQ ID NO: 34054 - DNA, 617 bp, Homo Sapiens
ccacgcgtccgcccacgcgtccggtgggcaactgcatctgagggtttatccggttccccagaaaaaatgggcatgcgtgtgtgcctgtgtgttcagttccatcctacagtcctcccaggggtctccagaaagcgtggctttgtcttctccagggcggacgagtcctagagcagtccgcagagccttcggtgaagtttcccgcggcctcccaagtccacggagcccggcaccccgtcccagggcagccctgacggcccgggcgcggtacccatgcggccagtaggtgtcgctgttcccctgccggcgggagccaggagccccgcgcgggcccccagcgccactcagccttccgctcccggcaggttcgcagacccaccggagctcccgagagagggccgctctacccgcccccgccccgggactgtgcccgtgctcacctggctaccaccgtagcgacactgccggcctaaggaagtaccttcggggagagaaaggagagacgggtctgttggggcgaaacatgggccccgacggaagcggctccgagccggcttctctcgtggctcccaactctccctcctttctcttcacgtgccatgggcggcggtggggcactg

SEQ ID NO: 34055 - DNA, 440 bp, Homo Sapiens
gctactattcctctcttttctgagtttcaatcatcccagtctgcaactaccacatctttctaactcattcccctattctaatgatatgttagtcccactcaatgaagctactactcccactctctttcatgtccacacttccctccatactgtacataaactccatggccaaccattattttaattcctttgcatgtgctctcaattcccttgctcctctcttacttttcactcaaatggccaaatcctaagtctggttaaatccaactgtccacctatcttgcacctccataattaaatttggctgggaaacagcacacatcatgctgactcctcatcttatattcataagaaatactggtctgtagttttcttcccatgtagtatctttgcctagctttagtattagggtaacactggcctcatacaatgagttggga

SEQ ID NO: 34056 - DNA, 430 bp, Homo Sapiens
cgaaatgatcagctaaaacccactttcctttaaaaagacttgcttgattattgcattactaaatacctacattgagttaaatatgctaaaattatagtaataatgtctttggggtttcaccagataaagtaaattgagctgtcataagtccccttaatttatttgcacagcagaattgtaaatgcagcagaaaacagcttactgtaatgtaaacagagttttccatgttctgctcacaggacaagtttatttaatgtaatatattacactcacccatcattgctacctttcagtttatacttttatggtaacaaacggttacaataaacagagacgttgtgttaaaatcaaatagaggctaggtattcattctgtagttgaaaaaaatgtgatattgcacaacttcgtactttttgatactaaagatttt

SEQ ID NO: 34057 - DNA, 477 bp, Homo Sapiens
cctgggaggagacaatcacattatttaaccatcagtcagcatggaagctgggcacagggtcctgggagtcccttccatatgccacacattaaccctttaattgcaggatcagggaaagtgaggggtgcccaggggagggacaggggtggcaatgaacatactcagtggctcagggccatggcaatttaccagccaatatagaagaattttaatattccagccatctgcgggatgcagccctgcacacaccccacactattccgtttcttccctgggggagcatcctggccctcaagtagcaggcagtgcctgccaaacccagaccaagtggaagagacagtgggcacatgggccaggcagccaacacctgtgggttagagagccccaccctggcagagtcagagccctgaggccagggagaccacatattccaactttcacagtgggtgcgacaggtgaggtgggaggaaggtggga

SEQ ID NO: 34058 - DNA, 461 bp, Homo Sapiens
gaggtacaaataaatacattttatcaagggctgacaaagactgtctgaattcccattcctctgaaatgacatctttcaatgatatgacctctagtggctacattcatgacatttacagtcaaagttgaaccagcgagggtggaagggcactcgggagtggccgctgccaacagcaacagactgcccagaagaggctgtctgcagtcagagtcatggaaaaggcaaattctgaaacccaaaacacgcactgaccaaagtcccgtgcggaactgcagaaatgcaccacgttgctcagactggccatttctcagtaacaacttcgaatgctggaaattgttatcacacctcatagcaaatgttttaattaaagaatcaagtaggtagaacagaaccttctgtacaatctcacaaacaggttaaagatccatttgaagctacttcagtaactaagacaatgcctg

SEQ ID NO: 34059 - DNA, 571 bp, Homo Sapiens
ccacgcgtccgcccaagtgcacaagcagcagggctcccaggcagcatggctgctcaggactgttgatgtgtgcctctccttcccaccctcagatccgagagcagaatttacaggacattaagacggctggccctcagtcccaggttttgtgtggtgtagtgatggacaggagcctcgtccaggtgagagcccagagtgtctctgactttagtgggtggtggctgtgtgaccgcctgctccaaagttattctgaaattgagagagtgactttatgaggtaagtattctaggcaaccagttacctttgttaaaaccttcatgatgagaaacggttcaggcacttttcgttgagttctagaaggagcgagcatgctgagggctgtgtccacccctctggtcatgccccttgtaatgcatgcatatgtgagggtggcacatacaccaccagctttggggctcagattcggcccgggttcagcagcgttctgtgtaaggcgctaggagagggtgggtttagggactcttgttctggtacatattgctgtctgcaacacagtgctgcttgggttgca

SEQ ID NO: 34060 - DNA, 596 bp, Homo Sapiens
aaacgtataactaacttacagaaccaactggtggcacatactgggggttgttgaacagtcccgcagttggtcacaaggccagaggataggggatgaggccctctagaggcatcctgtcttacctggtctgggaaggtgctgttgctcagtataatgtatgtgtgtccctgcatgtgcacatgtatgcatgagcatgaactcgtgtatgtattcgtgtatgtatgtaggtatttcaagcagtgcctacattcccaccgcagctctttcaaacctggttaattctacttctggctgtcagccctatctccatcacctttagcagatgatcgccctcccataccgggggagaaaaaggccattcttcctacttcaaaaatactgctctcatgacatcaccctggcacttggggctgggggagggggtctaccttccttccaaagcctaagtccctgtcctaattgcccatctgtcaactttgcaatattgtcctaacttacttttcaaaagtccagttttttctctacaggaaacaagactctctactgttaaccacccctcacccttatctgtgcatccatgtttttgcacttgggat

SEQ ID NO: 34061 - DNA, 615 bp, Homo Sapiens
aaccttacagaaatggtatcattactacagatattctgcaacctttctaccaacgtttttcttaaatgtagtcgggctgattcatgtaagtcagatggaactggtgaaaagtactacactgtgtaaaccgtcatttattgatatatttcctggctaataggcttttagtttccttctagtttttcatcatcaccaaaaatgttacaatgtacatctatttctccttgagcacttgcatgctagtttttccagtacagacaatagaagtaaaatttttggctatagggtatgtgtatccctaacttcaccacatctagtcaagttctcttgagagtagttgtaccaatttacactccccagggccctgtgtgagagaggaggcccctccccatgctgtatttctaaactgccaatttctacctaacatgatggtagcaggatcctttttttctttcttagtaccctgaactagctacagcagaaacacaggaatcccctgagctactctccccaaaatgttgtctggctgctgcctgaggacaggccaccctgcaaaaagcaacctagctgggcagccagcattcagagtggtgcacccattgctttctatctatg

SEQ ID NO: 34062 - DNA, 611 bp, Homo Sapiens
ccacgcgtccgggcagagccagtattattttacatagacagtgaggtgaggttactctcatgatactggagcagagccccagcagagtaaggtatttggccattgaagtgactgggggcagagagctcctggcagaggaatggcaagtaggcctgaggtgggagcatgcctggcccctcttaagagaacgtgataggacttgcctgtggaatccctaacgtttttgtaacatggatacttttggcagtgagggaagcctggggacccttactcaagataaagattccaaatgcataaaataaaatacctaaaattcaaaggaaactatgcctaattttgtccctcaggttaagatccatcagatgtacgctaagaatcataggataactttcaggggatctctaagaagccagtttttgccaaacttttggataaataatgatctcaccagggattttttcaaacacaaaccatcaacaaacctcaccctatccccatgtgaaaactaccctcctagatcataaatataggcttgctccttaccacctggcaaaagcccaaggtgattttagtagagtgcctctttctcttgttgaggaataaatatttaa

SEQ ID NO: 34063 - DNA, 609 bp, Homo Sapiens
ccacgcgtccgggcaaaagggctagttttctggtgggttatgaggctctcaaataacatcaaaaggcagtatttgaaagtaagattctgtcatgcacaccgttttctgtgtcttttgaagacgtgggtaactctattacagaaaaatactactatacctagcatgattgaaacaaactgtatgtaatgtaatgtaatagttcttaaactgtgcagcttcgcatcctctgcaaatcagctcctacatctggacgatgagaattctaatagcactgatctcaaaggggtttttggttgtgatgtgagatagataagatttatcatgtgatcactagttttatcaagtgaaggagataagagactcatcctatgatcactagttatcttggctctctgccttaccatttctatgatagcaagaaaagagcaacaaagttatgaactctgccagtcttggtatgcaatttgtaagatagtatgtataacagtcagtggtacaaagccacagaaatcctaaagtgttattttaaaccagatttccattttcgtcacctccattcctttcagggatcttgggaaagggaatgaactactttactttgaaaaacag

SEQ ID NO: 34064 - DNA, 671 bp, Homo Sapiens
ccacgcgtccggtgtgaccagcctggagaaaacacacaggtagcaagggagtcaggggggaggtacaagagggctgtggacacctggctcttgctcatcttcttggtgctgatcagctggtggtcaccatccctaagtacctcccagggagctgccattttctcctctgggagcagctgcctgaagcaaggagagaatgacctgaagggaagtacctccggccaagagtgcagggctgctgtgcctagcctgagcgggccatctctagcagatatggacttctctccaccacactagctgaaaagttttctcccttggttggcaaaagccagtgtcaggaaaaaagctgtgggtttctgaccaagaatgtgtgcgcttagctgcaaagtgcctgtcagcagctccaggcaccaacaaggtgcccttttattagacaattcctgcccgaacataaccatattgcagatgaaaattttcaatagagaatgacacaattcttgacctttctaaaaacttttcaaagagatagtcacatgtgtatatgttgcaaaagatttttgaaactgaaatgtcctccattaaatctcaagagcactcgagttttaagtctgctgtttctggtgtcacactaagacacacttttgaaagcagcccctggttctgaattagtt

SEQ ID NO: 34065 - DNA, 611 bp, Homo Sapiens
ctttatttagatcttgtctaaactttctacctttcttataaactttatttctagatttttcatttttattggtgttataaatgctgtcttcgattatatcttgtgattattgttcgtacatgtgacatctaaagttttgtatatatattcattttgtgactactcatcttttaaaattctttgtttctaatgtagtttttcagttgctattctttgattttcaaggtatataattatgtcatctacagataacccttttctttctcataccactaatttttctctcaaataatatagtgttttcacacagaaaatatcatttaaagttacgaattttaacataacgcatgccccttatatttagctctatttaagcaaaatttagtgtcctcttagtatgattaggcttctcaaagttgtacatattctgaacttttcaataaacctttaaaagatttttaatgtcaacttttttaaaatcagtttctaaaaatgagatattctcattgaaaataaatatttttattagtgatatttaaatattgaaaaactatctctgctttttccctcagaatcaaatggctatagcatgtggatctcgagctcattta

SEQ ID NO: 34066 - DNA, 598 bp, Homo Sapiens
cctattgaagttccttcttcttccccagtattattgaggtataatataaattgacaaaaattatatatatattcaaagtgtacaatatgatttgatgtacatttacgttgggaaataattacaattattttgcttcagtttatatttttagaacaaaacctattccttacaacctccagaatatgcatatctactcaaaactgagttatagctatcaattttctcatacacccacagtttttgcatgagaattacattaacattcggaaaactggtgacatcactcaattccttatctacctatatgtttgggctgctaatctgtcttctgttgtataactgtctcttacatcctaaaatgacttctagaattcattttacatgagttttctcactttgtcatgcctgtctaaattttgacttgttttccatggtgtcttatgaagataattactcagttttcttatcctggcacccactagacaatacctctcatcttgccaaatacagatttccttggctctggtaataatttaaggctctggtacacaatgttgaagggtcaatcacctaacttcaggtaaatataatggcaaca

SEQ ID NO: 34067 - DNA, 380 bp, Homo Sapiens
ccacgcgtccgaaagaaacttcagccaaacttctttggcattttctatcacttttagctaatcctgtcttgacagcactacatcttctccatgccagtcaccgggcatgcaactgactcctccctctgctctgaatggtgaagtccacaagggagtacgccccaggagctatgacacaagtggaatttgacaacaaggttaatccaagtgctgaagctttgaaaagtctcactccaacccttgtttcaggatttccccagcctgaacacacagccaagcctcctcactcattctcagcccacccaggagagtacagcatagaagagaccgtgccctaacacctggcagcccatttggcaagcaagatcccaccttgggag

SEQ ID NO: 34068 - DNA, 471 bp, Homo Sapiens
aaaaacagaaatgctggcctctgattctggttctgtcagcatgctatcacactcttatttactgttacttatttcctgattgagcacataatactaaactggcatttttactctctagcccccagtgttcccttgggccctctggcttaatgcgtttgacatttaatactatatccttatagaactctagaaagtgcaaactgaaatttagcacaacagttaagactaccttactaatgagaatattttcaaaattatcaaaaataaatctctaggacttggaaacaaattaaaatttcagaaagacttaactgagaagacatttatataacagaactggagacttgtataaaaattagtagttttattttttagtacctaagacaccagaacacaatgcctaaatatagcttgagagtccagtttaatttttcaaactactctccaaattgtaataacatgccaatatac

SEQ ID NO: 34069 - DNA, 533 bp, Homo Sapiens
ccacgcgtccgcggacgcgtgggcggacgcgtgggcagaaacaaatatttaattcttactcccaagaagttaatcgtctagtgggaatgagacaaataaaacaaggataatactttggggtctgtgctgtggcagaggcagacaaagaatcaggggaataacagaagacttccctcccacatactgcctgagaggtggaggactgggatgggagctcagggaaggcctcccctggagggcacacctgagaagtcattccgctacatgaactctgttattttccttatcccttattttttcctccccttcacatccaaatctttcaagtccgccatcaagtctgatgtgcatcctctttgaaacctttttgaacatcatagacatattttttctcttttctctaaaaggtagcacttcctctttctttaacacatttagcacacaataaatccttttatttattgcccactgttttctaaataacatttattgtaaatgtcattgattatttagttatatcatatgctccttga

SEQ ID NO: 34070 - DNA, 395 bp, Homo Sapiens
cttttgatgggggatgaggattatacagaagatttggcaacctaaatgaacatgagagaaagccaatagtataactaaaggaaggggatcgccaaaaccattcacttaggggaatttcaaactttggtgctaaagcttccaaataatcagcatcaccattcaccaaggagcagaggagttcggtcttgctgactgccagttaagggctctgaaaaaagacagtctccttggcagccgttccaacctggctcctgccccctgtgaaccaaggaaaagtggaaatctaattccatgtagcctggaagaaaccttacaggtccagggctgtggagaggtcgggtgaggaacaggagttcccaccatgccactagggttctggaagccctgggaagctg

SEQ ID NO: 34071 - DNA, 665 bp, Homo Sapiens
ccacgcgtccgcccacgcgtccgcccacgcgtccgacaggcactgtacacacatgaacacatttaaactgtgccacagccttcactgtataggtgagaaaacagtcctgagtgtcaattaacttagtcataacaatatagctgctggcattaggatccagctctacttcggaaaagctcatcagtttccactctaccacaccacctctacacttttactttctcatctacttttttctttgaggagatgcagttaaagtcaggcaagctaacatatattaccactgataacaaattcagcagcctaagtattgctgaggaatttaagtggctgatgtgtttgttccagtcttgggtagaaatgatacattatcaacaatttatttatttattaacaatttataaagaaaacagttttatcaaaaaattatcagcttgaattttatgaatgaagacagatgattcctgtccatggaaaataaatagtctgtatcctttaaataatttaaggcacatttcttgctaatattctgggtccacctatgtcttgcattgaaaaagtatttacctaatatcttaaagcagggctatgataacttagttctcaaggaaagaaggttttaaaaataattttctctgctctccatttctcttactgtaagcatg

SEQ ID NO: 34072 - DNA, 476 bp, Homo Sapiens
aaatttaaaaagaaataaaaataaagacatgagtcaaagataaagtatatataatgtagtcatttctcttttcataaggtataagcaacttcataatagcctatgtacaaagaaaaccatttcttcctattttaatgataattctgaaaatttttaagttttgtgaaaagttctttatactttaacaatttactaggccaaaatattaagaattcatatatcttacaaaataaaaagcaaaataaattcactgtaataaaattcatcaagtgcctactacataaaaggtattaaatgctatgctaactataatgtatttcggtcagtggaataaaataatagaaattcctttataattttataagtagttttacactttttatacagggtccccaatttctatagttttgccttttttaaagtaatagctattcatttaaagaatctgttgccttggatattgatagatttttttt

SEQ ID NO: 34073 - DNA, 644 bp, Homo Sapiens
ccacgcgtccggttttctaattggattatttgtgtttttactgttgtggaattttaagaggtctttatgtattctagagtctaattctttatcagatatgtggcatacaaatattttctcctcgcctgtagcttatcttttcatcttctgaacagaatctttcatagaacaaaaggatttatttggtgaggcccactttatcagtatttccttttatggattgatttttggtgtcatgtccgagaactcttcatcaaatcaggttcctgaagaatttctctttcccccctaaagttttatagttttatgttttacatttaggtctgtgatctgttttgagctaacttttgtgtaaggtgtgaagtttgggttgaagtttcttattttttgttttggactgtgtttgtcctcgtctactgacatggttttttgcacccttgtgaaaaatcattgaatatatttgtgtaaatctgtttctgggttctcttctgttccgttgttttgagtatctgttgctctgtcagtatcacactgtcttgattactgtagctacatagtctgacttaatgccaggtggagtctattcaccttatttttcaacagttttagatgttctaaggcttgttcctttccatgttaatttt

SEQ ID NO: 34074 - DNA, 666 bp, Homo Sapiens
ccacgcgtccgtatgaaactttctcatacccttaggtgatgtaatcagccatataatttatatttgatttcccagggaaggaatcccaaacttttacgaatgtaaactcccttggagaagagggttaggacgctgttgcgctcaagcccccctcagctgtgtgcacactgagccaggacagggtctttgagctttcccactataagaagaacagcaacaaaaggccgtctagaaaaacagaacctgcctctgcttctgctcagggtgtccccgctgggtttccattgtcctttctccattgctccctcctgtgacagccatcttgctcatgtaccagccctcatcaccccatccccataaatgggtgtcctcgaggcctctgcctgggggtcagaggtcaccacagggtggccattggcatgtcaacccgctgttaattcagagaagtgggctccacctcattgggagaagtgccatttcagcagaaattcacacgttagacgtgtgttgctgttaagtaaggggaagagagaggactagcctcagagctctggccatggaaatgacctcctaagactttttcgtggttttaaatattttacctctttccaggtggcatctgagtacatcagatggttttgcaaaatgcaaacaattttttccttg

SEQ ID NO: 34075 - DNA, 386 bp, Homo Sapiens
ggatccacattatttgggtattattgccactaaaaatattactagcaaggaagccaggtggtactttttttccatttttctcagttgattttgccagatgattgtgttccagttacttcttcctgcaagaataagggatagtatacactaagtttattttgttattgttgctgtagtcttttcagatgagatgaaaaagtcatgaactctatcaaatcccagattaaaaacagcaacaactaagaagtctctatagaagtttaagtgatgtgaattctaaaaattaaagagaatttttaagtgaaattgctagaatctcaattcattaaaataaatgtagtttgagatttggtgtcatgttaaaaatttggaagctgctgtcgtgt

SEQ ID NO: 34076 - DNA, 617 bp, Homo Sapiens
ccacgcgtccgggagcccaggcctggcgcggcggcgcccgccaggtagaccggggcgaggctgcgcgccggcgggaggggagtccactgcggggtgaggttttggggtggggctcgcctgggacctagagctgaatttcctgggctccgcggtgggaggaaggacttgaattttcctggtgggggtgggggatgggtctgactttttttgctccttgtgaacgggcgggggaggtgtggacgggggctgcaagtccaggtcggggtagagaacagggtggtgagcccgcagtcggctcccgtgcttgatggactagaactggagggtccctgcgctcggtttggggacgcatatcctgctttgggggcgggtgagcctgagcatagccgctggtggcccgctcggctgggtgtggctctcgtcccctcccccacctgcagctgtcggtcccttagagacgctgtacacggtcaccggcgctgatcggtggcggggaaggcgctgggtgggagagcggggtgtgtccgcggcggggctggtagtggttccgcttctgcgggctgctgtggcgtctctgccccggggtcgggcggcttcgctccccatctctccccccc

SEQ ID NO: 34077 - DNA, 668 bp, Homo Sapiens
ccacgcgtccgtgttcctattcggccatcttggcgccaccaagccgctgttttatttttattttcatttaaagataatttctaatttaattattatttctttgttctttgtgatttatggattatttagaagtgtgcttttaagttacaaatatttagagttttcctagttattgttactgatttttaaattttacctaccttggtcaagtatcattttgtgtgatttcagtctttctaaatttattaagacttgtcatatgacccagaatattgtctgtcctggcaaacgtagcatatacacttgaaaagaatatgtattttgctatttttgggtgtaatataaatataaattaagataatgttcatatattctttgtctttattgatttcttttgtctgtgtaattatattgtttgcagagagaggggtgttaaatctccagttatgattgtggaattgtttataatctaattccttaaatttttgtatcatgtaaacatttgtgattgttatgtcttccttattgacctttactcttgaaatctatcttatctgatattactgtaaccactccactgtcttcttatgcttactatttatgtagtatatctttctccatccatttacttcctgcctgcctgtgtctttatatttaaagtgtgtctt

SEQ ID NO: 34078 - DNA, 376 bp, Homo Sapiens
ccacgcgtccgctgggctgaggaagatgaaacgtgatcactagtctacaggatgcacatctaggaagagcttctctcagtatcctattcccgcccgaaacacgagcctctctcagctgcacatgggtgggttagccaccctggggatcctcgaacccaagaagggacaaaaatgggtcaccaggacctgcccttccactgaactggggccacaggctctcgcgtcatgtgtgggatggcaccagagttgggagggtctttactgaagggacatgggcaaaaaccaagtggaagacaggttccgacaagattcttccacttgaaagaaacttatcagggttcagaacagggtatctccacctcccaggtgactactc

SEQ ID NO: 34079 - DNA, 446 bp, Homo Sapiens
ccacgcgtccgcggacgcgtgggttacaaagccagtttcagtccctgaacaggaaggggatcagttttagggagggactattatcatccttgctttaaagttaaaccataaactaaattccttgcctgcacctaagaatgagcgagggcagcccacctgcagggctagaagccaagatggagtctgccatgtcaagcttctcttcctgtcatattctttgcaaaggcagtttcaaaacattgatatttggaggtccacctaccaaaaagatgactggaggcccaatccccctagatggtagttccccacccaacaggccccttctatgcatatgagcctctggtccatttcttaatgctttgcaattaaatatgaccagtgataagagaagctcctgttttcccaacactcacacacagaacttatggccagcaaagatgtgggta

SEQ ID NO: 34080 - DNA, 665 bp, Homo Sapiens
ccacgcgtccgtaacttccaaactctccaaacttattttaatttctgctgagatttattttatttctcaaattcttcctgtatcttatttccctataaagtagatgtcaagaattttcacaacttacagaattttgctactaacatatatcctgttggcttctggaattgtaactcttcactttgtctattccagcttttctggctttctgtgcatactgccagcatgattttatctgaaaactgtgtaactggccacatatcaaccatttcctcttcatttttacactttgcttctcctaaacatgatatcagtgtccataaggaggcatagcagaccacatataagggtagtctttcgttgctcctctatcacttcaatttctttccttacccacccactgctacgtgttaccttcttcagcttcatcagtatgtctggcattttatttctctgcaagattttgagaagaaaatcatataccaaagtttgatctagacacatttcacagcctttgacatttaaagaattttagagaaatcctagtacttgtcactcaagtaatgcctatccctttattgctggttgtagcaccttgtggagtatgcagtttgccagcctcagcaccttctgcattagattcagtgtgtcacccttgaagacca

SEQ ID NO: 34081 - DNA, 612 bp, Homo Sapiens
ccacgcgtccgtcttgaagggttgtgtttcagtcagtcactgccacaacaatgctacgtaacaaacaactatagaatcttagtgtcctgaaataataaatattgattagttctgaggatagaaaggaggatagaatgaagtgttgttctcatctcacaggcattgctcatcatttacagatttgctagggtcaaggacccaggctgtaggagttaaggtgactctgctccatgctgcagagctgtgagtctaccctgagtcattcttccttcttcatctagcacactagctgcgacaagccttcctcttggtggtgtcagatgcaagtgtgggagtagaaatatgtgatgcttcttgaagcccaggctcataactagcacatcctgagttccctacacataccattcaccaaagcaagtcacacagccaagcccaagtcaaggggcaatgaagtgtactctatctatactgaggcagcaacaatgtggatttgaaattgggggtaaaaaaatgaggcagatacttccatgtaccatggacattatgaggattacataaaatgatggctgtatttaccttaaactaataactgtcatgtagtaaacactccat

SEQ ID NO: 34082 - DNA, 506 bp, Homo Sapiens
ccacgcgtccgcggacgcgtgggtaagatttgatttctgctcctgctctgtcgctacctgaaacaaattatttatcctctctacatggatgacattatttaaacctgaggcattagagaggttacttgcaagttccttttctgcgttgaagtgttatggttcattttcttgacccttctcttaaggccagaactaaaatttgtcaggaatttcttagagcatgatagttaggaaatgcttttttcctgttaatgacgtaaaaaagagtatcagtataaatgagatcccctgaataaatgctgtagtatgttactaaaatacagttactgagaaagtgaaaccatttcctttagcaatcatcttattttgtcaaatttataatttctcaaaaacttgtacatttttaaccactttattgttaaatttcaaaacttagcctgtatatggaagagatggaagcataaaaatatgtatgtgtacttatctaagtaaagagcaagacttct

SEQ ID NO: 34083 - DNA, 395 bp, Homo Sapiens
aaaaaaagatcaaacatttagaacgaaaacttttagagagacagacatcatggatttatgacacaattgtttaaacaagtacaaaataaaacttgacctcacattttcatacagtactaaagcaaaatttcaatgctggtttttacagagaagtacattgaaaggaaaacatatcatcctaaactgcccttaaatctttaaaatacatgcgtggtatctaaagaaacctgacacaatcttaaaatacagaaacagatacaaaatagttttgaatgttttccaaatgttctattacccaacatgttggtttaagacagcagtgatgaagtaaaaggaagcgttgtattctaaggagatttatgaatactatacagcattgcaaaatcaatagctga

SEQ ID NO: 34084 - DNA, 653 bp, Homo Sapiens
ccacgcgtccgcccacgcgtccggatcatttaagctttctgcaagtcatagtcttgttgatgaagggtcttgcttcaatgttgatgactgctgaccgatcagggtggtggtttctgaaggttaggttgactgtggcagtttcttaaaataagataacaatgaagtttaccacattggttgtgtcttcccttcatgaaagatatctctgtaacatgcaatgttgtttgatagcatttcaaccacagaacgtcaaatttggagtcaatccactcaaaccttgcctctggctcatcaacttagtttatgtaatattctaaatcctttgttgttatcttgacaatgttcatagcatctttaccaggagtagattttatctcaagagaccactcttttgctcattcataaggcgcaactcttttgttaaggttttcttatgagatcagagcaatccagtcacatcttcaggcttcacttttaatgctagttctttttctatttccaccacatgtacagaatattaattcttcactgaagtcttgaacccctcaaagtcatctgtgagagttggaattaagttaatacttcttttaaactcctgttagtgttagtattttgacctcctaccatgaatcataaatgttcttaatggcatc

SEQ ID NO: 34085 - DNA, 537 bp, Homo Sapiens
ccacgcgtccgagagggcacacccactttttgctaaaggcatgagccagaattggcaggctcacctctgctggcctctcattggctgggactcagtcacatggccacaagcagctgctagggaacctgggaagtgtagtcttcagcggggccgccatgtgcctggcctcaccttgggagttatcttattgatggaggagaagagaatggatatgggggaccagacatctctgggagagggggagggagcagcaataactcagtcgtcggatccagctctcattgtcagagtttccggaacagcttgctcctgtttccctcactgtgcagcccagggctgggggcagtgaggagcttgcagctctgtgggaaggggaaacaccccctcccctcggcccctcagacgctacccaatgatgccggtttgcagagttggcctgtggaatggctcatgtttgtgcgtgtgtgtgtgtatatttatgggcatgggtgcatgcttggtgtgtatttgtacatgtctgtattgctgtgtccctgt

SEQ ID NO: 34086 - DNA, 518 bp, Homo Sapiens
ctggtcagggttcacatttaattagctcaacaacagaaaatcttttgttttcgtagtttttggatttcaaaaaatggataagagactgtaatctgttttctgcgtttgcagtcttcatactgggatggaaataatggttatgttacaacagaacttcagtctaacagtttctcatcttttaatactatttatggtaaatacatatatataacttacttgcaatttaaattacaaaattcatatacaaagtaagcaaaaaggcacacataagaaatccaccttgaccacagaaatgtgaaaacaccagccctaatgaccaagacaatgtttcaaagacaacaaacaccaagaaaagttgagattctacaataaatcatattaaacgcaagcactatgatgcacagacgtgagcactgaatatttactaaagcataaaacttaggaaaaatcattttacggggaatctattcatattccaaacagcattttaaaaaacattaaacttagcttagttttaa

SEQ ID NO: 34087 - DNA, 507 bp, Homo Sapiens
aactatttcgcacataattgctttatattcctatccaattccaacatcttaagagtctttaggagataggggttctaaatcaaatagataacttatttttgttagtgctcattcatggcagcttacttcattgtttatgtgctggcttttattgtttttgtttactatgaacacttgtttaacttaatctgcaggatttccaaggccctaaattatggttgatcctttggaagaggttttcattcccttctgctggaagccagggtatctaccaatttaaaaccattttatacccttttgagggttcaacttaatacaagagtctcaggttggtacacctatcttgctaccggcctaaggctttgtcacgaatttcatcattgatatttattatctggctttgagagcaaccctgctttttgcccttgtttgctgtttgacccgtcccaccccgattaaagttcactttttgatctggatgatgggagaggctgggagggaggaggt

SEQ ID NO: 34088 - DNA, 660 bp, Homo Sapiens
ccacgcgtccgattacctaccatctcttatagaggtattaatcctggtattgcaaatacggacttttttcacctgtgtagaagttagcaaaatacaaagtcatttttatcgaattcatagtagcttcttgttaacatattatcttagtaaaacaattgtcatttggaagtatgagaagtttttggctctaaaaatgtgtcttacaagactggaatcatgtggagaccatatgtactgattctgctgaatatgtcctgtgaagccacagttaggtctagagatggaagaatcgtctctttgctagtcagaagacctgaacattttcttttataactggattttaagatgagttatagttctactgttgcttgccagcactgtctggatttaatacaatcctgtcatttctcaaaacagtgctggagaaaacctgattcttagtgttcacagtcaagcatgttaagtattgttccttgttatgtaaaaggggttgaagtgattctaatttgttttcaaggttagtttaatagattggaagaataattggccgcctcatcggctcccttttcattttgtacagtatcaaggtataggaattttactgtatttgactttttttctctctcttccagtgacaatcataggaggcatcgttttttt

SEQ ID NO: 34089 - DNA, 592 bp, Homo Sapiens
ccacgcgtccgcaggacctagggatcttggccttccaccctcctccgagcaccaggactccctccagttccgtacccgaggcctccgtggtgaagaggtgccggacccgatgagctcgggagtccaccatcgctctgcaagccgcaggtttgcggagcaatttgttctgcctgatagggttgttaagggtgtcgcaatgaggtccacgatttaaagcgcttccataactatttttctccttttacctctacgagagtggactgtcaagggcgaatgcaggttttgtgaggcctgaaccttgtgccatttggagagcccttttaaagaaaaataatgtaaaattgtcttatttttgcaaattttaccgaggtacacgaccatgggaacacctcgttagggcccctctcaaggccttggaagtgttcgcaaaaatgggcccttaaaacttgggcttcattagcttcgctgtcaacccccctgtgcactgaagtgtacacacttgtttacagatgtgtgcctcccctcccttgggctttccttattctatgtcccctattttatatatacagaggatatttcataaatctgtggg

SEQ ID NO: 34090 - DNA, 657 bp, Homo Sapiens
ccacgcgtccggccctgggaaggagcatcaagtaaatgaacagattggagcagcccctcaccagccaacaactccagggggagcccacttgtggaaggagtgccaaagcaatggtgacttgaagccagatgggctggagtgtggaggaaggtctttctccaggctctgaaggtgtaatgtgacaggtgacggcacaatggaccagaagggaactgccagcccaccatctaccaccaggagcaggcagccaccagctggaagatggatcggctgcagagcgctgtcagtttcagctcagccacaggctcacgggaactgcatgcattcagcaagtgcaacattcaacacacagcacgcaaagggcccctgtcagatgctgacagacacccgctgcagccttacagagggagatggtgccacctttgcctaacaggttcctggtggtggggcacacagattccaaaggagagacatgtggttggatgttggtgtgaaggtcatggcatcgcatgcagggggacaagtcagtggaaacttgagtcggcagggagactttagagatagatttgtaaaagctgctgtaataaggttgaactgactctcctcagggaaaattcagagaggatgggacccactgttttttcagtcagtaaaaac

SEQ ID NO: 34091 - DNA, 683 bp, Homo Sapiens
ccacgcgtccgtgcagatggaatacatatgtaaaaatatttagtcaaaattaagtctttgtaaactttagaaaattcacggtagggagaactaaggcactggcacttaagacgttacactaaatcagaatgttctgtaaagaaagtaatccaaagctaaaactgttggataatttatttgtatataagtttaagaggagtggaaggttattttttggagagttaaaattacattcaaggtatacgtttttccttgaaaaaagtgtaagttttttgaaaagcaagtaggtaattcaactgtaaaattgcttcatgctgttccttttttcctgttgtttgtgtaaaagcatgtcatcaatttctgttgcatcagaaatctgagagattcctttcttattaggtaggcatcattcattaatttttccatggaagagtaaggatattaaaatgtaagatgataatgaaaatctgattggagaggctctttatggctgacttttaacattgttcatgtgatgcatgagttatgtgtttagagtaatattctgcattatagtgagaggaaaactttgagttttagtagtaaattgttttaccaattgtacttttatgtaataaaatgtagggaattttaaaattcttttataagactgtgataacttaacttttaaattaaacgaaatg

SEQ ID NO: 34092 - DNA, 676 bp, Homo Sapiens
ccacgcgtccgcccacgcgtccgcggacgcgtggggcctgagctcccacagctacccaccaccccatccccagtgtcttcagcctcttcctgccccttgcatttcctgaggtcatctgaacaggcttggctgccatggcaggagcagagcagatagagcaggacctcatctccttctctttgcattttgtgcctcctctaatgcatcctgggctcctgctaaccctgtgggaaacaccgtctcttctctcctttgccctcttctgtgatcacatcctcacttctgagcctatctgcccatccagtcaatcccccttggttctgggatgcttttccctggccgcctccctctaggagtgtttagaaccctcactgtgggcagaagggagggaagatggctgaggtacctggaaagggacgtgtggatccccgggcatggaaggaaggaggcaggagagctagaaaaagggatgagatctaatgttccctaaggaacctggcttagtgctggcccttcacatactgagacatggaatccttactactgttctctgaggaagagggctgtccccacttccaggtgagaaaacaggctttgtgtgacttgcccaaggccatctataagtgtagactgggacttgcacccaggtttcttagtgtggaaacgcaagcttgta

SEQ ID NO: 34093 - DNA, 552 bp, Homo Sapiens
gggaatttcaaagatgaaagcaagagcaaagatggagaatgggttggaggtggaagaaacacagaagtaagaagtaaaggctagtgaggagagtatgaatactttaggctctctgagttgatggcagcaagtagagccaaggggcagggagaatgaagacatagtctctactgattggatgtagaagaaatgaaaaagaagagtctaagatgtccttcagtaggagtggtagaagggtgaatgaggaaagtcagtagctcagaagagaagcatttgaagaaggaagataacaagttcagtaatttaagactctatcttttctttcctgaactcttcctatagtatccctgttgggtccccctctccaggatttgttctccagtctaccctttgcactgggtttctaaaaggcaatctttactggattattctctgcatccagcctcacagtggttgccaccaccttgaggtgaaaggccaaggtccagagcatggcatacaagctcttggagctctgcctttcctatatcttagccttatatcctgccattc

SEQ ID NO: 34094 - DNA, 496 bp, Homo Sapiens
agatcttctttggtttatttcatcaatgttttgtagttttctgccacaaaacatgtacaattgaagtcctgtacatgttttgttagatttatacttgggtttttttagcaactgtaaatggcatttattttttattttggtgtctgttatggacaccatatactaccttcccagctggtagtattccagcatagctagacttctcaggaaagactgatggggtgagagagaattaggagatccctcttgtggtggtctaaggtccattttctaagattccaaattcctgtatcaagtactataacttccatctgttatggatgccaaaataaaattgacttttgtatgtttgtattacatcttgcaaccttgaggaactcacttatgagttctaggaggttgttgttttgcagatttcatggaattttctacctaaacaatcatttcatctgcagatagggacagttttattttttcctttctcatctgcatgcta

SEQ ID NO: 34095 - DNA, 677 bp, Homo Sapiens
ccacgcgtccgcttggtttgccgtgtgcatggtgtgtctgtcgtccacacccctcttgggcgctacccaccaatactaaccctgtgatgcgccgctttctccagtgaatctgcttgggtttggatgtagaacatagaatgataattttaaatgcaaaagttctaggaatatgaaaccaaatcttggttttcattacttcagatagatacatagtacattgtgtatcatttttgtgtaatgtggccgggactaccctgagcctgccatgccatctattttacctaattgatctgacattgaaaaccaagacctgccagaccttttcatttgctctaatccctaccacatcactaactaaccttgtccctgggcctgagatttggtaaaattattggagaattgaactatttgtatttatttttccattattagacttagtaatgaccagttgcccagggactcccttttcataaaaatgtagaaatctgtttttcctagcctgaaaatggtgcaggtgtatgctttttttcctcagtagtctttactgatgcttggcctttgaattgaaagaaatttatgtgaattatgtttggaaaaactagagatataggtcatcatcattgagaatcttctaattatattgattagatcacattgctggggtgaatggtttgaaa

SEQ ID NO: 34096 - DNA, 637 bp, Homo Sapiens
ccacgcgtccgatttgaatatagccaccctgcttcatgggttcaccataccagcatttctcaaaactatgttgaaaactctagaatatagttggcatatgaagttcagatatttgaatcctaaaggctaacctcattttcttccgtctgtaatgaactaccccaaatgaaattacaagagtcaaaccaaaaagaaagtagagttatatggcaagtgggttagaattacttttaattaacaaaaatttccctgagcgcttctcccctctccagcaggcagattctctcttcattttcaaagtggtaaataatagaaccctctcctactgggcttccagggttttatgcttctctctaagagggaacactatgattaaaagatgaaatcatctagtaggtgacattttaatcatccttccctaaagaattgggttttcaatttggatgtgttaatttgtgcttctgcttaggctgctttgtaaatggaagtgtttttcaatagttgaataggtggtgtgtgtgctctgtctcttaagcaaaaaagggagagaactctgtcttccctaggacctgtgcacctactatagttctgcacccagcaaaccttcgataatgtgatgtctaaatgggagcgtatc

SEQ ID NO: 34097 - DNA, 448 bp, Homo Sapiens
ccacgcgtccgcggacgcgtgggtcgacccacgcgtgcgcagacctgcaacagaagtggcattcagtccccagcagacatgggtgagctcaccccagcactgctgttgggaaggtgactgcaggaaaccaattcttacaagatccatgcccagcctttttgacctgcttgagagggaagaaggggtgtttagcatttaatagtttgcttgtcttccactcctgccaggaagtgtttatttgcctctaattgggcctgagagaccatagggaggttggggctcactgagggattggctgaggatgtataaagcaaaggctgtgagaagcagttgggagtttggttgtcattggattgaatttacttttttgtttctcacccgcaacttgagccaggacagctggtccaagtggccacagttatgggtttaaggtccttgggggggctgg

SEQ ID NO: 34098 - DNA, 681 bp, Homo Sapiens
ccacgcgtccgcagaaagtcaaacccatgttttaaaagcaccaaattatacgcaattacatgaagggcagtttcaaaagttgagtatttgtctttatgattaaatttaactgtctaaagaatgtcagtattcttaggctgttacacaggcaataaaatttgtaaagcagcatttattgaagtcagactttcattggattttaaaatttcatggctaaatagttgagagtcagtacaatttgccttattacaaatattaaattgcttttaaagggctctactgagaggtttctttgctatgcaattttctgtgcaaaattaactcaatatatctcgctaaacaaaaataataattttgtaaatagggatttgcttttctttctcagtaactgtattcaaactggtttcaaagtcaaccctgtggcaatcttcttgtccctctgctttttctgaatttcatagctcagtacttgggcctcctgtgaccataatgattctgcaaacccagttcttttaattccatatttgaagagttaaaggatttatgagaatccagagattaggaagcgattaagcagttacatcctggcagttctccttctgtttcttcctgggttgaacactaggaacagtgggttctgcagttcaatggctgtcaaaacttgcaaggcaagtccagtac

SEQ ID NO: 34099 - DNA, 675 bp, Homo Sapiens
ccacgcgtccgagcctaatgacagctctggggccagaaagggtcacagttacctcaaacccaaagggtgaccactttatgaccaaacatctgtgaccctgtgatcgtgttcggccaacaaggagctggagccccctgccatgcaggagcctggagtgtggtgctcggagccggggcgtgtgactgggctggcagatgagccgtggcgggcatcgtgtgcagcaggtccgaggccctgggcgtgtgtgggctctcctgccggggcttcctgagcccatccttgctgggctgagcaggggtctctcaggttgcgtctgccctttcccctggtacccgtggccccacatgatggcaggggatgcccgctgagccgtgggaccactcccgccgttctgagacacgaccctcccacccgtttggctgctgggctccagcatccccccatggggaaacccagagttgctgggtttgtccgtccaggggatgtgggtttttgcgagaagctgtggagacagagtgaaggcccagaggcaggttgggtgctgggccctgtcaggatgtcagagtagaaaccaccatcaaggtcgcccagtgtaccccggtggaggtgtccacgtgagaggagctgctgtgctgccccaggatggcctcagttgtggcgccggggggccctcag

SEQ ID NO: 34100 - DNA, 493 bp, Homo Sapiens
atgatttttccataaggattcacccaatcattggagcttttaagagttcttcctccccttcagatgcacttattttgtattaaaaattgaaaaaacaataaagaaattcccttaggaaggaatagtaagaccactgctatagagcagaaaaatatttactaacatatactttattacaatcatgttttccctaagaaatttctatatttgctttcctcacagtcttttgcttcaaattcttaacaatggaaaccatcttgaaattgactttggaattcaaaacacacatggcaagtgtcaaagaatggtcaataaaatagaacaaagcaaagtaaaacaaaagaggtgtttaaactgtatagataacttatgaaatgtagataacatggaagggaaaggaagacagatctgagaagggaaaaagctaatttacaccacagacacctcccagcttgccccagggcaatcctaaaattatgggtggaacattttg

SEQ ID NO: 34101 - DNA, 411 bp, Homo Sapiens
ccacgcgtccggcacactgtacctcccctttctctgtgattctcagggacacattcaacactccttcctccacctgcctaactcaataatagtggatagatgtactaccacaccttggatcctctttattaaaaatgaatggcgaggcctcaccaaagaatcttgaactttgtatcactctatgaatgacactaagcaaggcactgtgaataagataccagatccttcatgctctggtacttttaggctaacatggaaaataaaatatgttcacatatgacttcttaatatccatatcagtgcactctgacatgaatctgtccaagtaattaatttcatggaatgtggctactcctggcctcttcccaccctcctaagtcccagtcttcaattctggataggcactctaac

SEQ ID NO: 34102 - DNA, 487 bp, Homo Sapiens
ctttcaggtgcccttcctgctcctggccatgcccacaccttacctgctgagcttacacaaagccagtgccccccatcttgtgtgatggagcaagaacttctctgagaagtttgtttcccatgatagaaacttcctcagtcttcctacttctgctgctcacttctgctgctttaaatgcttatagcaatttattttcacagggacgttccgcatgtccacgtctctgtggtcatccaggccttcagtgcacatgggcccagcggtctctcagtgtcttcttgaaaccttcagcatctgtgcagggccctgctaaccttgcttccatcctactgcacccggtaggcatggatgcagaaggaaatgagcaagttgggtatgagattttttacctagcatctccccatccccacccccagttcctggtaactaccattgtactgtctgctcccacgagttcgatttattttagattccacaagtaagtgaa

SEQ ID NO: 34103 - DNA, 489 bp, Homo Sapiens
ctaatttcttatgctatgtttgatctctttcctgtgtgtgtgtttgtcctttgtggtctagttcctagcgacaaagttggtttttaaaaattttgtaggtacacagaggagtatatgttgacatattttgatatagtcatatagtgcatagtaataccatcagggtaaatgtgatacctacagttttggtctttttgcttaggatagctttgactactctggatctttcatggttccatataaattttaaaattgctttttctaattctgtgaagaatgtcattggtatcatagtcattttgatagggattgcattgaatctgtacattactctaaatagtatggacatttaaaaaatattgattcttccaatcccatgagcatggaatatctttgcattttcttgtagcatcttcactttcttgcaacaattttttatagctttcattatagagatctttcacttctttggttaattcctaggtattt

SEQ ID NO: 34104 - DNA, 576 bp, Homo Sapiens
ccacgcgtccggttaaatggaccaatggtatgtgctaccttttttctctactaaggtaataatgtactcttctagctgtaacctaccagcctacagaaatggggttggttttgaggtttggatagatccctgtactgttattatcctgaagtaggggtgggggatgctgaagagagcttcacagtgccatctttgtatgtaaaaatggcacaattatcctcaagtgaagaaataatgtagaaagagctgaagtagtgctttttctaccactttgcagaaaattagtgtcagcagcacattattcagaaatctttatcttttaatctactatgctaactcttatcatatctgcccctgccctattgctttaactagagaggtttattttgttcccttagctaatgactctatctgggtcagacatcacatatgtggcacctgggtggaagtgatgagttcatttttgtctttttgttattgttattaacatcacctcatgtgtttggcattctgtgttggctgtcgaaccagattcctcttcctttcctgaaagaaaacagggcctagcataggaac

SEQ ID NO: 34105 - DNA, 467 bp, Homo Sapiens
ccacgcgtccgcccacgcgtccgtgagaatgtttcctgtgtacctatagaaaagcctctttggtagattttccggtttataattatttaaccagaagatacatgggaggttcttttgtatgtacctgtagaatacatcccagtaagggtcctatggagaaagacctgttgtcatcaataaccttcattattctaactgtgaaacgttcattaatgcgaataatatcctcaaagattttctacaatgagaatcatccagtaaagctttttaactgagaatttaaaagttgtaaaattgttagttaaatgtgtataattatcaaaagaggttgactttggaaaacaaacaatttgctaagggaaggaaaacttgaaaataatcaccttagatggggcatacaatttgacctaagcaattgtttcaaaactgtcttcagtttcttgaaaataattgttagggctgatata

SEQ ID NO: 34106 - DNA, 679 bp, Homo Sapiens
ccacgcgtccgcagtttctaatgggtatttggccgatgtggtgcttattgtagccaggaacgttccgggcaaggaagcgctgggcgattccaggagagatataaagaaaatatttcaagatctgacacacacacacagaagttcactgaaaacttcaggattttctgtggctaagagtcctttcaatcatgaaagtattatttacttctaaaactttttggaggacttttaaaattgttacaaagtttttttcaaaatcctctttttacaagtattagtttctgggaaaagctggaagacatctattttctagttaaaaaataaaggcaaaggattcattttctaagagaattttaattttataacctcccagattaatgtcttggtgtataaatgtgtatctcatggaatgtgacatgagaagcacgtcatttgttaggtgctaaatttgtttttacgattatcgattttataagtgatcttcagtttgttgaagaatgagtaaaaccacatagatattactttcccactttaatcttttggatgaaagcaacacattcaaagccaaaggacttagagtgaaatcttaaggtgtttgctaccataattctaatttggtattcataaaaaattatgtaatatttcaagacttaacgtgctctgtttgaatcacacatca

SEQ ID NO: 34107 - DNA, 628 bp, Homo Sapiens
ccacgcgtcgtatgtgttatcataggaattttaactaggtctaatgttacatacagttgattatgatgcagctataacaaagaaagaggagtgtctccatatacttccatagatcttttagatatattattcaataaaatgccaaggtaaagcaggaaaaacatgagccaaataagtctaagaaaaccacatataggaacatcattgttgtcttgaatcaatttctgctgctatcacaaaataccatagactgggtaatttgtaataaaaagaaacttatctggttcacagttctgtagactgggaagtccaagatgatgacaccaacatctggcaagaggcttcttactgagtcataatatagtggaaaggcaagctagcacctgagacagagagaatggggccaaacttgtctttttatcagaagcccactcccaggataactaagccatttttgagataatggtattaaaccatatgtgaagatggacccttcattagttaatcacctcttagaggttctacctcccaataccattatattagcaattaaatttcaatatgagttttggaggggacattaaaccatggcactagtcaagctgtttaaaacagaaagtaaaaaata

SEQ ID NO: 34108 - DNA, 542 bp, Homo Sapiens
caggctatcacctaaggtcctagcctagtttagtgggctgtaggtccagtggcaacttcatttcagagccttcatactattatagcctactggagctcccactggtcctttctggtgcccctttctggggctgagggaatttccatgggctgggccacctggtgcctctagatgggcaaaaggagtctcaggcctacggagaccaagagtgcttcccaaactaggctgcctgttatgatgtggttcctattgttgataccacccagtcaccctacatgtctgtcagtggaagtggaggagaataccaggctcaccaggaagcaggaggaatgagtctatgttggctgtcttttggtgccaagttgggatcaggtaataccaggcctaggtcaccttctcttgttggatgcggtgatggtaagacatcctacctctattgttcctccagtcttagggtccctaactaattcctctttctgtttccatctttcagagttctcctttggttacctcttgcattatttctagactttataattgca

SEQ ID NO: 34109 - DNA, 507 bp, Homo Sapiens
gctttaacactggttttgagtaatttgattatgatgtgccttggtatagtttccttcacagttgtgtgctatattccatccagtgtagttttcattacattttaatctctacaagctttagtttttttatgtcttccatattgctacttaaccttttgaacacagagaatacagttacattaacagttttaacgtcctccaaaaattctaacatctgtgccagttgtgaatcagttttgaccaattagtctccctacttaaccttttgaacacagagaatacagttacattaacagttttaacgtcctccaaaaattctaacatctgtgccagttgtgaatcagttttgaccaattagtctcctcattatatagaaagttttcctactcctttgcacacctggtaatttttgataggatgtcagatattgtgaattttaccttgttgggtgctaaattgtcatattccaataatcttcttgagctttattcaaggatatggttaatt

SEQ ID NO: 34110 - DNA, 479 bp, Homo Sapiens
aagtacattttgtcctatgagttttagcattaagccaggggtggccatagccacgttaaaaggaaaagttgagtaaaagggggaaggtaacccatactcttagcacccccaacctaggcttcatctcgattcagaggagtggcctcttagaaacccctttctagcttcttgtttattctgaaaggaaactaagggttcttcctgatcctgttttggaatagcatccttcaaagacagcagaaatgcatttgctaatcattccatggtatggaaaagtcaccaacaaagaaaaatatctgctgggaaagtctgaacactgctgagactggaaagaaaaccaggtggagacagggacctggggaactctggcacctaggaccaggggctcagcgtctgcagcagaaatgctgccctattgacagcccctccaagatgcattttagaaaaccatgctgctcaaacaggaagcagctacaaag

SEQ ID NO: 34111 - DNA, 491 bp, Homo Sapiens
gtgcaactcatctgtgtttatggtatgatcacatttgtttaaaacaatatacataaaataactgtatatgcatagaaattatcttgatgatacccaagaaaaagtaatagcagttactgctcttggagaagagaatgaggatgtcaaggtcacatccgggagtgacactcacttttcatctccccctttctctacagtatttcaattttatacataagcatgtattatcttattaaaagagaaaattttaacaatgacaagaaaaaaaccatagaactcatgactgttatctaagtgtcaaagaaagatgcctgctcaatttgagtacatgttaataatacattttatggattactcttctactaaaatctactaaaaagatacttaggccatttctactgtgaacttaaatggcataaaatatttacaaaagccttaatgcaagcacataagctaatttcaaacagatctggttacttaccctccaaccc

SEQ ID NO: 34112 - DNA, 633 bp, Homo Sapiens
cttgagttggagttgaaatagagcttagaggttgcctattctcaggtttgtcccatggaaaaaaaattgctaaaacatttttgaaaggataaatcctaataggcttggatgcttcctacaatgaggaattagttactaactttacactttaggaaatacatatgaaggttaaaattatcatgacacattccagaagttgcttctactctgaaaagtcattaattctatcagagataccttccaagaacaaggtgccagtacatatttaacatattttcttatgttcaaatattgaacaataactggatacgtcagataaataaaataatcctaaagaggtcttctttccaatgattttaagtattaggaaaataaaacaaatgcctgagagtgtatgaggtgccctttaagttcatacatgccatacacatgatcacaaatattttgttcctcaaagaaacggaaaatgatttactgaataatgtatttagtgatatttagatactataagcaacgatgaaaattcagtttcattgtttgtcaacatagctctaaagtaatccaggtggaactactgctgagtgaaaaaattaagataatcatctatgtaaattaccaatgttaaacaggcta

SEQ ID NO: 34113 - DNA, 482 bp, Homo Sapiens
gcttaggattgttttggctatatgggctctttttatgttccatatgaaagttaaagtagttttttctaattctgtgaagaaactcaatggtagcttgatggggataatccaaaggaattatctggattttatcatatcttggaaatattgttcattcaggcatatcttaaaaatgttattggttcagttctagaccatcacagtaaagcaaatatcaaaaagagtcaaacaaatttggaggttttctggtgcatataaaagtcatgttcacactctgctgtagtctattaagtgtcaatatcattgtgtctgaaaaacaatgtaattccttcattaaaaagtaattttttgctaaaaatgccaatgatcatctgagacttcagtgtgtagtaatattttgctggtgaagggtcttgcctcaatgttgatggctgctgacagatcaaggtggtggttgctgaaagttggggtgggtgtggcaa

SEQ ID NO: 34114 - DNA, 483 bp, Homo Sapiens
aaaagatgagttcaattctccaaatgtggctccaagccttgtgttgcataaccccgagaggaaaccctggaactgatttacaaggggtgggagaatttgattttcttcataattctagaaatctttggagtattttctctttggcatagtttgagaagagatgtgttgttgttgccttgaagttgaaatgaggtagctgtgtttcccttccctagttctcttctatagatccttagccttaccctggatccttgccttatatacttggcacttttaaaacaaatgtgctgcagattcattagatgtagcacattatttagtgtgtctttctctctctttcccatccgtttttttggtgtggtacattattatttcatttcacgtttctatatcttttactgtttattaaaaatattccacaaaaagcagtgaggtagtttaatagatttacagttttctttgcagggtttgaagctctgattt

SEQ ID NO: 34115 - DNA, 671 bp, Homo Sapiens
ccacgcgtccggaattattgagttcatataacttccctaaaatctaagaataatctataatcccatgccaccagtcccgttaataaagacttagggtctgtctttacccatttgttcatttgaaattccccgtctttacttcccccataaccaggaaacagatctacacccatgtttaacttataaagagatataagtgagtttacataggtggagatcttgtacctggattcacattgtaggttttattacccagctttcccctctatcccaaagccatgattgccatagtggaatttaaagtctttggactaacactgaatcaagaactaactctacaaatgtattctctgcaggaggataagaattccaaatggcttctaattgttgcccatggcttgaaataaagttccatatagctaaagccccagcacaaaaacacttgaagacagccattaggtagaatttcttttcttttttagaggtcttatattggaaatgtaacagttgcaaagatatctaatgtttcaccttaaaatgtgagttataaattcacatttcacattgcctccttcctccttgagcaaacagactaggcaattagtaccaaatagtaactagttatatttcttaacaccgattattgtaagtaatttattaagaaaaaatct

SEQ ID NO: 34116 - DNA, 481 bp, Homo Sapiens
gcatgattgcctgattttatttatattggcaaggaggctactaatttctatactttcactaataggagattcagtatgagtctgcccattttatgtgaattcatgtagaaaaattgggtcaatttttctgagaaactcctatctagcaaacttaagtactctaaacaaaactcagtgcaaagagataaaaacttcagttttaattttttcccaagacaattcccaaatgttacaaattaaaggattcttagcattatgaaagtaaatcagcccgagtggtggttacgttgttcaacagcaaaggaatgttattacctcactgactgaagttggcaagaatactcttgcaaatatgttaagcaggcaataaggtatcaaacaacagctgagcctcacctatgtagcaggacagaagcaagttatctggtatacagatttctaggtagacatagaattcaggacttcagttcttcattgttaa

SEQ ID NO: 34117 - DNA, 680 bp, Homo Sapiens
ccacgcgtccgcccacgcgtccgaacaagatcttttctccagaatagctctatttttttaaaaaaattaattgtgctaggagctctcataagtatttgcatatccagaagttgacctagggaataaaaagaggcagaaaaatagtttagtggcttactaattaacacaaatttgagttatatgcaaactcagtagtgtcttctcagcattaactatagacagttcatttgtcctgaaagctttattgtttgattgtgattgtgtagatctttctcccataaaacattggattagtaggtgtacatatatgctaaacaactaaaatacagcttaatatccttaatttagatacattttaaatcttaactttagcaattatcttttcctttggcttctctgggcaactagatttcaactcatgacttgattaagccatctccattttgaactttctgaaaaaacggaagaaaatctctgatttttcatagtaaaacataaatttaattactggtaggtatatattctacttgctttttttgaaagctttagggagaatttcaacctctgcattaaaagtcagtaagaaaaagctcttacgacaataactttcccctaaaaagcacaaatgcttctttgcctgtcatttaaaaaatatttattgtgcactcaatgcagaaatt

SEQ ID NO: 34118 - DNA, 386 bp, Homo Sapiens
gtgtgtgtaatgtttgggagtcttcaaactaggtgagttcccccatgccagttggctcaaatttgtctttgttaagagtgttagttatcctattcagtcccataggcataaaactgggataaaatgatttcattgtggagctgaaatatcagcatgaaatagagtactcagccatacaaagtgactgtcttataggaacatagagggaaagctcagtatagagctctgggacatgcaaaggaaacaccagggtgtgcaggatgctcaagaggtctgaatggctctcactatacctatagaaagcaagcatggctgagctgatcccagaatatttcctggctactgctcccttgagcatataaacccttaaagataggacggctaca

SEQ ID NO: 34119 - DNA, 384 bp, Homo Sapiens
atgagccactgtgcccagctctcttccattataatttcaccattaccaaccacctcaggtaatggtttatttcaaaatttggtgagtaaagaaatacttatcgtatagttaacatatactggttgctcactatgggctgagtacttcacactttgccttttcaatctttataataattctatgagttaaataatagtattgcccacattttacagctaaagacactgaaaacttacggtcactgaaaacttacgatccaggatcatattgttagtaagtagaagagcaaaaatttgaacctggatagtcagagtccagatcgcacattttcttagctactacaacacattgccaggtactaagtgaggtgccagggaatgaagt

SEQ ID NO: 34120 - DNA, 462 bp, Homo Sapiens
ccctccagaaacccaatgaccttggacttccctgagtcccacactggctgacatattacatacggattcttccctccaagggaagataagcctagcttccatcgggaacagacccgcacattccatcagtcccttctcctgactgtacactccctacttcactccccaggcagggcctgggtagtgaacttttaagaaccaacactgatttgacttccaccagcaggctcagcagcacagcctctagatgttttgctcgtttcatcgccaggcggtactctttcccacggtactataaagcaattcctgtttttcactttgttgaaaaggtgtgccaaatgactgcaattctgtgtgcccagattatgataagcctaccctggtgtcctgcctaactaatcacatcacagcccactggcattttcatcagaagcctttgcttgagtggatgggggtaggctg

SEQ ID NO: 34121 - DNA, 465 bp, Homo Sapiens
aagtgaagtgagtcatagtgtatagatctttctcctttgcataaaatagttttttttcctctgaagaaaatagtatttaaataaacattattggcaaattttaatattcatctttttggaatataacaacataagctgtatatcagtaaggaattttagtgaactattgttacaacatggttttaacctagtcaggcattagattgtatttcataatgaaaacagctataaaaacaaatgtcaattggaagagtggcccattttacaaagcctgcctctaacatgaataaatcttgccttcatgtcacaagctattattgcagtcccctttatctgaaacaatcaaatcattcacaatgaaatatagtgagtggtgtcagagaatcaaagaatttacagacgagaaaacaagcaaaacaccggacccaacccctcttaaactacagatgggggggagcacatgag

SEQ ID NO: 34122 - DNA, 673 bp, Homo Sapiens
ccacgcgtccgcccacgcgtccggtctaaagtggctaactttccaaggtgtgtatcgctttaccaaaaccattatttttcaaggattcaaagaatgtgtttacaattgatagaaaatggaagtttaaaaaaattaatactttatagcatgttgaaatgagggcagccttatacaaagtcatactttgagcttgcctagcctattgtgatcagagaataatgtaatttttgcttacaacttggtaagcaggtcagttattctaacttattttctgattagaacaaaaagatgtaaaaacttgaaaactattgggaaaagaacaaagagtgaagaggacttttgagtgctgaggaatgtggcagcttggaaaacaaactttttaggcagagattctttgctaggtcagtttgataaagtgagcataaccgtatttttaatctttaatgctaatgaatagcatagatgctaataagcatctaggtctataaaaagtcagctttgatagtgtatatagatggctttaaacattgttttctagcatttaaacactttcaaatcatccggttgcttgattgggcctagctgtctaagaggagagaatgagcccagatgaggaaaagagattgattttactgagctagaatgagaggagagagggttgagtgaatgaaaa

SEQ ID NO: 34123 - DNA, 459 bp, Homo Sapiens
cacagaggaccaaaaggctttatacaggcaagacatgatgcttgtgccacacacagggcaagccccagtttcctgggatacaatcatgctttgcccttgtcctcagtccaagtaagaacagctagtggaaagcacacccacacaagtgaagtgagtgctccccagtccctctggcatccgtagtgacttattcagcactggacagtgccctctgtcctaggtggtgctattgctggtgatagcctctctccttggcacagatggctgagccactggtttcagagctcaaagaaggggttatatttcctaatctcctgaagaagtttttctttatcctggttggcattggccaaggcttgtttagtttctataagttctttttgtaggataggcagttctttcacctgctgttcaaaaacctctcctgtgggcaccaaaaacacctgttctttttggggg

SEQ ID NO: 34124 - DNA, 501 bp, Homo Sapiens
cacgcgtccgcggacgcgtccgcccacgcgtccgccgaaatggttcttggaaccttaggatattagagttttaaatcattgcttaaagttgcctttgctgattgcaaaggtttgcttttcagggacaggtatagtagatttaagcttggttttatattttatttttagaactctatgtattgggatataattatagttcaaagagaaatgcagaaaaatcactattcctcttctttgcactggtttgtctagatattctgttacctctgcctagttttgtagacatggggttcttgacggctactgtgaaggctgcagagtctatccatctaagaaatccaatcaataaaattaaaataaaagccttatttttaattttataaactttgaattaccttatttaatggaggctccagaagcagattatatacagatactgaccctggtaacaggttcttgtaaatggcatcgtttaaagttgcttatatttgtattttaaag

SEQ ID NO: 34125 - DNA, 434 bp, Homo Sapiens
cgttctttgtcccaactagtagacaatgagggctgtaaggtagctaacagcaccttaccaaagcataagcattatttttagggcagaataatttattgggaatgaaggatgtctctttaaatggaccagctgtaaaatgtcactaggaaggagttttatggtttccaggtcaaacttattctatgattttgtgttcaattacacacttctatatggctctctgacgagtattttaagcttatgaagttgacgttctgacgcacaaaaaaatacaacggtggcacacagacttccagaaataagaaaagagcccatcagtgctggatacaatggaaaaccattccaataaaccaatgacaccataaatttttgtgccactgaaaagtaaaaaagtagtagcaagtatcaaaatgctaaacatataggacagtgtt

SEQ ID NO: 34126 - DNA, 538 bp, Homo Sapiens
caggtttgaaatggcatttatttcattaagcaagcattcacagaatggcagtacctaatgccgaaatagtggaggaaggattttttccttcaagatagtgaaggagactaacacctaaagaggtaattacaaataaggtattatgctaatttttaaaatagacataagatgaggcgcattgacttagctgggaaagcttcccagaagaggtgatactgaagctgcatcttacaagatggggaggaactatctcgtgaacagagtgaaaaagggctctcttggctgagggagcatgggcatagctatagaccagtaacgtccagcagaaatataatgcaagccacaaatgcaatgcaaaccagattaaacagaagttcaaagaaagtgtgaagttagctgtaatagtatatcttatttaattcaacaaatactaaatgttaccatctaacagatagccagtattttaaaattataaagatattttacatgctttattttgtgctcaaataaatcttcaaaatctggcatttacacttac

SEQ ID NO: 34127 - DNA, 498 bp, Homo Sapiens
aaatatcctaatcagcatctgtgtgaggaatcctcactcacccgattccagaaagaacacttgaaaatctcagttaaaaaaagggaagccccagcgagacaacactggatggatgggtacttttttccccttcctacttatttctccaataactgaactatttctttttcccaaagaaagacaattcctagtcagctctcaatcaatgttttcttctcttttgaagcaaagctcctgaaagacatctgatgctcccaaccaggtgggggaactctgaaggattttctcttttctttggggaactcccttaggatatttatggcattctcactcatcactctaatctatttctgaaagaaggcaattgacaaaagcaacaggagtcaatctcattgttgcaattttcctgagcaacattactttttcttcttttataagtgtgtgtgtgtttgtgtaacaagagattataaaaagaaatcttttacctttgaaaaggct

SEQ ID NO: 34128 - DNA, 391 bp, Homo Sapiens
ggcgacgcgtccggttaacttcaacccctctgagagagagaggcttcctgagcttccaacaatcaattatccaaatattagtcacagaagggcactaagggttgtgcacagcacgtggccagcccattctctgagtctgtcaagtttaaggtgaacgctaatcctgaatgagtcttaaaatgtacttggcatatcctgttcattgtaaaatgttctcacattgtgatggctggggcttccctctcaggtgtaatctgcgaagtcagacgtgacacagcctgggtgaggtgggccaagccgggaactgggttaggagggaagctggggaatgatctccaaggtctcagatcccaaactggctttagccagattcacccagagggatctcata

SEQ ID NO: 34129 - DNA, 430 bp, Homo Sapiens
aatattttaataaaatttttacatttctagagcaatttattcaattcatacatgatatagcaacaaaaggaaggaaactgagacagctttcctataaaacattcaagagtactttcctttgactgtttactcaatatatatgttctcttggtattcttctgaattgttaacacaaagttttaaaaaatgaaaatttcatataaaaatatttatcttttttaacaatgggttttcaaattaaataatgtctgtttatcaatatttattgcatagaaatattttaagtactttaatatttagaaaaacatcaggaagccagtttttcaatggctgccatgtcttaaaagttggtaacttaaagtctatttataattttaaaattacatattctgtagatataaaagttaaaaaaatacattttgatttaata

SEQ ID NO: 34130 - DNA, 485 bp, Homo Sapiens
ccacgcgtccggaggaatcccccctgaacccctggacgtggttctcctatttcagtcacacttctagctatgactctgcttagacaagatgaagttgatggatccattagaaagtttccactgaacttgtctggtccaatttctctttcctcaagggcatggacacagctttggttctccttcctgcacttacttgtctgctgctcccattcttcccattagggcatagaagattacctagcaggtgaaggcaccctacactctttggtttttaataggagaaaccctccagtcagagataaatcttacttggagtctaggtagctataagtctgaagtgtcagtacgacatttcagcactttcagtaggagctcccaagagccaaataaatcacagaaccagcctttgagatattgactttggcttgaaatagaatgtgaggtgatgattctgctctattataccagaggccaagttttttctg

SEQ ID NO: 34131 - DNA, 480 bp, Homo Sapiens
cagtatagaaacacacagaggtttaatgttcaatgttgactttctttggttgaatggtgggacgcctctctgctcagccgggggcactgagggtggaaagttcatgaggggctgcaggggccagggagagcagccctgccccaggatccaggacacagacgggggccacacattcaggtgcccctctaccccatcgagggtgagaaaaacacacggggatgctattaaccagcctcacaaagaacaaacaatgccaagactgtatttttgtgtggacggttctgcacctacagtgcgtacacagcacagcgtggggattcgggttcacatcagctatggaagcaggtgagaaggtgaggcaaaggcaaagccacctggtggtcctccgacggcccgtctggtcgacctgtaaggacacacggggtttgctgggaggagcacgctgtgggttactgagtcacggtcaagtttaccgacacc

SEQ ID NO: 34132 - DNA, 489 bp, Homo Sapiens
gcgcacgcgtccgatagtttgaaaactactggttatgaaaaaatccttctaattagccaaaacttgttggtacattgttcttttataattttctcctattcttatattttaaaatgaaaaagtatacatgaagttgcagatgtgctccctttattaatgttggacctcaggctgcctccgccacctgaagcataacccccacctggaaataaacaaagtccacagagaaaggaggagcatttttataaaacgtagtttatttattttactccataatagctttcgattttgtattatgcattaaattattagcgtaagagattagtaatttattaagctttttaatttcctctagcagtgttcagtttctcctaagctattgctctatacatttcaaaaaccatcgatggcaccttgtctacctcaataggacagttattaatgtcaccaagacatttttctctccttttttcttccatagtctgtatc

SEQ ID NO: 34133 - DNA, 474 bp, Homo Sapiens
gcgattttagatagagtgactagcataggcttcactgagaggacatgtgagcaaagacacgaaagtggtgaggaaagctaggactcacttggcatccaagaaacagcgaagaggccggcaaggccagatgggacggagtgatcgagcaggagaagcagatgaggcgaaaggaatcataggagggtgcagattatgcagggctttgactcagagtgatgtgggaagccactgcagggttttgagcagagggacatgcacattctggctaatgtgttgaaataaactgaaatggtgaggaagaaagcagggagaccagtgaggagactcctgcaattatccaagcaagagatgatggaggcttggaccaggctgaggtgaaaagaggtcagattctcaacaggaagggagagctgaggggatctgctgaccatatgaatgtggggtgtaaaagaaagagaaaagtcaagaacgaca

SEQ ID NO: 34134 - DNA, 479 bp, Homo Sapiens
catgtcatgataacacggaaccaaaaaatctaattatttcttcattccaccacagacatcatgatacaggatgccaaggatgcagttaaacttgtgcttctatctaaaattataataacaacacctttctcacaagttataggaactaattaatgttttaatgaaacagcttgacaaaaataattatcattatgaaattatgggggaaaacagaaaagaacttaaggacttcaaggactaccggattgaaatgaggattttagtttgatagcccaataagtaaaattgctggggggacatatggtcagtagaacacgtagggattactttctcatctacattctttcagctttttctcttagccttttctcatcccaaactgttgatgacatcattacggaacagatttctggcaacggatgacattaaatgtgaatttgccaagataaaactgactagcgtactttgttggctagttt

SEQ ID NO: 34135 - DNA, 505 bp, Homo Sapiens
ccacgcgtccgcccacgcgtccggttgaaagattgtgactctctctttcttgtggctaccaaagttgggttgctggttaaaatacttagagttttttctaagatatacaaccaagcaacatctttgcaggtaacccatccatttcaatcctaggctaatttcaattagccactgccaaaagtcctgtggctcaaaatattgtaatatccactacttcttcttgcaataaatgcacccacctgtattcagtgtttaattgctgctatttggcctgttactccaggatttcatcatcctcattgaaatcaggcagcacatctcaatggagtcatctcatactgtaatgtctggtctgcattggagggaaaccacagcaggatgcatgtgctcctctaaataatgtatttattgatgccttagtgaagggagtatgctctggcccttcccaggggaggtagtgaggtatgaatatgcaggtttcatatgataaatccacttcaacatt

SEQ ID NO: 34136 - DNA, 539 bp, Homo Sapiens
ccacgcgtccggtggtcagaaaaatgtctacaagtagatatttgagctatacttcatgttgcactgttcaacataaacccctaattgacccacttctaaaaaatcacctgcaatataataccgtcaataaatggatgttaatttttttgtatttatattttaaacctattcatacatctcagtgtatgtgtgttgtaaatcaaagatgaccgtggcaagtcacaattattttaagaggtttatttgccaaggttaaggacatgcctaggacaaaagaacacaaaatcataggaaaaatctgtggtctgtgcttttttccaaagagaatctgaggacctcaatatttaaagggaaaaaagcaggtattgggggaaagagaaagaagaaaaatctttttaaaagggtggtagataaaagtggcaagaggttgcatcctttttagtcttggatcagcattctctgaatctacattttacatgtgagagggggtagaggaatagtcacatacgcattcaacttgtcctcagtgaatctgcatt

SEQ ID NO: 34137 - DNA, 545 bp, Homo Sapiens
ggcacgcgtccgcccacgcgtccgcttgctgtcagccccgggggtggtttcctctctaggaaaagctaatgtcatgcttatgctgaaaaactcttttcagaggtactttaggaggggcctggctctcgattaatctgggccatttcataccggctgtgctcacccaggcacaaacactgaaagcaacagctggcaaagccatcgcttggtagcagcttggaagacaccaccaaagaagctctcatggaagcggcagatttcctgaagcgactggaatgcggggaaggagggcagtcggggagagccgagaaccagcccccctgccaactccaccccattcctctcctcacctgaaatgtctcatccttagaacagctgccctaaccccctaatcccacacactcctttgtaggttaagacccctgaagttgcaccctctcgtaggagctatgtttttcagagatccatgtcattatttgcctaatgtctgcctccctcagggaagtaaagtctgtgacgcgtggacctggtctgtgttgttcact

SEQ ID NO: 34138 - DNA, 541 bp, Homo Sapiens
ccacgcgtccggtctgttgtgccctctgagccctccagtgagtgcacacaagccagactccacctggccgcatcccctgcgttagccacgtgacctggagctagctgcctaccatttttggactgtggatccagagctaggaaggaaaggaccccaacattttaaattcaggctgccttgtcttatcaagaccttctgtgtgaggcagggaactgctttactgacttagcagaggggccttagagcccccctgccctccccagcccacccctgggcatcccagtgacttccaggagcagccaatgtggcttctgcacggaagaaagcactctcagtttccaaggtgaagcagaagaggggagagaagttagcacgtctttctggcctagtgcccaaacctggggcaggcaggagcctgagagtcgggggagggcacagcatggggcgagtcccgtgctgcttcctgcccagggctcccggcctcagctgactgatgttgcctttgagcacgtgcgtctgtcatctgagatcagcccatgcc

SEQ ID NO: 34139 - DNA, 487 bp, Homo Sapiens
gcgcacgcgtccgcccacgcgtccggtttaatgattataaacatatcattttcttctcttaaattaggtgcctctagacttctcacagaatcaagttaggaaagttacatttatagatgcattaaaaatctggactctatttcaaatccatcagcagttgcgggtcactcattcattcgtgagttatatgggattctgcaaacatttatgaagtgcctacgaagattctaagcaatgtttaagtataaggatctgttccttgacaataagagtctgcctattgtagttaaatttgtaatccggataattatataaaagcacagttatccttgaagactatatagactgaagagttaaataaaagtggtattacttagactttgcatagagttcaaagatttaactaaaaatctgtggtctaaacacaatagtctttgtcccagtcgtatttttagaaagccaagtttcaggtagaactaaatgcttt

SEQ ID NO: 34140 - DNA, 365 bp, Homo Sapiens
ctctttaaaagagacagggtcttgctctgtcaaccaggttagagtgcagtggcacaatcacaactcacagaagctttgaactcctgggttcaactgatcctcccacttcagcctcaggagtagctgggactccagtcatgcgtcaccacacctggatcttgctagattgcccaggccagccttgaactcttggactcaagcgatcctcctgtctcttagattttcattactaaccttctggactatagtaactcccttggttattcgtctctccctactctaatccaccttgtacaactctatcattttattcttatcatttagatcataaataaaccttgcttataaaccccaaactgcctgct

SEQ ID NO: 34141 - DNA, 539 bp, Homo Sapiens
ggttactagatgggctctttcaatctgaaaattcattacgtttctacagctcaggaaattttcttcaattatttctttcattattctatccttcccatggttcctaaatctcttgctctgagaactcatacttatggatgtgaaaaactgtgatatattttccatgcttctttaattttccctcaagtttttccagattattttctcttttgatttacatatgcagacagttcctcctcttaattccaaaatcaacaattgagtcttgattcatgctgaaattttatctcttcaattaaaatttttataattttcaaaaccttttctagttctatgcccccttttaaatgcaactatgattaaacattacgtattcttaaattttaaataaaatactaattacactttgaagtattcttctgaattatagctgaggttggttgttcttttattcattttaatcttctttcatcctcttgattgtcctcaattgtctgattatccctgtctggttatatttgcaaatgaaagattacttt

SEQ ID NO: 34142 - DNA, 433 bp, Homo Sapiens
ccacgcgtccgatcaccctagggaacatgatgagaaagtatgaggtaagggatttggggacattttgtcctaattgtcaccactgacatgtcccatttccccaccagatcattggccattggttcatataggtctctgcagcatccattcttgtttctcatccagctcctgtcagttgtctggactatgtccatattattcttgtacatgtatgaaacattcttctcctctaagctatggagaacatggtaaggttgtcacagacctggctgtacagacacactatgtgcacaccatttctactcttgtaccatgtgggatctcttgccacttcccttaactctgcccaagattgaagacataagttttcaccgccattggtccctaaaacttcttctgggattctgtcgtttcccactcctctttgtgaccc

SEQ ID NO: 34143 - DNA, 406 bp, Homo Sapiens
ctcacttttaatgcttagaggagaggacctttataaggagcctgtaacatcccctactattacatacttttttttctggggaaggatttgtgttttcatctttgaattggggtctgagtcaccccttaaaaaaacagcaatttagtgaaacagcatatgggaagatttataaatcaggaaaagaaagatggttatatgtaacttcctttcaagattaaaaggaaaaaagtagaggccgaggccaaataatgccccctttaatttaatccactgtagctgaaaatcttcagcaagcacgacaataactgatttttaaagagaccaagaggaaattttgtaggacaaaatattggccctgtctaatgcaagaggcaaagggagagggggagaagaaagggcaaataaa

SEQ ID NO: 34144 - DNA, 504 bp, Homo Sapiens
ccacgcgtccgcccacgcgtccgcggacgcgtgggttaaaatttattgctgtctgattccagatagagtagtttctttatgccttatatatttcatctgaaatttaaggttcataatacctactacaaaggttttgtgtgataaataaatgagaaactatgatgacggaagatatacctgcaaaagtacctaaacatttggtacataatgggcactccaatgttaatgcatattaattagattcattgtggtctatagagtttatagagtggtagagatgttaacttttctatatttattgtaaccccaaatattgacaacattgacataaatgtataattgagcttaggcatccatgaaagtggaaatgaaaacaatttcatttccttaatttcatattatgaattattagagtttatttcctcaaatgaggacttttggtgtttatattagtcataaagttattgatattgatgaaagaagtggagtcagttttgagtttat

SEQ ID NO: 34145 - DNA, 424 bp, Homo Sapiens
gtttcctgatttttgtgtttacttacatgaaaaaatcttatgaattaaggggtaacatgaattcaaaacatctttactgaggaaagcaaaattggtcttctagcaaatccagggcagacgggcaccactcacaggccaggaaaggaagggcttgaaagtgagcagtcaggccctctggacaggcaaggatggggccgggggtggggcaaagggacaggtccaaaagtggttctgccaaaattcccttctggatgggctggaggaaagggagctggacctcaacgggtgggcggagtgctttcctcccctgggccctccctcccgtgcccctggaggggtgcacgggttccctccctagggaaccaggctggctaacccaccagccggcccctagcacctcagggcttcctggtcccatgaccct

SEQ ID NO: 34146 - DNA, 422 bp, Homo Sapiens
gggaaggcctaaatacccaactcaaacaggctcacgggcctgtttgaaaaaaggggacttttttggctgaaaaacggggggccaaaaacaggcttccagctccaacactcggggggccccccttaaagggctggagcctgccctgtcccataaaaaatgctcgggtttcccttggggggttcgttctaaggcaggctggtcctgggccccggtttggaaagcccaaaagctccacactggggtcccattacttaacaccccgaaaaaagggagctttgccttcccaacactttaggaacagacactggaggggctccctgagccccaagcttggggatggaatttgactgtccaggcccatgttgagctgtccctgaagccaggggacattcccgaccaaaaagagggggggaatgtccccc

SEQ ID NO: 34147 - DNA, 387 bp, Homo Sapiens
ccacgcgtccgagagcatcaacatctccagagggcaccaacagaactccctaaactgtgtacagcctcctcagagatgcatcatcagtcacgctgtcggcagcatgatctgggactcagccactaacttatctgcgcacgcagtggctccacagctatcggcccatcctaaggacatggatacacctgatgtgtgggcaatgacccagaaggtcaaatcattctacagcagacacaatcacaacaaggcttcgctgtacaggaaccagctccaggtcccagcagacagctgctcggtcggactgctttctccaaaattgattacggcaatgataattaaagtagcctaatgaaggactttgtattgaggggagcagcagatcttgaa

SEQ ID NO: 34148 - DNA, 482 bp, Homo Sapiens
gtgtgtctcaatatccctatcaaagtgactcttctaacttaggatgaaagcaaggccagcactaccacttttctgtccccttttaggtcaccaaacactgcttcaatttagtaattataaaaacaagtttcatttaatagtcaaaagtactaaaattcatttaatgttataattttttatccccattgtgggcccaggataatcaggaagcctgcagctggagaaagggcacagttatgggctccttgtcttttcccacatggtggttgactcattcttttccaaatactcaacagtggtttctgctcattcagggagagtgctgagatgagtgggtggatgttagggtacctagaagtctgtgagattggagaagaatggacgggcaggtgatttctcacttgagcaatagtttcacaatctagcctcactgctctcagaaattagtaacacatttgagtgtactctttttcttctgagtg

SEQ ID NO: 34149 - DNA, 496 bp, Homo Sapiens
ccacgcgtccggtattgctctgttagtccctaaccccaagccttatgaagtggactttgaagagactagagcttcacacttctcttttattgttttggggaaaataggcacttctacctagagcattcagatgttaaagattgctctgcacactgttgcttttttcagcctccccacacacaccaccaccaacaaaaaagtttcttatgcaataaacgtcatgcacaactgaaaaaagtttatgttattgttttaggttctgtgcaacctggttgcttggaatgactgaaagacttcagtcaagagaagctgaaagtactccaggttatgaggggcattagctgggccaaggggatgttggaattcggtgtctccactccagggatctttagaaaacctcgctgaaaaagcaaagctgagtttattaaacttattgtagcaagagaggacaccttattgacagtcttaatattatcttaaaaagagaaatttgggg

SEQ ID NO: 34150 - DNA, 390 bp, Homo Sapiens
atgagccacttcatctaggctataacttttttaaattgtgggaatgttgcttttacttcaaaaagggggaacaagaagagaaaagggaagaaagggatggagaaaagtaatacttttttttagcacagaggtaggagaggctaaatcatgaaattacacctagtgttgggatgttctggggaaaggggtggaggcaagtgactctgtcttgctgatttcagtctcccctgatgtcactgagggacttggactatgagcagaattggggcaggaggggctccagagaagccctcctcgaacatgggggcttccagcctaacttacagttcccagggttgtttgtggttgtttttaaatatcatggaccagcaaaattaaagaaaaataacc

SEQ ID NO: 34151 - DNA, 478 bp, Homo Sapiens
cctggcgattttaataggcgtaagtggcagctcatggggggtttaatttgcatttccctcttgactgataatgttgaacatcttttcatgtattatctgctatgggtacctcttccttgggggagggtcttggtaattttttttggcccatagcctgaagcaagagcccctcaaataccaactttgtgctcttgctggtaccagggcatctatacttttgctggctacatggctttcttcatgttcctaatagtgctttgattgattctgttttatgtaaaggtgtttaatacatatgtgatgaatgattaaagaactaataatgtatccctctgtgttttacctcatgactcaatgcatctttaccctttctgtttgataatgtaacagggaatttaataaaatgtatgaacccagcccaggaaggcatttgtccctgctctcttcaactatctactggtcaccttcatttccccag

SEQ ID NO: 34152 - DNA, 489 bp, Homo Sapiens
aatttaaaattttaataaatttaggtacatagtcaaccattgacttatcttcctcctaaactctttcaaaattcaaaccttcaattggaacatgagacacaaatacatgtgactccaggcttttaaatttctaatacagggattgtcttcagaggtatcaaaaataacaagtttttcttggttgtatcaatcaaattcccacatcagttaaaagaagcagagagaagcggacatatctgtcacatttcagctgtgtgtttcttagtatgttcctccagcctcacaaatggctgcttccaggcaatgacacctactgtctgcaggctcaattatgacaagggaactcaaaatagttaggatccacagtattgcctgtaagtcacatctagatttatctttcctgtcctaagtcttgagtcccaggtacttagggtaaacgtcccttgctgggccaggaacctgacttgaacactagctaacttggcatta

SEQ ID NO: 34153 - DNA, 535 bp, Homo Sapiens
gccacgcgtccgcggacgcgtgggtatatgtgcaaatgcttgaagttacaacttgttgtataatgtaaggtacacctattttctgaaagctaagctataagtattttttatccagtagagggagtcaaccatttgcatgttataaaaaccagatctaaatttcttctcctcttaaaataatttattcttaaatcaaagtaaatatttggagtaaagtatatgtgtgtgagaattcatttttattgatagaacagtgataaaatatttgatgaatacatgggtatttaataatatattacatatattgacaaaactcatttgattcccttgaagtacacttttttaattttgtattccagggtactaggtaaaatcattcatggtggtcattggttgtttatgctagatattggactatttcagccttgatgtctactgtgaacactgatgtagtggccagtggtgacaataaagtaaattgacaaccatgagtcagaattttagaacttggttgaaccttccatgtggcatggct

SEQ ID NO: 34154 - DNA, 420 bp, Homo Sapiens
gtcacttagttataggcaaagcctccaccatccacctttcctcatgaatggtcatcccagcgtacttctcactttaatatctatcttatttttcaaggcattttcacaaacaacatctaattgacccccaaagtagataaggcagctatttgtatacccacttttacagatatagaagaacaaagtgattatgagcacaagactggagtcaagcaagggcttgaactccctgtttcactatttcttagcaatgtggccttggacactttaatatttctgaactgcaaaaataaatatgataatgtctggcttacaggattgttataaagattagattacacaatgtatataaagcacttagcacataatctggtacaaaacaagcactaagtgaatgtagctgctgctgtcattgttgct

SEQ ID NO: 34155 - DNA, 525 bp, Homo Sapiens
ccacgcgtccgtgatagttatttctctctttggctaaagatttagttagctgggggtacatgtctcagttggatgctctatagctgctttattcaggtgatttaatggctgagctgaatgctgggaaactcttgctttgaggacttttggggtcaaaatcattgtgatgacattgaaggctatagaactttgggactcaattgactgtccattggtgcagattcagaatcattttcagaggaaaattttggctcgttactttcttggctcacttccgtggagaggtgggttggcagcctacttagacatctttagtggttaggttccttaattatcataagagaatactcacctgattgcatttgattatgaaatatatatagtacctataattggcagtatggcatagcttcactctagcaagtatgtatccacatactctgctgcctgatttttattaaaaaaacctagaaacagcattttttgagaattgcttaaataaaacactttcaatccattgcttta

SEQ ID NO: 34156 - DNA, 491 bp, Homo Sapiens
gaatacataccatactttaataaccaagacaattcagctgtttttccagagtatatttcaaacagagttggcatataacccgtatgtaacaatattgctgtgattttagtcatatttaagggtccaaaatatgttcacaaaagaacagtttgtgaatgtcaaccagtttttgctttatattccttcaaaaacattccaccctggtcattcacactaatctacatcactgaaaataaccaaaataattcacagtctcacctctatgtaaaaattctaattgactcaacagggaaaggactgccctgctccttttgaggaaggaaacctgcaaggcaagttctcaatccctaaaaccaagcaaaaatgttccagtgcagttgctgtagccatgtatttaggatttgtatttatagaattaaatttgagaatgaaacatggccatacacatcgcaataagctgcctctcatatcaaaaatacaatgcaaaatga

SEQ ID NO: 34157 - DNA, 362 bp, Homo Sapiens
ctgagctactgtgcccagcctaaactttcccacttctctctgtggcttctttccaacctctctccttcctctccccaagtcctgtttctttgaagctggtaactgaatttaagatgatatctggttggtgtttaaggtttgagcctcccaagggtctgtgcattttgaaaggagatttctaaaaataattaaggtgccctaactcctttcctcatgattcctactccgaaacctggatggttaggagcccagggctccctgatttccagagctatatcctgttggacctttgccaacagacctgacacttaggggttattggtataaatctaattctctaatattttttacatgttgtttca

SEQ ID NO: 34158 - DNA, 479 bp, Homo Sapiens
gccacttttcatttgcctgagggataaggggaataaccctaaaaccaaagcagcttacccattggcaacgtgttgcattcaaacagtcaacaaagccagacaaccacgggggctggtgggggactttccaactgggagcaccaacttttcaaaggatctatgtcacacaggatttggagggctacaataaaaccaatgactgtgccctaaaaattaattttcttgacaggatttatggagatgactatttacatggggcttgattttgagaattggggggataacgacagagtgactgtttacttaaaagaactggcatggccaggccaccacacacatagagcaagggatttgtctttatagccaggaaatttcagggctatgagtatataaaaatcaattgttatgtgaattatctcctaggccaattagctagagtagacaataaatgatcttgtgcatcttccatgttaatgaca

SEQ ID NO: 34159 - DNA, 520 bp, Homo Sapiens
ccacgcgtccgcggacgcgtggggttgcaggataaaatacaggattcctagttaaatttgaattttagataaacaacattcttatactaaaaattattccatgtttatctgaaattcaaatttagctgagtgtcctgtaactttttattttatttgtttacttgtttgtctgtgataaatatggcagccctagtaaaaataaatatagcccctgatttattctaatttactctttggttggcaaggaaggcactaatcaaataaacctgcagataaatgaaaaattgcaactgagataagtatgaacaagaataaattcaaagctgaagaagaagaaaataattggaagagaaaccttgtcagaaaggggacttcgaagctctatggaagtgtcaatggacccacaatacagtggggaaggaaagagatgctctggcactctttcttttaaatgacagttttatattcaactttaatggtacaagcagtagaaagcctggctgctcacagagatgcagaa

SEQ ID NO: 34160 - DNA, 489 bp, Homo Sapiens
gtagacaggttctcgatatgttgcccaggctggtcttgaacttggccttatttccttctatctatgatcagtctagttagatcacttgattgacacagacctattcaaagaatataattatgaacaaaggaaaaaataaagcttatgtaacccatattaagcaaaattgttgccactctaaattttaaaaatcacatggaaatgaaacatatgaaaaactatcagtatgtatggtgtaagagttagccagatcggcacttttattcaccaacttagttaatttaaggcatttgacatgtttcactgagatcacttaatgattacagaattgccaagcaaattaacatcggccatgcatcttataaattgcagatgaatttatataaccaaactaatatactgcttaacagttttgattattttagtgtatttttttaaaactttgctcaaagcttagggaaaaatattgtgaagaatgcagggccagtc

SEQ ID NO: 34161 - DNA, 520 bp, Homo Sapiens
gccacgcgtccgcatccctataacatgggaggctgagaaaaatgaggggagatggaaccagatacaaggagatccaataagagaagcttatttaaatattgtgaaataaaggaagaaccaaagcatttttttaagtggggaatccttttgaacagttattatttatccatattattaacaacatcttttctgacaaaatccatcagatgaagtgtaaatggataatcttttaatggatctaaacctagaaagtttcacttactgttcatgtccgtgttccagaattgtgaaatggtgtgtggttttgctttccaagttcttctctgcctcctcttaattctctaattccatgtcttacagaagaatgagaaatttctttcttacttgagtatcatgctctaaaaaacttggcttcagtcacagaaacgctggctctcctgtgcttatattgaagccaactgcctttaattcttgggccctcttatatttttaaggtgcaaaatttgaagtctcagtcacc

SEQ ID NO: 34162 - DNA, 533 bp, Homo Sapiens
ccacgcgtccggttaatattaaccaacaaggaaaaggttatataaaaagataatattcaaaattcatcacttgctaatcatttgaccacatgtttccatatcccacaatctagcggttactcctgttatttctgtacggtggaaatactatacagcatgggctactgttcatttcttccctacttgcagtctgcgatgacatatttatggttttgaatccgtcatggtcgttgtatttacaccatggaaattggcaaataccacaaatcaggacctgtttttctccaaagacctggttgttagacattagcggcataccactgtgtattggtgacatcttctgacaagttgcacaaggcgtgcagactttttctctggacgtgtctgtggttggagtaaccacaaagaacagagagatgtgtccagtctctcatgttcagaaggagttatggtagtctgaaaatacccaagagaaaacttcggataaataaaacactttacctaaatctgtaaaccttccctctcctgtcact

SEQ ID NO: 34163 - DNA, 530 bp, Homo Sapiens
ccacgcgtccgcggacgcgtgggattcaatgaagcaagtttctctcaatagcaaagatttgccttcttaagattagctttctttgccatcctgataacttagggatgatttcctgacattgttcaaaataggaacagagaaacccttatttgttttgtcaatagactattattgaatgtcattaaggagcaagggaagatttttaaaaattggataatttcggggccttttttgccttttggcattgtcccttagatcctcttccctctgagtgctttaaaaacacacggtttgaggcacagctgatctctataggaaaaatattataagccatgcctgcatgagacacagctggacttgctgttcatggtcattattcaggagtctctccagcctcagaatgagtaaagctaaaatctgctccctctaccgtgcccagccagaaaggctactatattatatagctttgtggtagactcctgtgggcctcttagatttaacaaaggtaagaattcccacttaattatttg

SEQ ID NO: 34164 - DNA, 480 bp, Homo Sapiens
ctgtccatggctttcctgaagttcagagaccactgtctgtgtggggctgctgtggctcacagccagttccccccaatgagtgtgtgctaaatgcttttgcagagtcaaagacgtcaggtcctactctcatgcttctgctgatattctctctcatgtcaagctatgaatgttgtcagcaaagtggcccagcgtgataggcacacctacgtggagctgggaaccagcatacctggggtgggcgatgcctgaaaacaccggcccaggaaatcacgctgcattaactccaaaaggggagttgcatgaagcaggatcctctctgtactggcgctgtgtcccagcctgacttttgccctaacggtgggatgggtcagtctgactcagctcagaagcctggggctaaatggcatttttgaaggattacaggtttattaccttcaagtacaaacagcaaccctgctgacagggacaggaggaagcaga

SEQ ID NO: 34165 - DNA, 501 bp, Homo Sapiens
agcccggggtcgcgcagccatggccagcccggagccccggcgcggcggggacggcgccgcccaggccgcgaggaaaacaagagtagaggccaattctcctcttccaaagaactctggatccctaaatgaggcagaagccttgaacccagaagttactctatcttcagaggggtccttaaacctcgaagacattctctacctggaggacacaggtgaccttgatgagacactctatgtgcaagagactgagaaggcagaggaggccctgtatattgaggaggccatgcagccagatgaggctctgcatgtggaggagcctgggaatccagaggagacagtgtgtgtggaggaaaccacggagccagatcggatacagtttgtggaggggcccgtggagccaggaaagcccacaagcccagagcacgttgtttatgagggagagacagtcacaagggcggagaaatctaaccctgaggagagcctcagagccgagcagagccc

SEQ ID NO: 34166 - DNA, 549 bp, Homo Sapiens
gccacgcgtccgcctggctgtgggtgtggtaccgaggcttcagcgggtgccgcccgcctagagggagtggagcggtgagcacgtcaggggtggggggcgcaggtcaagctttcaccagtttttaattctttgatggggtaaatttgagcaattttctcgacttgtcgacattcgttattaactgagcaggaatcaggagaggaacccggtcctctccacacagcccagcaggtacgccgcccatgtgcctgtggagaagagaggttcctgtggggcagacaggtgtggaccaagtagctgcgaaatttcttctgaagaaaacacacaagggggaagcgagtgagctcagtggaggaggggcgctaccccaggggacgtccccatgcatgggcttgtgaacctcgaatatgtgagacggtctcagtcaatttagaaagtttattttgccaaggttgaggacgcacgcccgtgacacagcctcaggaggtcttgacatgtgccaaaggtggccgggacacagcttgcttttatacatgttagggagacagg

SEQ ID NO: 34167 - DNA, 434 bp, Homo Sapiens
ccacgcgtccggaatgttcacggtgattatcctaatgagtgatcatccacattatcctaatgaggggactcgtggtaggcctctagataactttagaatggggacagtcaccttgaaagactaaccacacaattagaagtttggggctttcagccacctgactccaggggagtggagtggggctggagacagaaaatttgcattccatttcagacctcattctgtgtgtcccatatttagctagcactcctgacttgtattctttgtaatgaaactataattctaattatagtactttcctgagttttgtgagccattctagcaaattattgaactgaagcgctcatgaaaaccccaaaacgtatagtcagtctttcaggagtgcaggtggtctggagaccccccacctcagtgctgctggtgtctgaagtaag

SEQ ID NO: 34168 - DNA, 531 bp, Homo Sapiens
gccacgcgtccgcttagttatagagagacgttgtgtgttggtttttccaaatgttgtttgtagtagttatgtacttgttgtgtgggcaagttcactgtctcctatggagttggaatggcagggatctcttgaagtttgtctcattctcttgtgatgtatactttatttatttaactttactccagtattttatttactgagttgatgattcaggcttcagtccaataggagaggtagcccttggtagtcactggttgtagctaaggcaggtgggtacatgtaatcctcagtggtgggcagggatcccagccttgatgaaggtggctaagggagttctcaattagatgtcctgaggttgtaccaggatgaagggtgtgagctacctcagttcccctgccaggccaacagaaaagttatccacctcatagcctcactcctgtaccagtgttctggctattcagatcatacgggcacctcttttcatgtgtaggaatattgatgctccaagtagcggggaattgtgaccttgcc

SEQ ID NO: 34169 - DNA, 532 bp, Homo Sapiens
ccacgcgtccgagttcctctgtcagacctaggtctgggtgtctgttacttatttgcagtgagggaaaaggtaggtggagccttgcctgtcgatgtgcaatgtgatatttctagctcctcttgtttatttcggcagaaccagcatctttttgggtgttccagattgtactattttaaacattctcccaaacattcaccatctttgccttacttaccgagcaactggaccttttgtagttaacctcccacacatgacctatacacaggtgcaagaaggtagaaagatgttggaattgccgaattctaaactgctcacagggaatcacagttaaagttcaacatggcagaggtctgttttgaaatgatacacctccaggcactgtttccagctctcattatttgcctgcaccagctggtacacatttccttcacagtcttttctagggtacctagaaaggttggctctgagagagtgacttggtggaatgcagcgtctgttaggcaaacgctcagcacatggcgtttaaatttgc

SEQ ID NO: 34170 - DNA, 518 bp, Homo Sapiens
ccacgcgtccgaagctggctaacccacacctcatcttctttccctgacctgcaaaaacagacaggaacgaatcttcttggaatctttctctaagaaaaaaagggggcttcctttttggcttcaggcgtacagggcaccagccaaggagggggcagagagaagacggaggaaaagggaaaggcacacagctctgttttcatggcagtaggtggggtactgagagagtcaacatcaggagggttttacttcttagacatctaaggcccagggatacttgacagctggcgcaggttgcaccagacaccctctactgaaaagcaggaggcccctggtatctctatactctcatcctggccctcttcagctggattagagagaaaggggcagagggccaagaactctcagatcagtccatagaaagataaatacttgcaagtcaatactaaggataaaaccacctaacctcgtggatagtgctgtaatgtacaaagcaccatcaaatattgatttatggccag

SEQ ID NO: 34171 - DNA, 445 bp, Homo Sapiens
cagtcaataaatttagactttgcacttctaactagcttgatacagctccagacaaagctaagagtctaggtaagcagtcaatctggttgtggattgtatcagaaaaatgactttagcaacttatttagagaggctatgctcaggttcccgcatccataaaaattggtataataacactcattccccttttattttgcagacatcataaaaatacataagataattaaaggaacccaaatatatgggaataaacatataaacctgaggtaggactgttattataatgatgataaacaatgagcatattcaaattctgagtaattaatacaaactgtccaagaccatttttaaatattgcatgcatatggcaacttggaaagcaagaaggaatcacaagctgggctattgggaaagtttgagagtcctaatcctgccagaggcactg

SEQ ID NO: 34172 - DNA, 473 bp, Homo Sapiens
atattgggttatttattttttcattattgagttataagggtttaaagaatatattctgaataaactccctgatgaaatatgtaatttgaaagtgttttctttaattctgcaggttttaacaactttcttgatggtatcatttgcaggacaaaagtgtttagttttcatgaggttcaaattatctattttttctttggttgtttgtgctttgggtatcatacctaagaaaccattgcctaatccaaggtcacaaacatgatttacacttatgttttcttctaggagttttagttttaggacttgtaaagtgctaaactaattgcttaggtctttgatccattttcagtgaatttttgatataatgcaaaagaggagtctaacttcattcttctaactgtgaatatctagtcccagatcatttgttgagaagactataatttccctattgaattgacttggcacctgtttcaaaa

SEQ ID NO: 34173 - DNA, 470 bp, Homo Sapiens
gagacagggtctcactatgttaattaggctcccagactcaaggggtccccccaacttcagcttcccagatagctgacattaaaggcatgtattgccatgcccagatcctgaaatgcataatttcttaaacaatcataataaaacatattaaacacttaaacagcccaggcacagctcatggattccttcttttattaacctcctgttccaattggaaggtatctctattctgagtttgtatagcatttaatttgcactttctttatgccataaacctagaattgcaagccttagaagttacacaacttggtatttatgctatctcttcagacagtgctttctacaaaataccaaacagaaatatctgctatttataattaagcaaaattattaacttatgagatgcacagttattctcctgggtctttgctggataataaaattagctacagtcttagaaatatcgcttc

SEQ ID NO: 34174 - DNA, 479 bp, Homo Sapiens
cctaatctttgtggatttgtgtacctttggtctttgatgttggtgaccttcggatggggtttttgtgtggtcgtcttttttgttgatgtggatgctattgctttctgtgtgttggttttccttctaacagtcaggcctctcttctgcaggtctactggagtttgctggaggtccactctaaaccttgtttgccttggtatcattcagcggaggctgcagaacagcaaagattgctatctgttccttcctctggaagcttcgtcccagaggggaatgcgccagatgcctgctggagctctcctgtatgtggtgtctgtcgacccctgctgggaggtgtctcccagtcaggaggcacgggggtcagggatccacttgaggaggcagtctgtcccttagtagagcttgagcgctgtgttgggagatccaaggagctggcaggcaggaacgtttaagtctgttgaggctgcacccacagccgc

SEQ ID NO: 34175 - DNA, 382 bp, Homo Sapiens
atccacttgttggttgatgggcatttaagctggttccatatttttgcaattacgaattgtgctgcttatacacatgcatgtgcatgtctttttcatataatgatttctttgcctctgggtagatacgcagtagtgggattgctggatcaaatggtagttctacttttggttctttaaggaacctcccatagacacctaaatccactgatgctcaagtcctttatataaaatggagtagcatttgcatataatctatgcacatcctcccatatactttaaatcatctctagattatttataatacctagtacaatgtaaatgctatttaccctatactgtgcatcctcctatagactttaaatcatctctagattacttataa

SEQ ID NO: 34176 - DNA, 532 bp, Homo Sapiens
ccacgcgtccgcggacgcgtgggttttggcattgtgctatcttagtgacaaaggtagctttatgttgttgcataactagaactttattcacattatttgaatttagttgtttatatgttttaggttttaactcaggtatgagataatgtgacagtgtgcttcccagaaatcaaaattctataaagagtttctcttaaatagaaactcttcttaattctttttatgtctagaagggcaatattaaaacaaccttctaggtgcaaatttggaaactctcattttctgctccctgctagagtttcccctttggctcagcttaaatatatctctgttaaataaactttctgtagcccacagcctaaagtatttacagatgctaatatttggtcatctatttttacattttttcagaaaattcatcagagattaccaagggaaattattgttggtttttttccgtggtcaccagctttctgttaacaattttcttcactcgtacaaacaaatctgtcaaagcagtattcctagtctc

SEQ ID NO: 34177 - DNA, 508 bp, Homo Sapiens
ctttttttctcattaattttaaaatcctcattacatattgaggatattaaccactggtctatcttatatgttataaatattttttcccagtctgtcatctgcctatcggtcttcaggcatacaatctgtgcttgaagtggaaacactttaggtagctgtgacctttgctctctgaagacttgagaggaagacatttctgtagaatgtagacattctgtaactcctaggatgcctcttactaaaaataatatttttaatagcacattagttgataacttccactttcttacttaaattcactaattgttctttgtgttctagcctaaaaatagtgagttatcacctccaaaaccacttcccttgtgtattagagcaagataattgtagtaaaatgcaaggaattaagatagacacttaggaatcatattaatgagacaggcaggctctgatttaatttgtgctagcaggatagtacaccatctaatgtctttaaaactatgccaaagtt

SEQ ID NO: 34178 - DNA, 355 bp, Homo Sapiens
aaagcaaaatctatcaaaattttaatgttagcaattttttaaaataaaacattgtgtggtgctaatgggatgggctgaattcagcccacaggttccttttccaactcaaggagtaaaataactcatagtcctacaagtttcatcagagcaagaaagtctcattctttcgggaaaaaggcactctgtggcatttttcccattgagaaggtggcatgagaccacctaactctgcaaccaccttgattttcaccaaactcttctaaagactaaacgtcttcttaggcaggtcagccagccaagcaaaaccatggcccattttgaaggactccaaaacaaccccagcctgcaaaacaag

SEQ ID NO: 34179 - DNA, 357 bp, Homo Sapiens
gcaaaaagaaatgtttttgtagaaaagggaaaaactctatgggagatgaaataaaatgagcaagttctgaggggtgatggacagatcaaaaacagatgatcttcaagacaacataatcacccataaacgtggtaaaacaaaaaattacacttccaatttggtggaaagagtgccacctgctgacactttctggaataaggtagtttagcccatttgaaagaagctgtattgccttctcaaaaacaacgaaaacctactattgatcaatgaaggtaacaagatataacttcaacaaagtaaaacaacgaacacataattatcccacaaaataagaatttaaataaagaattatcaaac

SEQ ID NO: 34180 - DNA, 370 bp, Homo Sapiens
ttttttaataaccaaaggttttattaacttggaaaataaaaattcaataaaacattcagattgggaagataaaaatgaataattcttcctgaaagcagatcagaaacatagacgaaaaatagaaaagataaaaaatattagagcatcagcctgggtgtaggggagggtccaacattgaaataataggtggtccaaaaagaaagaatgtaaataatcacaagaaaatttaagaaatttcccatgaaggcccagcacaaggtttaacacccgggatacaacaccatcatgacagttcagaacaccaagaataaagagatcttaaatgtttccaggaagggtggataaaaaaacctaagtcacatataaaggt

SEQ ID NO: 34181 - DNA, 423 bp, Homo Sapiens
aaaatttcattatcaggtcattcattgctagtatatggaaatataattgacctttgtatgatgttattgtgtcctgcatactgaactcatttattttctctaaggttttcatagattctttaggattttctgtgtacaaaaccatgacttctacaaatacaaacagtttaatttcatttttccaatcaggatgtcttttatttatttttcttgcctaattactcttgctagaaccaccagtaaaatgttgaatgtaagtggcgagagtgatgtccttgtcttcttcctgatcttgggggtaaagctttcagtcattcaccattacatatgaggttagctgtgggatttttgggggatgacttttagcaggttgataaagttcccttcaatcctcaattatttgagtgcttttgctatgaaatg

SEQ ID NO: 34182 - DNA, 419 bp, Homo Sapiens
ggcgttggagatgatttcgattgggtcctgctgttcatcttgaattataatagtttacaatagggtggaaatgttaagaattgattagattatggttttatatacataaattcagctttctctattttaaaacagtggtaagttatcaaatcatattaaatttgcacaaacaatcaaggtttacataaaccattttctttgaacaatattctccattcaatttcttaattttacaccaactaaattatactggaacaactgtagtttagaaaacattttgatcacatatgttgtattaatcctccattcccaccccccaccatcatcttgtaacatggttttagaaaataaaggacatagcataccacttaatcccagaaaactaaaataaacttatatacactttcaagaaaaggtca

SEQ ID NO: 34183 - DNA, 395 bp, Homo Sapiens
taaattcaataggaaaagcgtatgcaaatcttactgctaaaagttctaggtcctcaaatgtgtattcattaatcataagatgatatcatttgggaatcattttattcctttatgttttcaataaatacctgtggtgggtgccaaacactactcttgacaataggcattcaagcagttaataatgtcagtaccatttttagatatcttagttttggatttgagcagaaacttatgaacttttttaaacagtcattaatccatattgcaactataggaactaccttttaaagtactagccgatttttaaaaacaaattctaattatcctcccgtcctttattttctacttagtcactcttaattttttgtattgccccaaggctcactaaaacaaat

SEQ ID NO: 34184 - DNA, 368 bp, Homo Sapiens
gtgtgagccactgtgtcctgccagaattgaatgttaattttaaaagaaaaacactgaaagcaccgggagaaattccatttctggaaacctcgtgggctggggtatttggatccacccacctggcaggagacaatgtagaaagtctcactctaaaaacagaagatcaacacggcgcccaccaaaccaagcacgtatagtcatccgcggattccgggatgtggtatcacatgaattgcgagactcacctgcagagactgtctaaataatccagctcccatgccttgtctcctgagactcataatcagcacgtccttgtcggggcacactaccttcagtcactgtcttccacagcctcttatctttttttt

SEQ ID NO: 34185 - DNA, 468 bp, Homo Sapiens
tattcatttagatgacttacaatgatcatatttgagatgattactttttatattttcttgcggtattagggaattgaatggtatttctaatttcagatatacaaaagttgatgtcataatcagaagtttactagtttaaagctagttggtgaatgactactgtcagctttaagtctgaatttcaatgttctcatctgtcaaacataagctttgaatgaacctgactctaagattctttcagcccttaagtctcttgaatcaggaattctacaagtgtacagctgtaacctttatgcaggtgaggtaggataagaaaagcaaagggtcagcaaatacaacggtgcaaaaggtattatggccaaaaccagtgagcaagatgggggacatatgaaattataaaccaaatgctcccagatttagccttgttcttaactaccagactagatggtgctatcttggacatctttt

SEQ ID NO: 34186 - DNA, 357 bp, Homo Sapiens
cttcgtaagtctcataattatttattcaatgctgaacattgagtataaaagaaaaatagcattaacatatgagattaacatattacacattaacatatagagattgaaattaatatttttatgctcaggaactagacacacccctcgtaatggctactagaataggggtatgagtccatccagtttgtagttgttaggtctgtgctttagatgtattcagtttactactgacggaattgagggtagaatgaggatttccctttggcaggactgaaattgacatatcgagaagactagaaatctctgttttacagctctagtgccaaactgcaagagatctctctccactttacatcc

SEQ ID NO: 34187 - DNA, 359 bp, Homo Sapiens
aagcaactgaagtttgttcagggaacaaataagttgccttaaagactatttaagtataagcagaagaaacatttgaatgtttaaagtcttagaaaaagctaaattaagggcctaattctattgaagactttcaaataccaatattatgttcaacttacctcttgttagattcatttaggcgcaatgttctggacacgctgtcaaattgttaagaatgatggacaagatcataaactttaatgatggagtattttcatgaacacatagttcagtttctcaactgttgaagaagtcaccagtagccttgaaataccacaagaaaacatgaccaaatagatatccttgagatttaatgactc

SEQ ID NO: 34188 - DNA, 430 bp, Homo Sapiens
tttttttattgctagaatagtataatgaacaaccatatacccttcatttagattcaccagttaacattgtgacatatttgttttatgtaaaatacatacgagcacacacacatatttctgaaccatttgagatttagttgtactcatcattagatttcatccctaaatacttccacagcacataaattcagtgtgatatatattgctctacacaaccacactacaagattgctctcagcaaaatttaaattattacaaaaatactatctaatatactccgtatgcaaaacttcccaattatcccagtaatatcctttatagctgtatttttaatcatccattgcacattacattcagctgtcatatctcttctgtttcctttaaactagaacagttcctacaacttttgttgtcctttgtgatactgata

SEQ ID NO: 34189 - DNA, 435 bp, Homo Sapiens
aatgttgcataacaatgtttatttagttttacatttgtttacaatttcttataaacacttcattataattgttttatacaaacaacagtttaaatttacttatgtttatcatttatttgcttactagtttttcaatttcagataatccttttagaatcatttcccttcttgaagatcatccttttgtagtctctttactgaagttgtgctgaggataacatctgtttttcatctgagcatctgtttgtttcagtttcgcttgttgcaaattctaagctaatagtttttctcagaattctaccctcttttgggtacattgttgctgttaggaagcctactaagtatttgactgtcttgcttcactgatctttttctcccatggttgcttttaaaatcttgtatttggtatcttgtcatttacaataccttgagtct

SEQ ID NO: 34190 - DNA, 357 bp, Homo Sapiens
ctattgtcctattttttcagtgacaccaggtattgttggcatttgcttaccctaggaagaggtccgaggcacagtcctctgtgctcccaagcaccctaggagtccctgatctctgctctggagtcctctgcccaccgcaggccccagcagctccatctatggcccctcacccacccctgctacctcaccctgctgtgtccataacacccccagaatgatttccctttaacagcagtctgagagtttggccttgaaacctggaaaaggctgcagggtaaggcctgacctcctcagctgggatccaagctgtcacccctctcccgccatgcctctctgtctcatctcatcccctaaatg

SEQ ID NO: 34191 - DNA, 372 bp, Homo Sapiens
ggattagatgttaagatttccattcgctgagtatgttcattctcttatgtttcaacattaacacctccactgtagaaaacatgcagattattgatgttaactctaaaagaaaacttttaaataaatcttcccaaatacaaccatatagaaaattttctgagttaataagtaacaggaaataactatttaaatagcagactttcaataacctaacaagagagaaggatgtttggaatatacaattttttgaaagggataaattatttcttcttgacagaaaacactttccaatctttcatagcttacctaaaatccacggctgaactattaaatgtgttaggaaaagaagactttcttaccattccagattaa

SEQ ID NO: 34192 - DNA, 386 bp, Homo Sapiens
atgggttttctccatggtcatattttattcattattctactttctgcacactgtatatgcttgagataaaacaataaccaagatgataaatacataaagactgttagttgtagtctgggagcctaaatcagaggagtattcttgcttaatgtcccatggttctagcttttctccacagagcaggatttagacgttttcattactacacgaagaagtcatcatttgtcctaagatagacaaatgggaatttaaaagttatacaaaagacatctttttcttgggttagagatgtctaatacatcatttctacaggattaatttttttaatcatatgagcaacctgacccattgcattatatggattagaaaactctctaagaagcaag

SEQ ID NO: 34193 - DNA, 428 bp, Homo Sapiens
ttttggtaacacaaaattacccaaggtatagtaaacaaagaagacacagacaataaaaactaacagatgccacattttgcaaacatagcatttggctagaggcagaattataaggtatacatattaaaacatacatccaagactctcctcctcaatttgaaaccatgtttatcaagtttttacttcattgtatataagccaaaaaattaagagaaccttgatttgttcctgaaatacaagatttgcttgtattattactggaccaggtagactggatatgtgaatgtttaattcatagttagctagctttaccatcatctcctgaatcagctgctgaggatgcctgtgcctctgcccataactatatatagagtatgctttcaaaacaatatagcccggttgtgggtggctcacaccctgtaatccca

SEQ ID NO: 34194 - DNA, 395 bp, Homo Sapiens
tctagttaacaattgtcttcctttcaaaagcgagtcaagaggtaacattacatagctttgtattatagatcagaagaatattcaccaatatatcaaagacttcaaaaggcagccaacattgcattgaattgacacacacaaaatgttacaaatgaccttgacccttaaaaataaattcttacaaaccaaataataccacacaatgcactacatacatctaactatacataaattataattaaaacacaactgcatatttcaaatgcttggcagtgactcaatcttacattacagaagttagtggcagtgtggaggctggcatggctcaactccaatccattgtacaagcctaggattagaaacccatactattccattggtagactggggaaatg

SEQ ID NO: 34195 - DNA, 398 bp, Homo Sapiens
aaataaaactgtttatttatgggacacattagaaaagaaaggatcgaaaacgccacaaaaacaacgggatgcattttaaatcggtatgcagaggcatctaaaggattatacaaatctaaaattgcctaaaagattctttacaaaacgcaaatgaaaggctcatgcagcacatgaacctggattgctccttctctgtctcttctttgcctcgatgctttgagtacagtaacccttttgctcagttaccttttctccttgaggctaatgaaaaggggggaagttggacaaatgccttacaaagtgagactcttctagtcaaccagcctgccttgctgtaaccacttttactcccatggtctaaagctgagcttagagccatcataaagacttaactaatc

SEQ ID NO: 34196 - DNA, 378 bp, Homo Sapiens
aatctgagaagccagtaagaaaatttcaaaactagcaagaattttctcttacattggtatagtattttacagtgagacaattaatgagttgctgtcccacaaatgaagtcctcctctttcctttttctcatatgctgaatgagattctttcacaaagtaaaaaagcaataaaagtcaagaacatgctgcctgagaagtgtgaattcactgtatgccagtgcttcctgcatctgtgggactcaatattccttttcttgttttatggatcaaatgtgagatagtatcaaggcttttgcatgttttctcatgactaatgactgaaatatgtactgaaataataaaactggtgctgttcaatttcctttttaaattcaattc

SEQ ID NO: 34197 - DNA, 413 bp, Homo Sapiens
gcatctctgggaaaatttgttatatgggcatataatgtgttagagaaataagaccacaaaaatggttcacaccataaattaaaactaaagtgcatttacgcagagtaaagctaactgtaacaactgaagacgaaatatcaaggaagactttctggtgcacagaaaatattgcagccaaaataaattattgaggttggctcgtatggtatgggatagaggatctttatttgatctcaagtgattttgcatatttccttactaaccacaaatggttctacaaagaaccaggtcaattaactcagtattgaaaaatcagctggcttccaggacaatgtgctacatgatgagtaacagcacctggcagctgggttctaacccataacactaaaaactaacccaggattactaaattc

SEQ ID NO: 34198 - DNA, 411 bp, Homo Sapiens
ggagtgttccatctaatgcgttatgctgtgattgctagaggctatttgggaagcccatttatcatggataactttggggaaaattactatattgtaaacctgttagtgactagaattcccctctattagattcaaatgtttggattcagactaaccaagctgtgattatgagaagctggagaaatgtttgaaagctgggggtagaagcggcatactgccactgaaacctcaattttggagtgtgagaaaccaatgcactcgaaaaacattctgctttacaggactaatatgaaattatcctaaacggaggttttcagagaaagaaaatggcaggaaattcattaatgctcccactccctgaatgtgtgtgtgttttcctttttccatgttaaaattgtgattacagaaatg

SEQ ID NO: 34199 - DNA, 428 bp, Homo Sapiens
tttttttagtgtttctggtaacttcaaagctccctaagtcactaacctttcttcgcccctcctccactaaggggctgtcaggaagcatcaatttcagaaaatcttctttagacagaacatgttgagtctctgcaacagcatctcccaccactgtctgatgctgagttgctgtggacatgacatccatctcactatacatcctgttgaaaacaatcagaatggaaattaagcctatttgtaaagtgcctgtagtggtaagaattaaaacctaggaagcagtttcaacagccacaaacgcatacaaacacttcttaggtcttaagtcagttcacttttgctgcgtttgctccaaattcccatgccatttcacatttgtgaaatgagctcaactacaaagttagatgtctgaataattcagacacaaatca

SEQ ID NO: 34200 - DNA, 377 bp, Homo Sapiens
taagttgataaagtgtttttattttggagagttaataacttactctaaagtagattttaattactagaccttgctaacaactgacatatgaattaattactttaaatcactatcaagttcaatctccatacaagtttcaaggagaactgcacagcactcaaacataaaggaaatattaatgacataaatgatggaacacaatcaagtctatttttcattagtatgaatgaaaacaaaatacagtgagcgataaagacagactagaactaatatcatttgggtttacaaaaaccatctcaagtccaaacatgttcttgtccaaagtccttgcctcatttcaggaaacaaccccatgcctcacttgtgagattagagta

SEQ ID NO: 34201 - DNA, 482 bp, Homo Sapiens
tttttttgccacagtctgcatctcagtgccccactcccaacaccccacacatggagaggtatgaacagctgctggttgatgttttataaatttgcatacactaaagttctttcatgtctattttatctaaataattaaagtctatttacttaagtagctgacatcccttcctattggtatacgcattgttttatccttagtactacaatacttatgtctacgtgtatccctgacacctagctcagttctggaccacgaagtaaattactcagatactaataagatgaacatattccacaaatttattgaaagaaactactatgtttagtaattcaacacagttaattgctggaagtcattcaataaaactagaataatgttcactgcagtgttatttaaaattcagtaataagtaaatagttgaaaaaattatgttacacctacaggctggaaaatgaattacatgcaatcactagaaatca

SEQ ID NO: 34202 - DNA, 393 bp, Homo Sapiens
ggctgagtagttctccattgtgtatatgtaccacattttgtttatccattcatctgtcgatggacacttagggtgcttccaaatcttggctattgtgtataatgctgcaatgaatgtgggagtgcagatatctcttcaatatattaatttcctttcttttggatatatacccaatagtgggattactggatcatacagtagttttatttttagttttttgtggaagctccattctgttctcagttctacagtggctgtattaatttacattcccaccaacagtggtgtaagggggcatccttatttttttcacatcttagaggaaatacttatttttcccccatttagtatggtactagctgtgaatctgtcatatataactttccttgtgtc

SEQ ID NO: 34203 - DNA, 486 bp, Homo Sapiens
tccttgtgagctaacagagtggcggtacattcgtaaaaaggtgactctaaggaatcccaggcctctcctccactacagctgcttcagggcaggcctcggggctttggcttggcaagacagtttcacccaggtggatgccccttcatacctcccggcttcctgtgctgactccatgccaaccatgccaaggccaaaactcaccaccaaatctgagagcatctgctgtctgcctgaaagaagccactgcactctaaccaatgggttcatacttgttttagcttcatttaaacatttaagcaatggtctattttgaaaattactcatatgtagtttctgccattgatgccttatagtgaaaacaaattgacaaactttccctaatttctatttcaatgatatgtgatatgtttccccttatctttggaaatgacaatgcatgattagtggtccatggacaaagaatgaatgagtgggcacattttttta

SEQ ID NO: 34204 - DNA, 515 bp, Homo Sapiens
actgtttttcccccatagcaacaacttccaggttatattttatgtacagatgctgctctatttacaatggggttagatcccaataaatcaacgaaaagttaaaaatattgaacggtggctcatcattttctaaattttctaactttttcttaaataatattaatgaaagtatgttaaaccttccagaaattaaaagcaggaatttggtcaaagaagccagacattcaagtgaaaaagtggcaaggcattaaacaggcaaaacctagtactataaatggggaaaatgaagcacagataggctaaattattacatgattggcctaaacatgactttgccagttgtaaaaagatccaactccacaaataatgacaagatttcttacttactgcttcttcttctgggtttcccaaataacatttttgttcttacctcttttgtctggtagttaagtattcatttcctctattagattctagccttaagcacctagactagactacaactacttatcaac

SEQ ID NO: 34205 - DNA, 479 bp, Homo Sapiens
tgaaaaaatgatatatttattattttttaaaagccaggcaatataataaagtacaaagaagattttaaaaaaattatccaggatcccaccacccagaaataaacatcataatatgtggtcaacatcattccagacatatttctgcagatgttcagaggaaaagatagaagaatgaaagaacagaagggcaggagggagggcaggtaaatggatacatataaatggaatcataccatacatgttattgtagtgaaaaagcattaagtataaactttgcttgaacttaacaaagaaacagaaattgaggtgaaactgaaggaattgtagaacttcagatgaatgggtcttcacaaagagagaatagtttctaaaagatctctctaaagttaagaaaaaagtaatgaaaaacattaggatgctgaaatcattattttttcaactatatatgtcaatttcagactgtagctactgacaaatct

SEQ ID NO: 34206 - DNA, 429 bp, Homo Sapiens
gttgcacatatacttctcatattgggttaggatgatcttactttgataagtagtttcaaagaacaaagccaggctgtcctcgacttccctttatttcagtctctctcaagacacgcaagagaactttctgagcagctgtgggaattgtggagctcttgcctcattaaaaaatgtcctcctcactcacatggcaaattctagttcacctttaccaagtgcaggagagaaatttctcaggaaattttgacatggtttcctcagcttctctgattttcaaggctgttcaataaagtagaaacatactccactatggatgcctgggaggtcacctcagccattggccagaggcacagcccaggtgagtgagggctgggcgcctggcccctggtttgacagatggcttcatttgcaagccacagtgcagagatg

SEQ ID NO: 34207 - DNA, 461 bp, Homo Sapiens
tttcacagatcaccataacagttatttattaatgaaaaagtttgaaatattatgtgaattaccaaatgagacatagagataaaaagtgagcacatgctgttggaaaaaaatggcactgatagacttccttgatacagggttgtcacaaaccttcaatttgtaaaaaactcaatacctacaaagagcaataaagcgaagtacaataaagtgtgcctgtaatatgaatgtacaaaatatagtagtttttgagatcttttttggttattttattattcattttaacttattataaaatattttgaacataagaagtagagaaaatagtataccaaatcctcatttattcatcacccacatccagtccttatttttaaaattttgttaatagacatataacaattatatgcatttatggggtatatgtcatattttgagacaattatgcaaggtgtaatgatcaa

SEQ ID NO: 34208 - DNA, 434 bp, Homo Sapiens
tcaggaaaagaattagaatgaatgttgcttccagagtaggtttccatttgccatctacccccggccccattttttgttcatcagcaaatacttattgaatgctgcctgtgctaggaaatatatgatgaagaatacaaagtctactcatggagactatattttaataaaaagactaaactttgacatcattctcttacatatttttacataaggaaagagtatttgttttatcttggtgggaacttttattcatccaatgaataatatattaaagaaaacaagtgggaaatttcatgcagaaattacatacaagaaataggaagaaaatatgcaaaggtcaaaacttagtaagtcacattgacctagcatgttgcctggattatttaggtatgcaataactttttactgaaatggaatgttctcaagtactgtga

SEQ ID NO: 34209 - DNA, 414 bp, Homo Sapiens
cagcaacatgttttcagcatataagtcctgtatacattgtttgatgtttgtgcttaagtatatatcttttttgagaaattttaaatgatattgtattgattttaaattttgctgaccatgtattcattgttagcctgtagaaatacaatttattttgggcattcatttttgtatcctaaaagcttgttaaattcacttagttatagtagcttttggttgaatccttaggattttctatgtatacaatcatgtcatcttcaaatagggacagttttacttcttcctttctaatctgtttggtgtttatttctccttttcttattacacaggataggaattctagcaccatattgaataagagtggtgagggcagatagcctttgccttgttttcaatatcagggaaaggcattca

SEQ ID NO: 34210 - DNA, 450 bp, Homo Sapiens
ccaataaggacaggtggattttttaatgttggatggaaatgtacattctaatgatcaagcatcactaacataatttactattgtctgtgaaatcagactttcaaatgagctgcatttctcttcctcaaagcatactcttggatttacttatgtttttacaaatctaggtcttaaacatctttgccatcatttataatgcagacttcatgctgagaagagcactcgacactgccaccgaagttctgtttctggtgttgttttgtcaattatgctgatgccacgggaccatggaacagtgccactatttccaagagcaacagcaaatcgaaaaatcttcatgcaatggttgttctagaaaagtctattacattggtttatgctttaaatatagttaccaccagagtagtaattgtccaatctatcctttaaaagttcaagtgtattattgca

SEQ ID NO: 34211 - DNA, 447 bp, Homo Sapiens
aattgcatagaccaatacattttatttcttctttatgccagattgagttaggttttctatcattcatgatcccaaaagtcctagctaatacaaagagactaagggacttatttttatcgtatatcctttgtactacttgaatttcttaccaagttcatgtattacttcttcctttcaaatgaaactaaagaaagaaagaactcattttaaaagcaacatacaaaatatacaccaagaaggtaaatcaataacagaatgaagactaaaagttctctccgcactaggctgtgtggccacaagagtgctgagtgcctgctccagtttccgtctgccctctctttcagtaatagaatatcaacatttagctgggcaagctgctgcatagctaaaagaacatgtgtcgcagcattccttgcagctaccttaggtcatatgaataagttgtgg

SEQ ID NO: 34212 - DNA, 413 bp, Homo Sapiens
tctttaaaaagcacttttttaaaagtggggttatttctggtaagaatacgagaggtcattgattgacatagctaagtaagggcaatgttgggtactgagccttagcatccatcattcccaatcaccccctctaagtctcaatcagccaccaacttccattctgacacactctcttacaaaaacagtcacacaaacaaatgacctttatttacactcagtgacagttctagtgaatgaaggtgaatgaaggtgccagcactgcctcccattcctcatcccccagtcccaagagttagctctagaaattgcatcttggcctagtcccttaggaccagcgggggcactcttgcacagtttctgcacatctgctccattcttctctctctgttggctggcctcttctgttcatacat

SEQ ID NO: 34213 - DNA, 434 bp, Homo Sapiens
taccacgcacccaagagctgtttccacatcacaagaatccctgttactttccagtgaatgactgtgcattgtggcttaatctcaaaaggaagtagacgtataataccttaaaagaaaacaaacatgcacacacaaataccagaaagagaagtcatcccacaaattccacctctgaattctagcatcatttcttgtttctccatttggaagcttcaaattattctctttaacaactctttctagcaatgaaatatgaagaggtgatgatttcctccaaattaggaggacattaacaattaagtgttaatgcgaacaccgttaacagtaatgcaattataactgtattccacaaagggcaataggaaataattactctgattctcaagtgatagatagttccaggagaatgagattctcagtctaaaattcattag

SEQ ID NO: 34214 - DNA, 386 bp, Homo Sapiens
aagtttggcactagaaactaacagacaaataattcactagtgagtatgtgttgccaaaaagtagtactgcacactaatcaatcaataagaatggaattgtgcttcttgtgcaactagaactcttctcgttggcagaatgaagaaacaatacaaaagggctactgataatgcttgagagccatttgaatgtttctgtaacagttttagtgagctatcattcacatatcatataattcacccacttaaactgtacaattcaatggtttcactatattcagagtggcacaaccatcaccacaatcaattttaaaacagttttgttaccataaaaataaactccataccattaagcagtcacccccttctttctcctcccaatcaaccct

SEQ ID NO: 34215 - DNA, 425 bp, Homo Sapiens
caacaaaacagaataaagcctactcatccttccattacagaaaccagactgttgtgtctcagccttaaggaactaggtctatctgatcataacagttgtaccaaactagtagatgtagcaacacatcatcttgaattacaacacacacaaacagctgcaactttacttgtcccaagggctctctggagcatcccacaaatgactagaaattgttttttggaacttggtgttatggggaaataatctgaaagactgacccaataacctttcttctggacactaacattatttgtctttaagatttgcattttagaaaatttgttgtctcatatacaaagtttttggtcccagtacaatttttgtagaggcaatggtgagctaactaaattcattttggttaataaaaaaatgtctacttccaggct

SEQ ID NO: 34216 - DNA, 391 bp, Homo Sapiens
aattccttgtataactcccttgtgggatatcatttacaaatatttcctcccactccaccagctgtctcttcagagactctgtcgattgtttcctagctgtgcaaaaggttcttagtttaatagagtatcatttgtctatttttgtttctgttgcctgtgcttagttctcagccataaaatctttgccaagaccaatatccagaagtgtttcccctgttttcttctagtagttttatagattcaggtcttacatttaagtcctgaatccatcttgggttgattgttttatatgatgagagataggggtttagtttcattcttctacatgtggacatccacttttcccagcaacatttattgaagagggtgtgtcctttatcaatgtatattt

SEQ ID NO: 34217 - DNA, 489 bp, Homo Sapiens
gctgggtgccattgaagaaagtcctcttagatttcagtggctaaaagtgcttcccttttgatgggaaactggatcatagtagaacttcaaagtgaataacccaaatccagtgattttaagggcgaagggaaatgttttctataataacctactttctctggactctcagttcgtttaaatatgttctagtaaacaaaataaaaaataataagggatgttcttagatttacttaaaatctgttcatctgaccatgggcatgattggtttaaatttccttaggactttggaggagaaagattttcagaaagctttcacaattgccagattattttactttcatttttgaaccccaggtgacttctgtaaaggaagtcactttctaaatatttgataaatgccctcagcagcaccttctacaacaagatgtatatatgcccttctaggctgttggcatcagctctcgcatgtgccttcccatcatccttctg

SEQ ID NO: 34218 - DNA, 425 bp, Homo Sapiens
tctaggtttccttgaaatgaaatgtattctctagttttaaatctgcattttacaaatgcaaaagaaattgtagttataaagtggtagggatcaagaattgaagtctgagggtgccgtctctgcagaggctatcagaatgtgctgggaaggaggtgaatggaccccttgagttgaaatgatggtgacactgagggtgtcagtttcccgacttagaccagacgtgttgccactcttcataccatggggtggctaccatgggtatttgaggagaacatgaagcctatggaagtttgctgctttgcttccagagatgttgtcaggcagggaagcagggctcaatccatagagccagcttgactcctatgtcagggagattgtgggtgcccacccacgctccatgtttcctgctctgggatgtcttcaga

SEQ ID NO: 34219 - DNA, 452 bp, Homo Sapiens
aatcaaagtacttatgtgtcaatgccaaagcaacgaagaattcccctttttccttcactattgacagcttcagtttctgtacttactgtgtcatcctatccattcccttccctgagcctggactgctcttccaagggagactaggagtgaagggaggagtcctcccaaagttaccctttaagcttgataattagctccatagccatgctaaagcatgactgtagatccccaagtccctgacacattttcttctaagaaactggttagccaagaaagtaaagacgtaagccctgaagatggcaaaaggtgtcataatctcccaaagtcatctgtatagatgcttcatttaaccctttttcttttgcagacaaagggttaaaaatctcttctttctacctatatctttaaagagggattgacaagcccaaatttccttttatgaaaagacccaa

SEQ ID NO: 34220 - DNA, 394 bp, Homo Sapiens
attagtctggactttagctatttctttacagataggagaaacccccagaattccttggggaaattcctttttcttcaaagaaacactctgaactttgaataagaatgcaccattacttagcaaaaaaggaattattggtcagcatcacagggcagcagtagcaggcaatgtcagctctgtccctgcacgttcccctgagcttctcccactatctcgcttctcccaaagacttcctctttcctggccttactcttaaaagcaactacgtggaaattttaaattcttgtttttaaaattaaaaaacaaattgtgggtttctcgtgttttaatatgtgagtctgtaaaatagttttcctataagtcagcaatttcctacaaagaaaggtttcctact

SEQ ID NO: 34221 - DNA, 403 bp, Homo Sapiens
gggttcaaaatcaagggggctgtggcctccttacagctgagaagggacaatcagtgtcaagagcaaaatgtttctctctgctgaggcaagacatagcaacaacacgaagtcctgcttctaaaataacagctcccaatggatagagtgcacttatgacatgccaggtagggctggacactcccctgtcactgactcgtcccaacagtcctgcaagggcagccctgattttgcataggggtaagctgcaggttggaggggttgagtcattttctaagagccagaaagtgctggtgctccgcctgacctcaggcaaactgacgtcgggaaactgggcttttctgaatgcctgtgccactgttctcctctggccttgcctgtgtggcttccacagggcggatggctc

SEQ ID NO: 34222 - DNA, 427 bp, Homo Sapiens
gaaaggttttcaaaaaaatttattttcataaattaacacacataacagtggaaatcttagagtcacaaactaccaaacagaaaaggaactgcaggggcatcatgtataccaatgttaccaaaaatgtacaaatttcattgaactactgaccatgataatatataaacatgtcaggcagctatttttactggcccaaaccagcccaaggagatgctgaggcctctcaccaagaattcaaatccaattcagcaccagagaggggcttgtgaagacacacaatcaacaaacatggaatctgagagcacactgcactagatggccagctcaacggggaccccctttcatatcaaaatgcttttgctgcttgatttgtggctagacggtaacattaaactgtaattttagtaaaattaaatctccctagcca

SEQ ID NO: 34223 - DNA, 460 bp, Homo Sapiens
ggtttgttttactaaatacatatagcatatgttcacaatgatagtaatttgacttcaacaaaaatattgcagtttaattacggaggactttttgttatatttgaataaaatgtattaaaagccaagcaatatgctcaagggatcaaaattgttacaataggtagagtttgtattttcaaggagcaaagtaacgtggattattataataattattgttatttgaataactaaaagctatctattttttatttggccttttagtttggtaattgctgtaaatgcttatttctaactctccctttggtacatcatccttagagaattaacaacacctagtttttataatttcactaagcttgagtgtcaaaattttctagtcacatagtttgagaaaatatgaaataagcagtaaactgattagaataattataaattttattttggagtagatgcatatttt

SEQ ID NO: 34224 - DNA, 397 bp, Homo Sapiens
agagccactgtgcccgcccaatatgggatttaatacaggagagaggagaagccaaggccaggtaggcaggtatgctttaggcatggagggcgtcagtccagatggagatggtcagaaggttccagagggagtctggaccctgctgtcagctctccaggccagggggctaaaggagacttctctccaccagtagaagagtctacagctgcttttgttgccaaagatatagattgcctagattctagacaatcttgtttttattgatctgactcagtatccccttcagcattctagatccctgaattccctagctagggagtagctagaggctgcttcatgagctctcagccatgtgtggacagctcactggggactgtgatattgctgcttgggctga

SEQ ID NO: 34225 - DNA, 516 bp, Homo Sapiens
gagagctttactacttagtctcattcacttttgcacgcaccgagcccaaggtgaatactgttcactccatgaaaggaaatgattgagaaatgaaagggagagtcaaggtaaaaagtggcaaaagaaatacagtgtgagaagggaacagagctgaaggcagaacagaaaggcaagagcacatatgattataacccagcagctggaactaggccaggtccttgtctcacttgtcttggcagctcatgttataggcaaatgcacctctcatagcaaggactaaattcatatttacaaaatgaataaactaaatgatctcttaccttagatggcctatgattaatatcattttcatgttactgatgtacacatttactggaggtctggcacttaattttgatgaatattctatgttaataccacattttagatacatattcagattgctgaatttagtcatttctatgtactttactcacatatgtctatgaagatcgtctttactgcactacaagctct

SEQ ID NO: 34226 - DNA, 386 bp, Homo Sapiens
agatagagagtctcactatgctggccagactcgtctcaaacttctgggctcaagcaatcctcccacctgcctcaatctcccaaaatgctggaattacaggcataagccatcacacctagccagtaattgactctgaaagtaacacacaaagattggaaagtgatctaagttctgaattcaaatatcaacacatgcattttgctatttctttgttctttaattgcagcaagaacaaataacatgagatctatcttcttatcaaatttgtaagtatatagtagagtaatgttacctacaggcacaatgttgtacagcatttgttctacataatgttctacaggtatctgtagaacttattcttcttacctaactgaaactatgcctgt

SEQ ID NO: 34227 - DNA, 553 bp, Homo Sapiens
catggtagccaaatggaaattttactgactctttgattagtatcattacacttcacatatgagttttagtcttcagttaattcctgggaaatgccaaaaataaaaatactgccacagagaaattagtttttctctgctacatattggctcaaaagtaagcacctgaatattaattgtctacattttgtatttttaagatcttatttcaaaacaatttacattgagagtattatttatgctcttaaacaggatcagggatatctttatttctagactctgggaagataatttacctgagcaaaatgcaaagataaataattatacaaaaatttaagtcagttgtcaaagctaacaatgcatcacctggcttcaaaatttaacaaacaaagagtctacataaatatctttcttgtctacacatctttcttgttatggtaaacattttgttttttctaacaaaacactgctcttcattttaaaatctaaatggcaaaatgagaatgataacagcgaattaacaggtttgaatgtggtttataaaattaggaatggg

SEQ ID NO: 34228 - DNA, 417 bp, Homo Sapiens
ctcagtgactctatgtgcttccagaatccccacctcttttcaaacctagttttcaacaaagatgcaaaaatgaagccttcctgttctttccaacccataatttcccccttcctttgatcaaatccaacattacatttttaaactcttatgtattatattctgcctgtacaatggctatgtatgaatttattttaattaccttaatatattgtcagttttaaaaaagcaaatagagttgatcctctttatttatggactccatatacgcaaatttgcctactcactaaaatgtaacctcaaaatctgtattcacggtgctttcatgttcatgaacattagcagaggagcaaaaaacgtgagttgtccagagcacacattcccatccgaggtcaaacaagctgacactttgccttcttg

SEQ ID NO: 34229 - DNA, 479 bp, Homo Sapiens
cctggaattcaaaagactctcttcctgctcaaagagtatgaaaactctcctttaatccctctgttttcaagacagcatctctgcactcagacgtgttggtgactccaagccagaacccgcctaatttactttcaccattttctagggtgaaaaagcagtggccagtggcaacagagctctaactagttcttaaacagacttacagtcttcctgtttttagccccatcatcacctcctacttttgtagctacctggtatgggaaattttctaacccttttagagaacccgcattaatttaagtcaggttgtttcttggcttcccctattactgacacaggatttaatattctcaggtctgccaattaatttaccacaggccacctgttctgcaacttcaagaagttggttgctactgtctttctcctgccatctttgtccttgtggatttatgtcttatttaatataaatcctttcaatg

SEQ ID NO: 34230 - DNA, 444 bp, Homo Sapiens
gtttgttttgtttctctaggatagaaatcaataaaaaacaatgaaaagaaaaaataatataatctaataatgccaatattttgcccatttttatctatgggcaaacagtaaatgttttcaccttcaatggaagaaacatttattcagatgtcataaggatttaaaaataactaaatagcatcttttgaaacacttaacagtgtttaagtccttctgataagactatataatttatgaaaggaaaataaaactaagaaaggcttaagtagtaactaacgatgattgattctggaaggcaaagtaagtgactttataaaacttatgaatagtatattgtgttctaatgggatgtccacaaactattcctgtccttgttttgatactggatatttggattctttactttttatagttctctctcttcccctcccctgccttcctccc

SEQ ID NO: 34231 - DNA, 379 bp, Homo Sapiens
aatgatggggccttgccgtcaccctagctagagagcagtggtgcaattgtagctcaccgcagcctcaaactcctgggctcaagtgatcttcccacctcagcattccaaagcactgaacatttagatgggggcagaggggaaagaagcaaagataaaattgattcaagtatcttgttgaatagtgagaaagggagataacaagcagctcttaaggcataataaataggaaccaactgctaagtacatggcaatgtaaattgaagaatgtaaaataccacaaatattatattagtttgcttatagtaggtagcctctaaggtggcaatgatcactacctcatggtagtcacacacttgtgtaactgcctcccctagactgg

SEQ ID NO: 34232 - DNA, 396 bp, Homo Sapiens
caaggatctatcatccctacagaacaggcaccgtacaaggcactatggacacaatcgtgaacaagacaaccttggtccctgcccatatggagagcacagtcttggggacctatcaacactaaagtaaacaaacaagtgaacaaaagcaatgagcaatggtgacaagtgtggatggtggagacaacagcacaaaatctacttcaggtgggtgtcaggacaggcttctctaagcaggtgcaatttcatccaatgcccaatcccagaaggaggagaaggagatagccaagagctgggggccggtattccaggtggaggaaagaccctgtaaacagaggttgttcccagagctgaaagctgaccagtgtggctggatggggcaatgatggacagtgagca

SEQ ID NO: 34233 - DNA, 514 bp, Homo Sapiens
cttgagagggcttctcagtaaagttcaagcaagcaggtgtgccgaaaattgctttaaaaccaaacagacagtaggaggcatgcatatgccagaaatcatagcccccgtgagagagacaagcccatttttcagcagcagcagctgttggtgcatctgcagacaggttgttgtcaggagtgttgagcagagaaatttcaggagaaaggtgcacatgagaagagaagaggcgtgaggtctctggtgtatgagattcagcaaagaaacttgggtgatgcactgagtcctgggctgacattgttagaatttagaatttcatctgagactgggagcctggacgaaagtggcactgagactttagattggagtttgttaaatcctgagcaataaaaattgtagttcactctaatgaaacttcctgggaagactattagtattaaacagggagactctctccccagaaataatgctaaatcacagacacaaatacttgcaagtccagttcagcacaagccag

SEQ ID NO: 34234 - DNA, 426 bp, Homo Sapiens
acctctaaggaaatttttaggatctagatatactatcatttagatataaaactaattctcttaccttccaacaccttctaatgacttttttatttctgtgatcctatctttaatttccagtagttcacacttattctctgattactccttttcatagcatcctgtccttgtttagggatgtaacacctctccaatctatctgacaatgcctgaaatatttaaaatgttcttttgtcttctgtttcctaaattacttctctttcttatggagctctgccctgaccaccaccaccatttataacttgtaatttttttcatgctaaggtcatttttcaaatatctgacgatctttgtcttatcatatttaagagtgagccatcctggtcagctggcagatttcatttctcctttctttctttctctctt

SEQ ID NO: 34235 - DNA, 406 bp, Homo Sapiens
gctattttaagtgaattgtaagtatgttcttctgagatgttgggtagtaaaggtattttttaaaaaggtataacgaactataaatcaaataaaaagctagctcaaatttgcaggttaattatactagcacagaaacaaatttgtttcttaaccgatgattatgaggatcttttaaagacatggttacacagcaattttaacttttaatcttaaaatgctatgtcaatgaataatatgtataaaaatcaactgtacatacacctaacttgctgaatataaaatcttaatctcaggttggaggaaaaaagtgtgaccattttgttcttttaaaatttgctaagcgtatttaaaaatcagcaagttacattctgtttctatttttacagaacaggggagcaaaatactt

SEQ ID NO: 34236 - DNA, 446 bp, Homo Sapiens
actttctacaatttttttcttctttaaacaatcagtgctgcaacaatctgccctcccatgactcaaccttaccctacaatgccagctatatcgtctaagttattaaattatttttcatgatgaggttaggcaagattatctctaaaattagcattttgtaacactaaagatgactaaaatagaatgtaactaatgaatttggtaatattgcttttgaactgattctaatttagtctcttttttccttctgcagtaacataatagacttaaacgtttcctttatagtgccacaaatcaatcaataagcatttgttctatgtctactatgactttagcactacagcaaggtgtcctacttataaaaggcattgtacctgttttaattgccttctttagcacatagccatttaaggacttaatgataaataaatacatctagatgtcaa

SEQ ID NO: 34237 - DNA, 457 bp, Homo Sapiens
aggaccaaagaactttatatttattttaaatatcaaagtaacacaaagaactagttcaatatacagtacacttcctactcttcacagagaactgaaattttctataaagacatttatacttaggaaacatcagacaaccaaagtatgtataaaactcacaagatattttacacacagttcacaataattaattctgatattttagatttttctgtcattgcttttaaagtatccttaattaaaaacaaaaattattatttgagactgaaaacaagtgcaaaagcatttctactttaatatacactgtaaatccccataatcaaaacatttactacacaatgtggaacagctaaatgcccagttttgtattattttctggcagccacactcatcaattgtaatacagttttatcaatagggataagaagagttcaatcgttagaaggaataaaaattt

SEQ ID NO: 34238 - DNA, 425 bp, Homo Sapiens
gtagagatggagtctgccatgttgcccaggctagtctcaaactcctggtctgaagccatcctaccgcctggcctccgaaagtgctgggattacaggtgtgagtgccgttcctggctggtgtgtttcttctggagaggagtcatttgctaatatctgtatctgctgcctctctcttttggcagagcctctgtctgtgtatgcatgacagagtttttcctctcttaccagtaaattagcagaatatagtttcctttgctgttgtcattcctctaaatgggtgagtattttatgtctgagggaccttccccgcctgggagacaactgattctccaaagcacactagtggccagcagctctgagtgtgccacaaatgcacgtgcctgttccatttgtacaaggaggatttgcaatcactgcatctgctg

SEQ ID NO: 34239 - DNA, 426 bp, Homo Sapiens
gtttttttgagagctagaaaactaatctggaataagtataactcattattgctattattattaaaaactctaacctctggctcctggggctggcagcagtaagtaggttggtttctgtatacatgcaaatgaaatttattaagttagatattccaagatgagagtcctgtttttggttttctcacaaacgctggttttttaaagtactctgaagttagtagactgccacctcttgcagaccctggaaaggaatttgcttggccccaagagcagcctgtacattgaaattacacagagtcagactttcaacatagctgggagtcattcccttacatatgtgtttccgcttaatagccagacccaaaatcgtttaaagactgaagctgtgtgtgctacttcaactatatttcttatagcacccagcag

SEQ ID NO: 34240 - DNA, 470 bp, Homo Sapiens
ccaagaggctgagctgtcatttacttggaatggcttaggacagttctgactggaggcaggagtatggactcattaacctcctagccctgtaactctgtcaatctcaattctcaccagtttcaatcagatacagctgcctctagtttcattctggttggtttagtgtggttgtgtgtgctcatgcaattttctgcattgcaggggaaagaaagtatcttcaatatgtgtctatatctgtgcatgaggcagtgtgtatggtcagtctttccttaccgaaagtctcagcataaaatgtattgatagaggtgtacgctggtatataggaaagtaccctgtgacaaatatagttgattctttttatttctctttgcatagagatgaacacacagctacagtgctctcaggaggcctaggagttgacttagtccaaaggaatgactgtgctatttttgcactttccctcacattat

SEQ ID NO: 34241 - DNA, 486 bp, Homo Sapiens
aagaaccaggtacttcatgtggcaaaatgatggcttcttaaatctcaaatacctgaaaacctttttgcttgtttttgtacaatcacattttgtgattcatcagaaaacataattgatataaagtagccttagaagcacagtattattcttaaaaagaatcacagggccttctttcccatagtgtttatctggaagtcagaggaataccaagtgaaatttaagtattttctataaatatataagattatcatttctatcagttcccctctcaataatctaacaagcttctcagattttatgtccttaacaattctagaatgaaaataagataatctgcaattttttttccttgtgcctactgaaatgtcattattataagctatttgattgtactgggatattctggcatattttactaaaaaaattgactttattgttttatataagaacaagagaaaattaattttcctcactagcaatttaagt

SEQ ID NO: 34242 - DNA, 387 bp, Homo Sapiens
cgagatgaagaacaatcaaaggaaaatgatggacggaaattaacaatcattcttgggcggggggaaaaactccacccacaattcctaagtaaaaagggttacacacattctcggcataataagtctctctcaggccaaatgtgttcatgtgaacactatgaaggcattccagctgaggtcaggaaaataccaagtatgaccttccctatttaagttaaaatattggaagcttattccaaaatattggaataaatttgaaatacagtgattgaatggaaggacattaaattataactcattagacatgttattttactctatagacaaacacaacaaatcacctgaaataagctacaaaagataaaccagtaagttagagaaataatc

SEQ ID NO: 34243 - DNA, 391 bp, Homo Sapiens
attcctgaacaattgtaggagtcaaacccgtgaagcatgaagctcttgatctttctgcagttgatcaagcatcaaattaatccaatgtgtttggaaggtctcggaaaaccatggggagggacgagtcgagcacatgccgaatggtgggcactagggccaggcatggtggaggactaggccgctttgaacccatacaacatactcgcctaccgcttaacatggggcccgtgggtttcaacaaccaccacgaacactagtgagccgatgcattgaaatgtcgctatggcagactgagtggtcaacagacacccgtataatccgattcggataagctcgtctcacataggaccgctctatcgaggataattaggcctactccgggaatatacag

SEQ ID NO: 34244 - DNA, 477 bp, Homo Sapiens
tttaatcttcaaaactgtatttggaattgacaaaatcttcctagagacaaggccctgagcacacagagtccgtctccaccatgaaaatattacataagctgtacagaacaaaattagcaatgagtgatctttggcactagaacaggtgattccttagctgttcatgcaatatccaaactgcacaccacatgacattagattgctggttaaccatttaattttacatttaaattatcttaaaaggctggaagtcctagctaagttttcaatatcaatatgctacccatgtcataacacttagtgcctgaggtagagatttctgtaagagatttttttaaaacacaattgagagtataatacagaaaaacatttaaatcttggaagcatatagcctggttcaacaagccaactctgaaatgcagaactagtaccttttttatttgagtctcactccatcacccaagctggagtgcagtg

SEQ ID NO: 34245 - DNA, 390 bp, Homo Sapiens
aacatttccatagtatgccccaaggtgctattgcttatcttgtttagaactgtgctttaatgtgtttcctcagttgtaacccacactggttctagtttggggttttttcgttttattttatttacagggcccttttgtgtatctcttctagtgcctggcttccctctataaacctattcgcagagaattcagttctctcaagctgctgtcaagctgcactgaagcttttcctgagatccctcttctgagacaagatgattctctttttattctctctcccttatttccatcaagacctccattcagaggatagtgtaaacagatacacccaattatacaaaagtgtccatgaatgagaactgttacttctcatctgaagattgagtacaa

SEQ ID NO: 34246 - DNA, 466 bp, Homo Sapiens
tatacttgtatgaccccatttaattcactgatccccactgaacatcaattttcccatggctacaatgagggtactaataatatctttgcctaattaaagggttgataagaaaattaaataggaaaaacagggtccatatgctgtgaaaactctcagaacagtgtgtcaactttcattaacgtaggtaaatgtactcttttcaaggctttacttccaatcttccccttaagtgctagtgtccagaggaaaaattatttcttctctgtagaagtcattttgaagacagtatttttctgagatccaatgtggttgggagttctgaagaggaagttatagttttaagctagattatctcattttattatattctgtgtttattttcctttgccgtgcttaggcctttggcaaatgttctctagatgtaccattcttatctcagaatgctgtaaaccatcagtagaagcag

SEQ ID NO: 34247 - DNA, 447 bp, Homo Sapiens
ggttaaatagtatttcattttatggatatgccccagtgagtttatttatttaccaattaatggacactacagttgttttcagtttggggttgttccatataaaattgctataaacattcatgtacagatactgtacagacatacatttttattttccttggtaaaaacctggaaatggaattcctcagtcatacaataagtgcacgtatgaatttataacgtaagtgctaatttataacataaagtgctaatctgttttccaaagtggctcatcaaaaacatatgagcgttgggttgttcatccttaccagaacatggtttggttttcttatctttatttttattttaaatgttccaataaatagtgatatttccttaagattttaatttgcattcccctagtgattaataatgttgatcatctttttgtttgtcatcactgtcatt

SEQ ID NO: 34248 - DNA, 419 bp, Homo Sapiens
attcacagcatacttttatttaccaaagtacatcgtacattatacaaatcttaattacatttacattatacatttataatattaaaattgtgcgagtagtcttcaaatatctgacaactttggggtcagtgaattatttaagaaaaaactcagaagagttttgaaaaaggagcaggtgtgattctacaaattcaatatgaggcaccagtgggagaagtcaattggatgagcacatgaaatattaggagtgctcgtgagggggaagtaacaggtctattgtgtgcagtgctgggcaggctgcatatggagaatgtgttaaaagagcatttgcaaacttaagcattacttgaagatattaaacagaatgatggaagcctggtctttgattatttattgctgacatatgcattgcagtgatg

SEQ ID NO: 34249 - DNA, 481 bp, Homo Sapiens
gtgtcaccttttaatacaggttttcatcacctctgcaaaagggattttttttctccccagtgaaaaagatggattggtaagtggccctacagcctataaactgtttccttttaattcaggcccgagcagtttggcctggctcacattcaggtagtatataacttgtctgaactctttctaaagggcctcctgcttgtgtatttatgtctgaacacttgggtgagccttgaaacagcctctctacagagtgatgggatgtttgctcacctccagcccacattgtaatgaagcatgccccttgcttttaaaatcctgaggttctgacctctccaggtgaggctttccctggaaatggcccccagaggctactcccaactgcacggtttatgtgtgggacaccagtaactatgttcaatcttaagggttttctttctctttacattgtcagctgctttcatgttccaacataaaggcccacaca

SEQ ID NO: 34250 - DNA, 470 bp, Homo Sapiens
cagagttttagatattatttattttaaactaaagcaaataacaagttaagtgaaatttgcagttttcactttgcattgtctatttaaaaggcctaggtattggagctgaaatgctgaagaggctaagtcaggtatgtattacaattagtattgatattctatacattaaccttttcttaataaatattcacagggcataaattaaatcattaatctcaccatttgaacataaccccaacatatacttcaaatttctacccaaattaaactggattttcaaatcagatgatcatatacagtatatgaattatagtcaattaaaattgatttatatataatccacaaccacactatacaccctttttgctatcaagggaaagtaagaaggagggagattagaaagcatttttattcaaaaacacaggctcacagtatgaatattacaagactataaaagcaagatcttcttg

SEQ ID NO: 34251 - DNA, 473 bp, Homo Sapiens
cctttctgatcttggttatttctttacttctgctgggtttgggtttggtttgtttttgtttctcaagttccttgagatgtgaccttagattgtctatttgtgctctttcagattttttgatgtaggcatttaaggctatgtactttccacttagcttcacctttgccatatcccagatgttttgataggttgtgtcactattattgttcagttcaaataatttttaaatttccatcttgattttattgttgacccaatgatcactcaggagcatgttattcaattttcatgtatttacattgttttgaaggttccttttggagttgattttcgattttatccccctgtagtttgagagactacttgatataattttgattttcttaaatttattaagagttgttttgtgtcctatcatatggtctatcttagagaaagtttcacatgctgatttgggaacttcagtgttaggt

SEQ ID NO: 34252 - DNA, 509 bp, Homo Sapiens
ttttttgaaacgttcataccacataggaacgtgttacatgtttgccaatatgaagcaaagaaaatctttcgtgttagcagtggctccagtttaaaaaaacacttgctgcttgtaagctcgggagtgaccctctcctgattctaatcatcagaatctctgaggacattaggaaactataataattggctaaactggacatgtccattggattgcttcaagttcaagtctatgtacttagaaattgtaatgcagtgggaattgggaaagaagggaatgactggccttctcatctaacttttagttgcatacgaggcatatcttagttacttcttaaattgatttttgcctgaatactcccttagggcttaaatatatattttcaaatattgtcatttaatgaaaattcaggagggcaacgtgtcccttctttgaaaatgtggcaaggctgaattgtttgaacttgaagtcacaaatgtaagtaacttcaccatgtgggagccacgtttttg

SEQ ID NO: 34253 - DNA, 471 bp, Homo Sapiens
gttaatttttgtttttaaaaatattgccttaaaatattatttatattgattgctgaacttcctttaaattttgtgtctgagttaagtgccttacttgcctaccctactccaggtctcctgctgtcttgaagatgaaaacactgaaattttaatacaattcaatttaaataagtaactctattaaaaattcagagggatgttaggattaaaaaccttctaaaaatttctgttttaaacaaaaggcagcaaagcatatactccacctgagcactgagattgaggaaatgtatgtctcactgatttctcacagaaaaggcttatttgactacactcatgacctcacaaagtttgattccactgtgtaatagcaaagggtctcccagaatctgtaagtgaaggctcagctaagtgcagcttaatggttttaaagattagctattagctctcatctgaatgcagcagaaagtatcc

SEQ ID NO: 34254 - DNA, 430 bp, Homo Sapiens
caccaaacatcttttggcttcatgtccatttctgtaggagttttagttccttcatcctgcaaatgctgagttctgagctacactttctgttcctctccttgatccttaaaactagcaggacttcactttagccattaatcttaacagtcttgatccttcttcggcacattaagatgtttatctttgtccttagttgccctttgtctattttattttcagttctgtactttatctattattgctgggtatttgaaccaaaagggatgtatcaaagagaaaatttatgaacaacttggctggaagtcacttactttcaatttccaaacttaagccatggttttctatggaaaaaccattaaatgtacaataaatccttaagttaatagttaagttcagcagcaagctgtaaaagatgagtcagaagctaagc

SEQ ID NO: 34255 - DNA, 466 bp, Homo Sapiens
tggtggaaaggcgtctgttctccaggctgaaagcacacaaaaaaaacctgtgactaatttcttttcaaatctggaggcagtcttccactattctcttcagtcagggagaagtaagtcaaatccctgtgacttccttaacaaaaacattctttgaaggcacaaacagaataagcaataactgacaatttaaacatacctagaatactttaccacacatttttcttgagtgtcttataacaccgcaaaacttcaaagagcataccgactcttgcctaccggctgaaagggaaatatctaggtccactgttgaggcatttccaggatatttaaaaatgtttactggaactgataacaaccacctattgacagtgggctgctgaggatctccgggcctaggagacctcctagctcaaggctggtacttccataaaaggactgacatttgccaatgtctggtttagtgaca

SEQ ID NO: 34256 - DNA, 446 bp, Homo Sapiens
taccatttggctcatgactaacatttgcttttatagcagagaaaacataattttattttgaccaacatacttgttgcagagttattgtttatcttgctgcccaatattcatatatacttgcttctgataatagtaccctgattccccactctatccatatgttttggatggagttgccctgcttctggctccaggaataggcagtactcagccatggccaaagtcatggtgaatggctcaggactaccgtaggcatgtgggcaatcaggggtcctgagatgcataggcagctgcagaaaccacagagacacaggcatgaacctaagagaatgtaagccaggagctgctagggaaggagaagatcctactcatatagttttagtccttagattcagcaatgcctgtagtctaaattcctcctagatttgataggtatagagcctgta

SEQ ID NO: 34257 - DNA, 440 bp, Homo Sapiens
gttattatttgtagctctcttataaaatgatagcactcatattgtggaaaaatagaaagaattattttatggtaagaacaaaccacatataagctgccttttaagacttcttaaaaacaattggtgagcacataaaaaattaatacaaacagtaggaataaaaatgaataatcacatatatagctaagtaaatgaaaaccagtttattgacagatgttgtagagatctttttaaactcagggtgcaagaatgtgattaaaaattactgatggcaataataaagccatgatattactactttgggcagttacagtgtttctacactacacacaggtctgactgccctgacttgcaaaggcaaggacacaaaaaaacatctggactcttaagagtataaaatgcagaaagacatgaaaagccgaaatagatgccatccaatt

SEQ ID NO: 34258 - DNA, 418 bp, Homo Sapiens
tcatggtccatttattgttctccatctagttacttgacaaatattcctattatttaataggaattcagttcaggtttcttcatggaaacctttcctaatacctccaaccattgctgagggctgaatcagatgccttttttctcggtgcttattctctatgatcctatagcagcctttggtacaccgattacacattttgccttatgttattagctcttcgctacatagaaatgaaaatctatgaaactgtataagaacccaagataagtatcacttgattgtcttgagacaagcgcagtggactttcccaccatccttaaaaatatgacataaatttccatgccccattgtctctgtcctttcctccaaattattggggttcaatcctacctacctctgtaaaaaagacttcttcaag

SEQ ID NO: 34259 - DNA, 364 bp, Homo Sapiens
ggataaatggctttttatttcccattttttgtctttacagaggtaagataaatgtttttaatatatggaagtataagcttgtgaatacaccaaagaaattaaccaaagaataggaaagaggaatctggcctattcacgtgatacaatgtacgaaaatgtacaatagtactttaatccataaatcattcaacctgggaagataactcaaaatgtttaacaaccagaacagtaacattaaataatatatagataatacaaataaaaaatttaaattttataagtaaacatgaatattttaaaactgcttaccaagtaatataagttgcatcaaaccactcatcaaatcattcttataatttccaag

SEQ ID NO: 34260 - DNA, 595 bp, Homo Sapiens
tttttaaaggaacaaaaagcaaaaaacacaattcatttaaaataatagaataagccagtgatagaggggaaaaatccagtacaataagcagattaattaagtaaaagatctagtattttctctttcaatctattgtaattagtttattcttggcagtattgtgcagtgatcttttagctgcctctgtatctccgtctggaatgaggttcgggccatgctgcgcatgtttatgttccaagtttatgttttatctttaaaactctgactttatttggctacgtgcctgttactgggtatagcctatatttttagtttattcccaaatgcccacaatattagaattaccacttcttgtgtgtgcatccacagcatatcttatctgttattatgctgagagtggggtagattaaagcaaagcaaaattctagactgaaaacagtgtcaattgagtgcttgagccatgttttttcgttctcttatggtagagaagtttaggatgagcattatttctcagaagagttatttctttatctaggagaagaaataccacttgcaggagagggttgacaaagtaaagaaaaaagtgaaagaattg

SEQ ID NO: 34261 - DNA, 457 bp, Homo Sapiens
ttaaagttcatcaggtttctttactgcaggacttctcagagcctttaatgcactgtggttccccaagggggtgccaggtcacagagcatttttcagccttttgcaactgtgaaattcatttgttcaaggggcatctggagtggatggtgacgaatgcactctgggagatgtggttgtgcaggacacacagccggcactcagacccgggcctgcccacagcactggctcctcatgtggccaggccctctgcccctcactgagccttgccggctttgctgtaattgtattcccatatgtgtcccgtctggcttgatacaactctggccaccgacttccggaatattccaaggcctagcccaggcctgtgtgtcctgagattacctctcgttgctggcagccatctctatgaattcaggaacgaaaatcacaaagccagtggcagggctggcaggcctga

SEQ ID NO: 34262 - DNA, 374 bp, Homo Sapiens
tacactccctctcagtgttgggattacaggcatgagccaccacacaggtgtattagcccagggctaatacatggttttaaggtgccatgcaatgcggtaagtgatgcttcctccctctttgtaactccttaaagctttgagtgaggggtttgtaggtggttgagtttcaccccaggatcaacacagcatggcatagaacaagacagagtaagaagcccagtgatcacagtaacaagggaatttaaactattcaaactgttgcatgggtttctgatttccatggaccatgtgattgtgatgggggtgggtatcaaatcaatcttatgggaggagatcctgctgctaatcttctgacacttattgtcttccgcctc

SEQ ID NO: 34263 - DNA, 588 bp, Homo Sapiens
gaaatttgttttcttttattttacttttagttctggggtacatgtgtagtatttgtaggtttgttacataggtaaacgtgtgccatggcagtttgctgcacctatcagccaatcacctacttattaagcctgacatgcattagctattttcctgatgctctccctcccctgaacccccatctgcagtggcaggcctcagtgtgtgttgttcctctccctggttccatgtgttctcagtgttcagctcccacttatgagtgagaacatgtggtgtttgcttttctgttcctgggttagttttctgaggataatggcttccagctccatccatgtccctgcaacggacatgatctcgtttctttctacggctgcatagtattccatggtgtatatgtaccacgttttctttatccagtctatcactgatggccattttggttgattctatgtctttgaacatttgattttttaaaaagccttaccacattcattacaattgtaaggttgctctcttatatgaatactctgatgtttccattttgatgttcaggtaaaagccttagcatgcacattacatttctgtgggtt

SEQ ID NO: 34264 - DNA, 408 bp, Homo Sapiens
agagatgtttaggctctagacatttgcaccacagcagaaggagctatgttgactttcaatttcaaagcagattctgagaagctatgacattctaaatatgaggccttctttactcatggattgtcctaactacaggtttgttttcagatgaatgcagtctggtctcaggaaagacccctaaaaaggttaaaaagcaattacctagaggaatatgagtttttattttagaatttcaactagcactgctcatttgttactactgatgaattcctaaagaaagatgctaactaaatgccttaaatccctttgggaacaaggtagtaagtaaacatatattttataaaatctaatagtcatttaatagccaaaacaaacatattttataaaatctaatagtcatctattagc

SEQ ID NO: 34265 - DNA, 501 bp, Homo Sapiens
caaatttttcaggcctttcattcggccaaagcaacaattgatgtggtattttctaatatctgatacagcttttcaattttgtgtgtgtgtatatatacatgaaacacagattgttcaaggggaacagaagcctatgagatatagaaaccaaaggatatgccttttaaattgagtgagcacagtctttagggcctacagtttcaaagttttgtattagggaatggctgaccacagaaatttttctaaattaagtgcataccaactagaattacacaattggcttccgttttgctacttgaagctcccaccttgagctggtttcactcacttattgttgaattatagagacagttgtaactaaatttgactcttttacctcatccttttgaaattgtgatctttcttccatctccaaatataattttgcagaccatgaccttcaacattacttctgcatcataaatgtgattttggcatcttgttgcagaatgcctactctga

SEQ ID NO: 34266 - DNA, 518 bp, Homo Sapiens
gcctgtagtttaacacaactatgcattattttattgatggcaagacaatcacaagttatttgacaatattaagtatttcttatttcaacacgttgcagtacttttgaatttccaaaacttatcacaatgcaagttccaacttgagagcaggagaaacaagaatatacattgagcacatgtatctccgtgaggatgtgtttgtggaaggtgtatacacaagtctatctctatatataattatgtacacacatataaaaactaaacacatgacatctgaaacacgttcaaacattggtccttgccttctgcaagaggtgctcagtgggatcctgcttcctctcttcttcacctgaagataaattccttgctagagatgagctctggcatacagcctcctaggcagagggtgtgtggcaggcccactgcacaaatatcagtcctgccagattctgctgcacttactgcctgccatttcagattaatttctgagaagtttcaaaattcattccaacgacctt

SEQ ID NO: 34267 - DNA, 455 bp, Homo Sapiens
agatttaaagtttgattatgatgtatctgggagtggatttccttattttgtcctgtttaaggtttgctccatttcttgaatttgtatgtttatgtctttcaccaaaattggatgtttttacctatgatttcatcaaatgaaaaaagaagtctatggggcatttttcttctgtccatttgggactctggcataaatagtaaaccttttaaccttgctccacagttctctgaggctcttattttattctctgttgtttataaagcataatttctattgttctatcttcaaatcaactcctctatcatctcttttgctattgagtccatcaatggatttttaaaatttctgttattgtatttttcagttctaaaatttccaatttgttctcttttttataccttctgtttttctgtaagactctttatatttttgcttcttccaagaatgtttgctct

SEQ ID NO: 34268 - DNA, 479 bp, Homo Sapiens
tcacttggactaatatttaatacaacaaaattttcttaaatatgaatagcttcttagggtttgagatagtcctgtgcaaaaggctctttatgataaggtcttaattacgttttgaagaccaaccgttagaacttttaaaacaacttttgaaacagcactgttgagaactaacactggaaagctatttttttaatacatccatctgccaagaaaaactctggataatatctgaaattaagaaaaagtagtacataaaatcttttgacaaacaattatagactgttccaaggtctgaataacagtatataatgcaaagttgtataattaaatggatttatttaaattgcagaaacaatcattgctagtacttttggggttctttggattaagttactataaatatataaagttatgaaagatttatgttttaagaaaacctactttaagaggcaatacagcagagagttgaacagactccc

SEQ ID NO: 34269 - DNA, 444 bp, Homo Sapiens
ataccccactccccagtacaatcaggacccaagtcctactgagccccctcaaatatgcactgccccactatcctcatttataagatgatggttctggcttcttgggcacagatctgagttcatcttttccaaggtcgcagattctaaacaggtagcttctttctgctcatcacgccctctactgaatccccaccacaaatgtcaactttacacataacacttctttagtatatttcctttcttactcttcgaaatgactgtttcccacttctctttgtacaaacatcctacacacctcccccaacaactagcatctttgttcactattgatatccttgcctcagagttcacagagaaagagaagccaccagagaggaactgcctatgattcccaccacgaaatcatgaaatctaccaaattaccttcatttacacccccattct

SEQ ID NO: 34270 - DNA, 430 bp, Homo Sapiens
gtggggggaccgatattcaacgtcctctttctagctatttgaaactgtatcatatagtcaactgtagtcaccctacagtggtacagaacactggaacttactctggccatcggcttctctaatcagcgttttctacaaagcaaccagaggcaatttatgattctttctatctacttgaaacctggagacacatgcaccttactaacatcatgatgaagtgtccttggacttgactgctaagactattccatttctaggagactttttccccttggggctagaggacaaagtaatatcttcaaaagctaaaagctcttgaacacaaaaagggcccagcaccatgtctagcacataacaggtgtgcaacataccagggtttccctattctcagctcttttacttcaagccttaattgccttctacctccaag

SEQ ID NO: 34271 - DNA, 510 bp, Homo Sapiens
caaaagttatcgaggatatgactataaccttggaccagtttcaatttctttttattttttctgagaatacaccaaagattaatgtcaatggcaagtgagaaattgtccctagagaactattcaaggactttttcttactacatttgattggactggagtgaactgacattatagcatctttatcatcacctttaaaattctattttctcttagtagcaacagtgaagactttagaactattacttactttaaattattaaagtatatcacagacaaaatattcaattttacattaaagcaacattaagggtctcaatttcattgaacagaaacaaatgctgaagaaatttacaggtatgatttaattttagagagtgttctttctttagggaacaaaatgaaactagatctctcatttgtctgtatgggcaagatatggtaaacctcatgatcaaaacacatgccagttagaaacttgatcacagaaatgatgctcagtgttgaaaccca

SEQ ID NO: 34272 - DNA, 444 bp, Homo Sapiens
ttttttacaaatttgatgtgtatggttcttctgctttagtcatagaataaaaaatcatattcttacaaaaatcttatattcaagctctctatgaccatcaatgattttcattattttttttctgcttaaaaatccagagaatttctctcactgatttttgaggttttctgccatcttatgttgctaactttctttttattgtcctgtttgacgctgtagccacgcaggtctcctagtgcttcagctcaggctgttctttgacactcagtgccattctccttctcctccacactctcccatctaagccagattataacgtgttcagtttccagcttcataacttatcactgcatgactccgaacaaatagcctaacttctctgagccttactttccttatctataaatttgaaataatatccacatcacagtaattgtgataatg

SEQ ID NO: 34273 - DNA, 358 bp, Homo Sapiens
ggatgagccatcacctatgctttcccagctttaatttggagcaaaagcctctaccagtgtttttactactagtagctaacatcagtagcaatcatcatcattgagttaatattattaagaactcactatggggccaaacacctctgatcaactcattcaatactcacaataaccttgtagggtaggtagtatgatcatacagataaacaaacaggcctagagagatttagtcacttgtctcaggttataaagctaataagtaggactatatatttgattggggaggtcaatgaaccaaatttataattaagcacaaaataaacatatcaatactacattaagactgaagaaattttga

SEQ ID NO: 34274 - DNA, 442 bp, Homo Sapiens
ttttgctttcataaagcatttatttttatttgaaaacattatacaggcattacattgccacagccagtccataggggagcatgcaaatatcaaaaatggacagtttgttgaacttatcggtgtaacttttttttggttcgtattttccatttgcagtgttgtcagaattagtgtgctttgttatgtggcttaacaatagaatcctacccatggggtaaaatctgtactggtagctagctggggactactaaatagttataaatcaaaaagaaacccaaaacaaacaatactacacgcttgtcaaaaggttaatagcacaagttagcaatatctaaactaaacattgaaacaatttcatgggacacggtggtgcaaatttttccattgcttgatcacctggtcatgtatttgagagtatgtagatgtgggaaggtctgaccaa

SEQ ID NO: 34275 - DNA, 508 bp, Homo Sapiens
ggtaaaaatatttacttgtttataaacacaattgatatgtaagttgatgtaactattattctataataactaatgaacaatgatacacgttttcttatctaaggcattaacctaaggaagaaataaaagatcattagtatattgaacacatttaagattttcctattttgacttttctattttggctattttatttgcttctttttaaatcaacatttaaaaacttctatttaagttatttattgacaccaaaactgggaacgaacagccacattatgataaactgacaatgtttttgtaaatacatgacagagaatagtaattgccaacttggttattgggtttaacttactgttattgaattgccaacactgaatcaacaaacttgatttttacaacacagtggcttgttagttcctttttacttacaagcagtatgtcttatacaaattacttaatttagttgctggtataaagtagttcacatatgaaaagacagataatggac

SEQ ID NO: 34276 - DNA, 454 bp, Homo Sapiens
gatagtttttgtttgtttgcacaaatttctacaaatacttacaacttggagtggataagaatcactcctaaaatttcagagcccagagaggatattcttaaagacgccaggtagagacacacagaacgtatgtattaagagtttagaggctaattttcaaagatgtctgatgttatttttacatctatattagcaaagaaaatctttttttcctagtttctttttggctggtgtttggccttcttgtccttttcactcgtcttccttacctctatcagctttcccaatttctacaaggtttggataaaagccaacaaggactttaaagagttgcccctttgagggctggaacattctttgaaaatgccaaattgtgaatggtgctctttggaagtttctcgtagcacattcatacacaatactcggagtcaacatgtttgccctaagaagaaca

SEQ ID NO: 34277 - DNA, 517 bp, Homo Sapiens
atcttttatgctgtatttttactgtagtttttctttgttaggcacgtttagatacacaaataccattgtgttacaactgcctacagtattcagtagagtaacatgctgtatgggtttatagcctaggggcaatgggctatataccatatagcctaggtatatagcaggctctaccacctaggtttgtgtaaatacactctgatatttctacaaggatgaaatcacctaaggatgcatttctctaaatgtattcccattgttaagtgatgcatgactgtaattcacattttacagcacaaacagaattaataatttcgtgtagccttttagtgaaaatctattgtggccattagctgatattttgcatctatttcatgaagacactcaagaaactcaacaacagagggagcacacacattgccaaattcctgctgcaaaataaaaggcaggaatagaatcaaaagtttcctaacattctatcctgtacacaattgatagtcacatcatctacttctta

SEQ ID NO: 34278 - DNA, 420 bp, Homo Sapiens
ttttttgcatcttaaaagtcatttttaatcctcgactgtacacaatccaaatcttggtagcagcatctgacagggtaaataccaactcttgtgcaagggtcttttatatcctcaacccctctgattctggaaccggttccctaaacaaaggcagacttcttcagcttcttccagaatagacattagacatggtgacagtgataaacctttggggtgggctagtctttttcaacattgatggagcagaatttacaccctctgattcaatccatctcagtaaatgtcaatgatgccttcctatctacttctgctatccaggaacccacctctttagagtcaatgcatgtgaaaggctcatgatttgtaatatcaagaagtaggaagacaaagaggtttgaaggattctgccaaaggcaaagc

SEQ ID NO: 34279 - DNA, 464 bp, Homo Sapiens
gaacagaaactcattttattgagatgaggaaaccaaggcccaaaaaggtatggcaacttgcccaaggaaactctggtgcctcaactagaacctggatcttcaacttccaactgagagctctttccaacagtgttattactaccatgggagaaatgaagatatagtatcaaacaccataatgcaagttaggagcaaaaacaggacttgatttatcacgctatatgtaccaagggttaccggagttttctagcagcagaggagataatcacaaactcagcaccctccagtaaagtcattcttacaagaagccagtgaagaattcacaggtgcctgcccacccttcacaagctgccaagagatggacctaactccttaacaccaataattccaatacaattgtgaaatcctcaagttatggagaaaaaggagcatttctttaagagcttcagaatcaagacaaaaaa

SEQ ID NO: 34280 - DNA, 539 bp, Homo Sapiens
agagacaagctctcactctgtcacaaaagctggagggcagtggcacaaccacagcagctcactgcagcctcgaactcctgggctgaagtgatgctcttgctaaagtgttaggattacaaagtgttaggattacaggtgtgagccaacacacccaatcaagtatttatcgaaatagttaagttctacaaagcaggttaacagattcttaaaaattctcatttacctgggcaatgaaaaatttttttaaaaaaacttgaaacttagcctattgattagaattgacttttctaaaggattcacgaggtcaaagaaacatgaaaaatgctgctacaggatagaaaaaatgtttctcttaaaaggttaatttttaaaagacaatctttgcatgacaataagtgatctaaatgcaaagattagtgttaggaaaacaaacatgtatcacttgctgaaaaggatcctaccaactgagatgacaaaaagttcaagtaattacccaaagcaggtattactgagaacagctggtaaaattagaaagagag

SEQ ID NO: 34281 - DNA, 393 bp, Homo Sapiens
ctacaaaagttctaactaaagtctctcataagcaccaatctaaggaaagaaaagaatatggccaattcaaactataggggctattttattcatcctcgatttctataaatgtctacctgccttcttgtctagaagggacagagcaaaattatcacctatttgtataagcacctgaatatgctgtatttataatctggtaaaatatctagggacagagactttatatatatatatctccgttatcataaaaatgcagtctacttactatacaactattcctataaatagggaatgtaataaatgtacactaaattgtacagtactaaaatatctggaaagatagtaaatatttcaggttctgcatgtgatagtatctctgacattactgatctg

SEQ ID NO: 34282 - DNA, 472 bp, Homo Sapiens
ggggacagtattggccaaatggagcccttttctggctaaggtggggatctctctgcttagaaagatgactgcaagaagagagtgtttggggcactgcattgtgggctctggaagaaaagagatcttggaatgggttggattcttctggaaggctggaaagcacaacttcaatttttataggactttatagtgtttacacccataatctcctctgaaccttattataggccctggagcagggcaggcattattttttacagaggaggaaactgaagcttggagaagagtggggatggagctaacacttagtgtacaacgatgtttcacagagactggtctttattgagtgcaatgtgccaggaccactacgaacacattgcttgtattagctcctttaaccctcatgacaactctgtggaagtaggggatattattaatgcccatataacagatgggaaatctggaaggctca

SEQ ID NO: 34283 - DNA, 455 bp, Homo Sapiens
gtgtgcaaggtattttattgagtgttggtagctctcagtgaggtggacggggaggcaagaagagggatggagtgggaaggtagttttcccttggagggggctgccccgcggctaggttctcctccgtccgaccggccccagctaaactccgcatcattcagctggtggatggcctgctggcgtctgccggtgccggtcggtgtgccccttccaaccgattgttcctttcgacgtccagccgcttgtgtgttcctctggtgtgtttcactcaatgtccacccactcgtgtttctacccactagggcaccggggatttataggcacaggatgggggcgtggagggccaaagtcgtcttggaaaatggaagatttgggcacgagaacagaaatgcccgtcctcacctaggtccgagggcacaggccaaggggtggacccctaaccagggacccactct

SEQ ID NO: 34284 - DNA, 496 bp, Homo Sapiens
aatcgatctctttattattatataactcattttttgtctctttttaaatcttcttgacataaattttgtctgatataattatagctactctgctcgctttttgtttctgtttgcatgtagtacctttttccatttcttccctttcagtctacgtgtgtctttacagatgaggtgagtttcttgtcagaatatagttgggtcttgttttttcatccattcagccaatggatatctttttaaatgagaaatgtacattcaaggttattattgatagatgaggacttgtgcttgtcattttattgattgcggtctcaccttttgctctttactcactctcctattatttatttttgaagttgggtttctttctgtagtgataaggtttgattccttttcctttatcctttgtgttcagctctaccagtgagttatatagcttccagatgtaagactcacttgagcatttcttttaaaactagtctagtagtgatgaccg

SEQ ID NO: 34285 - DNA, 397 bp, Homo Sapiens
ctgccaagctgttctttatttcagggagagggcaggggaggcaaaccacatcaacccttaaagattaaaaaatttcaagttccctttcttttttgaaaactatttccctttggggattaaacagctcctcaaagaacccaggggagtcaaacagtctcaagggggcatttgcccaaacccccaaattggaaaccatttaaccccaaatgggcaggccaatcctgaaaatagcaggggctgcttttttgcagttctctacctcatttgacaaatctttgaggggaaacccaagcacttactggccctaagtcattagtcagggtttcagtcagcactggctcactatgtctttcaggccctaaaaagcaattgctgccccttctaaaaaatcagggat

SEQ ID NO: 34286 - DNA, 423 bp, Homo Sapiens
tcggccctgcccctttccggccgctctcactccttccctcggcctcgagttcctcgtaggcccgtgggggccgccgcggggtcggggctgcgaggcagcgcccgccgttccatggtaagcggtgctacgggacgttcggaaggaaacctcgctagagcaggggacgcctgggctcctggctgaccacggggcctttgcacggccagggctttgcgaaccgaagggtcttccttctgtccccggtcgtgcgccgtgcccctcagcgcggctcacgtttcggaacacgtctgcctttcatgcctcccgaagagcctccccgcatcccgtgccccctgctcgctgctgccgctgacccttgggcgctgcgctggtccagagcgtgttgtcctctgacgccgtcagaacctgagctccctgcgagct

SEQ ID NO: 34287 - DNA, 398 bp, Homo Sapiens
ggttaagacagggctgaatttattttcaaaaggaatttcaccatgtgtaaagggaaaacaaagtcaaagaaaccccaaagcacagaaattagtaggcaactaaaagcttttcttagctgggagaaagccttgtttcttttcctcaattcaaccctattggggaaaccatgacccgaggtcctgctgtttggctcacgctgctctcaacatcctgctttcttcacacaccctctccctcttgtcagatgggcaccagctgtaatgctataatgtgggagacaatctgagagtcagctttgtatggggcagtgttcatcagctgttcttaagccatccactttcctatcctattggtcacagctactgtgccttcatctgtaaccacatgcttatgggtc

SEQ ID NO: 34288 - DNA, 472 bp, Homo Sapiens
ggaatttatttttattttttaaattcacaaataataattatatatactcatggcatacaacatatttttatatatgtacatattgtgaaatgactaaattaaggtaattaacatctattactgcacatatttttttgtggtagaacactcacactactctcagcaattttcaagtatatgttatattgctattaactataattgatacattgtacaattgattttctgaacttattccacctaactaaacctttgtatcatttgaccaacatctccccagtccctccctcccccagcccttgataaccatcattctactctctgcttctgagtttgactttttaagattctacatatcagtgagatcatgtggtatttgtctttctggggcaaggcctgatattttacaagcttgacttttgtgtttggtactcattaaatagtttatatgcacaactccccacccacactg

SEQ ID NO: 34289 - DNA, 467 bp, Homo Sapiens
ctcaaactcataccacgaaattttattaaatagtatcattcaggtacagaatgagttagttgaaactgaaagaccaaccccagaatccatacgtaagtatcctctgccctctcctgcccccagagaaattttgactagcatcttcaacttgctaagatggggacagggactggggaatgccctacctgaagctccctttctctgatggccaaacagtactttagcaggcaggaggattttatatttttacctttatccaaaaggaaggataaggaggagaaaggactaattacaaataaatcaatctcacccctaacctcagtaccatcaaaacaaataaagtctcatgcttccaaagtagcagatgagatcatcctgaagcagagagggaaaaagtcaaaggcccttcttctacaaaattagagaagctctattaagcttcctaaggcctaacagagcttagccag

SEQ ID NO: 34290 - DNA, 405 bp, Homo Sapiens
gtaatgcactcatttttaatgaaaagagaaggggatattttatatgtcctcacatttggtccctttccgcgaaatttgaaactggagacacaaaacattccgcagttgctggtgaaatacctgctttaaaagcagaaccacagttattgtctttggcccggaattccagagactcatttccacccctcccacggagtcacctgctcagggggaaccccggccagaaagccgggtcgcgccaggtcaaatcttgcgcgtctcttgtttactccgccccgggcagggcggcggcgcggccagggggtggggaggaccgctggggcccgcggcgtcctgggcgctcggctctgctccgcagggtgcgggggctggggcgcccgcgaggtgctgcgcgcggtccccgct

SEQ ID NO: 34291 - DNA, 560 bp, Homo Sapiens
cttttaaaatacatttatttaagtaataaaatgaatcaattttaagaaacgtgaagtaaatagagctagtggcaagtacccagatatggtaaaaatacccagatatggtaaaaattcaaagtgttttttccagaatgactgatgttagggaaaatcctgccaaatccaaatgaggttttcgagtctatcaaaccaacacctggccaggcaagacacagccagtggcaccgcgtgctcccgggaatgggaccagcaccagtgtctgctgcatgcacaaggggcactctgagggttgggaaaagccagggctggccgggcaagcccccacggctgctggcatctggcagcagggccggccagagcccccgtattcgggtcccctctgcccttctcaaggaattgtcttcaaaccgtgaggtcagcagtgaacattcacagcactccaattcaggaccatgtccactgctgccagagactccagggccatcctgctagaaggttccttggaaatgcaatgggtcttccaaatattacatgtcatcctacacctccatgcttcc

SEQ ID NO: 34292 - DNA, 401 bp, Homo Sapiens
agccacaggaatgtttattccaaaaacgtttacactaccattaaattagaaaaccaaaatgcataaagaggagtataaagttggactctaaagtcattaaaaatatttaacaaaatgcttacagggcattcttatgtggggagagaaagcttacaaagcattctgtacaatataatcccatttttatagatgcacagaataatcaaaagataaatacccatagttgagagtggttagtagagggcctgggattgaggattcaaggctaatgctttcccctgggggctgggggtgtaactgaagtctacactcccagcccccatgggccccaagcaccctcacctggccctctgctaaggggtaggaagggggctgggaggaaaatgcaagacaggaggagg

SEQ ID NO: 34293 - DNA, 369 bp, Homo Sapiens
ttcaaataaaggttaactgatagagaatatggaagaagtgtgaaagatgaaaaaatatgagatgatttcagcagcgtcagacaaaatataagagaaactgccactacacaatattacgcatttcaaccgaattttacaaatttcctcaactgggtctaaattaagcccccctcgcccccaagaaaacctctaaaataactgccattcaatctcacaagaacagcctgatttttaaatacatttccattgtatctacttaacatagaaaagaaaaaatgtcttactagaaatgaagtatcagcaaaaagtgcacttagatatgatccttgcagaaaattcttgttcttttttcacaaaatgcaattcctt

SEQ ID NO: 34294 - DNA, 411 bp, Homo Sapiens
attctttatttataacaaagggataattaatatggataatttactaataaacagaacacaataaaacattcattttaagtagaatataaataaaatagaaatattttatgtaacatggtgagaaatgtttataaatgtaattcctatgacttgtagttgtgaaaaacagatgaaagatattctggagtatgtcactataacaaataccagatggttcctgtatcttgaatgtatatcttagttaattcacctcagtttaggtgaagcccatataagtatgtatatttttctagtatttcaaaaggtaaaatgctaacagtaaagaagaaaatggaggtcttttttagcagtcattcattcagtttctgattcaccaccttcattaactatctaaactctccgtaccataca

SEQ ID NO: 34295 - DNA, 369 bp, Homo Sapiens
aagggcgcaagaatccttcattagctgggaattctttccaaaataaccttcccattctctacctctccccaaactccattctctggctcttgtttccacagcaccctcatcaccaaagaagacccatctcaaccatcctccaatagaaatgggccatacaacgtctcccttcattatttcagagtgggggataaccctttatgaataattatagcaaaaaattaaaaaattttccaaaatttccattgggatttcattttaaaaaggccataaaaggggaatattggataaaaatagtgtgtgtccaaggtatataacatgatttaatatacacatgacattgtctactgattaccatagtcaaattaa

SEQ ID NO: 34296 - DNA, 412 bp, Homo Sapiens
cagctataaagagaattttaaaatgccacttctttcttaaaaccaaatcacataagtacaattctaacacttatactaagcgagtgatttccatcctcctttggaattctctgcttctagaattgtttcccatatgcttaggaagacaaagtttttatgggtagaacttcactataacaatggtatctggggataaagataataactacatttaggttttccacaataaaatgtatttttcatcatgatatatcttttactgcccctcaacccaacaatttgacctaaatggctgcatgggcaagaatttactattagttagtcatgtttatttacactttgtcttattctaaaaaagatgaaaagctaagaatcattcaggggttctacggtagtaagacttataaattta

SEQ ID NO: 34297 - DNA, 393 bp, Homo Sapiens
ctgtattttagtttttattctctcatctctcctcaaaaaccaaccaggaggaagtggaagacgagggcaggatgtatgcgtgtggagaaatgacagcatggctgtccagctctccaggttccaccccaagaagcctcccgggttgagggaaggcgttggagagagaggactcccggccctacccaggcctcgtgggagtttctgtctccaagggaagccaccattactaggcattataaaggcttcttggatggaagaagaaagggaccgactggggcttacctgtagcagcctgccgccccaggactggcccagcaggctcaagagcacggtgctcattcctgggggtggggccacctctaggtggaagatggtgaaggccctacaggcccc

SEQ ID NO: 34298 - DNA, 351 bp, Homo Sapiens
ggagagatgcattctcgttaccctcccgccttggcctatcacagggctggggttacaggggggagccgccgggccgacaggagtctgggctccaacacactctccaggggatgttggggcacactggggggggagaactgtttgtcagccccccactaaaattagcattttattcacctgatggaaataaatatcctccccaggaccaggtgtagtggggaaggggaggttccagggaaagttgcgaggctgttcctgaggagggtgtgccacacaaacaggcacgcaggttgagattcttgaccaaaagcagcctttgactagtgatcctgggggataattaccatctgc

SEQ ID NO: 34299 - DNA, 433 bp, Homo Sapiens
gggctaggatgacaggcatgagccaccgtgcccagccttgcctgcgcttttcctcccacactccaaccagatccgcagacgaggctgaggggccctccatctaatcagaaagggcagccctctgcatggacaggcccataagcatgtggctcagcaaggacgtggcattttgtccagagtgcacaggccaacacatgtgcacacacaggggcgtaaggccaccaggttaggtctctgttctgcacatgggagggccccgcatccaagcttcctgcccttagttcccgtatgttgttcatgcaccactgtgagacccccatggccctgcccgctgctgccctgcccaccccctagctctggtgcctcaacctccaggactgcaagcaccccagtcctttctctcacagactcgccttacctctctgagacagaa

SEQ ID NO: 34300 - DNA, 409 bp, Homo Sapiens
tgctgcttggagggccgccagcctgctcttcggtcccggaggaccggcccccgacaaggcgggcttcgtgatgacccctgcgctgggcgaggtgggcggacacctgcgcggggcagctgtgtgcctgccggaccccagcacccgccaagcactttctggcagcggccaagggcgccctgagcctgcaagagctggagcggcagcacgaggagacacagatgaagctgttcgggcgcgcgcagctggaggctgagaggaacgcggcggcctcctggccttcacgctggccgagaacgtggcggcggcgcgaccatacttcccgctgcccgacccttgagccgccggcctggccggactacctgggctcgccggcctcaaccacgtggtctccatgttcgaagtcaacaac

SEQ ID NO: 34301 - DNA, 448 bp, Homo Sapiens
cacagaacaagctgttttattcctcagatatacatgtctctacaatgaaactgcacacaaggtcctacttattgcttgccccagagagtactgttaaatgtacagagactgggaatatatctaaatgtggagacactggtgcctgtcattgcttttggggaagaggcacagattaccccattgggcaccaataagactggagcacttcagaattagacagctgggatggaactatagagcctaccaaactgagaatcaaccttgtgtaccataaatgtgcttttcttagaggccaatcccacagggactaggacacagaccccatagcaatggtagtggctgcattactaataaaaatacacatgattcagggatacatggtatcaggtgcaactgaccacaaccatctcatggtaaatacctaagccttgagagccttaaacgctat

SEQ ID NO: 34302 - DNA, 360 bp, Homo Sapiens
tttttaaaagggaaaataaaagaaatttaaacttccacaaattctatctgtatatttcaggacatactctaggaaaataaaggacaaaatcattaggtaggaagacatgggacctgggaaactgcaggttagaaagaactagaggttaaaaggctcaaagaagggagaagctatttaattcaattgaaaatctgattaaccagctagataaatttgactaaaagtaagtttgttcattaataatattattataattacatcagaatgacctagctgaatttgttaggctcaaaatctatgactcccagacattcatttgactcaatatacattattatactttaatatccaagaaatgtt

SEQ ID NO: 34303 - DNA, 447 bp, Homo Sapiens
gagagctgattatttaatgaacaacttataatcttacaaaataactggctgtagctgttttacattacaatacaggagatcaacttctttcactacattcccaatcaagccatccccttgggtgttaactaatgcactcaatagtgatcacaaagaatacaggaagtgccaagttcaatgccttgtaatataaaaaagagaagatgagaatcaggaagagctctttactttcacaatccctttactataatgtctgacagtatatggccattcttcttaccctggcccctttacctgcctttctgattggaggctgtcatgctagctgttagagccagctagccctgggccacctgggcacaatcaaacacacagaagagtctctgagaaaggctctcaatgaccacatgggtggataagagtagcagaatgtggaccaccacatgg

SEQ ID NO: 34304 - DNA, 420 bp, Homo Sapiens
ccagcaatgcactttgtctccttcctttctgggtctctgatgacttaaatgtcagactttttggtgctgtgtgataggtctctaaatctgtattcactatgggttttttctctgttttttagattaggtcatggttatttatttatctttaagttcattgactctttcctctgtcactcagttttgctagtgagtccatcccatgtgttttattttggttatgattacatttctacattctaaaatttccattttgttctctttatattttctatttccctggtaagaccttctattctttctattcatgtgaagcaaattcacccttacttttggattatttttattatagctgctctgaactctttgtcagataattctaactctgtgtcatctaagcattggcatccgttgactgct

SEQ ID NO: 34305 - DNA, 445 bp, Homo Sapiens
ttatgataactcaacaggatcaattttatttacatgctgaataaatgaatgaaacatattctctacatccataacttaagtacaatcagttataattacaacactgcagcaatctgagctgccacctgctgggatcggtctaagggaaacgttctgatgttccagaataatgttcttaatactctgcaaaaaatgaaacaaaataaaaacacaacttcacaattccttactgggttacgggtggtttcaagaatttcttttctttcactcctgttttgctgctttccagagtcaacacacgttggattacttctgaatgtcaatgaggaatgtgtgcatcagtgaaataaacagaaaatcattcattcatgcctttgcacagcttttattattaagctatgagcatcctgtttgaggctgtttactagcggtatgtgcacatttg

SEQ ID NO: 34306 - DNA, 499 bp, Homo Sapiens
ttccttctgttgggataaggtccaagcctctcagcttcgccagtgtgcacacacctactaccgcagcttcctcttccctcccactcgccagccctctcgctggctgtcccctctcccagcaatgccattctcccagcaacacccttctcccagcaatgcccttctcccagcaacacccttctgccagcaacacccttctcccagcaacgcccttttccctggaatggcccttctccccacaatgcccttctctctgcaatgcccttcttctcccagcaatacccttctccccgcaatgcccttctcccagcaatgcccttctcccagcaatgcccttctccccacagtgcgcttcttctcccagcaatgcctttctccccgcaatgcccttctccccacaatgcccttcttctcccagcaatgcccttctcctagcaatgcccttcttctcccagcaatgcccttctcccagcaatgcccttctcccaatgcccttctc

SEQ ID NO: 34307 - DNA, 395 bp, Homo Sapiens
tttgggtttaagggattctactacctcagcctcccgagtagctgggtttataggcatgcatcaccaccccacgctgtgttttgcaaaaaagggttttggcatgtgtgccgggctggtcttgaaccccttgacttaaagtgacccacccatctaggcctccaaactgctagcattacaggtatgagccacaacacatgaccagtaattttttgaagtgtttaataaaagaaacagaagttgatagagggaaaatatttaactcccaaaaaaggattatttatgtaaatatctaattataactggatttataacaatatcttcaaattcccttatttatattttcaaccaacattttgacaaaaattgttaaaattttggtatgaatttgttatacg

SEQ ID NO: 34308 - DNA, 399 bp, Homo Sapiens
aataaaactagaatttaatgacaagtgtgataagttttgaaactctccagtcttcatttttgttaaaaacaaatcataataggattgtttgcaaaataaactttagtcttatacttggcctgattatttgcataaagtacagcaagaataattatttttcacatatgcttttaaaattggctctgatggaattctgttccataaggaatatcagaaaagactttttaaaagtcaagcccagcaatgggtttgtaccctccaatacctatgagttgggtaaattcctctcttcttgaggtcccaagataacttggggctcctggacctgttagaaagtgacattctttactcatcacaggttaggagccctgtacaaggactgtgtagacaaggtatgag

SEQ ID NO: 34309 - DNA, 458 bp, Homo Sapiens
gggatcacactgtttattgttctgatgtctgtgtaacagaaaggtgttcagccttcatcagtgattttctcgtacaccctggcaagggttcctttcatctatgagcgagagctgatgccagatcacatccatgaactgcacccaacctcgctgcttccaccttttcaccccttaatgccactgtataccactgtctcaagcaactccacccttttctggcatttggcttcagcaatggccacacaaagggcacacagcgctgaatttaatcctgactccctgaaacaaaagcgtttccatttcaagatttctgatctcatcgagtagtatctgattgttttttggtatgacaatataaaagtgactctaccagatcatacacacgaaccaacagaaaacatctctgtgaggtgtttactggaagaaagacctttagtgctccatgaattcttttcaga

SEQ ID NO: 34310 - DNA, 478 bp, Homo Sapiens
ttctctctgccctttttattctccccaagaacactttgctttatgtagtagccctttgaatgttatcaatacctaggcttccattcctagccttgacatcaagagatctctctttgtgaagttacacacatccttagttctaattatgattagtatagtatatgcacacatttcttacttggaagactttagtatatctttagagctatttctgtttccaatctcatgggggttcttttctaatctcttttccatgcttcagctttcatgatttttctaaaatgttcatttgctattaaaacatttaatacttctctactaccatcagggtaattactacttccaagccatggtggacaggtgaattttcttcagttcttgcctacttttccagcttcactcatcaccactcacctgtgtactatgcataacatctctcacttaaaatattcacccatccttttgcctacaatgcctg

SEQ ID NO: 34311 - DNA, 458 bp, Homo Sapiens
tttttttaaggagaaatggtttcttaaatctactgttgagtcccctggtgaggactgaaataagagataaacaaggaattctcaaatgcatcatgtttgatattacattctccttcgtcttcataatcctaagaattccttacgggaatattcagcttggaaaagaaaatggcagaaaacgtgaaggagaggaaaatagcagatctgggcagaaaaacatgccccctgggaaggcgggagcctggatcttgactctgatatgggataactgaagctcagaggggaccaagtggactaaacagcttctgagggtctttaatgttctagtagtctatggaattaaaatgaattttgttttaggaatattttgcagaatttgataagatctgggggtatagttggtgatattatgggaccaaagcaggatgggaatatcactaggctaagtaaatgtgcgc

SEQ ID NO: 34312 - DNA, 381 bp, Homo Sapiens
aataaaaaggcaaaagacatttaagatacagtggaatgttaatgttctatatgtcagaaactaagttgctaatatacacgccttatttaagagtcttatagtttagtaatttttaccttttggaatgaattctggcagagcattagataaaataaaatgaataactaataagatgaaacataaaatacttaaaatattggtataatatgagcagggcctacgtcaacttatgagttacttgtggctagtaaaatggtaggtgccaccacatttgcaaattgcaaagtaatattttgaccaaataatatagaattcaactgtaaaaaacaagccaaaccaaactcaaacccactcttatcacgcatgtcaggaaacccaccg

SEQ ID NO: 34313 - DNA, 431 bp, Homo Sapiens
tttttgttgaaaaattgtttaatcacgaaagggtattgaattttgtcaaatgctttctctgcatctattgagatgatcatgttatctttatatctttgccctgttaataggccatttcgcactgatttatttttgtatgttgatccatacttgtatcctagggataaatgccactcagtcaggatgtacgatcatttaaatgtactgttgaatttgatttgctagtattttgttatgagtttttatatgtatattcatcagagatattgacctgcagttttcatttcttgtggtgtctttgtttggctttggtatcgggataatgttggccacataaaataaattttggagtgtgccctcttcttcaatttttaaaaatagtttaagaagaactggcattaattcttctttgagatgtttggagaattcac

SEQ ID NO: 34314 - DNA, 357 bp, Homo Sapiens
cacgatgtatatattttttcactatatttactatattaatatacatatatatttcttttaaaccgggttgaccaagctggagagcaatggcacaatcattgctcactgcagcctcaaattcctgagctcaagccatcctcttgcttcagcctcctgagtagcttggactacaggtgtacaccacctcaccaagcaaattttattcatttatttatttttgtagaaaatggggacttgctattgcccaggtttttctcaaactcctggcctcaattcaccatcttgccttagcctctcaaagggctagaggagctaccacaactggcctcataatatatttttaagtgatttccttta

SEQ ID NO: 34315 - DNA, 471 bp, Homo Sapiens
ttaaacttaaaaatcagtttatcttaaaatttttttgaattagaagaaattgatttcacatgaaaatataacattctgaaggtaagtattttaaacattacaactgttggctgaaatatttacaaagttataataagcttataactggatgaaagcatctataaaaataaataggcaccctagatgtaaaaactttacatgaaataaaatgattagtatatatgtatcaatctgtatctggagtgttgaatcaacataaaaataaatgggcattttctagtttgtgtagtagtacatgagtcaggaggtttcaactggacagtacttaaaagaggcaaaactggacatttctatttgatatctacaactcaactgagttgaaaagacaaatgtctgagactgctgttaaatacaaaaattagtttaaatgtttcaaataatacatttccaactcacatcttaaccaaatag

SEQ ID NO: 34316 - DNA, 527 bp, Homo Sapiens
ttttggttaggtaacaaggttttaattacctgactattagaaaaataataaaaatcttgaaagataagattttatcaatttaaccatgtctttatcttaccttttaaacaactaaataacacaaacctcactgaaacatttgacctgttttctttttctaaaattacaactatttttgcaatatgctcaatttttccaaagcaaaacccacaaacatacatatagaatataaatgcttaaattcgcttgatgaaagttcaatcacaaaaccctccaactaatactaaaataattaaatatcttgcacgcttactccaaattccaccgtgaaaatgatgtcttttcataactcctataatagcattttaatcaaggttagtaacagactggaaaatttgtgaaaagaacattactttaaaaatcaacatgaaagatttcacaacttttttagccagtcagcttcaaagacacaatttgattcaataagcgttactggcatattatttccaatctacgtgaaaaaacgc

SEQ ID NO: 34317 - DNA, 357 bp, Homo Sapiens
tgagccgccgcgcctggctatcaggtgttttcatattctgctccacagacctcttgcccccaaaccataggttcaagtaaatgacattctttgacctactggttattctggtcaggcatcaaaagaaaattgcaaattttccgtaggttccatgttcacgtgcatatgaaataaacatgactctaaaatttattgtgagactgttttcgtgcattcataaaatatgtatgcgacccatctaaggatatcagtgcaatgttgacatgccattttctgtgctgaaagtctcctgtgagagcctgtgtttcagtgctttctaagaaaagtttcaatctaaagttgtgctgctgatgtatc

SEQ ID NO: 34318 - DNA, 423 bp, Homo Sapiens
ctcccccaaaaattccttttcgggggagaataccaaattttaaaatccgggggtgggtggcttttcttctatagaaggaacatagccataccccggaagcttttagtttccgggggggtccccggaagccccaacctaaactaattttcaaacccattggttttttccagacccaaatggatcccccttcacccaataaacggggaaagaagcctttcaggttctctttcatttggctataaagcattttttctttggcctaaaggcaaggggagaaatggggttttttctccttttaatggcccccagaagaggccctttctaatttcggagaaaacccgaaattcaggtgtgaatcttcttcctctctttggggggcaaccccagcatatcttcatggctggaaattcagggctggggaat

SEQ ID NO: 34319 - DNA, 427 bp, Homo Sapiens
ttgtcattaagtctgacatgtgatctactattaagctatcttccaccatcatacagattatattcattaaattaaaacctttttttggttcagcacacttaagttcaaacataatagtcaatactgtgattactgaatcagataacagttttccaatattgaaaaaagtatttcctcagttttggtgtgctaatcacaatgtaatagctactaaaaaaacatgcttttaagtttaatttgcatttttaacatttactcatcactttttaaagtctagatgaagggtatagaaacattttctataatgggccaaacagtgaatattttaggctttgtgggtctaacatctctgttaaaactactctgccatggtagcataaaactagtcacaaacagtacataagtaaatggacatggctgtgttcca

SEQ ID NO: 34320 - DNA, 437 bp, Homo Sapiens
ttgtaggttattttcaccttcttgataatgtgctgtgatgcacaaaagtttttaatttttatcaaatccaatttatctgtttttcctttctcccttgtgcatttgatgtcatatttaagaaattagtgccaaattgaaggtcatgaagatgtacccctatgttttcttctaaagttgtattgttttagctcttctatttagatctttgatccattttaatttttgtatattgggtgaagatagtggtccagcattattctttttgcatgtggatatccagctgtcccagcaccatttgttgaattgcctcttatttccctgttgaattatcatggcacagttgttgaagatcaattgaccagaaatgtacaggttgacttatggactcacaattctattccactgatttatatgtctatcctttgctaccttttgtg

SEQ ID NO: 34321 - DNA, 427 bp, Homo Sapiens
ctaatctgccaattaaaatcattccactaaacttttaattttaaagattgaaactttaatttctaaaatttctatttggttctttttaaaacctgtctgatcattttagtagtttcatattctttgctcacattttccatttcatctcttatttctccaaaagtttcaaacactcatagatagcactacatatattctttacctaaaaattccaatatcttaagtcctattcatattaattgtgctgtctgctgagtctgctggttctcccttatggtggcttatttgtgtatttttaaattttggattgtaagctcagatctaatcttgagaatcctaggaggcctgggtttacggtctatttatccagagagtttgcactggcttctaccaggagtcccagatcactatcacttcagttctcagt

SEQ ID NO: 34322 - DNA, 382 bp, Homo Sapiens
agtttttagcttctttattcatttgaacacttcaatattctgtcttcttcaatgattcccccttgcccgtattttcagctggaacagtttctcattttccctatttctgaacactttcaggggcttccttcagtgaagcccaacacacaaaacgtccctttcagcaaaatctcagcggtggtgctaagggactaacacagactttaaggtcacaaaaccattgttttaacatttttctctgtttcttttctgataatgatgacagttctgtctctattatatttgttgaaacttactaggacccagtgatactagctcatcctctagagagaggtcccaagagcattacaccagatctcctacgaagatgtgggatttcctc

SEQ ID NO: 34323 - DNA, 425 bp, Homo Sapiens
ttttttacatttattgtgcactttatttctattattattactttgtaatatataatgaaataattatacaactcaccataaggcaaaatcagtgagagccttgaacttgttttcttgcaactaggcgatcccatctcggagtgatgggagacagtgacagatcatcaagcattagattctcacaaggagagtgcaacctagatctctgccatgcgcagttcactagagggttcacgctcctatgacaatcaaggtcgccactgatctgacaggaggccaagctcaggcaataatgctagtgatggggagtggctgtaaatacagatgaagcttgatttgcttgcctgccactcacctcctgctgtgcggcctggctcctaataggccagtactgggtctgtggcccaagggttgggggacccctg

SEQ ID NO: 34324 - DNA, 448 bp, Homo Sapiens
aaaaatcaaactattttactaagttaacatctcattcaattagttgtaagttgtaatagcggcatattttacatgagactattagaaaaggataatattaagtcattaacattataaatctgaccacttttattaggttgaggtgaaatagagaaatctctactatcctggagagaaacaagcaataaaaccatgtattacaagtttaaagaaatgaatttatcctaaaatcatcagtatcagcaccccaacaaagcaactttgccatttctacttaaagtacactgtagcttgatcagacacttatctcagcagtacttgtttaagcaggtctctttgtacaaaagcaaaacagaaagcaaaacaaaatccatagccattatttaccttgcacccagtaaaagccaagagatttaaggtaaggacattttctaatcccatacccatg

SEQ ID NO: 34325 - DNA, 385 bp, Homo Sapiens
taaatgtcaatgattggtgataatccacattctaaacttgtcccagggtacattatataggctaaacttccatttgctgtgaagggactctagacaattctatgtagggaagaaaggtttggcaagaaaagaccaagctagtaggtactgagcagttgtggaagttacacttgaaggagttagcactgttgtaactataacaaagcaagtaagacaatcaggaaacttgcagataattgtaaccaaggtcatacagatttgcttatatgtaaaacaaactgaatcaagtccccctagtacatcatctggggaagaactgttaatcagaaactaaaatgatgaaggaaagaatttactctttggatcctgatgcaaaaggtcaagt

SEQ ID NO: 34326 - DNA, 379 bp, Homo Sapiens
catcagataataattagtaattttcaagcacagacgatccacaggaatcaaagaatcaggagggtgaaaacaataagttacaaaggccatttgcctcaacacataaatgagaaaataaacagagataaattaggaggctgccccagtgtaagttttgactagaatttgagtgttctgattcccgatctatacttcctgcatctctcctaaatccacagcattaaagttaacatttgtaacaataactcaaagaatttttatttctaaagagattcagcacaatttccacatttataaataccacagcaaaacacatttttggaaaagtgaagttggaagaagcatttattatagttcctgagaatggcttactgaatct

SEQ ID NO: 34327 - DNA, 377 bp, Homo Sapiens
agcggccgccggctctggttggggctgtggctcctgttattgccaccaagtgtgggtgaggcacggggctaatgccatggtgtggccagcaggatgccacctcctgagcgtgaggcccatgagaggtgggcaaggccgagggacctgcccggctgaggcttccccatcctgggccaaggcctccaaggggagcagttttgagtcagctaaaaaacaaacgctgctgaaggagtcccggtccccatggaccttcaatggctcccccagtccaagccagcaccccagaggccctccacagccccagcagcccccaaggctgcaggccagagtagggccaggctcctgatccccagtctccgtctctgcaagaacagtgt

SEQ ID NO: 34328 - DNA, 372 bp, Homo Sapiens
aatggggatagatttttattcagaaatcctttcatattcactaactgcaattaaaagtttaaaattacatggctcttaggaatgacgccaaacatgcaacattttaagagtaatattaaacagtaattttgccctcagaagtttacttatcaaattattacaacaggaacacaaatagaccacatattactctttaattagatttgttttacaatatgttcttgtcaacgagctatgtcaaactgtttgtttaaacctgacagaaaagcattttcacaaaaacgtaccatggagagggagggggaggaggggaggcactttttctagagatggaaaatagttccaggaaaaagttcttattcctttcttcta

SEQ ID NO: 34329 - DNA, 385 bp, Homo Sapiens
ggtgttttctgactttgtatgttcaaatagcctgtcttcaagctcattaattatttcttctgatgattgattctgttattgaaaggctgatgcattcttcagtatgctaatagcatttttcagctccagaatttgtttgattcttttaaattatttgaataactttgttaattttatctgacagaattctgaattctttctttgattttatcttgaattcatttgaattttcttttctacaagacagttatttcgaattctctcctggaaaggtcacatatctctgtttctgcaggattagttcctgctggtttatttagttcatttggtgacatcatctacgtctggacattgaagaaataggtatttattgtagaactcagtc

SEQ ID NO: 34330 - DNA, 476 bp, Homo Sapiens
tcaattctcaaatccttatatttgagggccaaatataagcaagccacaaggcacccaatggtagcccataagtatgtgaaggtaaccaactaaaatgacttcaagatcaggcaactagagagaaagtcttccaaccacagccatctctacgttataaatttgttggattgaccttgaatatattctgtacatcttccatgaatccattatcaatgttgctagtgtaatacacaagaaaacccaatgagagaaattcaaatattaagaaacaagcttttgttgattgagctttaaatggccacacaccattataatatctaagatgcttgtgctccccaataaccaatttttgcctccaatgaggatgcaagtcctaacttctatgctcccgaatttatcatactagcacctaaaaaacacaaattaaaaaatcaatttagccaagaaaacctccatcccacagctaccatgggagc

SEQ ID NO: 34331 - DNA, 357 bp, Homo Sapiens
tatgtggctagaatttttatttttcctggggttttttgctcagatgcttccccatcccaattgaggagccatatctgagtaagactgaggccagtgtcagtctttggcaatagagtgcagcaaaccaggcttggatgtggctcagccacttttgctcttccgatgataccttcccaccaccccggcctttacgctgggcctgggtgacctgaggcagcaactggatcatagtgccaggcactgagtaggtatggttcctaatttttaaaaactattttcctcccaattctacaagaaaagctcatctcagaaaaagattagctcactcactgtcaggtataaataaatgacaacagt

SEQ ID NO: 34332 - DNA, 486 bp, Homo Sapiens
tttttttgattccaaacaacttggaattttattgtaaacatcccataaagaatggcaacaaattagtccagtttttttgtctttgaagataattgcttataatgactgataactgccaaacaaaacatcttttataaatcaagccagtttatattaccttttttactgaattttagtttaacggacattttgcccatatacaatatcatatcaactatgaactgattttccatcttaaaatgtatggataccaagaacaaaaaaaggtacagttatgttaatactgtgtaagacattacaaaagacaagaatgataagttacaggacaaagaaataaattactgattgccatcaccacagtattgtttaagaattaacatttgtagtactgcctaatgtgtatctggtgacatatgcaaaaacacatttcccaactggatttctaaatatttttgcatatcattttaaaattcaattaccaatggt

SEQ ID NO: 34333 - DNA, 490 bp, Homo Sapiens
aagatactttccactacacatagaaacagtccaaaaacaactcttcagtaatactgccagttagctcagggacagtgactctattagatatcatcatttaaatgcacaaagataaagttcctttgagtagcccacagaggccatttacttattagagcaattaatttattggattcagatattcatttcaccattgttgcctttatggcaaaacatcttctcctgtgtggctctatctaccatttagttccattcaactcatctctcctgagtgcctactgggagaaagttacttaaatttagtcacattccctccatggccacatctagatctgtcacaccctctgtcatctccatatgactgtaatggtcagcggaatctgcagaacagcagttttcatgttcctccaacagcttctagaattcttccaacttctgcaattattataatactatgtggcaataaatggtggaaactcagccctgtttg

SEQ ID NO: 34334 - DNA, 485 bp, Homo Sapiens
ttgtttctcagagtgtgatactttaattccagaagaaatatggtactgatgaaaatcaaccacagtctcattttcaacagtattaaggcatcaacagcagcaggaaaggcttttacccatttaaactccaggcctgatacgagcacacaaataaaaaggatctgatacaacaatatctatcaaatagcaaactgtgctgttaggaactatttaaattcccacaagaaaacaagaatatttccaaagtgatatggacaattttgagcagcttcttaaaagaaggtgaagagagctaagagtatgttaaactgttcaattgtatctacagttcccacctttctgattactaccatttaagagtgaatttttactgcctaatattcaatcaggtcaatcttttcccattcaggtaaatgccaggaaaattttaagaatatctaaaattaagagtggtagactgaataaaagtaaatgtcacatacctt

SEQ ID NO: 34335 - DNA, 468 bp, Homo Sapiens
aataggcaactaactggttaatacaattgcgttaagtaacacaatagcgaatgcaagtgtcaatacataacacagaatccatcccatgctcttccataccaaaaatcaattggcttatagtttcctgcttcagaaacctaatttccactccccgtgtgcacccctttcagcagttattctgtatatctgccaggtttccaactgtagctctcagatatacctctagggaagataaattaaactacttcaaaagtaatttttccaccaactgcttttgtagggtcagttcttcttacatccctcttataaagcatcacatgagggaatacaaaatatcttttgagtggtttcaatctttacccatttatggggaaaaaagactttttaaaataagcatttataaagcgcttactatctgaagacaacataaggggaacgcaacgattagaaaaaaagatctgtgagatt

SEQ ID NO: 34336 - DNA, 396 bp, Homo Sapiens
gttcagtatattgagattaattttattctcatgggtaccatttcttcagtttcttggactaacagtaatttgtttccagagaagtgaacatgtgccaaaataactaagccaagcagcacagttcaataagtttttccacaaacatatatatttttaaagtagataaatgtttccaataaacaaaaggtctcgtatttgtattagtaatgactttctataaaagtaaaataaaattcattcaaccaagacatgtcagaacttactagattcagagagattcaaaaacaaacaaaaagagctacttgcctggagctccagcctagtagaaaagagacaagtaagcaataattacaatataaggtaatggggctctaataagaatgtgagcaaaatgct

SEQ ID NO: 34337 - DNA, 379 bp, Homo Sapiens
tacactgttgaaacttaacatatcattactttattgtgactcaagattattttcatctgtattaagtatttgcaaaatgcaacataggaatacttaataacactgtaataactctatcatctctccataatttatgcaaaaattttaagtttttcccccatcgtcacctaagacatttctaatcttttataattagttgactcactttcatatagtaccaattaacattagcctaatgaaactaagtcaaatatggtcaaaaataatcatcatgcatttacaaaacaatattatttgccagtcagagtcaacttttattgagcacctcctatattccagaaccaaaaaaacatgttgttccttacaaaattctcaaagc

SEQ ID NO: 34338 - DNA, 449 bp, Homo Sapiens
cttctaagatttattttataaacatgtaagaaaagttgtagatatttattgtgggtctggttatgcaagaacaatcttcctggacacagtgtgcgattctcagtatcaaaagcattctcttctttcagttcgtaaaagaaaaacatggtttaacttctaatttactgcttattataaggtttaaaagcaattactgtacttatgtatcgaacttatttgtgtagcaactaattcatctgtgaagccatggtttgctgtggcttcacagtaaattttgacttaagtctaaagcgtgtgttagcatctcaccgtaacttaatgcttcgagtgagaagtttgaggaatgctgctttaggcaaaagagccactggaggaatgagctctgctcttttcacctgctctggactgctctcactttcctcaccgacaggaccacaggcttaagaact

SEQ ID NO: 34339 - DNA, 426 bp, Homo Sapiens
tttttttcaagatatttcaacatctatttcctaaaaacaaggacattctcttacataaccacagtacaatcctcaagaccaggaaattaactttgatacaatattatactcttcagacaatattcacattttaccaactgtcccaatgatgctcattgtaataaaagaatatcctggatcatgcatcacatttggttcccagtgtctctagcctactttaactggaatagctcctcagtctttctttgtctttctcaacattgccgttttttaaagagtacagggcaattattttgctgaatgcccctcaatctgggtttgtctcttgtctcttcataattagattcaagtagcgcatctgtggtagaaatgacacagaaatgttctcagtgcatcctttcagggcagcagtagttgtacatgtac

SEQ ID NO: 34340 - DNA, 398 bp, Homo Sapiens
acttgttttaaaacattttattagatgattttttggattttgagtatacattcctggcccgttacatagcaggagaatgttttcttaatattaccagaatttcccctaatcagagctccaaaccacatattggccactttacaagaaacaagagccagccagttgacatctctagctgaaagccaataccagttttttgggcagttccacagccaccttttattaatttaaaatgggggtgaccgaaacattttaagaccatgactgtgggtcaattccctgggaagatgctcatttagaatgtaccagatatgctgtgatgttaaacttcaatattcaaagaagtttttcaagtatattgtatagtagttgcagattctaccttataaactgggtgt

SEQ ID NO: 34341 - DNA, 514 bp, Homo Sapiens
ttcctgagtgtgacatgaagcctctgcagtgttttgaccagggagtaatctgtttctctccggtttgttaaacactcaaggacagcaggctactagttaaaatattgagctctggtcttaatgcagcttaaataatgcagatagttgttactttattagtgtcatttagtatgttgcccttaaaactcttcagggaaacacaaattgtctcagtgaatacagaaacaattcccttcctcatttattactatcagatgcaaaaatgatgtttaaactgggctatgtaattgatttatgcagcagccctaggattcccatagagaccctcctgaaattggctagaactctgggcctccggttccacttcctgcacttgccagcactccggtgggcatcccctcctgtcatccttgccgcctgcctgctcttcaaccaagcactcttccttccagatgcttgtgcaggcaggagtgagggaaatggcaccggatgccattctaatgattttccagct

SEQ ID NO: 34342 - DNA, 376 bp, Homo Sapiens
aacaatctgtaccaagtttcacagattcactgttttttctttcctggaggaaattaccctacacaataaaactatattcccctcgtgttgcccctttcttcaaagtaggtcagcaaaccctcgagcatatgttatgtggaaggaaggctctgtggcagataacagctatggacactcatctctgtcctcaaggggtttacacttcatttgcagaaaaacaacaacagctggcaggtattgaatacctcttgtgtgccaggcactattccaggcactttgcataggctatcgcattgactcctcctaacatgcttagtgaggtggtactagtgggtgagaaactgagaggctcagggaggttttgtgttttgcccaa

SEQ ID NO: 34343 - DNA, 372 bp, Homo Sapiens
ggaaaaatttaatgagataacttaatgaacattgttggtcatcttaaaagaattacggttagcaataaaaatccagcaaaggcaaccacataggctattttcattgtctaaaatgtgttaactatatacagaatataaatccctagaatacagtattaagtgggaaatttttctttatatatttgtattttaataaaataacagcaatatctttcttaaacatgcatttttccacctaacagtatccatttagttaatataaaatttatttaggtagaaacaccaaaacaaagatacgaccaatacacttgtggaatacaattaagatagctcttcacattaaactgcagggaccatctttgtttttcagat

SEQ ID NO: 34344 - DNA, 446 bp, Homo Sapiens
gaacttcaatttttattcatcacatatttattaaattccatatttattatgttccaagtacagtataccctataaaaatagtagaatgaaacccaaaaggaacagagttgtttcaaatacagcaatacttatgtggaaggactaaattattcttaatttcttcaacttcattcattcattcaaaaagttaactgagcatttggtaaaagttaagtgctaaagtcaaacataagtaagtggaaaacaatcaagtacaatacaatgggattagtgccaaaacagaaatttttaaaaggttctaggaagccctttatctgctgaggccgatcaagatagctttgcaaggggcacttgagcaaggccctgaacaactgagaggctatggtttcataaccaggaaagcttaactgccacactaaatagtaagaatgtagtgctacataaaa

SEQ ID NO: 34345 - DNA, 469 bp, Homo Sapiens
ctttttaaatatacacatatattttattttaaaaagcacaagaacattatacaagttttaaatttacatttttgcaataaaagttatcaatatatgcattatttgtataacttcatcatggatggaatttgaatcagtggtataaacatgttgcagtcactaaatatagatcatcatcacagtgaaccaaaatgcatagttgttatgaaatgacaaatgaccactaaaaggtgaactcacagcccatacaccaatataataaattaattatacagatatatttttcttcaccatatcattaaaattctcactagccccttaccaaacattagaaaaacacagttctggagccatcctgttgaaccagtgccttcacatactacactaaagaaaataaagtgactcagttgcttgtttgtaagtaaacttcataagcataattgtttgcaatgattaaggtaaatcacta

SEQ ID NO: 34346 - DNA, 402 bp, Homo Sapiens
atactacattttaattacagaacagtctactgtccaaaaggcactaatccagaataggagatacaatgatacaggactcatttgaactattttattcaaaacaatagagcgcttgtttctttgaccatttacatctagaaacaagggctttttgctacagccattacacattgttataaatatgagtcctacgggtgaaggtgcagtatcactctccctagaggaggttcccattagtgggaccactgtggagctcaaaggcggatggcgcagtgggtggggcctgggacctgccacatggttggcccgtcagcccctggacacccggagcttgtctttcagcctggcctctggtggttggtttctggccattactggcagccactttcaccccctcttgtg

SEQ ID NO: 34347 - DNA, 410 bp, Homo Sapiens
taaaaaccaaatttattgaccttaacctgattggctaaaaagataaattcctccaagttacaaaacaataccgtgagcaaaatgtattcaaatgttttgcaaatcctctctcagccttacaatttcaaattcaatcagggtcaataaaaaccaatgccaactaaataaagaactctgctggcaacgtattcttggttggtgcaggggttggtggtagcaaggaaaaggagatttaaaagactcattgtgggctggtaaattttcaatacttctttgcaagggcatttcaaagccagcaaagagcatcgtgggcctctggtttccagcccaacctccctgctgcagcacttttatttattcattccgacatatagatacggcgctatttatttgaacaagatgatggatgt

SEQ ID NO: 34348 - DNA, 448 bp, Homo Sapiens
caaaataacataaatcttttattgaaagtcactttactaatgttacaatgggagtaacatagaaaaccatggtatcttattagcttccgaagtgaatactaataaaactgtgccagaaatttgaaccttaagttacagtgacctttaaaaacatcaagattttgtttacctacaatgtaagaacaattttataacttgaacagccataaaacaaatcacacttgctcaggaaagcagttgccatatacatttccattggtgtttgccataaccccagtaattattaaaatagcttaacgaacctgaagtgcagagtagcagagaaatgttaaaataatgcgaatctaagtatatacacatgattacctgattaccaaaagtgaaaccatgctgctattaacacctcctcatggggtggcttccactatctatagatgcacatcacctg

SEQ ID NO: 34349 - DNA, 455 bp, Homo Sapiens
cttatcaaccaacacttttaattgcaaaaagtaaaaaccttcattacaataaactttaatttacatacattcttcacatggtggaagtctttaccagtttgtagtatcctgcacttgaacacatactaaaagctcaagccattcaaagccgctgtggctgtgacagctgcctgcctccctctgctccctgggaccatccagggccaccacaccctgctcccggaaggagagctgcagctgaccctggcacctgtccccgatgatggcgggagcactgcgctgagtccctgtcttgcctgtgcctcctccttccccgaccctcggcattggttactgacccttccccagggtggaggtgaaggaagggaagactgcagccaacatttttctgagggtaaaactgtggaaagaagtatggagggaagcctgtctggataagatggggctttctggga

SEQ ID NO: 34350 - DNA, 429 bp, Homo Sapiens
aacatggattaacactttttattacagaaaccgtacggtgaaggaacacaacagaccagggctttcatagggttattgagattgagctgagatgacctgggagagaaagatctaggtgagatgaccctggggagggagccacgttccttggacctggtgacttagtgtcgccgggtcttctttttccctgttctcattttggggagtgagtctttctatccagtgtcctgaattcatgagcagttgaaaggtaaacatttctgcagatccattctctttctatcctaatggataccatttttggaaacgtgacagagtatcagaggctgcagctcagtacacgtggtcaaagcaaaacgggatggaaacttccagtcactctgatttgttgcccccgtcacccactgatgcgcttgaagctgggaccca

SEQ ID NO: 34351 - DNA, 520 bp, Homo Sapiens
gctaggaatgagtctacaaaatgcaggagagcaaaccaaatagacaaatgtaaggaatattgtctaagggactaccagatctccaaaatgccactactttttgtatcctactattctcaacattctgtgtcagttacctgtgggctctaagattcacgtacagagaagaaaaaatggatgagcattaaagacaaaaaatgaagatgtcatagtagaaggagaaatagtaagttataaggaatagattagaaatagatttaccatgattaatctattatgctagcaaacttatatagagccatgcattagtagattgattagataaatcttatgaatctctttatttgaaaaccaaaagtattacattgccactcagttttggacctttactcacgagtatctgattcttgctcctggttctgaatgatacttctacttagaactgtgcctcagatgtcacacagctcccagataaatgagggtaatcaaagttcttgaacatcagtgtttctgatgttca

SEQ ID NO: 34352 - DNA, 493 bp, Homo Sapiens
gcaggggcatcctcatatacactgcttaaaaacaaaaggctaaggacaagtcaccttttcctctctcacacggaggcctgcgctcccaattgagtacagctacttacatgggggctataaagggttcaaggaatgtcccacctcaactttaggaaatctttgtagaccaaaaataaatgtacatcaaaagaaatttttattctaaaaataaaattaatatgctttctttttctggtcgtcagatttttgactccctcccatcacaaaaggcttatgatcaacagaatatgcagcttatttggcaaactaaatatatattcagttcaaacaatcagattattctgatctcatgtaaaagttagacatctgctcaaatcagaaggggaggtgagcagggacataactcacacttatgacatttaaaaccatcgtgaaatatttgtgatttgcagttacagatgaaatgccatctcccaatctctcgtaacagaga

SEQ ID NO: 34353 - DNA, 449 bp, Homo Sapiens
ttatctcacaatgtctagtttctgcctccaagaacaccccaaccactcttttcaactcctccaaggaccgtaaatggagagtcccaaccatgtccctttcacccttccaaggccataaatggagaaggaaaccatgccactgctcactacttactgactccctggagaaaagcattcagcacacacaagggcccagttggctctgttgctgacggttatttcggaagtcagggaataaaactaacattcctttcaagaaaggtgccacacatatcaggaagtgacacaagcataagcaaagccaccaatctctggcgatagacatggtaggaaaccacagcaaagactcttactctctttggaaccaccaaattgagcttaatacttcacttggcttatgtaattgtgaataaggaaactagcagtatctaatggttacagatatggaa

SEQ ID NO: 34354 - DNA, 383 bp, Homo Sapiens
aatggggtatgggcattttgggatcatagagctcacataattctcctaaattacttttttctggccacagacatttttttccatccctctttcatatttgccacggctcttttggagggcatcctttcattcaaagggtctgcacctcttcagaggagacccctgcctcacagcctcccagtgtagccagcagggagtgagagtctgccttccccactgacagccccttttcccgggaagccagacattccgcttaaatatctttctacactgtcttcccagcccaacccacggtctgatggcaggtgtagaaggtgtctttcagttgtgttcacccagttgttgccttgggttataaaagacttagaccaatggaaatgctg

SEQ ID NO: 34355 - DNA, 419 bp, Homo Sapiens
tttttttaagattttcattttattaaaaatatagcaacataatagcagcattgtttgataaatctttactagtaccatttaaaagtagtcctactcacaaataaccaccacctatgcagcatgtttatgtttacattccaaactcttcccttgataatctaacactgttctattaatctaatcattaaggaggtaattttttaagcattaagttgatctacacagctacacagtatactcaaatttcatacttaaatctattgtagaaatcagaaatttctttagtttattccccaacagtgtgttacctaccagtaccctcaaaatggttgaaatcaacctattctttcagtgtgatttttatgaatttatacttacatatgtagttaagaaattatgtctagcaaataaaaataaac

SEQ ID NO: 34356 - DNA, 438 bp, Homo Sapiens
cttccattgaacaattatttattgaatacttactatgtgccaaagattcttctaggtactgggggtatagtaatgaatgacacaaatacggcccatccctctaggattttacattttaggggagaaagacaggcaataaggaagtaacaaatgggcaagataattttagaatgatatagactatgacacgtagggaaagatagggggatagatacattattattcaacccaacaatgtaggacaatctttggttttttttgctaaaatctccaaatagggtctcccactttatctgttctcaaataatggcatttttcaatgtcagagtaatctaactttttatctttctctacttctccttttctttccatctcacatttattaaagaactaggttaaagtgctttgcaatgcatcatctcacttaatgctcacaat

SEQ ID NO: 34357 - DNA, 487 bp, Homo Sapiens
attcgcaactctgggttcataggggcctcttctttgggaagtgtctaggcgtcccaccaccggcacaggagatgccgtcagggcagaagccccatctgacaccgaaatgcacctgcctcccagcccagggtcagacaccctccacctcctctcccccagctgaccactccgtaaccacaggtcgcctggggagtgctccctgagcctacattcctaggggcagggccagaaggaagtgaatgaagctccagctgtggtttgcaaacaaggatttagctccctgacctgtacaggagacctccttgggctgctcagcccagccccacaagaaggccaggaaggctgggcagggcgaggggacaatgcagctataagctgaacctggctctgcagtgcagctgtgctacagccaggtgagtcccatctgggggcatggaaagctggatcctgctgaaggctcctccaggctactcagggcaggaagcca

SEQ ID NO: 34358 - DNA, 479 bp, Homo Sapiens
ttaacaaaccaaggtcagagcactgagacaattgtgctaactaggcaacagggataatctaatcatttcttttgaaattcaacataaatcaacatttcttttaagcgtaagaacctggcttttatcttccatatacaaccaaggcaatctttgatactttatgtgactctattctatacaactgtttttaaattcaagataaaattggctctatataagctagttcaatattttgaaatttaattgtaacttggatacactttctctgtgaccatgagtaaataattaaaatgctttctaccaatgagaataaaggcatagcaaactataagtcttacctgaaactgtatgcagtgattgttttgtgttttgttttctaattgacagttgatatttatacactaaattatcaaactactatttgtttttaattaattcctcaactttgccactcaaggaaaatgatatatgctttgtat

SEQ ID NO: 34359 - DNA, 431 bp, Homo Sapiens
ttatattgtgtatttttaaattctgtgtcttcaaattgacttttctttacttctgtagtatctgttaatcccattcagagtattttcatttcagatattgcattttcatcattagaagttgaatctgagtcctttatgaatcctcttgtgttcatgtttttttacctccttgaacaaacgaagtatactaatagtagttgtttgaatgaacttgttaaccaattctatcatccctttcatttctaaccccttttctattggttacattttctcctatttctgggttgaatttttcagcttttgtatgtgtgatgatgctctaatgaatattcaacattattaatgttacactgttgggatctggattttgttgtattcctttaaatattgtcaggctttgtagtgggatacacttaaattcatttcaggct

SEQ ID NO: 34360 - DNA, 357 bp, Homo Sapiens
cttattggcattttctaatgttttaatgcaataagataaattgctgcacaagaatgacgggggaaaggaaaaatagatgtcaatgtgcatcatctgggaacttatagtatttcatcaaagtaagttatgcttcaaatttgactagaaattgttgaaaaaaatattaattgtgttgtaaaaatatgccactgcagagacaggaagtcaacttgtttccccattcctgtcactaaactgaaaagaaccgttcctcaatttccaacagatgttgaggagtatttctgagtctgagtaaaagcacataattttcctcctttctttatgttttatagcttcggacgcgtgggtcgacgatat

SEQ ID NO: 34361 - DNA, 412 bp, Homo Sapiens
tttactgcttaaaatctaggtgggtgtgaggccatgactgtgaacgttgtcagtcactgactgtattcagctgtaaaggcttgacaaggtgagaaaaacctcccacacttttaaaatgaatgaaatgtttgaacactaagtagtcatacacaaaataattaccttaatttcatatgttgttccaggattaagattagtaagaagaacttccagactgtctggctttgatctgacttgtgtatatactgtttgcatccacggacaaacttccttatatttgacaatgtaagatataatccttccatttggattaggtggtgtattccaagacagaagaatcccagcagatccgactctttccccggctaggaagactggaggccctggttctatttttaaaaaatccattttg

SEQ ID NO: 34362 - DNA, 365 bp, Homo Sapiens
ttttttcatcttcttcacatgtcttaaaattaccttatatcctggaaataacagaaaaattttaaaagaccctctattttggtttgctgtataggttgagtcctgatatttttaatcatattaacaatatgctcaaggcaaacactgccacgacccagtattcttacagtttgtaagtattttattatttccttgaaaaaacactcattccatctagtacgtattgtgagagaagatcaagtacttgtaaaataatttttatttaggaaccagtatatacagattaacggtatttggaactgactagaatgacaatgaaatcaccaacttctgatcaaggtgaaataaattaatgatttcactaa

SEQ ID NO: 34363 - DNA, 473 bp, Homo Sapiens
ggaaaatgaagatatcttctttgtatattgttataaggattgagataatgaatgtaatacacctgccatctacctggcctacagcagaaacccattttaatttgtgattctacttttcccaaactagaaacattgctttaaaggactgaatgttctagaaatgaacatctacaatgaaatgggactctccagttaaatgctgaattggcaactcactctagtaaggaaggatagaaacttgtttcattgcttgactgggcacctgtgctagggacttctcaagcatctggctattgggaggtgtgtattagcttatcattttcattgctaattcacctgtaaatggaaagagcaataccttccctgctacgtggattattacagggccagaataagagcattgttgtaagtggtttgaaaaacaaaagaagatatgctcaatattgcattaatggagatctattatcactatt

SEQ ID NO: 34364 - DNA, 479 bp, Homo Sapiens
aaatgtaaaggaatttaattgagcaatgaataatttgtgaattgggcagcccccagaatcacagcagattcagagagactccagtgcagccacatggtggaagaagattaatagacacaaacagggaaatgatgtgcagaaattggaagtgaggtacacaacagctggactggttacagattggtgtttgccttatttgaacacagtttgaacactcagcagtgtatgaatggttgaagtatggctgctgggattggccaagaactcacctatggatacacgtgcatactcctagttaggttttcaatcttgtctatctattaagctaggttgcagttcgtccacaaagactcaaatatagaaacagggaatccttctcaggccacatttagttcactttaacaacttcccccttttggtcattttctcaattttgagagattgaccaaaactttaattatcaatgtcactatcaccat

SEQ ID NO: 34365 - DNA, 410 bp, Homo Sapiens
ttttttaaactctctacgcccagttcctagcactgactaggtgcctagtaacatgtgctgaatgaatgagtgaattttaccacacctttgccctaatgctgctgcttccctagatttctctaagaaaacgattctctcccaaaactggggggtggagagtgggatggggccaggcagagtgtttatttccaaaggtgaggctccacctgaagaagaacatctctagaaggagacacagagggcaacacaagctctgatttagaataaatgactatggtaatgattaaaggaggaagctctctccaacacagctgggtaaaaatggagcaagtagctttgtaaggtgattagcagtcactctgagcatcccagtggaggctgaatgatcacctatctaggatgctatggaa

SEQ ID NO: 34366 - DNA, 468 bp, Homo Sapiens
gccatcttggtccttttccaccattttcagcccctccaattcatctttaagtgtcaaaccaatcatttttgggggaaggggagggaattttactaacttgctcaggtaaagtgaggttagactcctgtaatagcccagacatgcttttatcagacactttccacatcatactcggatggcttacttgcctgtttgtccaatcagaatgggagctctttgaggacagagactataatttgttcatatttatatctttagtacctagcacagtacctgacatgaaaggcagatatgttacctgtggttgaagctaggagaaaataatatttttgcatagtcagctattaattattaaaattacagcatattttatctataattctaagttagcagtgctgggtgacagccggagaataatccttgtactttcctacagtatgtgcactctatggcaagtgttttctcagc

SEQ ID NO: 34367 - DNA, 468 bp, Homo Sapiens
tttgtttgttttaatttggaaactcttacaagtattatttaggtcattttcccttctggttttctttttcaactcttcaatcaccagcaattccaaatctttgaataaaaacttttcccttggtaattttaagattaataaaagaatgatttaacttatatgcatgaggagcttttaagaaggcatccccaatatgtggcaatagaccctataattcaattctgatgggtatgatgtcctaaaatattactatgacacacccttattttatttatatgaaataagtttagtataatttttaatacaagtgttggggaggcaggcatctgttaagaaatgatactaagaaaaaacaatcatcatcatcattattatgaggtatttgcaggcttattttggattaaaagataggaaaatcaataatttttcactgattgagctttttttcactaggtctgaaagagattc

SEQ ID NO: 34368 - DNA, 452 bp, Homo Sapiens
ttttttagggaacttgcttttatgtattactggtgtaattcaaaagtaagtattaaatatgaacagaaagttgaagttatataaggaaagaaaagctttggaaattcattgttgacccaggtgacaacagttatagtagagtagggacaaaacccaccaggaagagctggagagaggaagagctgcgtgcctaggagagcaaccgaaccatttcttcaagaagccgggctgcatgtgcaagaagaagacagtagctagaggagtattcagtgccaagaaaaggctttaatttctcttataagacaggagagatttttaggagatccaaaaaatacaggaaaaaaaggtaaggagcgaggaataaacagactggaaatataagagagaaatggaataagtaatggagcaagaaatcagagagagagctcaaagtagaaatttgtcttgaaccg

SEQ ID NO: 34369 - DNA, 380 bp, Homo Sapiens
caggggatttattatacaaagaaatgtaaaatactcataaacatgtttatgtccacacgtgaccaattaaaagcagttaatttgaagtttaattaccttgtttggtttggtttctctcacataacttcaaacactggtttaaaacttacctttttgacataactgatagggatcaatctccactcatctttctccatttggtatcaataaaacaaaactcattaatttatggattcacatccctcacaggatttgaggtgggttttgataatatgctatacctctccatctacatcatagacaatgcatggacactaatacaaggacatgctcatttggagtgatggataactatgctgacttgattaaaatgtagctta

SEQ ID NO: 34370 - DNA, 453 bp, Homo Sapiens
gacgtgacagaaaaggaaaatggcatagtgtgctaagtttgccgaccgtactggggaaggaagggtctggcactccttgggattctggatatgtgctttctgccagctggagagctctaacctgctgttagggaagaatggcaaaagtccagcttggagaaatttcaaaaggataacccaggtgacaagcttcagcctcactatgcaatgctgtgtgacctcatgggagtaaaaacagctcagataatgagaccatgaaaagttgtacaaagcattaaacaccatacatttaaaacatttaaagttgactttattatgaagcaaaacattcaggaagaactcaggactccaccccaggggacccacatatctacagttggttcagacagcccccaaaagctggcatgctgtgtgcttgggacagaacttaccaactgtcccaataaagaccct

SEQ ID NO: 34371 - DNA, 362 bp, Homo Sapiens
agaggcctagactccagttcatctggtccagggctctccactggtccctgagaatgcagtcctgaccccaaccccatgtgtcctaaggtaccttcaggccctgaccagagatgttggaatagccacagcaggcccctattgcattcccagaacctgtgagatccaggtaatcagggtcatggacacctgttcctgccacaggagccaccttgaaccccagatgccagcgtggcctgccattcctaactccttagtgagcactccatgaggtactgctggatggagagagctgccctcatctcagcaggctcatcctcatcccagacgttgaggggcactgcgggcagagtgcaggcagggct

SEQ ID NO: 34372 - DNA, 419 bp, Homo Sapiens
ttttttaacggcactttgcaaaatctgtggacaaaaaacctctaccagccccaggttcctgcactttaataatcaccaaattaaatctgagtttcacacaagggggacatgcaaacatcaggaggggccgacccctgaacggccagtgagccaccctgtgccagacgcctgcatgtgggtggttagccgggtggcttttcacatggctggtaggtgctttcacagaacaacaggaagagggagatcccagaaaaccacttgtttgctgtacagaggttcaggtggccccctgcccgcccaccctgggattgctttgcacctgcagccttagctgcacctgtcttgtccacagaggcccacgttggccactgggggcagctgccaggccgggccccatcctgcggaggttagaggaggct

SEQ ID NO: 34373 - DNA, 511 bp, Homo Sapiens
ttttttttccaggttgagattctttattctggaggtaggaagggggtcagcacacagaaagctgtgcaatctgggaagagtgaggcagtcactaaagccagcaccatccagttgcagcaggaatacgattcgcctgtgccataagcaatatttacaccatttaaatcaagaaccgtagtgtgaacctattattgagaaacgtggagatgactaacagaagaaatagccaagaaggggaagcctctggaaggcgggagggaaagcagggcaggggctgctgctgccacataagcctttctctacttcttgatttttctccaactatgacatgctctgtcttattttaaagttagattacgttttctgacattaaatatttgaaaatcaatgcaaatacaagatctagaaagacaagccagatagataagctggacagccagacagcagaaaaatgacagcctgatggctggctggacagccacccagacagacagacagagctgggtaggcg

SEQ ID NO: 34374 - DNA, 507 bp, Homo Sapiens
ttctccaggctggccctcagcctggcgccccttccgcagacatccctagaaaaagaactaacgcggccttctccgagcccagggctggagtaggaagtacccgccctcccgaacgcgaggtcctggctgcgcattggctgcgaaggccgtcagtactccggagggcggagcctcccggcacccagcggaatttcaggcccgcacctccgggagggtcctccgggctcccgggcttctttcctcccccttaacactacccccgcacacacaccggccccgagaaggcaactagcctcctcaaacggttcctttgcctttttatttcgcaggccttcctctcaccccatacagttactgcccctttgactcctccgagaggcaaagctttttcaaagctctaacacctctcccctaccccagcaagttccccgtgcgagaccaaatagaggatgccgctgttctaagagtgaagcaagctgtggactggatctcgccgagggagagaga

SEQ ID NO: 34375 - DNA, 445 bp, Homo Sapiens
aggatggggggggatttcagatggagtagctgggaaaggaaactgctctgaggaagtaatatgtgagatgagtgaagaaggtgctaaccacacaaagatcaggggggaatatcccaggtagagaaaataatttttgaacggcacaatcaggtggaggcagggattaactgtgttctgctggtgaccaacctttctctgtgattctcatttacccaacctagtccaaggatatctggcaaaagtaacttgcagattgtggctggactaagaagtcttacctacctcagaccactaaaaggtcgtacaagttcaacaagaagcagccatccctggttaagctcagcctcaactgagctttcccttcttttcttgtgcctctcagcaatggttacctgtaccattcattctttcaacccatactggtgaagggcactgtgataagagt

SEQ ID NO: 34376 - DNA, 437 bp, Homo Sapiens
aacacacattttctttactaaccaatgaaacaaaatataagaaaatatatatcataaatgaatagcttattccattaggaaatatctcattctacattctcttaaaactggttttccatcaatttcatcacattttgtttctgcacttctgtttgggtgaaaactcccataataaacaataagaaaaagaattccaagaagaagagtaagaactatagttatactgataggtataaaatagtctggattaaaaatagtgagagggcaaaccccaaatacagtcaatatccccaaagtgcccagtaccctaacaatataataacaagacattggacacttggtattctgtcccttaatattaaaaaatgtaaagataagaatgaatccaacaacaatcctatataagaattccatacttatacaagtacaaaactggg

SEQ ID NO: 34377 - DNA, 469 bp, Homo Sapiens
ttatcacttaaattatttcatgtaaattttccatgaatctacatagccatatattttcacttgtgatgataaatgaaatttccattgcattaacacagcacagtttctaagacaaaaggaaaaagcagatgtgtagaggtgctatgaagtcaaagaaggacaggatgtgagacctgagtggagaattgtattattcaacaggcgagatcctctatgtagccatatgccaaaaatgtcagagaataagcaagttagcaatcactgagcagattatacatctcatttatagtggtgtctaatcataccctaattccaccttagtcatatttcctcttaccaataagtatggcagccaccagaacaaaagccccaattactacatggcactagtcaaagcaagatacccatcctttgtatgtgggagcttatgggcataaaactaaggcgagaaagaagaaaatatggatca

SEQ ID NO: 34378 - DNA, 471 bp, Homo Sapiens
aaatgaatgacttagaggttaagaaaatataaacagtctaaacaagtcaaagaggatttgtaaaggatgggccttataaaggacgttttatgtgtgcttcgataagctgagactaaaaagaaattatttatgtgtttttctaaaaattaaacattggtggcaaggaagcactgttatagtaccagggcctgttcgtatatactgcaaacaaagttttcttgaagtattgacctgctcttaataaatttgccaacaggttttgattttttattttaaaatctgtttctttaatgccatcttctaaactgcagacagtttctatttctgccacatttcttgctgagatgtatttaatttttctagtttcaaatttaaaatgctgcccttttcttttacaataataatttcatttcttgagataaagttttccttttgcaatttctcagatttatagctcagaagttcaaattt

SEQ ID NO: 34379 - DNA, 351 bp, Homo Sapiens
gagagcaggaatcttcagtgatccacgggcagatctgcagccattgtgggcacctgttcctcccgcgacctttgtgcccacgtctctccctccagtacctattgcacgaccccccacgtccgcctcctgccattgccagcaagtgccttgcgcgggtacctggctgcgcttattaatccattatggtcgctctggcactggtgccattatgtgctcacgagcccactccctcaggtttagaagtcgcgtcgcccggcaacagaacaatctgctggcttagcctttggccaagttggcagctggacgaggacgctcagagcccagctctcgagagttcaagtatccgacagt

SEQ ID NO: 34380 - DNA, 379 bp, Homo Sapiens
cttgtaaggggctgcaagtcatgatgcattttcatttcccctacaggctactagacaagattacccaatatgctattcccagggctgccacccattcttgttaggctttgcatttcctatattcggcctatcatttgtgtaaagaggaatgagttgctttctccgacgtttcataaagccaggtaggcatgaagtctggcaatagaacagcagggactgacattatctgtaactcaacttgcagacaaggattggttgatcaataaaagcattcttttgacatagatgacaatttattctttattgattggcaaatgatgagtaatatcctgcatctggcattcttgcctcttatacattatcctgtgactccatttct

SEQ ID NO: 34381 - DNA, 472 bp, Homo Sapiens
ttgatgtccctgagattttattcaatgaaaaaagaacagccttgataaaaccacacgtatagaaaaaagtgggcaacatggcctgaactctccccaggcacccccaacagaaaacgcagtctgggagcctgcagcctcaaatgaagggctgggttgaggccccagacctgcagagggcggctctgggctgcctggcttcaccctctgcagagaaacctgaaatctctagcctggaaaggaagctttccctgcttttctccactgctagaccctcatgctcagggccagggcccagagtgggaatgagagaggtggggtgatgacagcctcaggatactccgctcaagctggccttggttctagctcccaagctgcagccacctcttagggggttcctgctgcctggacgcctctccctgtcactcaatgtcacgtcctcagagaagcctccctgacccagtctattcaggcc

SEQ ID NO: 34382 - DNA, 524 bp, Homo Sapiens
ttttttttaaattgttcaaaaaatggcttaccaatctttgactacacatttatttgatttaacacaaaactctaatggtgttttattaatgatattttcatcaaagtttgccattaaacttaaagcagctgaataacatgttctttgttgatcatctgcaccacatcttgctaataacattcttgtaattgttttctttttcattccttctcttgctttatctaaaataaattcacttaattttaaacatttattacatttagcttgatcaccttcaattccttcaataattccattataacattttccatgagctacatttataatttctattgttttcttcaaatcagctttataatcacgatattcatcttcatatactctcattctttcttctattactttaatcatttgttgataaattcctcttgttcctttacatactgttctatcttctttcttctttgtttcatcttttaattcttctaattgaccatgtttaaatctatattcatttgctctat

SEQ ID NO: 34383 - DNA, 399 bp, Homo Sapiens
aagagttacacagtttatttttgaacattcaaatttcaagtctcataagcaaaaatttaaaaaaatgtttcatttacattttcaacaccaatctataaagaattttcttttttaagaatgaaatacaacttatatatctaaatatggggcttcccttacaggggtcttgaaaggtttattcattaatttagttgatgcttttaagattcaaagggttttttagaatttaacaagaaatgcctattatccagaagacagtttttctaaatgatgccaaatcctcatcttttgagaaaaggtatggcttacagtaagtcattatcactcaaagtattaggcaagagatcaaactatgtattatcattttttcttaaatatgagccataactataaataagg

SEQ ID NO: 34384 - DNA, 499 bp, Homo Sapiens
ttgttccctcaaagtactttaatgagcttatatttttctacacggcatatagaaaagtgcataaaatttctagattatagaactactgtaaagggaacgtccatgtagtcaccatataattaattgaaatagagaaatgattatactcagtcttcacttgcaagcctccaagataagaatcagctactgacctgatttttgagattatcaacataactctttctatacacatatcaaacctatgattactttaatctgtttttaaacaacatacaaatggaagaatgcagtattttttttaattttgtacctggattcactcattcaaaattatatttgtaagattcaaccatgttgtgtgtagctgcatagttcattcattctcattattgtatactgttccaccatgttaataaaccaaaatgtattcatttctctgttaatggatatttgggttctttccagtttgaagctattgcaaataatgctaccatattat

SEQ ID NO: 34385 - DNA, 489 bp, Homo Sapiens
ttctcttccccttcatcgacttaactttatacttattttgttttgatttttctcccactcttctgttccatctgttcccctagacctagaagtagagcatcattctaaatcctcaccacgtgcaaccttgttagacaagtacgacaaccagatctctgacctctctttgacatctctggctttccaggcttttgtagcctttttaccaacttagaattttagaatgtcagagcctggaaggaaaactacagagcaggctttcccaaacattctacagaacagcagatggaggacacaactttgcaatgagagcaggctgaagagttctgagatctgtgattcactcagctcaggaaattgctgcccagcaattctcctctcagagattcacaatgcacgtcagcttttgaaacacactgacaaagtcccagcaggcggagagaaatttacttaactctgcttaaacttagtcttttcacaactcttcac

SEQ ID NO: 34386 - DNA, 542 bp, Homo Sapiens
gtcgaacaatgatccacgcccactctctattgcacaagggaaggctgagattcagaaaggggaaggggcttgccccaggctacagggcgtcagtgcccagctgggccagcgcttcttctgctcctggcacccccacttagtgaggagctcccaggctctccaggggactcacccctatctgcctgtcccctggggtgggtgctggcccctgcggtcgctcctccccgcctgtctctgtcccctggggtgggtgctggcccctgcggtcgctcctccccacccgtctctgtgggcttgttgcagtagacactctcctcttccccaggcagcagggggtgtgggtagtaagaactgcccaggcactgccaccacccgcccacctggcccacgctgcacctgcgtgactcccacctggatccgctccatgcagtgtttgggggaacttggctgacacgcactggatctctggcttgagccgctgccggcggaagccacggccatgtcttcacacttctgatcttcggagtgagagacacaccacc

SEQ ID NO: 34387 - DNA, 492 bp, Homo Sapiens
ttctgttcttttttgtttaccagtgcattacaaacgtaaactcatcccagtttgtgggctgtgcacacagacagggcacaccagatgtggcctgaggctttagagtgccaacccctatttctgacagtccattatgagaaatctgggtcatgatgtctcccttttgagtttatttctgccaggctgttacttcactagtggatctccccaatcctgtggaagtttgagtttacgctttggttaggagaatcaagtattgtctttgttccacagtgtggtccatacccacgatatggctttgctgatactctatcctgtggtgtggacaagctctctctactctagatgagctgaaagtctgtttccaaatactgtgtgatccctacaatctccgtgggatgcttaactctgcacactgtgccactctcaactgctctgctagggcctgtgaaattccaccccaggtatgagaaactcaggcccagccactga

SEQ ID NO: 34388 - DNA, 454 bp, Homo Sapiens
tttttttcttggtatcgaatacaattggttttattggcaacttcattattcacacaaagccataataaacaagtaggtaatccagagggtagccctagcaacacatccttatgatcatggctatcagtatgtgtttatcaataggataattgtagccggcatgaacattttcattttggttctagtttttccaagtcccataacaaaccttggtttattctgacttttatctttataaactctcctaaagcatgatacaccttagtgtgcctaatagaaatatttggaagattgggtcatattacctaaaatgtagtctattccatgtaaagttttcaaatcacatttcaatagacacgtcactttcattattttctttttaactatatgttttcccatcaaagaacaaaacggggattgccttcttgactggtctcttgctatgaaccaggat

SEQ ID NO: 34389 - DNA, 362 bp, Homo Sapiens
gttcttaagcgtttatctaatcagctgaaacgtgagtataaacttccttgtgggcaccccctgcagtagcaactccagaaatacggatgcagggaaagggggctgatcccaagattaggtcaagaaaaacattcccgtggacaaacacaactgctcccaatcaaattcaaagttaacaggtgttcaaaaagctggatttccaatttcagtagagaaatggctccccctaccgaggttttgggagataacggcttctaggcaccagtgggatgctgttaacatatattctattttctgtgactgtcaggtataataatagaatctgtaaggagactgaggccggacgcgtgggtcgacgatat

SEQ ID NO: 34390 - DNA, 407 bp, Homo Sapiens
ttatggaacataatgaaccaccaattttattagacaatgctaatcataaatcaaaagcaaaacaaaaagccatttacttaaaaaacatatacagtttttggttgtcatctaatccattggttaacaccctataaaattcaaaatcggagaagaaaacacagtgagaaaataaagtatcatcttataatcagacattaatgtaaatatttcctagccaggccaaagaaactcatgaaatatcttacaaatattattttctctatttgtagaactcaatggtactacctacttgcatatattttgggggaagaatgccctcttgtggcagcttggggtagaacacgaaatatggagcaatttttggcagcattcaaagagcagtcagtatcatttttaataagatctcc

SEQ ID NO: 34391 - DNA, 455 bp, Homo Sapiens
aaagaccgccatacaatatgaagctgggatctgcaaacatattgatttatttgtactttgaaatagggagattacttttttggaataagaggaattctcttccagctactactggactaggaagaagtttccagaaaagttgcaatggagagaagacggagaggaaaagtgggtggagagagagatatcttgtttatattaaatacttaatagagcactatgcaaagttgtcatgcaatatcaaggaaacaatatttgtggctgggtgtttaaaaagtttaataatttactattttattgtatatgtcaatcagtgaaatatgcataagcaattaataacatctttaccaagcatgtcttaaaacacctttaaaatacataaatacatggtactattcaaggcagtataaaaagcatttccgagtggagaaaaaggatacaaatacaatctctgg

SEQ ID NO: 34392 - DNA, 435 bp, Homo Sapiens
gggttgtatgggtttaatgtccagaaatacatcatcttaaactcttcccttaattattactatcagtggaatctggtacaatcagttaaatgtataaaatgaggaaatggaaagttttaagcacaatagtagactttatgaaattgtactgcccttatgttttctttctgatctgacacaggtcagttgtgtcactcattaaactctagctatagaaagtagaagttggtaccaatgactactaggccacttgaacctctaaacttaaaaattacagcttttcttacttgccgacgatagcttattctgtatgatgttttcaaaactctttcagtcacaggtaaaattaagcaaagactgaaaacattcagatcaagcaaaacaatcaaggcataatcaaccatgaaataacactatatcaagctaaagttactc

SEQ ID NO: 34393 - DNA, 470 bp, Homo Sapiens
aacgtcttctggtttttctacaataaacatgaatcagttgtagaacctctaaaatgataatgttcatgaggttggttttcctcgttcagtagctggcgaggaacagcatagtgaaaaatcttccctttgccaggaggcaggcactagcggggaagagatgtggatttttctgagttttctaagaccctgttagcttagggtctctgtgctgcttgagtaaggtgtaagcgtcttttaatccttcaaagtcacctctgcaaaagagcagtggcctgccccaacctgtatcttgggtccccaggccacaaggaggctggccagcagcctcggccaactctagggcccttcaccatctgtgtttcaaacagcacaggctgctgtgtgtcaggaaggcctgggtggcatcatgagcagggctgagtacctgttgccgcagggctgtcagctgagaagccaagcctccagctcct

SEQ ID NO: 34394 - DNA, 466 bp, Homo Sapiens
aattgactgggtttgtttattttaacactttttacaagatattttagacataccaaaagtgattttttttcagtgcctcttgtaactataaatctctctaatttatagtctcatagcatcaagtgtcattacaatgatgagagtaagtgcacacacctgcatagtcttcaatggatgcctggcctgctccatgtgctttacatacagacttctctagtttccccacaagcacacaaggcagatactttccccatggcaagcaatcaaaaaagccaggacacagaggggcggaacagctgctgaggactgtactgatgcacaccccggtaggcagattcccaagcccttgttctggagtttgtgtgctggacggcctgtaactagtacaaactgacctttgtgtgtctcttctctgtcctccctgcatccatattgtaggacaggagaaagaaagggaggaagtctg

SEQ ID NO: 34395 - DNA, 369 bp, Homo Sapiens
taagccactgcacccggccctatcttggtatttttaatgaaaaaaatccaaatcttctttctcaatattcattttttcttgtctacattactagggatctcatgttacttaaatattgactttatcttatatgcaatgcaaatttcttcaatgccacttacctaagaaaattaaaatctagagcatctaaatgttgccagtttaagtatgttctttcagcatattggtaattcctgatttattttttaaaggctgcacaggtcttgataagatttaatgtgttcatttataaaatgtctttttataaaaccacactgcaagttctgacagataagatttaaagccctccctgaacagtctgcttaaaaa

SEQ ID NO: 34396 - DNA, 475 bp, Homo Sapiens
aagttataaaaatgactttatttttctgtttctatgtactacatatccaaataacattaagacattttatcatgaatttgcactatgacaaatcaactttcaagcattttcttgacagttttagaggttttgccagcttttgacatacatacagacagagtaaacaaggggaaaaaagaaaacttagtgagcacgtaagtcatggagtttgagctccaataaaaatattcattaaagaggaagaataaggtggggggtggagagaggtattctgaagaaagaaacaaatttacctcacattaaaaaccatgcataggaactgttatcaaacacagccaagaaattaagttttccaaatttatatacccccctttcaaggtattctgataaaaaaattcctttgggcagggggagatcctcctccacctttcaaaaatgaacttaaggatgctacctttatcggtgagtgactttg

SEQ ID NO: 34397 - DNA, 442 bp, Homo Sapiens
ggaagtttttagtttattaaaggaatctcactgggttcaactcaagttgtcagcaaagctgtcttccttctggaggctctagaggagaatccattttcttgccttttctagcttctagaggctgcctgcattctttggctcatgatctccttcaagcaatctcatcactctgatctctacgtttaagggcacatcttctgtcactcgcctgacttcttcttgcccttggtaaataaatttctggaatacattgggcccactggaataatccgggataaagtccccatttcaagggctttgacttaattaaatctgcaaatctcacagattccagggatttgggtgtagatatctatgggacatgggtgggggccattaattctgcctaacacagcagcctgctaacccttagcaggaattctgagttatcaatactggaggc

SEQ ID NO: 34398 - DNA, 483 bp, Homo Sapiens
aaagaagacttgtagcatagcaataggccattaacttcccctaaggtaatgcccattacagtgtgggccgatcaactacttcaaacgtgctgctcagacttaagcaaaactgacttgtccacgatgttcacacattgctcaccaagcatatggattctctctcctcataaccactgtctagttttctaaaaaggacttttatttcaccctcagtcttctattttttaggcaaaatatccttcattcctataattcatcctcagtgggcatggtttacactgttctcatggttcctagtcctttctgtttctctttctcagtctccttctttgtaggtaatgcttagaatggagctattaacccaagtgtggtgcaactcaaagaagtatagaggaaatatagcacttttatcttgatgtgcttttcctattggtcccacctaagaatataacaacccttcagtcagtcccagcacactggata

SEQ ID NO: 34399 - DNA, 384 bp, Homo Sapiens
ttttggtttccctttctaaaagtcacaatgctggcagcatcgcctctttgtagcccggagcagctgctgccatcacgctggctgtggcggaaggaggtcgtgggccgtggcggtgggagcagctgctgccatcacgctggctgtggcggaaggaggtcgtgggccgtggcggtgggagcagctgctgccatcacgctggctgtggcggaaggaggtcgtgggccgtggcggtgggagcagctgcagggccagtagtggcggcggagaggacccctgtgccccatgtccccgaggcagctgactgtgccgtccccagcctcacggggccaggcaggacccactcccaggcccgggagcctctgccgctgtttgaccctgggcccc

SEQ ID NO: 34400 - DNA, 473 bp, Homo Sapiens
cccccctataaaaataagaactgtctgtcttttcagcagatctctttagcaaaccaccaccttcaaaaccacagttttctaaggatattgttctggattctggaccagacaagtctgatgtgaaacatgaaacttcagaattttctttcaaagggcttgtggctgtgggactatcatgtgtagaactgggttgttcattatggtggccatgaagctgttggtgattgtcatctgcttcacagaccaggtttggtttacacaactcttccttcccattgtccacattagaaatggcactgtttcctggtaatgacaaccaaggacaactttttaattcttcacattctttttctttaggagttgcttctgttaatacagggtccacaaaggttaaaggttctggggtaactaatgtgctggtttctgaaacctcatcactggtcatgattttgtctacttcttggaattcaccg

SEQ ID NO: 34401 - DNA, 454 bp, Homo Sapiens
agaagtgtgccaaccggccagagaacggcagttaccacagaatgtattttgctggtgcccaccattacaatgggatgaaccaaaggttggtgtgccaggaatgttcctataatgttctcacttaatgctcacagcaaccttgtagggtaggtagctcatattcccattttatagacagaaaaattaaggaccaaaacatggagagtaacccatccgaagtcacaatgcaattaactggtgcagctggtatgtgaatctggtctcttaattccaaagctatgttctggtgtatcacaataaattctgcatgctgcacatctcctaacactcaaggtatagctgggtcagcaactttccccctctcccctccagccaacatacacgcacactccaggctcattttaaacaagctatccattttcaaagtactgatcaatctgcatctaatgcaaaa

SEQ ID NO: 34402 - DNA, 460 bp, Homo Sapiens
ctctcgcccagcgggttttatttatttcacaacacttttatggctgtgcttccagtgtgccaagcactattctaagcacctgaaacgtactgacccatggaggtctccagcaactccatgagttacgtactattcttgtccctattttctcagtgggtgaaactgcaaaacagggatgtaatgtaacttgcccaaagtcacacagctcaccaggagtagagctgggatccaaacctaggcagcagggctccaacgcccctgcctgtggccagggccctcgctgtgcctcttggcccagccccaccaaggcactggacatgggcactggagccctggatcaggagaggacaagtggtaagggcagggtgtgggaaagctgggctccagttccagatcactgctgctgcctatgaccctgggcaggcacccaaccgccctgccttgttcctaatctatacac

SEQ ID NO: 34403 - DNA, 469 bp, Homo Sapiens
gttgaaattctcactttgttcatgcatgttctattgacctcattgagcatctttctgatggttattttgaattttccatcagagacataatatatctccattgcattaagtttgatttctggagattaatcttgtactttgttttggacatatttacctggttgtttttcccttggttcttcattttagtatatctggatgttaaacaaaacagctacctcttccagccttcatggactggcctcaaacaaaagaagaccttcacctatcagcctgaccagagattctgggggcttctcaaatctgtatgctaggcaaaaccatcagctatgttcttagtagctcccagatgtctagaatatgctgagactcatctgcattctaagacaagtgagacagaagccagttcctcaggcaatccctggaaaaattgaaacgttaaatatgtgatccaactcttttcttcctc

SEQ ID NO: 34404 - DNA, 420 bp, Homo Sapiens
gtttttgaagatggtcacgtagcaaatatttttgactttgtgagccaacatatctttgttgctactactcgactctgtcgtaaggcaaaagaagccacagacaatatgtaaatgaatatgtgtagctgagtttcagtaaaaccttatttacaaaaacaggtggctgactagcattggctgtgggacatacattgctgacctctggtttataaggtttgaagtagggaggaaaattcaactggagatatgttacatctagataacacacaggaatggagctttgtgacgtgtcagggctgtagtatagattgaagaatagctaaatattctggaagagggactacaacattggtgttatatctttttaaggttgcttctgctttgttgtttcttttaagtgacattaggatagttagtaaa

SEQ ID NO: 34405 - DNA, 431 bp, Homo Sapiens
tttttaacagtaccacaaattaaaattaagcccttataacctcaagccatggacctttgaaatataatttcactatacttctctataactagcttatctcttctctaatccattcctacctcctcgtagtcttttcaaagccctgccttctatctatttctatttcccattagataaaacccactctttaaactatcatacatgctcttttccaaaacttgttcctggctatttttccagatttgtttcccattgctcttctccatgaatgcttcagctaaactctacaacttgccattccccgaatacacttttactttccctcctgtatattattcaaggaattgtactgaattgttcatctctctaggcttttagaaattcagcttggtaagcattgagtaaaactaaataagacagtctttctgctc

SEQ ID NO: 34406 - DNA, 459 bp, Homo Sapiens
tttttagcaagggcaactaaaatctactctcaaaaaaaatcccagtgcaatacaatattattaactatagccctcatgttatacattggatctccagaatatcgtattttaaaatgtaagctagtattaatattgctcaaagtggaatacacatataaaaatgtaaaaagagagaattcagatctccagaatatcatattttaaaatgaaaaaagaaagaattcccccaatttgggggatagcaggaagtactgtaagagatggggaaaaaaatagcaaagcaagtcagaggagatgtggaagaaagccaggtttcacaggtaatgcatttatatagaccagctttcctcaaactgtatggtagtcacataaatttgagaaaggctacatgccccaccctcatctagcccttcagggatccacaagacactggtactttaagacctctcaaatgacctg

SEQ ID NO: 34407 - DNA, 460 bp, Homo Sapiens
tagcagatttgatcaagccacccagagctgttacataaaccaactactgagggtaaacacgtttggaaggaccatttaaaacacctggggcttcatggggccggatgtgctctgagctacaggtggaatcaagagttttctataatcataaattgcatagttttcagggaaaatattttcctatttgactggtgaaacagtatttttgtcctctgtaggcagttttgagacaatatactacttttcctgaaatgcttccctgaatgaacatgattatgatggcattctggaatgaggttttataacacttgtgggaacacactacccctttagcaatggaaaacagaacttcacagctgccttctgaaaggcctggtccctgcagatgggacccacccgggaccctcctggtaacctacccatctgtctccggtgtaccacccggaagctcttatgcccc

SEQ ID NO: 34408 - DNA, 410 bp, Homo Sapiens
gagttggagtctcgctatgttgcccagtagtcgatattttttaaaattggtgagatttactacaaaactgtctttccagtttctgttcaaaaatcatacgatacagcaccatcaagtctgcattcttgcatggaactggatggaattgagttgtgtggacttcctttagataacgtgtgagctttcctattttgctacagccctaccctgccactccactaatttccataagctgtctaggcccctgaaggggcctagacaattagtttgcaattcctaccctacaaggatcctgggttattaagggtagggatgataataaaaatactcaactggtatgaactgggaaccaactaatcaggtcaccactggatcagagccttggaagagtcagataccaactctttacc

SEQ ID NO: 34409 - DNA, 367 bp, Homo Sapiens
atcacagtattatgtatttatctggtttttagccttaaaaatcgatattacaagagtgatcattttcctatgcctacatgcacacagaagaatccctacccaaaaaatattaatggtggttacctctgggaagcaagattcatagtgtagaggtagagggattctcttcctttttatttcgtgatttttattattacctaatatttttattgtatacatctaatctttatacaaaacaaacctaatttctttaaaaaatacatattctactgaatatgacagatgtgaaccaataatgataaaccctggtgagaggtattcttatctgtcccttcaagactcatgcggacgcgtgggtcgacgatat

SEQ ID NO: 34410 - DNA, 470 bp, Homo Sapiens
aattttaattttatatgtgtctctaaaaagctgattactaaatgtctttttttaatatactgaagacacatattaataaatggaagtgaaattggtatgggaaatctaactagatttgtcaaattctaaacagctattgctgttgcctcatgaaatgttttatatgctctcatttatctttaaactgtaactataccctaataatgttggattacttaacctacaatttccccttctttctatttgtgaagctattcttaattttaggacttcaatcctagtatattacctaacaaatattcttgtatcttgctaagtctgggattcccctggttgactctgcagtttgggtattaagctccagacagaaggttaatattttagatatgagcacatgagataccttctcttacgaatgcttatctttgtagagtttttcagggataatacatgtataaaaattatgtaga

SEQ ID NO: 34411 - DNA, 426 bp, Homo Sapiens
aaagaactctttaatttttagatacttttatattgcgacaaacataccatttgtattactctgtattgttttaataaacacttggtatttctacatcatctcagtaattacatgtttaagcatctgccaagaacattttcaggataatttaaaatacatcaatacatcatcaaaacacttttggaacattcagatggtttgtagtttggttctcacagagaagactggatggtacatctttgtttttggattgggcttcttaggttatttcccaactcccttcacaggaggaatgtaagcaaacattttgatctctcacacatgctcttcttggcaggattccaggctccacagccgctgcaagaccagcaagtatttccgctccctcgacatcttgggcaagttatttaacccccaaaatgaagg

SEQ ID NO: 34412 - DNA, 414 bp, Homo Sapiens
atattaattaaatttattataaatatattatggataacacatatataacaatacaaatgtatttgtacatatacaaatacattaagcactatgaatacaaataatggtacaataaaaagatatggagtcattgatttagttggagtagtggtggcattgtcaggaaagtcagagcggaaagttgaaaaaagtctagaattagccaggccatagggatgtatgaggggcgtggtagggcattatagacagagggaagctcactagtagaagtcctaagctgcaggaaactgggcttattcgggaaatgaaaatttatgaaattacagagccaaagatggacagacccttagagatgaggatggaaaggtgcacaagggccagttcacaaatgtttaaagtcgctctacctgcact

SEQ ID NO: 34413 - DNA, 406 bp, Homo Sapiens
aaattttacagagtttaattgagcaaagaatgattcaggaatcagggaacccctcaaaccagaataggctcagagagactccagtgccactgtgtggccaaagacttacggacagaaaagggagtgaggcacagaaggcagaggtgaggcctgcaaacagcagggtggctacagctcgtgtctggcttattgaaacagagtttgaagtgctgctgcctgtgactgattcaagagtaggttacagtgtccacacatccaattagatgactgttcactacgtatggagaaacctataggctaaacttacagtatgtaaggaggcggcttcaggctacagctgagtagtgtgtccttacagttggaaccaggagttcatgggaattctttatcatccagtggtctgtaa

SEQ ID NO: 34414 - DNA, 626 bp, Homo Sapiens
aaatcagctttctcagattgaaatatatatttttaaataactgcaacttttgagaatgagctgaacacttcacagtgaaaattgaactaattggttaaatatccagagtctgtatctctattggaatgccttctaaagccccaagacaccaggaactaagcaaaaaggagctcaatgcaggtcctgtgatgaatctgaaaagctacagacatactgtggttatgatcccctgggaagcaaaagggtagggcctctctaaaaggcctgcaggtctcctgggtgatgggtggttttttccattgtcccaaggatggaaggaattctgtttcccactagagatgtgggtcttttcctcattcctgaaatccaagggctcattttttggccatgtttcctcaaatgatgatcatgctgggagccatctgtgccatcatcgagggagatattggaagtaagtatcgctgaagttgctggtggggtgaagaggtgggaaggtgctgtatgctatgtcatgcctgacagcgagccatgggaaagtggctgctcataacgagggtagaggacggaggttttgggatcatacacttgtgcgcgacgggcgagggccgaacacaggggttgtttaa

SEQ ID NO: 34415 - DNA, 473 bp, Homo Sapiens
agaagtgtaggtatcaaatattattattaaatttctacattattagcaaccactgaatttgctgccctggagacattcagagctgtttaagatgcagacaaatgtttatttttacttataggaataaaaagtcactcaatacaactcttaaactgtagcccaaactgtaatttgtatgtgttaaaggctttaaatttcaattattccctttatccatgtgtaccaaagatgattttttggaagtgagatggtgtaattaaaagcacctcataaaaagctcagtttttttagtttgcatatcatgtgttgatagcagtgtctaaggaaaagagaaataacacatgctacagtagtattcaaaagaatcatcaggtagcccatgggaggaaatgaatatttatagcatataaaaatcccttctaataggcatgtcatatcatatagtaactttgggaattgtggaatgagtggaa

SEQ ID NO: 34416 - DNA, 415 bp, Homo Sapiens
atacagacagtaagtttatttttttgagtatgtgattttttaaaacagggaagtcactggttacattatataattttaaactttatatcttagaaggtagtaagaagttctagtatcttttctttctcacagacactaagttctggctaaatacattacgatacaacttttaacaggagacattactgcaaatacatagtaatgtaaatctcagttaaaaaaataaatccttaaatactatgatcaaaacactttgagaatttcagagctgattctatacctcgaagaggtttcatgactagaaaacttaattgcaataaaagacacttccacaaccctgttgacctctgcagcccagtgatgtctcctctttcccccatctctgctcacaggcgccatgtggaccatggttctc

SEQ ID NO: 34417 - DNA, 657 bp, Homo Sapiens
ggacggtaatgctgataaccagccctgtccgtctcatactgtatcctctttgtgggaccagaagcagtttcttcagcctcagacctgagtgatgagggtcttggcagcacctaggccctcagagtaaggactcccaaggatcaaactgcagtgggcacctcttgtacccatctgtggtacccatggtcaagtccactgcaggaccaagttctgaccaccagaggcacttgtttactgtgttcatcccagaattaggctgtagaattcttgggaagctacatctttccagaggctgagactatgtcacggaactggcaaagaagggctcagccagatccttgaggcacttcaaggatagagcaggggtcattgcccaggtctcacttccacagtgcaccccatgctcttctagctggcctgtcacccagaagagccactggtcactctgggtaatgttccagaggcaacttcttacatactggtgggtagacctccttagtgtaggctctgaggtttgctggtgaacaattccataggatgatctgccggagacgacaggctagtaatcgaatcctcagccggggaacactagttctagagggcgcacgggtgaactcagtttgtccttagtaggtattggcctgtatctgaggctat

SEQ ID NO: 34418 - DNA, 671 bp, Homo Sapiens
tatacccgttagttccgaggaacctgtatccgagataagcaatgggtttagggtgaattggcaccatcatgtgattgctggggtggtggacgatgtgattgcagggcggcggaaggatgtggtgcttaacgtgcctcctgggtcgtcgaaaacggagctggtggcgattaatgtgatggcgcgagggtaggcgctgaatccgtatgcgcggtttttgcatattagttattcggatgatttggcgctgctgaattcggagacggcgcgggagattgtgcagtccgatgaatatcgtgcgttgtggccgttggagattgctgacgatgccaagtcaaagaagcgttggaatgtggtggtggatggcaagaaagccggtggggtgtacgcggtgagtctgggcggacaggtgacgggatttcgggccggacacatggccccggtatggcagggggcgatcattattgatgacccgctgaaggtagaagatgcctacagcaagaccggacgcagtaaggccaaccggtagctggtgtccacggtgaagagtcgtaaagccagtccggacacacccatcattgtgatcatgcacggttgtcgcaggacgatccgacggggttcatcagtctggggattacgggcgcgttggaatgttgagaatccgcttgttgata

SEQ ID NO: 34419 - DNA, 598 bp, Homo Sapiens
tgaggatgacatccatgtatggggtgcacttggtctccgaagcagaacatcctcaaatatgacctctcggggttcccgggtctgggcttggagctcttccacctcggccctcaatacaggcatgttctcctcaaactggtcaataaactgagaggaaaggcacagcatgggagaagggagaggcaaatggcccccaaccaaatggagaaaggccaaaatgaacgaggagcaaagctatctggggaaatggtatgggttctgtcactgggacttgctggactccagagagggggcttccccatgcaaggtgcggctggcttccaagttagtgacaatattcagtggtgctgaaacaggtgagggatcatggagaatggagacaggttacaaagtggcggggaatgctcaatcatgggaatgaatggaggctggcagagatagtgaagggcatgcacattaaaaaccagtgaagaggcaagataatgaaaattaattcaagaaggcagtgatggtgaagttcattaacactgataatgggtggtgggcggtaacaagaatcaaggggtaaagatgcccggtggttaatggctgaataggt

SEQ ID NO: 34420 - DNA, 584 bp, Homo Sapiens
gacagtacttttatatatggggtcctctcagctgtttgacagaagaaataataaagagcttcagatttcgttttagaatgacacgtcagctaatacacgttaggcttatcttccaatttgcagtttttggcattaagcttttagaaactttaccagatttatttcatgtttcttgaattctcttctccacatgaccaaggagtgaaattgcaagtttgtttgcataaaagaagcgcagaacagccacgttccatcctgtttaccagtttaggccccggtgaatgcaagcagaggcaggtatttgtgacctttgaaagcagctctcactagcacctcttcaatgtatttctgaacctttggatgttcctggctgggcaaatggttgattaccatggaatcaagcagtaacaagccagtcttacctttgactttagtgataaggattaagtaataatctccctcccttttggttgagctgcgtgtaccgagcccgagtctggttcttctgtgtgctgtgtgaagtgttgctgctgcaatcgtgttacctcagtcacagtgacttcgggaggagatggtcctaagtc

SEQ ID NO: 34421 - DNA, 430 bp, Homo Sapiens
ttagatctgagttccctccatacagctgaacccgcccgggaagtgtgtatcaagctctgtgtcctctgcctgagctgaggcctctgtgtgtgctcggtatgggttgggcctggggtgagagtgaccgttgaatcagtagccccaaaacatcgtttctggggagccctcagctgtcccagtgtcctgggtaagttcctttccctctccacgggaaaatgacagcacccacctctggtaacatattacattgccagtgctgggcaaagaacaaacgtgggagccatttggcaaatgaggaaacagaacccataaactcagtcaccaacacactggaggctggggtggtgcccagtgtgctgggaatggcagtgctccagccaggggacacagtgggcatccagccaccttaaaccccacagggcttggtccc

SEQ ID NO: 34422 - DNA, 381 bp, Homo Sapiens
cactgttggcaggtatggccatggtactaccccaagactaaccttggaaccccacaaagcctgacctatttgcagcaacacctctcagcctgcaatgtccattagaattggtgggatcttgtgtggccaagaggagctgaggctgatggcagaggccagtgcaaacacaggttctccccaccagagtccagattctttcaaagacatgcaggctattacctacagtccacatcttttgaatgacagttcctgatccacatcaccttatgccaccattacctctgctgctggacaaggagggagagcctgctcatttgtccatccatcagcctgtttagtccatcctcctctccatctgccttccttctcccttctgccctt

SEQ ID NO: 34423 - DNA, 459 bp, Homo Sapiens
ttaaaagacataatagaatataataagcaactgtataagcaataaatgcaacaagtaaaatagaaatgggtaagtacctaagaaaacttatcaggcatgtgaagggacggaacaatacaaccataatgaccaataaaccaacagaaaaacaaacaagataaaacagaccaatagatgatgccgatattggaaaagacaagcatttaaataactataattagtatgttcaagagaactggagtctattacaagtctataaaacaacatcaaaggaatactctaagaactcaaaaccacaatagtaaaattaagaacacaaaagattataatgacaaaaagagaagatagtattggcatactggaaggcaggtcgatagaaaatatccaaacagagaaaaaaatataaaacaacatgtggaacatgataattaagtaaaatatatgtagtaattaggatcc

SEQ ID NO: 34424 - DNA, 447 bp, Homo Sapiens
gagagatgagcttaacccgagaacaaatcatcccccgaggatgaggaacatatgcatgtagtgaatagtattgcaacccctctgacactttgtttccagttatgatttcataggaggttgtctcattgctaagcaactaatgagagctgctgtggttgaggttgacacacaggacctggtctgaaggcagaccagtcgactaaggtgaaactgcttcccagcacagaggagaatgttcatcttcagcaggaggctggccaggatgtcagagtcagagaaacagtttgtagtgggggagcaatgctcaagctgtgtggaggtgtgctcagaggtgggttaaggttcaatgggtctccatgggtgccaggacactgccggcctaagtcaggaatacatggtatgcatcccagcagtcctcgtggagctcaccactatttgagacgggca

SEQ ID NO: 34425 - DNA, 353 bp, Homo Sapiens
gcaaatgaaagttagttgctttagaaagagatttagaactctgtcttacagcatacttctccccctaggcaagtctctatctctggagctggggaacaatggtggcacttctctttgaatgacaacccagctagaggacaaaaacactttgtggagttggggcaacagcctcgggtctcaacttgcctctcccaatgtggaactgctggattacaagctggggcattgggtgactgtgccttcagtattctcagtggtactgtacacaggtacagcctctgtaccatgagtaagaaatagttcctgcctctcagccccactcatccagaacttgacctcaccaacaggccact

SEQ ID NO: 34426 - DNA, 462 bp, Homo Sapiens
gctattgactgaacattagtctaattcaaatatagtactttctgttctaaagtggttaagtcttcataataaattcaaattatcctgaaattatgtatcccttcatctattttgtccatctttttctcttttttcttgaacatatgattcatagttattttaaagttattgtctgctaactccaatatctgactcacctgctggcctgcttttattggcttatttatgattcacatgatcttgcttcttagcatgtctcataattctttactgcatgctaaacactatagagtccttatataatgttattaactacctataaaaaagacaaaaaagggctccctttgtactctggtaagcaggtaaggagggagctcatcatccaatgagggatagcgcttagttgagttgtcattttttaggaccctgtctgcttttgccttaaccctgtttctttttttt

SEQ ID NO: 34427 - DNA, 541 bp, Homo Sapiens
agagaagtagaggattctaccactggggcatcgtagtcccctaaattttaattttctttagtacatgtaattccatgagataaaccacatctacataaactaaattggtaaaaaccataaggttcagtaactttaatttttaccaactaaccaccgtaagtagaaggtagtggtgagctatggatgtcttctcgtgcatagataaagcattaccaaagcagatcatcccattttaatatgatgcatccaaattagctgtgccaaatatactctaaattcctgatactcttcctgcctctgcgtcgttattttctgaataggtaaattactgtaagttccccaaatgaaagatactctaaagcaaaaaagaactggaatttaagaaatattatgtgctctttctataaaatagaaataaaatttgtaggatataagagtctcaatacagattatatcactgccccatgcaaatatgattttatttaaacaaataatgaaatattactttttggataatactatttttatgtttacattattt

SEQ ID NO: 34428 - DNA, 430 bp, Homo Sapiens
cctcctctaccagaccatttaccacactgctagccaggcataaaactaaaatagtgaatctccgccatacccctgatataaaaacttccagtgattccctacagccaatggggcaaaggccagtcatacagcattacacacataggccctctccaatctacatatcctgctgctttcccacttcccaacgcccctgaacctataagctccattacaactatctcaagaaaatgacaataccccacctactacagcgtggtacatgctgcttctagaaacatagctccttgatacttctccatatagagtagaggcaactagcacgctcttagaagactcaactacaaaacgccagtcttcccagaccaacccccacagtccaaattaattcgaagcacccatgagcagtttgtgcaggagggttgcaacg

SEQ ID NO: 34429 - DNA, 516 bp, Homo Sapiens
gaaagcccaccacaatgcaaaagcagcagctgctggcgctcacattctcagaactctttcatgtacattatgccatttgatcctttaccggaaccccaggagagagatgggcagacatcttagactgttttcacagataaacaaagaagagttaattaagtctgtactaaggtcagacaggttaatagtgtgagacgagacgaaaacctgtgcatctgtgagtccaattcccagctcagggctctcttctaatagccgagggcccgtgatttctcttgtctactcgattattagtgaccaccttctgtgtgtctgagactgtagtgggctgaggggattgagagctcgctaagataaaagttggaccctggaaggagatgtgtgaccatgtcattagagactacacatgctgtgcttgtgaaagcttcaaaactggaaaagaaaaatcgccatccttgggattctacaataactatagttaatgacatacaatttgccaatactccctaacaccca

SEQ ID NO: 34430 - DNA, 453 bp, Homo Sapiens
gcaaggagacatcaaattgcagtgggcaaaggcagaatttctctctttctcatagtatttgctgtagtaccacacatggtgactgaacacctggagcagaggccccgtagcacactgaattggcctcattatatcatgagcaagatcttctatcactggttatccttattggagggaagacttcttttatagtctggaaagacatttaggcaacttagccttgtgatagaaaacagctaaactactacagttttctaagttccaaatcaagatttcactcaccccctagcatcttactaaaacctgggtttcctataggggaggataaattgcccacaaagttatgactaccagaattgggactctgttctgtgaagtagaaataaatgcagagaccattttttcatcctagagtaagtagaaaaaaagcaacagttattttcactttctttt

SEQ ID NO: 34431 - DNA, 529 bp, Homo Sapiens
tcgaaaatgggaggtgaggttgtgttaccagcgagaagtcagctttgaggagaagtcctccacagaagagagacaagggcaagggcttacttacttgtgggttaccactgctctcacctggaccctggtaggctttggaaaagccaaggtctccccacagttgtaagacaatttcatcctcggctccaaggtctccacggagtgagaagcttctggcagctggccctttcaaccagaacaagaacaggaaatttttaatactgttgcaaacaattaactatctttctcttattgatcctttacgcatagatatttgagggtaatatactacatcctaataattatgtcgataggtgacagtagtgtaccccatgcctgacagacataaatgaccctttaataggttcttaccatattttcttcattcagtattgcttctcttcatctgaatatatttagccatgtctccaactctttttttcaaaagtgctcatccttcagcttatcttgactctggacagtcttcatc

SEQ ID NO: 34432 - DNA, 403 bp, Homo Sapiens
aggtgactctgaggatctcccccggtatcccaccctggggccaatgcttttcacaagtaccaagtcataaatagatgccctcataattgaagatgcaaaaaacaaaacagaaagagtgagagcatgtgcatgattgattcctatatattgtttattagtttaataccttagtacattaaccaaacacaagacttcaggacaggtcgtctgtggagtaatatcttcatagaagctattctcccatagatatatcctttcatttgaaagcgtgcaactggccagtgggctcttcgtgcctgctggccagatacagccgatatatcaatttagaggaattgcagtggagaaagagttcaattcaagcagagccagctgaatgggaggctggagtattattactcaa

SEQ ID NO: 34433 - DNA, 364 bp, Homo Sapiens
cgatctaaggatcttcccctgtatcccacccctacctatacttagtccttttcttatacaaatgaaatatttgcttagtaatcctttttgattcatatgctgttttataataactatagtgcttcttctacttaagtaatttttgacatctctaatcaatccctgttgacttaaatacattagaagtcctcaaaatctaaacattaaatagtttttatttaaagaagataaactggatataagtaagaaatactcctcaacaggctaatctttgatatccaaccctggggtggactgaattatagggactttgtttatctgacgtaaaccagaacaagtaaaacattcatttcgaattaaagtg

SEQ ID NO: 34434 - DNA, 584 bp, Homo Sapiens
gcctgagatacacctttcagccttgctgatctctccatgcttgtgtggctgggctggtagaagaatccacttgcactgctggatgcatgtgatgctgcagtaccctacccccagggcactgtgtgcctgctatctcagtgggtcctcaccatagcccttggaaatacagcttgttttactctcatattattattctcattacaagaggaggaaacagttacagaggttgtaacaaagccacccggatcggggaagatgtataaacttttctgttgctgtaccacattacctcaaaatcaaatggctttaaacccagcacagatttatcctggtagttctacgaggtcagaaattccaaaagcggaatctggtttgcatttccttctgaagactataggggagaatccattacttttgcccctttttcccacgcctgtaagaggccacctatgtatattgggttatggccccttcctctattataaggtcagcaatggctggcaagtcagcaacagcatggaagcctgcttatgactttgattcctcggggccattaacatccagaggttccaagagcaacagct

SEQ ID NO: 34435 - DNA, 741 bp, Homo Sapiens
cttaaaggacgtactggtgtacagacgaatgttataatgcttaccagccacagggtgtcaactgaatacataaaccagatgtggaaaagaatctcacttctgatcagttcctgaatttctgtatgattaatcacaataatacagaactttaaataacattagtcttatataaatacttacatatcaaacgtattgaatcctacttatcaactagaaaagtgataaatcagaaatttccttattctctattaagaaaaatgaatctaagccttatgtccttatacagaaatagcatgatttagaagtaccaagtataatgatctgatctgtgaaaaaactaataaattaaagttaatgtaaaacaataaaattccttcaaaacggagtaggaagggctagtaaaatctcaatcataaagcaagtagaaacagcaaaggggcagatgtcttcgctgactagaatatgtcaaaatgccataatatttagaaaaatgttaaataccatgctaaaaatatattcaaaggcttatattatataaccagaagtcacaggcaaggcagacactacaagaatatatgaaaatgaaatcaaaatatactgtataaacttaaagagtatcacggagtaacctgtagacaacaatctgaagtgtcctaatctggaattcaatcgtatgaattgattaagtaaagtaccggagattaaacagtataaatatattgaatgaatacattttagaat

SEQ ID NO: 34436 - DNA, 482 bp, Homo Sapiens
acattatggcatactccttcaatgataactcagctgcttgtggagagagggcactccaccatggcccctgaacatgcctgcactctcttgctgagtaggccaatccataagacttacaggctcctgataatgagcaatgtctatagctactcacacagatataactaggccaaggcaactactgtaattacctataactgcttgctccctagagggagtggggattggcacattagctgcttgctcaaaaagtgctaagcccttgggccaggattcctctcctgtaatgcaaaccactgcagatacgtatgtcatctgggctcattgagttaccccataagaatttgagggcaagggaaaccattgcaaataggctgacacatgctatttgctgtgccatgaataataaattcctctgtctctgaccaaggagagtcatgactattgccagggtccatgaaacaatgacagactaacatatt

SEQ ID NO: 34437 - DNA, 561 bp, Homo Sapiens
ctatggtcagctatcataatatacataaattaatcgcatggagctctggatgtggaaatgaaaacagtcctgctgggtcatcatctcaaacctggactcttgggagagataccctgtggatcattacatcttttcaattccttccactcctgtttcctcaccccatttgtggtactcaggcaacagagatgtcctctggctggaaatacagaggatgaggtgggcacccttggactgtccctggtttaaatgtcacctcctctccccaccccctttcctggctctctcaacgcacatggggatgtttaatgacattctccttttcccctcgtttaggcctagggagcagtgatattaactcactcagtccacacaactttccatggagattactgtaatctgttattcccgctgtacagatgaggaaactgagtcaaaataaattatttgcccaaagccacacaggaactgctagagctgagactggaactccaaccatcaggctctcaaatcctccttttagccaccatgccctaatgcaactcgaaacagaaaaagggc

SEQ ID NO: 34438 - DNA, 384 bp, Homo Sapiens
catcaattgtgtcaagctactttaagcataagaaggttgcctgcttacctttgacatgcaacctgaaatactctgaaaacagaaaaattgctgttctgcctctacaagctgcccagaatggctggacttcaaataaagcagaaggggaattgagagaacaaacaagagaaagggtagtgaccgatggacttccttataagggaacagtccccagatacagctcattccctcaagcagtaatggacagaacaacctaaccaatgggaagcttcacctgggttggtgtagggagatagctgctggtcccagcaaactgctctctagagacagaaagtatccatttggtatgtgtctcgctaaattcaaactaacacagattcctcc

SEQ ID NO: 34439 - DNA, 503 bp, Homo Sapiens
tagttctcgcgtcttaaataaatccttgcctgagcagcaaagtcaacatgtccagatcaaaactccacatctttccccaagaactgatttctcttctgtgtctccaaaggtgttaccactttccttactaaaccaggtttaaaatcttggagtcacctttgattctgtttactaattgctcctaattaatatgattatatagtttattgtccaaaccttttcgagagtaacagggtagccatgagtaattacatcaggaaaacatatcccaggcaaaccaggaaatatgggcagcctacttgatgccttatgaaatgcggtgattgccgagttctgtcattctcacctataaaatatctgtcatgtccatatcctctattccatactgactacttaagcctcaactgctattaccagtgaccttctaactgcttttcctacctgtaagctagtctcaccccctccatccttgtgatgcattattggcctcgtggtcttcccga

SEQ ID NO: 34440 - DNA, 379 bp, Homo Sapiens
cgtacacatagtgttggtgatttgtatagtgtgagcacattgtacccagggctgaatttgaacttcttaagaggtataatttggtgcatcgataggtgggggttagagcaaagggatgattaactagtggtccgggtaggtaggtgccagaatagaaaaaaggaggccagaacattttagaggtttgagttcgaggctagaggcagctcagcttcctgaataagcctaggtagaggagcagttggcctgcgtgaggaggaggggaggagaggctgtgggcgggagaggagaacagtggcggagaagcaaggctgaggaaagggaaggcagagcgggaggagcctaggagggagaccctgagaagagaagggaggacata

SEQ ID NO: 34441 - DNA, 356 bp, Homo Sapiens
taatgggacaagcgccctcctgctccggagcatagcacccaaagcctcaatagaaagacgtcggcaggccctgagggttgctccatggtcatggactgcccgtactcgttcccacggtacagaaacttgatggtccaggctcagtcatcgggcagagacgctgaccacagctctggagcgctaccgaagcgctgtatacgcccctggcgtacttccatctccaggggtccagtctatgggccacatggtctcccgggctagccggatgcgcacgcttgccaattcgcccaacaacttggccctgtccgtccatttagaacgtggacccctacagaactaaaaacatgccttgaatc

SEQ ID NO: 34442 - DNA, 388 bp, Homo Sapiens
aggaaacaattcgtacatccagcctgttcctgccgggatgatttgatcgtacaccgcctcttctattttgcgcggactttctactgtatgaaacatcgtcatttcctccttgtattcaactttgctcagttgcagttgatcaattgataatactcccacgtattttcaaatgcacgccgattttccggacaaaagttgacgcaataatcgtcaagatttgttggcacagcattaaacacttccatcgtgacaggcacggaaggataaggtgttcttgggtctaaaggattcggtgtattggacaacacaagcaatacatccatttctgtacgcagcgtgacggtagctcctttctggcaatgccctacaacaaagtgcatgtcaccag

SEQ ID NO: 34443 - DNA, 368 bp, Homo Sapiens
gctctcgaggatccccgctgactatttgttgagtgctgcaaacaaggtacttgctaagcttaactttagtgaacaaattaggaagaattggaataaggtaaaactagctaaatgactcttccctgagaataaatactaatgactgccccttcagatggtgccccctcatctgctttactgactgtttcttagtagtagttggcaaaacacctcttaaaataccatacttgttttcatcgtctttggtgtatgaaatagttgaatatatcctttcagaataatatttggccatttacatctctcttttgcacacactgaatttgccatcttgtcttcctgttcctacacctttaattggggtaccgagc

SEQ ID NO: 34444 - DNA, 534 bp, Homo Sapiens
tggagacccactatgtacctggcatcatgcaagggacacagaaataaaattgccaattcctgccctcatcacatagttggggagaaagaaatttgaacagaatagagcatggacagcgtggtgaaaaaggcaaacacagggtgctgtgggggggagtctcccccagctggggtgacacaggcaaacaagagaatggctaaaggctacctgtatgaggtgacagctgacatgagtgtgcaagtacaagttaggggttttctggttgttttcggggggacatgaaggggcaaaggatcccacagaggtacaaagatttttctaaaacacagcagacttatttcaagaagtatttaggataaataaaaagacctgaaaggagaaatgagagctaagactaaaaaggctggcaggagccagtataaacgattactctcttgctttacaatccacatcatgacttgttaaagacagaaattgctaagatttctgggggaaaaagtcaccaatacctagtctacatcatatgcccaatca

SEQ ID NO: 34445 - DNA, 539 bp, Homo Sapiens
cattcgtgtgagactgcaagagacgagacttcttcaaaggaggtggttgctcctccactctgcctgccagtagctctagggaatcctagagtagtgttgtctgaggtcctgatttttcaaggggaaccagaaattttgatttctgtgatattttaacatttttaaatgctagcactatttggaaactgtctaaagtctgcatctggcctgtggcctgacatttggctgtctctgctgaagttccacacttccactttattaggagacgaagcctatgaacctcattctgagcatcaaatgaagcttgtagttattaattgtctttattatttggagaaaatactattatttagctgtaagtaaaggttttatgtagctcacatggaatactattgatatttgtgcagtattttcaggaactattctaagtactctgtctgtattaataaatttaatcctccacgactctataaggtaagtactattaatgtcccagttaacaaaaacggaaatggaagcatggctgaaattaaataact

SEQ ID NO: 34446 - DNA, 414 bp, Homo Sapiens
aacagaaagagatgtttaggtagaagaagaggaaaaggggaggaaagccagagccgcagatgcagaatggaagtcgggatgggtgcatggggagctctgtgggccggttggtgctggccctcagagaagatgctgcctgggtgaaccaaactttcccatggaaaaagtggagagtaacttgccctaattaacgtgaaactgagcacctagaactgggcctggtgccgagaagataatcagtatctctttgacatcagcagcagtcagctgctcacaaatgataataaagatctgggagggtgaaggggccaaggagaatctgtccttccagcggctctctgggaacttgccagagaaggctggagcaggggagggccttcaccagacgtggcctggttctcacataggggtacc

SEQ ID NO: 34447 - DNA, 450 bp, Homo Sapiens
catggctgagacaaaagccagttggaaagttattataccaagccaatatagtggtgtgaggtgtactatacacaagaatgaggttgttctagattaaatcagaaaagcaggttgcagaatggttgattagtatacaaccatttccatagcaaatatgtagcacgtgtatgtctgtatcgtcatatggatgtgctaactgcttgcatagctacattctttttgtataagtaactcaccaagctactaacagtggttgcctgtgggaagcaggacaagggcctgggaagtcaccactgggaagaagacctttgtattctattcccttttgcatcttttaaattctgtaccaggtgtgtcacctagtcaaaaatcggtttccccaaaagatccacctaaatcattaaactggaaagccagaatctacaaagtcacaatgttaagaaaggagcc

SEQ ID NO: 34448 - DNA, 355 bp, Homo Sapiens
tcatattctataattaggatgcagactaaaactctgcatttgagtataagcaagcttgtttgaatcttagaagctatggattgtctttgattatcctttgctgtatcagacatgtagcacacttttgagcagcttttactcaactcactagtattaggttgtgccagtttagagtactttctgagacatatctaaaagcaaaaatggtgacatggaaagattctcgctgtaatggggattaagaaaaatcctctttctctttctctatctcttagatagtcttagcatattcaataccttagggcaggaattgataatctagcaatgggaatgggtttaggggatctgtagatcc

SEQ ID NO: 34449 - DNA, 410 bp, Homo Sapiens
ctcttaaaggccggactccatgaccttcaaggatggagccaaatctccctgttcctcgtgtgatcttcctgtgcccccctttgggctgaacctactgtgtggttcacccagggacttcaccctactttactactgtgtggttccctggagactgggggcttaatccgtctctgatatctccttgattggatagaatttataattggccaacaatttaacaaacgaatgcattgtttaaagaattatttaaagttttaaaaagtgtttgattcagccatcctaggaagggatcaaaataagaatgtatctggaaatgcttcatggactgcaaagatcaatatgatttaaagaaatgccattttatacatggttcttcgaattttttttgattgagaggattctgtgcaatt

SEQ ID NO: 34450 - DNA, 368 bp, Homo Sapiens
aactaatgacttccatctctagggtgaggtgcaggctgtgtgcttatgttttaaataagctctccagatggtactgctgattcagtaggaaaagggcagttattatatattcctttctcctgcaccccaatcaagcccagtgtgatttcagagcacccatttgggtgaaagcagtcacttgatgcccagccgccttacagtccggctgaaatgccaggagtgctgttattggtatttgggactcgaataggggctaggatgactctgtgaaaaagagccataaaaacaagaatttcatagctaatttactgcttacctatacttgggcaggccattcaacataatattcttctgacttgagtttctct

SEQ ID NO: 34451 - DNA, 397 bp, Homo Sapiens
ggtgatagctgactcttgaggatccccagtgacatgtgagtggaaagagcggagtgcaaaggcctcagctatgatgagtcctacagggagagcaattcaggtagaggggttggcaaagacccaagccctacagaaagcaaacaagctggggcagcgaccatcaggggcacatggcagagaggtgggctttgtgtcccaacacagtgggaatcactggagactttgaagcatggtcatattttcaagtcacttgcagctgtgtaggagtggaagtagaagctgagtaccctgcaggtctcggcagctttgatgagaacaaggccgcttagccagggctgggtgcagaagcagtggcaaggatcccccagacctgggagacctcactgccaaccaagca

SEQ ID NO: 34452 - DNA, 378 bp, Homo Sapiens
tgtgaattctcgtgggcgtgcaaaggacccacagctgccgaaacactggggaggagtgaagctgaatggcagcaggtcctgggtgcaagaatcacaaaaccacagtcatggggccacgtggcgttggctttccgaccgatgagcagaaccagagcgtccagaaacaggcgcccacacgcggaccactgacttgatgaaggctcaaagaccatttaatggcatcttttaataaggatactgtaaatgataggatcactcatacaccagaaagtgaacttggagtcaaaaaaattaaccccagatgcgtcagggatctgaaggtaaagcccagaaccgcagagctagggcgaagcctttgtgacagtgggccgggccaca

SEQ ID NO: 34453 - DNA, 515 bp, Homo Sapiens
acttggtaggtcaggatgctacaggcgctaacaaggggaaactgatatttacaggatgtgtttactatgtgccaagcctttccctgaaaggcacctgaaataacaagataacatttgctaatcctcacaaccaccctatggtgtcataattattgtcctcattttaactggtaaggaaaaggcagttatacatctcatttgaagcttaaagagcacaatatgtgaggaagactggatttgaacccaggaccatttcactccattaccgatattctttcccctgtattactacatttcccataaacctaattcatagttgctgtttaagtcgatctgaagttttggtatgatctttcaaagcctaaatctggacttataaaacacaatagatggtactctaggctgtagaacttcctttctgaggggagagaaaatttcattaacttggttttacagaaaactgatcagcttgagcagcttttcagggtttctttaagaatatggcaattgagagt

SEQ ID NO: 34454 - DNA, 547 bp, Homo Sapiens
cagatcacatggtgagaaaggaagccggagaaagaggcgggaggtgtgggatgcttttaacaactatttttaatcgagaaagaacaaatagagtggtaactaagagagtgagaactcactcattaccatgagaaaggcaccaagtcgatcacgcaggatctgctcccataaccccaacacctcccactaagctccacctcccagcaccacgacactggtgattaaatctcaacatgagggttgtaagggccaaacagccaagctacagcagtgtctaaattggacctagtcagacctgaattcagttatgcctgttacaatttataatagggagacattgaagcgcctccataggcgggcttactaggtagtgagtggtctgtaaaacatattgggttttatggaaaactgctgagaaaacatactgggcaggaagtgagaagaaattaaaggtctatgataaatctcttcaaggatttgaagaggcaggttacagaattctgtggtgcttcagagggtaacataatccagctcagaataggactta

SEQ ID NO: 34455 - DNA, 359 bp, Homo Sapiens
agatggaacctctaactgtgtgctcacattggtagaagggaatgaacaagatctctcaggcctcttttataaagacactaatcccattcatgagggcagagcccccccagaagttccaccatccaacaccactgcactggggattaagttttaacacatgaattttgcggggacacaaacattcagaccatggcaagtcccttccttatcactatattgtaaacataagaaaaaaagtcaagatattataagcacaatttttttcgggtctttatgtcagtggttagagtcagattgcccaagtcttcactattcctatcaatcaccatggtttcatagcctccttggggggatcctct

SEQ ID NO: 34456 - DNA, 561 bp, Homo Sapiens
ctaaccgaatattctgaatgtcagacaaaggcgagttaaaggtagcagatctcatacctgcctgtcaaagccatggtgcctggtaccgcccttcactcccccaagcggagacctcagcagatttcaccaggggcctgaggactcccccaccacccctctcagggctggtgtgtacatctgccatggggggcctgagtgcagggttcccctatctggctttactcagctttaccaccccatcctagagagaaggtgactcaagcccttgagcactccaggtcccaacccaccacctgggacactgaaagcgcttctacagatgttaacaaagatcacatataaacgctactgctatcatggcagcctgctctaactggcatgttacacctactgaccaggtcagcctccaaaacacaaggcgaatctgctgaaaaagatgcacagcactcaggaaggagacaggcttcatgtgacctctgcatccaccatcagccatgccgccctggcttctcagtattctgaagtggcttcttcatccacccagtacacagctactacaac

SEQ ID NO: 34457 - DNA, 425 bp, Homo Sapiens
caaggaggcatttgaaaacttgaatatgatagctgtcaactcttttaaaagaggtatccaaaagaaaatatgtgagagttgagtgtgttgttgctaataaatttgcactgagtcttttaggaaaacattttctcctgacccttaaaagtctttaaaagcatgtgccaagaattcatcatagcagcagacaacacccaaaatattgagctagggtttataaagccgcctccctcctcgtcattttttcctttaaagcttagtttctttacttttaattaacagttcacatttctctggtttctcatcttgaaataaatgacgttcacaatcccttgaactgcttcacccagacttcagcccccaggtacacatgagatccaggatccacttttcttttgcattgccctgcccagcaatttcattct

SEQ ID NO: 34458 - DNA, 480 bp, Homo Sapiens
ggaatatatgaaaattatcacagcattgtggatatttagacatatataggaattgtgagagcaagaatttaaaatcggaaaaatactaagacagaggtaaaaagcccagaaaagccatagagagaatttaaatgctgctctcccactaatggttatacctttttcatcagcttcttcatctgattggattaaatttaaaattttcctttacccttggatatctgacaagacttctttcaatacagtgagactttctccaagaaaaagaatccacttgattggatcggaaaccacaacctgcctctggcaagttaaacctttcagtaggtcaggtcatgaatcaggggtggtggcatttcatgaaccttgcttggattctttgatcttgccccgtgacccacacagacctggtaaggagcttcttctcattgacggggataggggagtggactctatcttccacttctcttgtctttcctt

SEQ ID NO: 34459 - DNA, 386 bp, Homo Sapiens
tgtttcctggggaaagcctagctgactacctagcaaaggctgtaggatggcaccattgtatagtcacttaagtcatgaggtccagttctcattttgtaggctcagaaatttgattctgttggtgtacatagaggtggctcatactagccaaacgcatgagagactgacttatatactagaatatccttttataatttccctgggaaaaaaataaactgtcaggtaggtctggtcagcacttcctctgcttttggggagagaaacaggtggagaagtcagaggtttctgattggggcggatgtgcagcatgttcactagtaccctttctctggagacaccagcagtctgggcctctcgggcctccctggcattccttgcataccatt

SEQ ID NO: 34460 - DNA, 407 bp, Homo Sapiens
ggcatgggatgaaaagggcagaaagccagtccctgggctcagtggctcaacatgcctgagactcacaccatggggcaagccactcgatcgatcgcccaaggaaagcttctgcacagacttggacctgaaaccccactagcccagccactagcttccttcttgcattagcaacacggaagaggcccctctactctcggcaggactaggaaaatgaaacaagtcaacctacttgaagcatgcagcacatatcccacagacctaacaattggtactagatcctactgttgaaaaaatctgccttcccaggctgcaatgagggccaggcgtgagtgatgtgtgtgcaaagggcatcctctcctccatcacccatgtctcttcaccgagccagagtcaagctccacagggcc

SEQ ID NO: 34461 - DNA, 534 bp, Homo Sapiens
tcgaatgggtagtgagagacagagatatgaactatagccttgtgtcccattatagaaacaaagactgtagtaagtagctttttgcattttctctttgcttactatatatatagtataagatattgaaggtaaactttataaggtagtctttagttaacagaatattcagaggcactatgacagattacatacaaatatagctagcaatgattgttgttgtgtgtctccttatttgggggagagggtaagaactccatttgtataaaggatagttttgtcttgttacgtagacacagattgttgaatggaatttcaagtgtgtttagaagcattcataaggaagctgagcagccaggggagtggactgtgacagatatttactgcctctccaaacatactggctctcagcttcaaatctaccctttattgccatactttgtgataaggatgagaattgtgtaaatgttctcctttgctatctgaaaatgttgcagttttgtcagcagagggtgctagagtaacactgcagtaaga

SEQ ID NO: 34462 - DNA, 404 bp, Homo Sapiens
atttggccactaagtggcctcctaaatggctgatttctttttaaagtatgaagattgtttgctgtggcattattaattacacacagatttgtaccactttcctccactagaattaaggaaatttgtaaaaccaactcgtggtcagactccagcaaatgacccatcgttttccaccagtgtctctgtttctatgtaaaattatagattaaacgccaagtcctctgcctccacctgtccagggtaagtaaccacctccagaagtgagaagctgggagtggctctgagaggggctgactcaagtattctcctaataaataggggcgggcgaagcatcagggcgaatcccacgtgaggcagaaaagtgagctgaactatcctggagtgttttgttgcattccatatct

SEQ ID NO: 34463 - DNA, 420 bp, Homo Sapiens
tgggcacaagcgatcttcccacctttgctgaaagtggcattttcaacctattcaaccttacatttaaatataagaagacatccttcttgccatgatgtcaatcagtgacccagactttctagctctactttgtgtaaactcatttaggtggcatccaaagaactgagttttatagtacttacttggtatgccatagctactacaatccttattttgcttatttcatagcttaaggtactgaaagcaattattcgacagtattattattattaattgatattgatattctccagaatattgtttttaattgcagaaatgaaaaacactgcaaatatccaataatggaagtgttaagatagatgcataaggtagaatattatacacccattaaataacatgcttttatttatttttaagtta

SEQ ID NO: 34464 - DNA, 513 bp, Homo Sapiens
tcggccgcctactactactactaaattcgcggccgcgtcgaccttaatattaataatttatagatttaaccactttagtagcaataaaagataattacagagatgtgatggctatatagaagtaaaaattaagacattccaaaacatttttagtacaattttgagcttcagattattaaggtaaaaatggttccagttcctactgtttataatggttcattattacattcaaagtcacaaatatccctgttatcctttctttgaaagaagcttttaacacctgaaagtcatctcaaaatggatatatgggtaataaaactggatcaggtttactgaagtttaaaatggccaatttacactatataactggtgactttaaaaatctctaacgggaggaaccaggactgctttcttcataagtactcacagaatactattccaactgtacatatcatttaatttgatcttgaagatctagctggcagcagtctagcaatgggctaagcaaagctc

SEQ ID NO: 34465 - DNA, 367 bp, Homo Sapiens
ccgcctactactactactaaattcgcgggcgcgtcgaccgtcattggattagtctaacctacatcattgtataaaactaacctacgtcattgtattagtctaacctacatcattgtataaaactaacctacatcattgtattagtctaacctacgtcattgtattagtctaacctacgtcattgtataaaactaaccttctatcgcgtctctctggtaactaaccttctatcgcgtctctctggtaactaaccttctgtcgtctctctggtaactaaccttctgtcgtgtctctctggtaactaaccttctgtcgtctctctggtaactaaccttctgtctcgtctctctggtaactaacgtcgacg

SEQ ID NO: 34466 - DNA, 520 bp, Homo Sapiens
tactaaattcgcggccgcgtcgaccctccactatattttggaagcacttgttcttatgtagaaattacagttatatagttagtgctgaggacaaaattattttaaacactactgatcacctaagaattctatctttgggcctgtctactatgattttagaaatttccaccaaatgatacttgctagttaaatgcaagtatctgtgattctggtaggtcaagtggtaaacttgtctttgtgacacagaatttatcattttacactaaaaaatttataagaatatttctcccatggcctataagcatacctgttaacactttttagatttaaaatatataaaatgactcttcaggcatctttttccatactttgaaaacacactagtaatggtaaaaggagtagctgttgctatcttgattctcctataatacccaccatctgatctgtatttctacccttgctgcagagggttaattaaaaagatatgcatcaaaacatttgcttaaaagagacatagccc

SEQ ID NO: 34467 - DNA, 466 bp, Homo Sapiens
gcctactactactaaattcgcggccgcgtcgacggtaaatcaacattgcgcgtgcagacgacaggcaatgttactgtaaatacatctgataacgacgttgatgcgcttcaagtaggtggcaattctcaagtctccggtgtgtctaagtttaatgcgctaatgactaatgacctgactcgtatccctcgccctgatggtggtgcggcaaaggttactaccggagcctccacgggcgcagtacagattcaattaccagtcctgtacacgaacgcaatgatgatgattcatgtgcgaatgtacgactacggaacagcgggggtgtatgacttactactggctggttacaactacaacggctcacctgtaggatggacgaactgcaaagccgtctataaaggttctggagtttatcctgcatttaatgtccgctttggtaacatcggcggcaaggctgcgatatggatcg

SEQ ID NO: 34468 - DNA, 390 bp, Homo Sapiens
taaattcgcggccgcgtcgacaacacattaacttttgaaaagccattattttaatcagtgaaagcctcaagctgcaatggaaagtagtccctaaaatgtggaaaataaaactatcagatgcctcctttttccctacaaaaatatgtggccactttgctcaaattccatgtcacagatataaattaagcataaacaaaaatacataacattttataaatttttaaaaagaagttgtcttttccctccttacaaccctaagcaaaaaaataacagctcccctggactcaccgttgtcttctttagaggaaacaaccagtggaaagcatcattttaaaacagcatcatcttctccctctcttctgcaccctgagtctctcacaaatctaccca

SEQ ID NO: 34469 - DNA, 440 bp, Homo Sapiens
ccgcctactactactaaattcgcggccgcgtcgaccctcaacactgttattctctagcttatcttcttggtcagagtctactttcttcttttctgggaagatgcttgtaagggagtaaggagaggctttctagctggaagggaagggcaaaatgaatgattagtgtttggaaacaccacaatactctgggaattgaacgttttctaaatccctgattgtaatgctgatgagtaggaactgactctgtttgtcatgtttagttttcataaatgataacaacgcctaacacaatataagtatattttctttttcaatataaaatgtctttaattcttgtattatttctttacataaatggacggttaacctaaaaagtatgctatttcatacgctcttatataacataaatgagaaagcaaacactatgaataaaatctaat

SEQ ID NO: 34470 - DNA, 396 bp, Homo Sapiens
cgtcaaaaggcgcaagcatgttgactgttgaaattggcttgagggaagtacgccagaccgcaaaagtagcttacactagcagtcagacagccgctggctctgacaccgctaatacaggttcagtgcaaacgcagacttctagtgacccagtaggtgacatccaatgagcctaaccgcagcacgagatgatgacggcggcgtaggcggcgggattggtggcggcactccaacgcccacgccgacacctgcgccctctcctactccgactccttcaccgacgagccctgtgccgcccgctgtcactcctgcgacgagtgcgatcgtaccagctattatcgcatctttggagcgaagcggcggatccattggcgtagctcgcataccgctgtctgccat

SEQ ID NO: 34471 - DNA, 378 bp, Homo Sapiens
gcgtcgacgaacattggaaaggctccattactgtatttatatacagtaatggagtcaggcgaatctgcctagcaccgtctggcaggcgccagcctacggtttggccggcatatcctccttgcgcaacgccgccacatcggtggcctgtactgcgccgccctgattaccccaactgccgcgaatgaaaccgaccacgtccgccacttcctggtccgacaatcgccaggcagacgccggcgtggtgaagttcgaatgtgcggtgtgggtcaccggcaaggtgccgcccttgagcacgatatggatcaacgacgtcgggtccgccgattgcaccagcagattaccggccaacgccggtcgacgcgggcgcgaatttagtag

SEQ ID NO: 34472 - DNA, 468 bp, Homo Sapiens
gcgtcgaccagcgagcaaatggagcgcgaaagggccgatgtggtctatggtgtccagcagcagcgaaaaggcaagcacttcaagcgctggaccgggcaggtgttctacaaactcttccgtttcctcagcgggctggatatgcccgacaatatcgtcgtcgccaggctgatgtcgcgccgctacgtggacgcgttgattcagcacgacgaacgcgagttgttcatggcgggtctgtgggtcatcactggcttcgatcagcgtgcgcaggccatcgtcaagcgcagtcgtgacgagacgacctacacgctgggaaagaaagtggggcaactggtcaattcgattactgccttcagcagtgcgccgctggtaggaatcttcggtgtgggctgcgcgatcttactgctgtcggccgcctacacgagcgttctcatggtcaactggctgctcctgcgaacccacccagcggcg

SEQ ID NO: 34473 - DNA, 654 bp, Homo Sapiens
taaattcgcggccgcgtcgacgaatcttgcttgtgtttcaaggtatagacagcccaaaattacccaaatacagccagctaagctactcaaatatgaaaaagaaaatatatcagaatgaaatagccctgtatatgtgaataatctcacttaatctgtaatcgaaagcgtaaaatatagaaaagataattaggaaaaagacagggaggtttttgtaacatcattagtcatttagaaaaaccaagtatgggcaccttaaaccacaattggcctggaggagacttgaaaagtcattttgatccaaccttcccattgaccaatgaagagactgagaccttgaaaagcgaagtgtcatgctcaaggaaatactgttttttaggggccgattattaataagttcaatatataccctccttccaacccatggaaagatttcaaccacatttggataggatgttatccataaaattattaaaagggtctggaggtggacgcggccacgaatctagtagtagatttcaacctcgtcatgccgtagaggtactcgagtctccctcaccatttctgacggcatctacggctcaacatttttgtagccacaggcttgcacggcttcacgtcattaatggctcaacttttcttactttctgcttcatc

SEQ ID NO: 34474 - DNA, 372 bp, Homo Sapiens
gcctactactactaaattcgcggccgcgtcgactttcaagttgcggctaacagctcgggatgaaaccgtattaagcctgcattcagagtttatgccggaatgccctgctctttatacccaacgtcattcaagatgcaggaaggcggcaagggaagatagacagggaacatacatcagtatgtgacccggctggctgagtgcggccaacgaaccggaattggtgaatggtctaacttaccccataaaagcatgaaaccgttggtccatgggctgcaagaggatcgtggggattatttgcggtatttgatttattggaaaagccagagtcaataatcaaaggtcgacgcggccgcgaatttagtagtagtaggt

SEQ ID NO: 34475 - DNA, 545 bp, Homo Sapiens
aacattggctcgaatttctaccaagtcaatagcgcggtcatgcgaatagcgcctctgacggcccccggcttgagcctcggtcttgatcgtaggagccaccaacaaacgcttccagatgcgcgctatctaaatttgacaaaaatgcttaacgttaatgtaggagtccatacgaacccacgagcggccacatctcatggatgcaagaaatcctgcacgtatctcgatttgcatagtaggtaattcagcacagacggctctcaatttcatggtggtgggcgctgatccgcgacctgtgttccagaggggcccgagtgcaagtgttggcgcctcgttggacgacggctgcccgggcgcagctcgaacgatggggggcggagggagtggagtaccccttgtctccgggtcgggctgactcccctcgccgatttgcgctccttatgggcgctttaccttcatcttcggcgcgagaggccgcgggtggtgcttacttatattgcgaaacccaaacctactggggcatactcgccgcgacgctggcttggtgt

SEQ ID NO: 34476 - DNA, 549 bp, Homo Sapiens
gctgaacttgcccgaacgggtgttataacgtgacgtttcagctggtccgccaggtacgagctgaaagacattcctcgctttcctggcacggtatgcacggatgcaacctaaaactcagctatcgctgatgcttcttcgctcacggctagcatcagccttctcaactgcaaggaccccttcacgtcaccaatcaaaagcatctcagacgagtaaccgcagatttgaacatggcatgctattggttcagctcgccagacatcgatgcaggtacgacgctcgagccaagccagggcccgtgttgaagtgctcgaaactctcaacaccgacatgagctgggcccggccgggagatcgcgctaagctggacgaagccgtcgacagcctcgaggaagccacaaactcgaccgagtggagggagtggaacaccaattccgtctccgtgccgttcgacgtcactcggctcaagtaccctatccggaaagcatggtccgacagccccagcgagcctaatgcgcttgacggcatgtctatcaccatgctacgcgttggc

SEQ ID NO: 34477 - DNA, 381 bp, Homo Sapiens
gatctcccgtcatgcgcggcaaggcgtcgatggtctcagcgacccgctcatggaaccactccgcggagatggaaccatcgatggtccccaggtgggtggcgaacagcggcaggacccagtcgcgactgtatgcgccgagaagacgaagaggcgggttggtgtcgacggcttcagccaactgctgtggtgttgctgtcaacgggtcccccctgccggcctcaggtgtcgccagtatctcctataccgacgacacggtgccgctttggcgggcggacgggggctcgaggagggcgaggatgcgtgcgcctgggcaccctcatccgccagatgccctcggcggtatgtggtcggggtcggcagcccggggtacgtagcgttctt

SEQ ID NO: 34478 - DNA, 496 bp, Homo Sapiens
gaatcccttgtcaggagagccttagaacacgagcgtacaccacgattaccacaagacatgacgaacattaaagcaagtatactctggccagaaaccagcagtaccaaggccaagacactgcagcgcatattttccgcaaaacttggagtcgtaagcaacagaagttctcgccagaaagggtcgcttgtagataaccaattgactcagagcacaccttgtgttctagagaactgcaagggtagggctcgttcaatgaagaagtggactcaacggcatggtctaacaatcatatcactataggagtccttgtcatggcacaagagcaggtatcagatagtcccttaacatttgcaacactttataagaggaaaaacgcaggatcatcccatccgcttaacgaaaaccccctgtaatgtataccttcttatctacgagtaggcacgtgcagtaggtatagtacgaaatgatgtaatccttgcagccattgcctgcccct

SEQ ID NO: 34479 - DNA, 485 bp, Homo Sapiens
catcgaacagacattaacatccacccatttaacaaaactatgtgttttaggttctcagatttctgagacaagacaaaaattcctccctgcaaggagctctgagtcttgaaaggatggatattcgtgaattcaccgtaaaagagcatggtaaatgctttgctctaaggatgagcaaaatgctgcaaaagcacagcataagtggaggccttggtgcccagaacaataaggcaatttgatttccaggagaagagaagctcagtccacaggtatagattctattctctggggcttcttaaaatctgccagtctatggctcagtttcctaggaagagacccctaggctttctttatcccacttgctttggtgcatctctgcaaagcccaaccatctgagcaagttagggagaacactagcatgaaggaggtgctcttaaagaagtaagtggcaaacaggaaatttgtgcctcaaacagatctctgactag

SEQ ID NO: 34480 - DNA, 371 bp, Homo Sapiens
gaaaaatcttctaaatgaaattaagaacttctggaaatatgggcttgctatgtaaattctgtgtatgttgcatacagctttttatttcttggtaaaattttgtgattgtactgaaaattttccttattttcagactactgtactgcctattaaagttgatttcagacatgcaaaaaaacctggaagaaatgttgcagggctagaaacattcttctcttcctcatagtttacttctacccatctacatgatttgatagaagtgctcgcaggaggtgcttccttaacttcggtgtatgtcatgacatctgtccttttcttgagggccagaacacacattctcccatcctttcccagccaagcaacccaatgga

SEQ ID NO: 34481 - DNA, 366 bp, Homo Sapiens
aacgaggagggtggcaggagcacgaggatgtgaaatacgacctactattatataatggctgtgagaaaaggctctttcctttcctttccacttttgctccaccctatcaggagccagaaaggcctgatggtgacaaggtgtgaaccgtgtggacagtcctgcacacagggctcactgtggacaccttcccagggcacgcatcagctgtgtgaacaaagccaccaaagccattctttccctcccccagtgagagcgagagtgagagagacagacccgggacttctttcatttcctaagcaccgcgcatggtggtggcactagctccccctccaagatgtcacagaaaacagagcaggttggaaatta

SEQ ID NO: 34482 - DNA, 395 bp, Homo Sapiens
gtatatgctgagtcagtatagtcttgaccaagaaatctgcccaggtgaggagtggggttttctgaaaggcagcaccctctcctgctacccttccagggggtggcgatgattcttttgccttttcctcaagttgagtgcttcaaactcctactcctacacattggtccagctcctgccaccttggccactccccagatgcctacaagtggagctgctctaacacctgaggtcttctccctcatgggaggaaaggggatagctcagctctgaaaaagcactccccagaagggttcacccctcccagtcttcttatactgactggtgcaggtgggcttagtggtaaggttggttcttacccagtgcctctcaataaatacttcaagagagctattcca

SEQ ID NO: 34483 - DNA, 499 bp, Homo Sapiens
ttaggaagcttttttctttcacgatacccaaaggaggaagagtggttcaaagctgtgtcagagggtcttcatccagatgccaaatatgcaaaggtaagaaaggagtcagggacctctcaattttatgttgccatgcagggaaattccaagatcatttttcaccttttccatgaactttatctttagccagtcttaattatcccgcaattttcatttccagattttccagaagggggtgctccgggtgcgagagttgcaaggtctcaccactcgtaggttagcacatagcatgcttggtgaattgaccagatgattacctgtgttctagtgtggagaaggagaaacgtgaattctctcagccaacttccagactatgtttcctttggggtatttattcctgtttggcatttctttttaatgccatgtctctcttttccaggtgaagcttatccgactggttgggattatgctgctgttatatgtcaacaggagcatgcag

SEQ ID NO: 34484 - DNA, 386 bp, Homo Sapiens
aagtaaatatcctggtcccctttaaaattttcctcaagcttaaaaggaggacaggatgaaggctgcgtccaagggtgccgagaagtcacggaagttatgctggccagagcccccagcaggcgagcatctgtagtgtgctggtggggggagggctgagtgacttacaccctcttccaaagacaggcgagtgaaaggtatggtttaaacgaatgctgcagtatggggtggggtccaggtggcagaatgcattgggaaattgtatctgctggggacactggtctttgggcgcttcctgggagcaggagggaagctccccaccttatggtccccatgggcactttcattccacagggacatggggtctgagaagcatgaatggacttaca

SEQ ID NO: 34485 - DNA, 378 bp, Homo Sapiens
tagtatctgtcccctttaggctgctagtgaggtgtgtaagatggctgcaacttgaggaggcatccttggttccgtgaggatagaaggtgcatggtggagtagaaagatacaggaactataggcgatgccacaccaactctgggccacttatctccagaattcctgtacagaaaagaaaagtacacttttatcttgtttaagccactatgatttctgggctctgttactagctgccaaatgcagatcttaacagatacagaagtccttgaggatttttgagcagaggaactgagtgtaaaactggtggctctgcaagggacagattaggggaggggggtgttctggagaatcctaagagataaagttggcttggtaggt

SEQ ID NO: 34486 - DNA, 554 bp, Homo Sapiens
aacacaccggagatgacactcatcactaacagtggtgttctatacaggaagagagaggacactcccaagactgaccccgtccagcgtggaactcttccacagttccggggatgactggctctctcccatcacgtaggtttcagctcaagtgtcaaccagagtggcgtttccgtgatctccccatataaagccaccctccttcctgctgttattctccatcggagaacctggttgatactcctcagaagcactattgacactctggaaatcttttattgaactagcgtatctgtttctaccactagaacctgagtcctgtgcaggagaaatcatacactggtatctttccagtgaatccccagtgttgaccagtagtacattggaaaagactactaaatattcagtgacataagtgactgtatgcatactacatgagaaaagaaacttggtcagaaacaacttatatatcctacgatgtctccaaatgatcactgcttccttacaaaactagcatacgctacattgcttagaatgtgccagggacctctatacat

SEQ ID NO: 34487 - DNA, 661 bp, Homo Sapiens
gtaatatctgtccccaaactcttccccaaaacagccaaggcatgccatccccactcccaccctgtgcttcattggtggctgttctggattagaaattccactctctgccctggctggatagaataactggggtttgcaaaactcccagcctagctccttcacagcctggaatgtgctgtgtgcctgtgggagtcttcaatcaagtatctgcaactatggccaacaggaggggtagcaaaacagactggtgtgcccacttggcttcctagagaggtttgttttccaaaggctatgtttgtcaccttggaactgatgaatccaagacgttagatgtctttctccagctcagacgccatggaaaacttgagggaggcaatgagaactgttgttaaagaagccataattctttaaagaaaccataaattaagaagggattatttatttaataacattaataaagggataatttacaaataataaatatttatttattatttcctcacttaggagcaggaagacctgctagagtagaaatgtcatttctccccaaacggatctatagattcattctggttccaatcaacgtccagtacagttgatttcctcccgagacttgagaagatgattctaaaatgtgtatggaagattcgagatctaagaa

SEQ ID NO: 34488 - DNA, 383 bp, Homo Sapiens
tggacaaggtgtgataacgaggcaatgaggctcagcttgtcattctgcttattggcaaacaggccagaactcctgcctctaaataaacaggtccttcctgggagtcagcacagatggctacaggcctcattcaaacctggtcatcactgcttggattattttggagctgttctttgggaactttccttataaccagttgatcagccacatgggaacattagccacttgcttcatagtctgcttcagaattaatatttaaaagaaaggcaggaagctaagttttgggagtctcaccaaggggtaagagcgcaacagatgcccagtactaaggaagccactgggcccagacagtgtgagctctctcagggacgtcacagggccag

SEQ ID NO: 34489 - DNA, 420 bp, Homo Sapiens
ttcatagaagctaagctacttatccaaggccacacaggtccgacagaacataaacccagtccctgtatctttacatgaggttacatccccagtggagagagacatctgtcatatattaaaatgggggtcatctggagtatgagcacaatgatgaaggaacacagagaagttagtggggcaacaaacgagaagtctaagaaaagctcacagacgaactgacatgtaacagggctttaaagtatttgcccagccagagaagataaaagaagcattccagatcaggggaaagaagggagagtaatttttttccaggtaataccataaggcaaagaggttttgcagtacagatgactcactttatagaatgatggggaagaagttacctctagaagtcaataaattgatgcctccctcgaccct

SEQ ID NO: 34490 - DNA, 452 bp, Homo Sapiens
atgttctgccacagtgttcttctaaagccagctcccaggacaggggccattctttccttatgaatgaccaagaccatactggctatatcaaaccgactagcgttttcttcctatttataatcaatagcatcactttcagcatcctggttctccttttttatgtaaaataaaataaatagcgtccttcaaatcacactttttttaaaatcacaccttctttaaatctcatacaccatctatatgcaggactcagagatcatcccccttagccccaggcaggcttgactgtcatttggataaagctaggaaagaatgaaggatgtaatggggtgtaagtaggtatgagagctctgaaggagaggtgcctgcaaagttccaggcaaagtcagcctccagttaggcagccagagtccagggaacacatatttgctgaaggttggtagaagtccatg

SEQ ID NO: 34491 - DNA, 419 bp, Homo Sapiens
accagaaaatttgaagagttgtatctgctttccttgtgctgcaacagatgcaacatcgccagccatcgacaaatgagcaccagcactctcaccgccaatgtatttcagcggcgccccgaatctggactctgcattatctactagccactccgcggcgtcataacagtcattcggtccagcagaaaaaggattctctggagcgaggcgctagccaacagagaacagcaagaccccgttcgtgtaggctagattctgcaggacaatgtccttgtgattttgcggtttgcagaccccatcctccgccgtgttatgtgatagtagaccgccccgatataggcttgccattttggagggtctaaagaactcggcttgggttgtctcgacctgcatctcgagatggtatactggtctggctcggt

SEQ ID NO: 34492 - DNA, 534 bp, Homo Sapiens
ctccaaattaatattctttttctttccctttgcctctctccttctccttcgcaatccttctcattcccaggccttctcgttattcatagccttcaacaggaacagcgtggggcaatgaggcccatggtggtttccatgtcattatccctatagtaactcagggaacagttgttttctgagcatcctttcatgttccttgggaaaacatggaaaagactgggggctgtcagtactctggaacttctattgtgattataagaccgcacgcatgggactgaatttatttgcttatttatttttgttttccctaggtgagagctgaaatcattacaacattttcactctgtggatttgccaatcttagttccataggaatcacacttggaggcttgagtgagttcatccattttcccagctccccagtaagacagccagatcccagcttctgtagtgggcagtcctggtgcttcagtacaagctgggatcagatagagaagccatcgtgaaatgggcccatttcttaagctgcagtta

SEQ ID NO: 34493 - DNA, 659 bp, Homo Sapiens
aagatgtaagctaaaagatggtctgaaaatctgaatattctcattagtactgaaattattctcatgctagttacatattaataagctttttatttataaaagtttactaataatgagaaatttgtttctttggttttgatttcattgtaaataaatgattatgatatttgggtagcacgttttagattttggaatactacataaagcgtagtgttctctctacgatgatttttaaacttaacacatgctgctacaacaacaaataaacaagcaagtaacatttgggtagccatatcacgatcagccaaagaagaatttgtcgtagaatgttaaagctcaacatgtaaaattcttttttgtgtagcaacagcataagaatttactctccgagcatgaacaacttgtagtgactttggaagaccacaagagtgcactagctgctgcacaggttagaagggtagcagcctctgtgggttcttttacaagtctgcttaacatttctcaattcctttatgcatgtagtctcttacaagccaatcttcagtgagttccttaggacagagctatcctaatcctgaggatcatgcatgctttccaaattcaatcagtaagatattaacttttgattattttttgccctggtgtgcggtacataatat

SEQ ID NO: 34494 - DNA, 381 bp, Homo Sapiens
catgctagagactaatgaaattccccaccaagcatcccttcacccctgcctctccctcttgccatcctagtgtctaatgatctttaccccagtgccaactgagaataactctacagggccaaccaacaatttctgtcaatctcttctttacaaagatgggctgattccccagtctgggaataatccaagctcttgattttcttcccttcactatttctgaattattccactgccacttccattacccctacaaaggctactgaaaaaatactaatgagcacctgtgttatatgcatgtaaaagcactattacttcaaagtatcactacgaatctcaagggataatctgccaatcaaactatacaagacacttttttaaccg

SEQ ID NO: 34495 - DNA, 392 bp, Homo Sapiens
catggtaatcctcctttgattcattcctatcaattatgtcatagtgatattaattaaagtggtagagccaacacggtggtatgtttcattctcactgaaaaacctggggtaatctatttatagagggttatataagtatctgtaatctcaggttaaaaaggcctcactctgtttctccttaggaattcctaagaattcttccttaggaatttcagaacagcccttctgaagtaacttctcctggggcacttcattttaccttttggtctaagttacttattggaagctattttaagtgccagggcagggctctgcagaaattttctgaagtattaaataagaatacatcttatctttcacatttcctttgcaatcaacctcccccaaatgag

SEQ ID NO: 34496 - DNA, 351 bp, Homo Sapiens
tgacgttgataacctggctgatgttgcatttgccaggttctccactgtaaagttattcttttccccattttcttactgaacattttggaaggaagtactatgtgcagccctcactaaaagaatgaggagttatgctccacctccctgaagctagaatatctatataatttttttggaacttttctaccaggaagatttctctattttctccaagttatttatatatttaatcatatgtttatattagtgtagacttctgtatttttgctttatagtttgtgttattatccagaactgttttatttattttgttgctcagattctttcagctttggctattggtaattcttt

SEQ ID NO: 34497 - DNA, 578 bp, Homo Sapiens
tgccctcacagacaagacaggtcccccaaatgagagatgcaggcagggtgtaaagtaacaagagacggtaatgaccatggttacatggggggcacatgcttcatctagccaccaacctccagataatgggcactgtgtaggaggtatggatgcagttatgccaaatctggtatttttgttttctgagaaagaagccacaaatctggatttttgggtaaaaatctccaaaatgttaaatatcagtaactaattaaaacaaaatactgtacagccaaacaaagcatattcttgtgccagattttccctatggcctaccattttggaacttctgatgtacagaaattctaagcttattggacaaaattaataccttgtcataaatataagaggaacaaaattcacatcaataatagtgtataggacctcatgaatgtggcagcaatgtaaatggtgtgtggagaccaattgaaataatttaaggtaacatatttagtgagtcacattatttcctggctcttaagtaaatgtatttgtaacttggatgccaatgaattgacttattctaaaacttctcacac

SEQ ID NO: 34498 - DNA, 489 bp, Homo Sapiens
ctgtcctctgcaaggactccttaagaaggatgagtcatgactgaaccccagctttccaacacaggttgggtgagctgtgatgccaccaaccaaggcaggaatgcaggcccgtatgtcagtgggttgtggggaaggctgggttttgaataaactgaatgtgagatggcctcacaacatccatgcagaaacgtaagcaggcagtggaaagtaagggctagagagagatctgagtgttactgacattaaggtgtagctgaaacccgaggcatggacgacaacgcttcaggagaaaatccagaatgacggagatgctggagacagaagctggtacgcgtgagcacggagggccagcctgacagaggagtgcagaggcagacacggaaaaggcagaaagaacaaaccaggagtgcattattgcctgtggcaagagtccataaggggtaccgatcagtacgtgaactgaaagggtcagtaatccaagggctaaat

SEQ ID NO: 34499 - DNA, 546 bp, Homo Sapiens
acgacggagatgtgttttgccaagataatggtgcattcaacaagttttcttttgaacactgaaaaccacaaagatcacaggaaaagaacttctgtggcccatgtgcttgtttgatatgcatatgtagtgctgagctgctctctgctttggtggctgcagtgacaacaggtattgtccttaggctgctgcatgtgagactcagcatgtttttccaagtcagagcaagaagaaaacaaatgcccacagatgctgcatttgagaactgtatctacattcccaatggtacaactaacactaatttctttcggggggaaaggagattctctttccagatcaagggaaaccatttcctgagcagatgttttttcagtgtctgttttcagagaaacaacatcaatagtgctaaaattgcaagaaggggagagggcatttgggagacatgtgcctccaactgtgcagtcactcagaaaggtctccttccctgtttcatctaatgcaatacccccttctgtgactgagctctcagaagtttctaatctacaaata

SEQ ID NO: 34500 - DNA, 450 bp, Homo Sapiens
gttgttcaggagagtgacttcaaatatatggaagaagaagtctgaaccagatggcaaggttctactaagggcaaagaaccttctgacctctcggagttcctaaggaactttctccagcctccctcccacattcccaggtcaccacacatacccagacagtctgtttgcatcagattgcacgctttgcttgttctgtcggttgcctctgctctctcgtgttggttattaagctcttgtctttcacagccttctatattctgttttgtgattctgcagtttggactctgcaaactacacttctactctgtcagctgtctcctgttagtttctaccactgcatagagattggaagtttggaggagaaagaagggaaatgctcatttcttttcatttgctgttctttcagcaacaattcttcatccccctcaggcagcagcagctgcttccagt

SEQ ID NO: 34501 - DNA, 528 bp, Homo Sapiens
atgaaccatcgtgcccaccctgggaccgaccatcttttttgttttgaagttataacacattataaatgataaataagtaacagggtctggattctagcctgggtgttctggctccagagcccatgctctggctgttctgtgatgttggatgtttaggttgcttccaattttcccttttataaataatgttgacacagaatcatgctgcattgtaacttttgcttttggccagattggatctgctggtggtcatctaagaagaaagtatttggtaacacgcagtgtacaatactaacactccttcatttactgtagttattgatgaactgctgtggttaatgtggagggaaatgtatgttatattctttgtctgaatagcttatgataattgaattaccatgtttctttgattctaaaattcacgtattcctatttttacaattcctaaatcataatgtttttgtagccagtgtgtacaattaatgtggctgtgtgtgtttctctctcttttccttcctttcttttctg

SEQ ID NO: 34502 - DNA, 442 bp, Homo Sapiens
tgggtgttagaatgccagggtctattctgaaacaacaacacaattaactagagctgttttagggaatacggaaatatttggggaagtccagaggctgtctcctcatcacgtacaaaaatttgtaacaatttccttcacctccccctcttcccacagtaaagctcagcagtgacatttcctttcccctatctagttatatgaatcacttcttactttactacatttttagggattctgtgtttttaccttgaatcaaaagtgatgccaaattatcactaatacatcttgactcttctgatccccaatcagaatttcccctcccctaattgaaagtgacattttctagtacaaaaattttcacgcaaaatgaggttagactagaataaatatgagtcagatgaacatgaactgaaacagaaaaatgtgctggtgcaatccctcc

SEQ ID NO: 34503 - DNA, 658 bp, Homo Sapiens
ggtcgtatcaaagggggtgttagcatgaaactctcttggctgaaagtgctctcctatgaatccctccaggacagtcatccacctcaggtagaaagtttctgccctttccccactcacaccatttcataattccccatctccagtgtttatggtcttacaggtgaatgctttgtcgtcttcaccaccagaacatctgcttattgggcagaggaaccccatatcttatccctctcttattcctactactaggcccatccctcagcctaatgcctgcctccccttaagtgtttctggaacattatgtgaatgaacaaatgtcagaggaattaggcaaatagctgcaagaaaatcagcggtacttaaaactgtctttcttcaggatgtttttttctatacgaacccacttctaaactagcacaccgaaattacttgttcagtacgtgtctccctctcattagaatgtaagctcttgaggctctggtttctgtccctttgttccctgctgtgtccccagaatcttagcacaatgcctagtttatagtgaacactcattacatatttgctgagtaatatatcagttgcacccatggggtttccacaattgaaactccttttgaacccagggagctctggtcttttgtcagtcatctctatctta

SEQ ID NO: 34504 - DNA, 621 bp, Homo Sapiens
taccatctacatggggttgttagatcacgtgaccagccgaacaatcacgtgcctgtggagacacggtggctctgattggcctggcttatatgtgttgcttggatctagaggtaggataaagcccactcaggccacatggacagaaagaaggaagagagagagggctgaaggcaggggcaaggcaaatgggtgctgtgtagagacaggcaaacccagcagatgccctgagcctagacctctggtatgctgaatgctggaagccattgggtttacttatatatatttcacggtgctgagaaacatctgtttgcattatttatttgtgaatcatgcctaatataaattgtgttgctgttttaaatttcctatgaaatacgtttttaagtatcacgatattgcgtagtcaaatgtaatattgtttttgcacatggttctgtatacatcatagattctaaattaaaacttttgatagaaattacaaaatttgtgttaccttactgtatgggcatatttaaaagctaacatcctagtttctggagattctgatctaccaatatttcccatgctgaatcataagcttcagcatttctttaacaatatctcggcgtttggtataaaacc

SEQ ID NO: 34505 - DNA, 366 bp, Homo Sapiens
agtgtgaccgtacatcccagtttgcctcaaacaatcccagtttattcaggttggactggtcggtgaacttttttttagcaatcttggttggtgaacttttttttggaaaaaactagatatctggatttggacaataactagaatgatgctcttaagtaaggactcacgctgtactgcaccgcctcttccctctgctctgtgctcccttgcatccacacgtgccagtggtgaaaagttcattcagagaacttcaggttacattttcttcatactctttggtatcatgaagaacggtctcaacccaggggcaatttgtcttaaatgacttccactgctgacatgtctgcgctaccgtcgtggggatcc

SEQ ID NO: 34506 - DNA, 521 bp, Homo Sapiens
gcccgcaggaggaatgtgtggtaatctctagcagcaaagaggcccttagatatcgtgcaatgataatgaataactgatccgcaaagcatctaaatgatttcaaggcgtgctactgctctcaagaatttatgacccagacaacagtggctgaggtcagggctcgcccctggccaggttaccagggcttgcctctgcattggagtagagccctttattgttcttttgtctaggaatggagtttcagatcagaagagatccaaatactcaaaaacctcttgccccaagcataaaggactaattccttggcgtagagcaggaactcaccaaagactataaggtctgacaatgcacgacaggggaaagagagagaaaaatgagaatgtccacagtctcattacttcgacaaacacccgcaaggccccacccggtcaaaggtaaggcctggagcagccgtgcccacacaatgagatgactggactggtccatctgtttattggcaagctcaggacagggtatgagca

SEQ ID NO: 34507 - DNA, 370 bp, Homo Sapiens
ccaaaacctccttcgtgccatcacagtcccctactctgcccctctgtcatcaccaaccactgccctctgtcatcagccactactgctgtgatttctgtcaccataggtaaatatgggccttcattttggaatatttgagggtaatgtatatggtccaaatcactctcccaacacaaccaactaagctgaagaccaactctaatattataagaaattggaatttaagtaagaacaaggccattttattttaaacacacacagttgcgtccaaatctaacctcttccttcaggagtaaggagagaagatgtgttgtcttctagaatttccttcataaccagaacttcatgtcagttaaaaatttctgccatg

SEQ ID NO: 34508 - DNA, 467 bp, Homo Sapiens
caagcacctccagaaagaaagcgggtttttgttcacatagcaggaagtgaatccctgtgtggtaatttatcttggaaacacgggtagattggcagaaaaacgggaacatgtaggtaccgcgatgttggtgcatgtccattactttgggataggctttctcagtctttcctcagatgatagttgagccagttttccagtggcaattctgagtgacttgcgcttgtcttatggtgtggtcaagggacgttcagaactacggaaaacttttactgaaacagcgaagcagagtataccggcatgagagggaagatgaacactcacctatgtaccactctttgacaataaatatagtatttctcaaatcagtctcaagactgatcctgtctcagaacagaccattgttctctcatttctctaatacgctgagaggaacactctgaataaaggctaagtggtggagcatgcaa

SEQ ID NO: 34509 - DNA, 469 bp, Homo Sapiens
ggtgccacatattccgtctgctgatgctggtgccctccactacacatgacctctatgaaccacaggtatgctgtccaaacttcttagctcaccaaacgcagcaactcttccatggactggtccctagtctgcaacacccatgcccctcctatcagctcccatggcaccgctggtcctccttgaggtctttaaggcattcatccacttattgaaaccataaatactgggctattagtgatatttaaggtagtgtactaggtgccaaggacacaactaagtacagactacacattaacctctatcttcacggagctttcactttagtggaaggagaacaaaaacagacaaaatgagtgaatgaagatgggatcttagtaatggctaaggacagataaaatgctgggagggccagtgctgccatcttccatggacactcagaggaggcatcactgtggtggacatgtgcaag

SEQ ID NO: 34510 - DNA, 489 bp, Homo Sapiens
tgagccactgtgcccagcctgtgtggctctcttttggttaccctgtggtatcctgttttctcaagctcatcctccctggtgggtccatgatccctggaaattgttggtcttctccggccttttgaaattgctgccttatgaatgtccagagttgagtatctgcctttctctcccaaggaggaagaatcctgagggggcatcttggcttttaggtcccagggctttcactgacttcctccttgctggcttcttggtttgttccaaagatgtcctcggtacatcttctgagactaatgacatgataagtttctggaaggactatgatctggatgatgagggtttcatcacagtcctctttcagttctgtcctacggattacacttgttttcttccttcatcctttgtcttcactggttcactgtttccatctgcattcttctgttctcatttcttttagtcgtcgtcttattttttatcttctactctatt

SEQ ID NO: 34511 - DNA, 395 bp, Homo Sapiens
ctgccatgctccacacgatcacaccaccaacaacaaaaacaggaaattaatcaaaccaaccaaccacccaccacaaccacaaaacaaatgtagaaagctaacgcaatcaaatgacaaattggaacatgaacaagccataaatctgatcaagtgttaataggtcgatgaataaagacagttcagtagaggattggtgaaataacccctggaacatccagtactatggaaaattaccatttaaaaaatagcaatgtagactgttatttattggcatgtacatgtgcctgtgatatattaattaattaatagaaagttacagtttgcccctatgctgtgtgggagcaaaagcatgtggatgcttgtatgagtgtttgtgtgtggtggagcagtgcaag

SEQ ID NO: 34512 - DNA, 537 bp, Homo Sapiens
gtgtgagccactgcgctcggcccattcaatccattttaattctcataacattatatgggtacctacggatgttatccttattttgctagaaatggaggctcagagaggttacttgcccacagtcactgagctagtacttgtggagctggtgtgatatggctccggggtccagacccttcactttggtgctgcatcgctaactggtgggcaaaatgaggcgggagtgtcagaaccaggatcccaaaagatctcaacagcctagcataaaaaataacatgtcagctgtcagaactggccagagagcaccggactcccctggggctgggattcatgtgcaagtgctccaccaccatcagaaggcttggacacctccatcatcgctgatgagtactgaatgttgggttcctgcggtccagagctgtctgcttctgacagaggggatggccgcacggacgtgactttcaaacaggagccggggtggggctgggcaaatgccctggtcccttgcccacccatcctgttctatctactctgggt

SEQ ID NO: 34513 - DNA, 665 bp, Homo Sapiens
agctcacgagagggggcacagtcgtgcaggcgggaggagcgagagtcggcacgttgggtgccatgggtgtcctgggtagagttgagggcctcccccgggaaggataatgctgagcgccaataggaaacactgccctgagctatctgatggccagccctctgtccatgggggagccatttcttttccttatctctaagctaatacccctcgttcctgaggttctctcttactgcctaagctgtttggctctgggagttactggctagcttgtccccgtcgggatctcatccccatcggtatctctggcagggcttcttgaccagctccccctggacctgcggctggagacggagttgtgccgctctctccgtcctagtttgccttttgaggcttacccactcctccacctaggctgttttaaaatgattagagcagaacctttcaatcaattctatcaaatgcatctgtagagctaagggggcggtcccttatgtgaaacctaatctttatagctaggccgatgggtgtgctcaccgccgaggcacgtcattacgatgctctttggctagtcattgtcgttagaaatgtaaacactgattggggaccttccgcaggagcgtctgggctgctgctgtctccagctatcaactccaggttaccttgcg

SEQ ID NO: 34514 - DNA, 652 bp, Homo Sapiens
gccacacgtatctcctgagctcctcaggcagaaaccatgcccgtattcaccttgattctttaataccctggataacaggacacagtgtaggctcaacaagtgtctggtgaatgcatgaatcaacaaaaggcaggtggactaaaagaaccatcctacttctcttccttgggacactcacaccatgagaccacctcataagccttgcccctgtgagtttcaggccgtcttctcaaatagacttacccacccatcgtaaacaaactgcatcatgcgaactcattccttccaggcattactaattctctacaagtccctcccctggaaccttacagtgaaagtactcaaaggtctcccttctgaggagaatatctcactgcaagacaccacctagaattccacaaattgataaaccaaaacacgatgggcatgacattcacatatataacttccttctccacctagatcgcaggggcgaaaacaaaaaacccctttgctttgtagccttcatcttgacctaaaaacacccagaatcctgattctggggccaaccaaccacctacttccaagcagtaacaattctaggcactctccagcctccgtttatcttccttagtcctttctgattacttaagcagaaaacacatacacacac

SEQ ID NO: 34515 - DNA, 586 bp, Homo Sapiens
ctctcaagggacttgggaatgtggggctgagagctcacaggggcatgtctgagtacatggcagggttctccgtaacagaacttcagatacttcaagacagccatcagagccctcaggaggctgcccttctcccagagaaaccccagctacttctgcaggagatggggaaagattttgggtcatgcaagtttctctcccctcttattgtctgggtcatatctgcggcttgtgggctacacacattgtttgctctttctcgttctctccccataaccaatgggaagagttctctagggacctcaacatctttctaaggctggtgggcctggctggcaggaatgaggactcaatggaaaggggatgtgtcaaatactccctactatccttcaccaaggtggaaagtccctgctatccttcaccaagatggcaagtatctagatgttcaaagcaggatgagctaagcttttggcaacaggagctgggacccctcctccaggacttttccagagaaggcagtcttttaccctgtgacctctgctgggtctctgtcacgcagcatccatcatcaagatggtcagctacttcc

SEQ ID NO: 34516 - DNA, 582 bp, Homo Sapiens
tcactggcaagaagtggaaaagttaggattagggaggttactgagggaagaccagcatctaaatcgaccggtcaggcgtgtgtccctaacggaagagttagcaaggtctcttaggatgagtaccgcctaccaaagaatgaccctctggtaagggagactctccttgtttagccggagcttctaacagcagatgagcatagctgtgaggcgagtctcaagcacatgcttcaagattcattcttcagatttcagttcctgctatggcatgatgttcctttgagccggttagcctcttagcacggagtaactatgatgagcctgaacccagtataacgtaacattcctaaaggccaagtgttggtaactggacctgctcagaaagagaatgctgactataaacacttactcatcttcccatataatagaccatcgtgcagcaagaacttacgtggtatatatacagatacagacataaatcatgggcaatcatatttcgggaaaaattatttcctttctaattctctatcaaaccttctgatattgaatctcagatctcagctggatgtggtgggcatgtgcacg

SEQ ID NO: 34517 - DNA, 409 bp, Homo Sapiens
gcctgacagtgagggtacgtccctgacactcagcactgctggccctgcgcctgcctcctctcctccacagcaggtgcctccccgacacttcagcatcttcttgacgtgtatctgctgtccctgcacagcccgagcccacagggccaccggctcctccaggccagggctccacctgttgtgttcaaggccaggccccactggatctgccccacgacctccactgaggcctggggtgcagggtgcatgtcgactcccacaggtatgacaggtgctagtgaggggtgaatgagggactggcacctgctcaccccacaaaagagggctcttccctgagcaccgtcattgtaggagccgtgacccccatctgtggggaacgataggtggggggcacagtggtggagcatgcaag

SEQ ID NO: 34518 - DNA, 407 bp, Homo Sapiens
ctgctctggagtctattattcatcatcctcatatgactaacaagagctgagttactgagaattggcttcagtgcatacagatattctaccatttgataagtcgagttgctaactaaatctgcatgaaacaaaacgtccaagtattcattctttaccagacttaacagggaataaagtgaacgtctaatgaataacaacttctgcagggtctcaggaaaaggtaaaaactgctatctccctctcttctctctgtactaagatttttaataaggccacttctcttgctacatggggagagtgtgcagctgatcagaggccctgaatgttgcctagtcaagttcctccacttcatactgtataggccaaattaaatgttgacagacatcatcatccatcttttaacttag

SEQ ID NO: 34519 - DNA, 365 bp, Homo Sapiens
tccaccacggcatgtaatcgccccttctgtgaatagtacttctatcttatgctcatcttttattctattgagtttcttttctttttcttgttgattagcatacatccgtaggaatagttacaggaaacaagtccagtcatgggtttggtgtggacaagtcgctgcagtcagtcccatctgtgtgaaacttgatctgtggggagcatgtgttctctcatcgtttcgagggaatactgatattatatattcgagtatttgtcggattacatgcagctggtaacctgaacttgttttaaagcctgatgtctttggagtactgtgtcacccctgctgtcctggctgagtagtggtggaatgtgtcaatg

SEQ ID NO: 34520 - DNA, 393 bp, Homo Sapiens
gccgtgctccacactcatatgcgcaatccagctaccggacccgatgacgctccaagaagacgaggaggcacaagccggagttcaccaagaggaaacagagaactgtctggtgctagcaagacgggcgagtcgccaatacaaagaagcgcaaatggaaacagagagactgtcctcatccttcccccgtggcacagattagaaagcgcctgataacaggaggtgccagcagggtgttgggaacaggcccagcgggtggcaggagtgaggagtcgcacagacaagatacttctgtggagggcaggttggcaggcccggccagagccctgaggaaacctggcccctcccctctcagaatcttccaggaattcgcccgacggctggagtgagaagcct

SEQ ID NO: 34521 - DNA, 395 bp, Homo Sapiens
tcactaactttttagcatggctcccttcatggcatccatcagaagaaagcaaagcaattaaagaagttattcattaatcaaaagcctctatcagtttcctggataaaaaggaaggataagcacattaatttaaaaaattaactttatatggaatgaagtccacaggttctcgaaatttaaagagaactaggttatctggaaatgcagataaaaatacaaatattttaagaaatgaaagcagtgttaaagacagattcttatctattgaggctcaaaaagtggcagaggccatgctggtagatgtgcctggctaaagctggacacgaacagggggtgtttcatcatttgtactaacactatcggtctgctcctcctaagtggtggacatgtgcaag

SEQ ID NO: 34522 - DNA, 587 bp, Homo Sapiens
ctctctgcaagcttcccttaactctatgcttattggtattccaggcttgttttcttatactggaaattattttctctttgggttacctcaaaccaggaactttttttcttaatttgaggtaaaattcacaatttaaaatgtatttatgaagtgtgtacaatccaatggtatttagtaattcttaaagctgtgcaatcatcacttctgtgtagttccaaaacatgttcatcacctccaaaggaaatcctgtacccattaagcagtcactccccctttcctttctcttcagcccctggcaactcatctgcttcctatctctatggatgtacctactcgggatattttggtacaagtggtatcatcctttaattcccttcgtgtttcttcttctgtattggttttagtatttttcgtgagggtatcctggtcatccctgagcttccaaagtttagttcaattcccactttctctacaagggcttaactgggtgttccctccactccacactggtattaggcttctctggatttctggagccttgggtctctccctttacttattttagcccttaatcacatactgctgtg

SEQ ID NO: 34523 - DNA, 404 bp, Homo Sapiens
gggatgcgtccacacatcttggtcccagtacggatcgcttcctgggagccctcaggtgatctcatcacctgagatgaggcctcaggtgagcctcccaaagggctgggattacaggtgtgagccacgggacctggctgagctaatgctgtttccactggactttaagccctatgaggatggagatcaaggctgtcttgtgacccattgtccccagcatcacccagcacctggttgggcttagagcagaagatctacaagtcatttttcggatgaaagagaatcttgtagcatatgcttctcacctgtggactgtcctggtggccatacctaggaaaacgaggccagagtcagcggatgagtggggcttctaggggggagggcaataggtgtgatgctgtggtggg

SEQ ID NO: 34524 - DNA, 536 bp, Homo Sapiens
gtcgcaggctccacacactcacctaattttttattgagacggtctcactatgtggcccaggcggtctggaactccagaactcacgtgatcctcctgcctcgggtatagcctttaagttatgaaggctttgtttgtttggttttcatttttgaagtggttggggggaaaagaaaaaagcagaagacgtgaaaacaatacgcgtttgccctccagcatccaggaataatgttgtattggcacagggctgtgcactttcattcacacggcgtctggttgctctttctggctcacagagcctaggcgttcaccctctggccgtgtgtagagactgcccgccaacccctggcctaactgaggaagaacagcgatagtcaaacagcaggcaactggaagaacccaaaatgcaacgacgattcatcttccaaactgaggggtgagcactgctcgaacaggcccacacccgaacacagagactcacggaccacggcagccaccttcagagccgtgaaacgtgcagcaccaacttttaagtttgt

SEQ ID NO: 34525 - DNA, 385 bp, Homo Sapiens
attttttgaaccaaccacataggagagcaagaccttgattctaggaggctacaagtcctagccctgctgtgactgcagccttactttctctttatcctgaatcaccacgattcttctgtttgtaatattggcagatggtggatgtggtgatcccaagttcattcttggcaacttattttgaaaaatctgctgttttattcttcctgctatactcccatatcccttagttaactcctgtattgaagtacttagcacacatgacttgaatagggatttcgtcataatcatttgtgtttccttagcatctagcacatggtcacttggaaaatatttgttgacacatgatgatcactttccaatgctgagatggtgtgattttgtgatt

SEQ ID NO: 34526 - DNA, 433 bp, Homo Sapiens
attacatgtgtatatgcacctaataaatacagtttcaaaatacatgaagcaaacaactaagagagggaaaacagtcaaactacaaccgtaattggacacttttcactctgtaagttgataatacaactggatcgcccccaccaaagtaaagaaatcaaagatctgaaaaacactattaactaccatgacctgattgatatttatagaactgtaactaacaaatacagaatacactttttctccctaagtacacaaggaagattcaccagggtatgccgtgtgttaggacatgaattctcagtgtatttcaaaagattaaaatcttacagagtatgttttctgaccataatgaaagtaaatttgaaccacatgataataaaatgactacatattaaaaattgtgtccttcaaaaaaattcacatactttttaaa

SEQ ID NO: 34527 - DNA, 393 bp, Homo Sapiens
cccaacatgtgatgagtgagtgtatttatgtatttacagttgtatgttataatcacaacacaatgtctttgtcatagaataataatccttggcagctatttgttccccaacttcataccttttctgtcttttgttgagactcaagtagtgacgtgttttgctactagttatgatgggatagctcctaaattgagttgagtctccattttcaaccctctcaaaaccaaaaaccatatgactcagcatccttcgaaattggtccccagggagtgctactacaatagtgggagggacctaaagacatcacaggaaatatgcagggagaagtgacagatgactaaggaaatccatatattagaggaatgagtaagtataaataagaaactttagcca

SEQ ID NO: 34528 - DNA, 514 bp, Homo Sapiens
acagccctgctgatcagaacggctatgtgaagcaggaggcagcaaacaggccccaggctcaaataggcacttcgtagtggtctagttttgcccgactaattcccttaaccttgattaaggtacttagttttaccaaaaaaatcatcagaaatactctggctggcatggaatgtaacatgtcctcattacgagtctcacgtggggaaggccctgaagtgaggagaggcccagcctcttcgtgccacttttacctgctgtccctaggtcaacaccccggacacaaagagtcccccattcagtcgctcccttgtgagctggactctgaaggtcctctcccagaggagggcaaggccttaccgtaacatctcactctccatgcaaacagaacgtgagatagtcatctggttgcctgagagtatgtggtgtgtgagggtcttctgatatttcaggcagccctctcctactctcccagctgcctctggaggtcaggagaaaactatgtggcttccctaac

SEQ ID NO: 34529 - DNA, 402 bp, Homo Sapiens
cctctcgaattgttggggtacatgtgtgagccacagtgcccaccaatggtatctccatttttaatggagaaaaggtaacagcatttcccttaccaacagaaaccaggtaatactgttacctttgttggtcacagtactagccagcctacaggtgacaacaataaggtgtaaggatcagaaaagatgtataaggattacagttgacagtttttttaaaaagatgccgcttacagtagcaaccaaaatatatacctaggtgtaaatccaactgcaggctctttaggggagagatcagaggtattagagtcagaaaagactagtttcaaattcttatctgcttctagctccatgactctggttcctaatccccttcaactgctttatgtggggagcatgtgcaag

SEQ ID NO: 34530 - DNA, 387 bp, Homo Sapiens
ccaataacacatctttttaacaataaacactaaaatgtatacatgtccaatcattttgttagcttttttccatgaaggaatactaagatttttaaaaattaatttagcatttcttcattatctttttaaaattaaattagttaagattaaaccattaattcctccatccactggcccaggctgcgggaatgctgctgtgcttggtgagcacaggagcaggtgtccatttccatggcatctgtagtgctcaatgtcagcccacgcaagtccttgagctctcaatatctgttttccagtgtctgacctgtcaaatgcgggacatggattgactcccacagacccttccagctctaacccccatggcctataatcagggctgtccagtga

SEQ ID NO: 34531 - DNA, 472 bp, Homo Sapiens
tggcctcccaaagtggtgggattacaggcgtgagccaccgcgcctggccagattatgtttcttatcagacttaaaggcagtgtagatgttaaatgctggtgagcttttcctgaattccagaagggaggaggccacaatgaggcctgtctgactcccctcttcccataatggcctgaaccagtctttcagatgaaatttggatggccctggcctagaagaggaagtccattcagatggttggcaggccttgagatattcaattttggtttacacaatttcgaaattatttgcatataaaattattaggaaaattatttgaaattatttggaagaaagattgttgcctgagttggtctgtccctttctactgtgactagaaccaaaatataaattgtatttggtgcagaatttatctgtggagttgctcctgagttagcattattgtgcagctctgatactgggctggcccagg

SEQ ID NO: 34532 - DNA, 465 bp, Homo Sapiens
gcacctagatcactttgaggcactaattcctttccacgtctattcctttgctctctactataagtcccttaaggacaagctttatgtctctcattttttgttttgtccatggctggcggtatctgacatggagtaagaatttaataaatgtatgttcaataaatatatttgtctcatcccacaactaggcaaaagggcagatattgtatcacatgtatttttgtgtccccctgagtggttggcatcaagagggacagagttagtagtggataaagatttcaagttcttaaacagatgaaagcaccccgaagttttggctcaagctatacttggtctttgaacctttgttgaaaagatacaacggaaagatggggaacagccaaggttagagagagatttacacaataaagagagtcagatttttcagggtgtatttttgggatttttcagtagatcaaagcgtga

SEQ ID NO: 34533 - DNA, 448 bp, Homo Sapiens
ggctttgatctaattattttgtattcatttttatgtatgccttagcccaagtgttatgtaggaatgtgttgtgtttgaatatctctatgtatgaatttgggaatatatcttatcgttattgatttctgatattagcaacttgctgcggggagcatgcccttttcgatatcaattttattttagaatttattcaataatcatggaaagcctctctgagatggtgacacaggaacaaagactgaatgaaatagggggacagagtttccatagaaatatcttagaaaagaataatccttgcaatggtaatagtaaaaacagaggctatgaggtagaaatgagtttgaaatgtttatggaagagcaagaaaactaatacgtgtggaacagaatgaaaagagggaagagtaacaggaaaaaatatcggagaaatattcagcaaccaaatcagg

SEQ ID NO: 34534 - DNA, 353 bp, Homo Sapiens
taacaagagggaaaaatcgctgatttaacaggtaaaaattatgtaacacaaaattagaaaagctagaagtctattttgaaacttttgaaaatttcgcttagatttaaaggggctttattgatcttatctgtagtaggagatactgattttatcccctgcctttccaaacattcagacgtatgcacctatatgtacactaataagagggaggaacgattgatacgagacctatgagattattcgaaatgcaaaacctttgagtatataagagaggatacagtacctggcttcgataggagcggtaactgttcatatatactaataggtaaggattgcttctgcctttctcactg

SEQ ID NO: 34535 - DNA, 391 bp, Homo Sapiens
ggaactgctcataatgcctaactttcctgaatcttggaatgcacactgtgttcaagaactggaagggactggtagaaagtataagattaatcttgatgaggagacaagagtcagatcaagtagaatattgtaagccaagttgaggactttaaagtttatcttaaagtaaacggaaagcttatttaaaaattttaagcaggagttaggccatctgacctgacttgtgtcttagaaagattacttgggctgccgtatggcatataaagagaggccgagggaagtagaagtccaaatagaaaggctgtagcgtttattcaagcggaagataaaatgtggtgtgttttgaacggtggcagtggaaaaagaagtgaggagggagattcaaaatata

SEQ ID NO: 34536 - DNA, 551 bp, Homo Sapiens
ccaaaactgtaactggacgtccatcttgggtgacaagaggagaatgtcaggccacacggagctagagacttggtgggaacatttgtcgggcagagggaggggacaatggagctcacttagactcacactgggcttgctgacttagaggtatccaggagcagctggatttaggggccagagttcaagaagagggcctgggctgggaaagggggcttgggaattatcccaccgagtggccccgggaccaggcagtggtggggacatgcgagggagaagtttccatggccagttaggacgaacaggccgcacggcgtggatgacgaggccaaagacggcgagatgggtggccttgaagggtatcacctgatgagggatggggggaccgaacaacgcagctcaagaccctgcccaggaaggcacaggaccccgctgaagagcagcagagactcaatcactgaggctcaagcacaaggcttttctcatttcagatacacacagtcagggccttattctagattttgggaccaatcactaatcgaattcctgcagcc

SEQ ID NO: 34537 - DNA, 398 bp, Homo Sapiens
catagtagagtgagttcacatatatacctagttgccagtttcctctattattaacattagcattgtaggggctcagaacataatgtccagaaatagggtagtttgaaaactgagaagatagcagaagcaggagggtctctttgaccttctcttgtgcctttctcccctaaagcaagccataaaaactagaattgccttcaccctttttctcttctgaagcagaccataaaaacttggagggtcactctctggccttttccctccttttcccccagaaggctgtcatgtaacagctgtcctgccctgtatcccagggaagaaatatcaaacagggatgccaagaagaaactgaacaaacgagcctaattcctcccagtttgttaccattccatcatacc

SEQ ID NO: 34538 - DNA, 551 bp, Homo Sapiens
agtacttgtcgcgtactaaaatcagaagaataaacaatgagtatcttagttcctactatacgcacaaagctttctcataaactactcccattcatgacacagtgttctcaatagcagtttgacatagctgatgcagacatacaaataggaacatgagtaatgaagatatatcaaataaggaagaggggtatacaaaaagactatactgatagcgagagcattagaaatagataattaaagatttacggtcagatatactactaggctgtaaacatagaagaactgaactgcatggaaaatacaaaagggcaaattaagggacagctacttcagaaggtagtaggtacaaacaaattacagacctccaaaaatagtccaacacacgaataaatccccaagaaaccttgtgactatagttacctataacgtggtagaacagggacacttgcagtgtaaattaagtaggacacaccctatgagatggggagattaattccgcatatcctcaagtagcccaaatttaatcgtatgaattcttaaaagcagagggt

SEQ ID NO: 34539 - DNA, 570 bp, Homo Sapiens
gcttggggaagtgcaccccaggaggccagtgaataaagtgttggggttggtctgaaggaggcggaggccaggtgggaccattgacaagggactctgaggtgcagcatccccatagccaaatcctgggggagcaggctggtctctgggggtggaaggtggggggaccctataagggccttgctgcccaagaccccaggctttctgcagaggatgcaacagaacctatacttctctgggtcctgcatggacctcttctgctcaactgctctgggccctccacgaactgcacccctgaacagacagtgggggcactgtcatctatagctcctgtggagacctctgtgggctgaaaacccacttaagtcacacaccaagaggatgacggggtcctcaagtatgtcactaaacagaaaaatagtccaaaatgataccgaactgacaagtaactacagggaaggtaaacataattgtgatttccctcatgtagcttaagaattaataaaatgttacgtaacaaattgtattagagcaccttcctaaggagtctttgagaacatgtccatgtgcctg

SEQ ID NO: 34540 - DNA, 361 bp, Homo Sapiens
ggccaggtctctcagacagcggacccccaagtgctgggactaccagtgtgagctaccacacccagcccagatttttccttgagtcagataaacaatttcccctctctgggcctcaaagaactgttaagggaagtagtcatgaaactattggtctccagggtcccttccagctcgagacttctgtggttatgggctatgtggccagataagtattcttgatgtctccgaaagttctgaccagtcccaccactttcaggcacaggctttcccaagtcaaatgctcccttatacctctgcatctcttcctagctcaccactactttgggtacctttgagtggaggtcagtccatgtccataggt

SEQ ID NO: 34541 - DNA, 439 bp, Homo Sapiens
tctcagacagcggaccccgctgtctggagtctctcagtcactggaggctcaagattcctttcatttccaaagaaggaaagtcagcttggagagggggtaagacaacaactgcagctgcataacccagcacctactttgtgcagggcactgtgttaagcatttcagagatgatctcattcaatcttccaggagttttttggaagcagatgttatcatcgccccattttgcagatgaggaaactgaggttcagaggggtcctgttaattttccaaagtcaccgagctagcaggtggggtagcccagatttgattcccaatgtatctgactccagggtctatgtcctatgggccttggtgccaggactgccccttcgatacccctgagggtttgagtactgcagagatctgcatggagaagggggtccggttgtctgagggt

SEQ ID NO: 34542 - DNA, 425 bp, Homo Sapiens
cctgtagacagcggaccccctctacttcagcagtatttggcctttgttgttcctcaaacacctaactaagcacattcctcaggacctatgctcttactatttcttctgcctggaacattcttccctcacatatcaatatggttcactctcttccctcttttggttctttattcaaatgccattttactgagacttcccctggctaccctatttaaaattataaaccatcaacccttccttcattcttcttcataggatttttttaccatttaacatacttcaaatgcagcaaattaaggagttaaagggagatgggaatggacattggcaataagcacggacccttctttttaaacagattgtgtggaaagagaatacaggaaactacaggaaactaaacaagaggtcagatggctaaagtatga

SEQ ID NO: 34543 - DNA, 373 bp, Homo Sapiens
taaataaatcttaatagtgaacagcagagggcgtccgctgatcagaatttggagttaagattgaagaaattatacagtccaactcaaagctccatttcaggcaatggacagtaagcagaactggacacatttatcaagtcccaaaatttgaaaaaatgagaatttccttggacagttaagagaatttaaatttgctgatttcccatctataagcagtttatatcacactgaagcatatactttatgtacagcccacctgggcttaagcagcccccaatactctctcttggccactatagactatactgttgtttagactttcttcatcttactcttggtccaagtatctctgtataattttcctctccaagta

SEQ ID NO: 34544 - DNA, 518 bp, Homo Sapiens
ttgcttgcacaaaggatgcaaacccaaggcccagccgcggggttaaaggtctgaacagtctcgtgtgccctgaccagttcagatctcttccggccactgctttccttcttcccaaacccctcccccaactactttatggattaagcataaaaatgcctatgggcatccaggtcctgaatctgactccttgtagtgctgagcacagatttttaggaagagagaccaggcaccccttatagaaagagctttttgatcaagagccatcaggcagcgcgtggagggcctcacctagttcttcctcctgggcttgggcacgctctcctccctgcttgcctctgctgaggactgtatttccttgaattctgcctacctactcccagcggggctacaagcgattgtctgcaccagtcctcacaggagggtgctccctgcctttggggagtcagtgctatttctctgagctaggtagcctgctctaaatcttactaggtttacaaagagaatcctccatcccacct

SEQ ID NO: 34545 - DNA, 564 bp, Homo Sapiens
acagacagagtaataataaagaacacaaatttatttcgaacagttctgaagactgggaagttcaagatcaaggcaccaccatttggtgtcgtggtgagggccttcttgcttcctcgctagcatggtagaaagcaaaagagtagaaggctgtagccaaatacttcatgaatcctcttttataaggaccctaatctcattaaaaagggaggacctttcatgatctaatcacccccgaaggccccacctcttaataccatcacattggcagcacctgaatggtggaggagacatattcaaaccatagcaaccagtcagaccttcattcctggaatgcaaaattttctttctttcctgcaaagccagctattaaattgaatgtctgtcacattttatacaccatataaaagtgtttacagtgggaatttcttgtgttatctagtctactgtattttctgaccattaaagctgaagtcattttacaatttgatatattattcaccaattgcagggtaaatgttgtccagactcagagttaagaaacactttctgtgggaaatccaaaaa

SEQ ID NO: 34546 - DNA, 590 bp, Homo Sapiens
taaactcttgcttggtttctccctatttggtctagagtggagtgagtttgtgtgtgtatctgtgaatgtactcatcctttttgtaaaaatggaagtggatagtaaatgaaatagagaattctttcccaatttatttctacttctctccttcattttctatgttgaactaagaaaaaaacattgtaatgccatcacatatgtatatatgtatttttcctgtgtcttcttttaaaaaatatttaagatctacagagatagacgtaaaaacaattttaaaacatcaggaaatgggagtaaaatgaaaatcatcacgaaaaaaggcaacgtagaaagtagttaagagctaagattccaggactttgttccaacctggctcccttcttttctcagctacacaactttgggcaaataattttgtgcataaaacaaagttggtgttaagtacttatttgtgtcattttccactcgtgggatcatatcagcactcaataagtttcagattttgaagcattttgaattatggatttccgaaggggatgctcagcctgtgctatatgaagaggtatgatttatcaccacttggaacaaca

SEQ ID NO: 34547 - DNA, 552 bp, Homo Sapiens
tatgatgtcttccctgatgatcagcgatgctgagcattattgatatacctgtttgggcctcactgctcatcaacggtgtggtctcatacagaccacccacccagcatgctccgtgggagcctctggaaaacaacagaacctcgccacagaagggaatttcccagtggatggtcacaggccaccagctcccccaggtaacacaggcaaatgtctaggaattgctgcctacctggaggccctgctggccattttctattgtgatttcacgtgtggtcagcaactctcctttaaagactctgaaaggtctcacaaccaagaaaagctgtttcacttcaattcagccattcccaaacttataagagctcaggtccttttcattttttgcaaaaacatctgttaacaacatacagaccaagtgtcccacggggcacactgcgaaaaatgtttctatatgaccaatccatacctatgccaacgggatttactagtccacgtatgatttcgcagttagacccaagggccctctccctaattgtcctgaagagctgagtc

SEQ ID NO: 34548 - DNA, 535 bp, Homo Sapiens
ctgttccttgatgtccccttgtcatcagcaatggatgctcttcaccgctggcttccaacatggccaaggacaaacagagcacgacggcgatcaacggtggtactgccattgccggcgaaatcacagcggtagccggtgcgaccagttgctcatcggatgccaataccatcgcctggacttcatactaaggagcgccgagtgagcgttatctccgaagctcagttcgtcgacctgtatctgggcgatggtttggcggacgctaggggtctccctggacaagcgcgaagagttgaggcgcccttagaatggcgggctgatctagaacgaatccgtcaactatgcgcagagaagtacgccgcgaccctggatccggagtttgcgctgctcgaagatggggttgtccttcgagtcacacagttgatagacgtaaccagcaagccggatttttgtcctcagcaagtcgtcggttcaaattcgtccggtggacatgctaggcctgcccgatcacatgcagaatgctctgatgagcgacacg

SEQ ID NO: 34549 - DNA, 558 bp, Homo Sapiens
ttggatgaagtggttcttccccaggcttcctacaggcctagcttaggagggtggcttcctgtatgctgaggagctcttccttgcagagggtgacacaatatgagtgtgcagacagactggctttattggctgcctggcttgtgcccaaggtcacagggcacaggtaagcagagacctgagaaaataatggctgcaaggcaactccagcagccaccctgagctccaggcagaagaccaactgtgccaggcccatctgcaccaggcacacacaagggccacccatcaggctcctggctgcagccacttccccatcaaattgggctccaggagcttaagcaaacagcaggtgagacaaggctggccaggttgactctgagcacttctatgcatctgccttaggctacagacacaggagttcaggccaggctgggcaaacaccagagtcttactcttcttataatcttattttgagacaagtcttgttctgccactcaggctagaggcctatcacagctcatgcagctagaatcttgggctcatggattatctgctcagctc

SEQ ID NO: 34550 - DNA, 554 bp, Homo Sapiens
gcgtttgacagtgagaacaggtacatgtatatctatgggtgtgtttaggcacagtggagatagggagggctaatagatgaatgggtaagattaccttttagaatagaacaaagaaccaggagccaaagccctttgaagaggaactatttgttcttaacaacggcagcacaagtgggatccatgcaatgccatcccactttcccagtagagagtaaactccagattctaaacaatttgggggtcaagcagcattgcaactgcaagagaaaattctaaggagggcttagtactagacctcataacctctgccaagagcatcccctttggggaggttgaggtctgcaggatcccccagagcatcctcctgtgggctccaatcttagagtgtcagatgtctctgaccttaggtgggcactggcgccactttccatgtgttccctccagagcctgctatgagctttcctttggtacctgggtgtaatccctgacttttagcatccttataatttgataagggcacgctttcccatgcttcctgttccgtgaactttaat

SEQ ID NO: 34551 - DNA, 586 bp, Homo Sapiens
gtcgcaggcggcgcgggaattcgattagggtggtcttcatgatggccggggtgcaccctggagccgtgtttgttacagacgaggtggcagagtggcagtaacccatgttgtagcccaaacggcatggcctgcaggcttcaaagtgcactggttccctaatgtcatcttgctaatgagaattgtctggacactgccagacatgctgttggccccagctgtcacctaatgaattaaaacgtgggcttagaagggctgaggaacatgattcttaccagagccaaacttgggagatagcaattgaatatactatgtgtatactattactttctgcaactattttctccatcacttttgcattacaaaagttggagtaagatgaatatcaccacaggcctggactgtaactaagttgaacagaaaatttaaagcaaatcttaaactttgaattccttaatttttcaatttgaacttttcctagtgcgtcagcattatcccgtttgcaaccattgatccgaatacaggacctgctttgtgtggtaccaaatgtggaagtcagttcatcacaagtgagagagcagagtgatgt

SEQ ID NO: 34552 - DNA, 427 bp, Homo Sapiens
ccggcactgttgttcatacctgcactgtttttcatacctgctagttactaagtagcccttctttttcacatacccacaacaaaacccaccataataaaggaggtcagccagagaaaaagaagacgctatcataactcctgaaccatggcggtgtaatgtttatgtagcatttacgtaaggatggtcacaagcttggatttaaagtactgaaagggcaggaagagtgctgctgcatgcacatagtagtcaatgcaacagtctacatttactgtgtagaacaagcacactgaataaaacctatgacagtacaatatgtggtactctaatatcagatctgtggataccggcaggacttacttcctgatggaattggatcagataatgcaaaggacgtttggccaggtagaagcaagcaggcagaactatt

SEQ ID NO: 34553 - DNA, 353 bp, Homo Sapiens
ataccctgggactctgagtgtgcaagagaaagagacttctagcttgtgtcagtcactgtttggttaggttttctactgcttgaagccaaaacgactttaactaataaaaacggaactgagtagaaaagaagtaaaaccaggaaggggctggtaaagagaagaccagagaccagagggctgacccttaccctgtcagtccagaagcaggtttagagggagtggggtagaagggaggaaggctgtaatcaaaaggggaatttcagcattctagatttcagaagtagaacagttcccaagaagaagtggttaaattcttggggattttgggttgttggtttttgagtaagggtctg

SEQ ID NO: 34554 - DNA, 444 bp, Homo Sapiens
cccgcactgtgttcataccctaaacttttaaaactactcatgactaatgtctttcaccaaactgttacctacgaactttctaaagaaatgtgtgacaaaggcgtgattagtttcattcgctctgccatttttagctgtatatgtgataaaacatgtcttaatacatctctttttaacttcgattttatttggaactcttgaatgagctgtctggtatcgcttccctacagcaaagtactcggagtgaactttctttgattcccaggcttcttcattttctcccccttttcttcttctctttactctgcatcggctagatgcagggcaagaaatttacttactctaaatttgtgactcagaattttacaaactaaattaacttcataaatgcgctcaccttctttcttaatgcattacgtctaaccccccgatacagcgaccagg

SEQ ID NO: 34555 - DNA, 403 bp, Homo Sapiens
atatttctctcccttcttaggaaagcacgtggttgctactgccattgggaagagtgatacctgattagccaggtagccttctgaaaattgaaacaagtggcctgaggataacttgaatggctgttgggtagcagagagccctggaggcagggtttcataactgcgaacagcagttttcattgtaattgacacagcagtttacattgtaattaacaagcttcccttatgcagaaacatttaacgatacctttttaaatgatgtttactagtcatctgattagatattattaaaaatttagatgattcgtcctacataatgtcaaagcatttgtctaaaaacttggaagcttatgggggtggggaaggtggtcatagaaatatgatcatcttcaggatatggcag

SEQ ID NO: 34556 - DNA, 473 bp, Homo Sapiens
gtcacggtgtcatacccttataagtgaagcttaaaagcctgcatggaacctgaggatatgcatttggattgcatcctccgtgttaaatctacttccttttgtctctgcttcttcctccccctacacacagatatttgaaaagtcactacaaagtaaaaacaggaaaaagaggaggcagaaaaaagataggggtgtaataaagcaataatgatagctaaaaacacaatctatcataattactgctgcgggaactaacaaactgttagcacgtgctcctgtcatattgtcaactcagctgttctacttcactattggcagccatgacagaacaggaaatcagacggagggtgtagcaaacataaaaaaagacacctcgttatgactacatactttatttggctctcttgtagtctaaggatgccatgaatttggaaacaagcccggtatgaacaacagtgcagggtaccgagctc

SEQ ID NO: 34557 - DNA, 440 bp, Homo Sapiens
cagaatccattggaagacggtaaccccacgcgatacggactgtgtttgtataaattctcttttacgcttactacagagatatcaatacagtacttgagaattcctgcaggactcagcctcgcttcctcgaggagctctcagcctgcctccgcactcgagatggcagctttctctccctccggccaccgtttcgccgctaggtggcaggcggctcaatgacgcccttttaaaccgtttgccccggagttgaccgccgggatcgcgtgtcaccacccaaccctagcgattgttggctatttcgccgaggccggaggaggaaccagcggcagaaccggaagcgtctggtacagcgagtgcacggagtcctaagaatgcgtgcgcacccaggcaccgcgctggcttaaagaggccagttgcagcccctcctccggccttagggg

SEQ ID NO: 34558 - DNA, 506 bp, Homo Sapiens
aaacgctgggttgatggtcattgagggcccagggtgctgccttgccgccctgacgtacggtaacggggagtggcgtgtcttctgaatgcacaggccttggtggtttttcagctatgtaatgagaaggctgggggcggtggtagctacaccctcggatgttggagctggtctgcctggttccacttccatccaggcctggcttctcaccccccaaccttgggacggggagttccgtcatctctctgagcccatttcctccttgaggaaacaggaatgagcttggatgtgctggcgcacggaagccagagctagctgctagtaagcagttacggttaaaacagagcttacagttttaataagtttttccttgccctccctttatttatacactttagtttctgtgtaagaagaacatacgcaccttcctgaaaagtctgccacgataaatttggataaaggaacagcgagctgtttggagccctttgacctcttcgatgtgcgagact

SEQ ID NO: 34559 - DNA, 514 bp, Homo Sapiens
cttgggtcgactccgcggctacagcgcccaggcaaccatcttgcttggcacaacgagccaaatccgttgccattcgcatcccagcaacgccacggcgacaagctggtctctgtcatcgcagggcaccccgactcccccgaatcaccaattgtcgcgatcgaccaagcactgggagcccgtctagccactaaacacctcatcgaacaagggctaccggaatcttctccatgtccatggcgacctggaatggcaggacgcgtcagaacggctttcctcctaaatcgccgtctgcaaagaggtcggcatcgaccctggatggatgccagccaattcctgggaagccgaaaccggggcagccgtggctgaagaacttatcgccggacatctccccgacgcggttctcgctggcaacgatgacatcgccattggcatgtgtcacacattcctcattcatggcgtgaggatccccgacgacatcggctttgtgggattcgacgacatccctcaagctcgc

SEQ ID NO: 34560 - DNA, 610 bp, Homo Sapiens
tggcgtcagctcacaaagtgctgggattacaggcgtaagccagcacccggcccacattcctttccttaccctcaccaccccctcctcacaaagtcagagatctcccacttgactcaagtccctgggttccctccagccagtaaaccccgtgtgcaaatgtcctgactcttgcaaaagtgttaaaaaacaaaccttaaaaagcttccagatgttctgtttgtattgtggtgcttctctgcgctggtctccagaggccaatacgcagtgcacagcatcctgactgcccagataaaatatgaggctgccaagaggcacagcctgggggtgagtggggatgacccttcccccaggaccatggctcccccagttcacccattaactcttccattgccaaagggcaactttccacgcaaaaaccttcaaaagactgcaaaggaacaagtctgataagcttttaggttttgtctcctctgagtgtccacctcacctcaccattaaacttctcacaccaactgcctttgggatgtcgagtcagggactcaacgacacaagagtgaccctcctacttaagatgctaagttaccattttcaaggacatcttaggagctgg

SEQ ID NO: 34561 - DNA, 393 bp, Homo Sapiens
ttgtcgggggattcgatgaagaaataaaaggtataaagattggtaggaaagaaagaaaactatcattattcacagatgataagttgcagacatagaaaatcctaaataataaattcttaaaattagcaagtgaattaaacaacatggtctcatatagagacaatatataaaaatcaattgcatttctagtaacaagtaattggaaaattgtttaaaatgtaaatactattcacagtttccataataaacatcaaatactcaggtataaagctatcaaaaatgttactaaaaatgacaaattggtaagagaaattaaggatcttaacaaatgtcgacatataccatatgtactatagattgaatattgatgtcaattctcccaaaatgaacact

SEQ ID NO: 34562 - DNA, 391 bp, Homo Sapiens
ttgatgagggattcgatcctaatatggatgtaatatccaattctgcagagattcagctgtaatttagcaacaattaactgtccacttattataaagtgatgccaaaaaccctaatgcaattattttaaggcgttggtcacattaacaatagcattcaagtttgcagatgttgcagaaactttagattgatgtgtctgattaaaaacacattacgttggaaattttcttactttaggtatttatgctggtatttcagaaggcactttcggtttcatctttggaatagctctcatttacttttgtgcctttcttaaaattttatttctgcatatttgctttgaggaaaacaaattgatgtggttttctaaacatatgcaactttttgaggggt

SEQ ID NO: 34563 - DNA, 369 bp, Homo Sapiens
tcatgagaaaggaaatatattccacattgttaagatcaagctcagagaagaatctttaaagcatcaaggtccaacagaattcctctcctctagcttcccttccctcgaggtggtactctgctgcctagttacatagccagtagttctagtttctagcagtagtttctagtttggggctgttacaaccagtactgcaatgtcttagatttttttattccgcaggaataccttacacccatccactcaggtctcctctgccaggacttgtcaagtccaaactctcagacatttccttgcttcatagactgcagtagccattcacttgctctaaactgtatccactttcgcactaaaaaatttggcagagcg

SEQ ID NO: 34564 - DNA, 519 bp, Homo Sapiens
ccagaagggattcagtggcaagaaaaaataatcattctaagttaggactaaaactaagatgaaaaaagtcaaagcatcataagacacacaacactacgtgtctggagcagttaacgtcccaaaaacttaccatctctgtttctaacaaagcattttgtttttggtatccttttaatatagcaagtggctataccataattgaacagttatccttaatcattcttatctataccttctaactttaatggaagcttttagtaagatactcttaaaattgctcagattctatttcattatcccctgtcaaacatacctaccctccaaatcatctcaatgagtggacttgatcctttctctatcagtaacttgttcaaagcacacactgtacagtaacatgatttttcttaccaaacaaggagtcaactatagaaaaagaggcttaaactgggcaaaatccaaaatgatagaagtgcttttgactactataaccaaatatatttaagttgttgaatctatttg

SEQ ID NO: 34565 - DNA, 641 bp, Homo Sapiens
aacccctgtgctaggagtagcctcaacatgctagatttaattgtaagcagctggtttaagaaattatgtaagttgcaatgatgaatattcctcgtcactcacaaatgttattcatcaatttaaaaattaatatgtatcaagtactcagtgtgttccaggcatgattttagttacaaggagtacagcagccaataagatattacagttttcagggagttttatcctactagggaagacagataagtaaataatgaccgaaggctagttaacaagtgctataaagagatataaaaaggaaagagcctaaggagattgaaagtgatggttatgggagagagatgtctatattaatagggtggtcagggaaagcctctctggggaggtgacagtttgaatgagatctgtatgaagtgtgtgagcaagacctgtgaagatcttgaggaagagcattcaaggtgtagagaacacttgcaaaggccctaagatgggactgagcccggtttgttggattttcatcagtaagcccggggtggcaggagcatgcatgctgatccaggtatagaatgagtggtagaaggtgagatcaggagccctgtaagctgttgtaagcatcgttgttttaatttggggcacttcaggtt

SEQ ID NO: 34566 - DNA, 596 bp, Homo Sapiens
agcgccggtccaacctgaagttgccaagataaaaacttagaaggtacaaaacttctgaataagtaaaaatatatacaaatatgcaggaagtaaaaggcagagttggtaaccaaaggtatagaagccattttctatggcaagcccactaatgtactctaatgttctgtagtcattgtgctaaacgacttacatatggataggtgtaaagtaacaactctctccttctaacccctattctgcccaaaaacttatttagatgaaactagtttgaaatggaacttaaaatcatcaaattataacaggttcctttgtgtaaacgctgtattactctttgacccctttaccctttccttcctttatagctctcatcacaatttaacattctacatctaagcaaccaatttgcctcttttgctcatgacataagatacatgtccagtacaggtgctagatagttacccaaagactaaactgagaacacaattacaggtttgattaaacttgaagatctgaatacactgatcattaatattttgatattgatgagtcattctctctaatcctttgtttcaagtttacaaccaagaagtgaatac

SEQ ID NO: 34567 - DNA, 606 bp, Homo Sapiens
tgagtgggtgaatacctggacggtgctcttctttctagggtgacatacttcaactacagagcttgcatagggaattctttcttccagcaagattaatggttttgtgctgaggtcgccacagattctacctgatttatatttgccagtctgaaggccatgattagggaaatttttttgtgtaacagattgacgtcaatgaatctttcatatgttatacgaagaaattaagacatatagagaaaatttcatgttcacagggcagctgtatatgagtgattctggtcagaaccctcaaggctattctgtgtactctgtgtacaccggaagggctctgaagttttctggttgggctgaggagtagatgtctgtcccagtgccacgggattttcttttctggaggaagatagtacatcataaatgttgtctttttcttgtactgctggtgtgagtgcttctttattgatttgacatttgtattattgactctgaaaacattgagtggcccgagacctcacttcactgatttctgtgtcgaaaaacatccagagatcttcagatttgagctctcttggggtgctcctctgtgctgtcactgttcatgaaaaa

SEQ ID NO: 34568 - DNA, 587 bp, Homo Sapiens
ataaatcgttgtaggtatatgatgatttattaggggaacttacagacagaaacgtggtcttgggtggctgcaagacaggtcgatatctacagctgttacttcccagacccaaggcttgtataccataggggaaaggtatacatgctccagcaagacaattcaaggcaaccctccagaacaccaagaatgttatatgtgtcatagcctataattcatgtgataacatcaaggttgctttgatctaaaatcgggatttgtagtgagcacatattcttacactaaggacaataaattaagaagaaatcaggaggcattcacagaaatggggtcattcagaagtcaatggtggattaacatccaagatggagtcattttgtctctacacaaagagatctggttatttttgtggcatacaagatttaacattacgattatgactggtaacataaaccaagacatatcagatttctaggactcgcgtactattttggaacacatattacacatttatacaaatataactcaaggaaaactaaacaccattttgtatttgccaatgcttcccatgtgattttaacatactgagt

SEQ ID NO: 34569 - DNA, 407 bp, Homo Sapiens
ccgagtgtacagccggatgctcctgttgccttgactgtcatcagcagtgtatctggggaggttcactggtaccttgttgaatattctgtttcctgctcagcctttcacctaatggtcttagcatccctaaactcattatttcatcagggatctcatagatggtttcctgtatctgtgattcttttcacatgtattagcgggcattctgtaaagaaacttcttatcatcaataagagaacatcatagattcttctaaaaaagcagggtcaatgtttcattccgtcctttatccatttgaaaggaagatagtcacctatagttgtggaaatcagtgttttcctttcactcctctgcttctttccctccatccttcctttgtgaatcactgtgtgccaactgactattca

SEQ ID NO: 34570 - DNA, 413 bp, Homo Sapiens
ccaaccttaagtgccaaatgagtggaagttgtgtggtgcagcacacctgggttggccggagggattggggttggggttgggttgaggtcaggaagacatcctagagaaaggctggctttgagccctgattgatgatgaggcagcctgtgattgattcaaccagtacttcgttgtagggggtaatatgggtgaaataacttagtggttaagtctgctgtattaaaaatcagtctataatccccagacaattcaaattcttcagtatcttaggaaactcttctatacccagtggatgtttaataattcagattgtaaatggatttaaaaacatactggctggtagagtaggagacttcagcccactggacacatgtggaagggtgtggtgtcattctgagaaacaagagccaccc

SEQ ID NO: 34571 - DNA, 508 bp, Homo Sapiens
catcggaagcacacaccagccagagtattgttaattataataaacaatagctctacaaacttcattttgtacatactgggcttctaaaatgaaatgatttcagataacaatttgaaacttatatagggcctcaggacattcttgataaaacctcagaattgaaaatgcaatcaggtattatgtgtaattaaagtcaggctattttaacttgcctcattaatttggagtttataactatattgacaatatctgcagaaaggatttgtttagcatattaatggtttagacaaggtccaaataatgcacacctacaacaaacttttaagcacttaaaataattttagaacctccttttgcatgaaaacaatttgctaaaataaattttatgtctatttgtaaatttggatctcatatgctctctacttagaaatattccaagatcctcttactaaagatatagtcgtgcaccacataatgacgtttcggtcagcggcagaccacatataca

SEQ ID NO: 34572 - DNA, 353 bp, Homo Sapiens
cgtatctatggtcatagtctgttcctgtgtataccaccccctgaaggtgactgacaggtgagggatattggagcgagctggtgctgctacttgcagtcaccctagcctgttctgatagtgctctggtattaagtgatcccaggtggagctgacgttaacaaactttgtgtactgtcggaatcttggaagaacacccagggcacacacggttttcccacttgagtatacagagcccaaatacatttctaaaagttacctaaagctttcttatctgaaacatcccatttaccctgagttgctttgagcattagaactaggagatgagtcaacaatgtggcaaaaatcagcctgct

SEQ ID NO: 34573 - DNA, 470 bp, Homo Sapiens
aacactggtcatagctgttcctgaggtaacacccttatcccacagtgttgatatcataaatacccattcagaacccatgtacatgcatatatcaggttcataccctacaagtttcacaggggaatacttttttgcgtagcgatcttcgtgactcccgtcccgtactctcattctgtttatgactggaatgtggctcgtgaagaccacagggatttcctgaagtgtagctgtagcctccccacacccagtggctgcatgcagagcaccttgccccctcacacacatccacaggtctatttacataattacataccaaccagttacttatttaaagtataaatctcggtggtttttaatatattcacagagttgtgcaacatcaccatcaccaattttgttgtagtagaagtagttcttgtgacggagtctcgctgtgtcacccaggttagagtacagtcacgcaatctcag

SEQ ID NO: 34574 - DNA, 489 bp, Homo Sapiens
ctacacccaatgcattagatatcagttgaattcgtctctattaaatatcataacttaagcttgtcgtgttccactttcttgcatcatgtcgtgactgatatacccctcgcttattaaaccaaacctaattccagagcctcaactttgaagaaagggagaacatctatttcttaaactccacttaatactgtaaaaattataactccatagcatctattaatcccattacaaatgcaggtactgagagcacaaaagaaacattaaataatccacataaattatattatgctatttttggtttttaaaaataaaactattacttgaaatgacaagtattcaagtatacagatatttcaaaatttacaaaacacattttatgactcaaaaatcatcaaaaagagacatttaatctttttatatatgcttccttttttggagacagggtctggcttctgtctcccaggttggatggtagcggcataatctcag

SEQ ID NO: 34575 - DNA, 369 bp, Homo Sapiens
ttcccccacatgagtaaagcaagcatacacaaattactctgtgtgataatggagatggcctggggatttcctgttacacgaggatctgtgggctccaatctgccttcatggtcttgtccatcagcaggagctgcttgtactccagactaacctcagcatcagcaaggccaggcgctgtctccctccctcccactgctgctctgttccaggcactgagggatctggagcctacgcccaccggggccccaggctccactgcctgctcccatctgggtcagtcctggcctgagatagaagatgatccttccaccatcccgacagtggatgggatagcccttggagtccaagaggcctcactgtgggggaggg

SEQ ID NO: 34576 - DNA, 388 bp, Homo Sapiens
cgtagcgcctgatagtctactttctatccttatatagagttgccttttctgaatattttatgtaaattggatcatataatatgtggtctttttaaattggctttttccatgcagcaaaatgttttcagggtttattgatgttgaatgtatcagtagttgataacttcttcgggctgaacaacattccattttatggctgtgtactacattttgcttttccatcagttgatgtctatttgtttttgcattttggcagttgcaaaaatgttgcagtgagcattagcatacaaatatctattggtgtttctgctttgaattcctttggtaatatacctaggatggaattgttgagttacatggattacctgacttttaaaattacaataat

SEQ ID NO: 34577 - DNA, 371 bp, Homo Sapiens
ttcgatagttcttgaaaagctacttcaattagtggttagcaaggcttaaagactaattcagtgctttattttgacacgtgtccgcaacatgtggtttttgtatcctgtgtcctatgggacctagtcatctgtatgttagattcacagaggaattaaagagataaacatgcatgtgctaaattgatttctgtctagcttggttatcctataataatgttataaaataacattattataaatttcccaagagttgaattaataccaacaactggtaactcgtttttatgtaaacagcatacttgagaccagaaatcttcgggatcactttggggatctctgccgtgccattctcattggtcctctgttcatcc

SEQ ID NO: 34578 - DNA, 381 bp, Homo Sapiens
tatgtcttgaaaagaaaagcgtctaatatgtagtatatggatcgagagcagcatgtatcagtctatagagtagtgtcctacaatatgttattaacagatagcaggaatctaaaaggttggagaatagtgctctagggcagtgaacatcaagttctcatattttccaaaacatctttaatttacatgtgcaaggaggtgaaggaatagtaaattctcaaatactaatacattttcattcactgtcaatgttataagatacaacttattcagggaagacggcagctcactgtgattaagcagtgtctggatgctgcacatccctgtatcactgggaatgattatttctaaaggcccagaattcccagaccactgttgccataa

SEQ ID NO: 34579 - DNA, 370 bp, Homo Sapiens
gacagaggttgattagttcttgaaaagaagaaaaggaggagtcaactatgtcttaagatatttcttaaagaaaatggtaagacaacatctcatttcttgcaaagtctctgagcagttttttaaaaattatttttgtctgctaaatattgctttaggtgtgccaagaagactagaatttgagctaagaatttaagaaaattaactttatctgcatttcatatttactttatctggttttaaatgattgcttataccctagcttttaaaactaaacattcatagcctaaggatgtttcatatctttggactctgggaatgaaaacccatttggaaattaagtctatcgctcagctcttcgtgctttcacatg

SEQ ID NO: 34580 - DNA, 377 bp, Homo Sapiens
gaaggctcgattagtctttgaaaagaggatgacaccatctacctgaagactgtgaggattccatgaccatacatctaaagtgcttagcatggtacctagtgcatacatcaaggaactggtacatgttaactgtaccatcatcacccaccaccagcatccccttccctccttcatacctcttaaacactaggaaccatgatcagctaggacttgttggttacagacatttgtaggcagaaaatctggaagccacctgctaccctctcccacatgaggaacaaaggctgcagagaagccacctgtctctccccatctgcaaccttctgctccctgtgacctcccccgggcccttactcctgctcactgctttactctct

SEQ ID NO: 34581 - DNA, 406 bp, Homo Sapiens
gattagttcttgaaaagaaaaaaggaaaagaaatatggattcactgcacagcacagtgcagtgaggagaaacaacattcagagaggcagcaggggtggggagggagcaggaaacaatcttgttgaaggagaaagcgaagaacataaagaaagagaaacttttatttagaaataagatgagaggtgaaggcgagggattgcctctgaccttgtcgtccgcggggagtgggagtacctggattcaggaagggactcttcctgatcttatcccctgaatttacctagctcagtgcctgagacagggaacccactttctaaaggtttgacccaaggaaagtgaaacaatcaaaggtgcatgatacctggaatgagttcacggcatgcattggttgggggctgctagtgct

SEQ ID NO: 34582 - DNA, 361 bp, Homo Sapiens
gaaaagcacgggtaatataagggtacctgttattctcttgtcacttagatgtgattttatttcttgggaacatcctacatgccttttcttcataagattctccgtcttctgctggccttgaactaagtccagtctacctgctggcctgaggtggcgggggtgtgtgtgtcagccccctcagttgtgttcctggggcaggcagaactcaccagcacccggtgctgattttatcccttccttctctgaaaactcggagagtatgtgccagctgctgtctgcgattgatgcacatttattttgtcacttgggctcagaacgtcctcaccagtgagcagcttctgattaatgccgccaccccatc

SEQ ID NO: 34583 - DNA, 393 bp, Homo Sapiens
tgatagtcttgaaaagtagacagcacttctcattgtgtcctccaatggcctcgtgcattcgcagagggagagatatcttctcctctttttataaggacaccagttctattgaattagggcctcactcctaagacctcacttgatctttattacctccataaaggcccatctctaaataaagtcacattgtggggtaggccttcagcatatgaatttagggggacacaatgcagtccataacaaaagccaccttggagccatgagtgggcctaacgttaggtatgcatggtacaaatataggatgaagccaactatgaggcaagaaaactaggaagctaaaaagaggttcataagtcccattgttaagtagttggattaaattcctcttttttt

SEQ ID NO: 34584 - DNA, 397 bp, Homo Sapiens
taatttctaaacatatgtttctggaaagccttctgaacaaactttatgccattcttaaccatttatattatatcctttgccacctcgggactttccttctttccatggtattactgtgtacccattgagggtactttccatggtattactgtgtacccattgagggtactttccatggtattactgtgtacacaatgtgaatatataactataaattacatattcaagttgctgtctttgtatatttacctcttcggacttgagtctaggttgtgattcagatctttggattgtttttgcattctcccattaattctttcctagcctctgcaaatatactccctggtttacatagctactcactaagaacaagaaccccccgagaaaatataaaagc

SEQ ID NO: 34585 - DNA, 370 bp, Homo Sapiens
tgatagtcttgagttgtgtgaatgtctgtgtgattgcatgcccatgcaaagatatttgctctctgcatctgagcagcaggaagccattagaagaggaaacccatattggatgagaattttattccacacccaggaaagcagggttatgatgtgggggcaccagctcaggccctggtagctgtgccagggacctaggaccctggcattgtgaggtcccctcctctcagagccagaggatggggagaaaggacgagatgcttggctgctgaaaccatggactggtggtgaccgccattcccaccaccctaatcatgcacttgtgatattaataaaaataatttatgtcatgtgactgctttttaactagctg

SEQ ID NO: 34586 - DNA, 436 bp, Homo Sapiens
aagcttagtatactagtacaaatgttgatgaggaattaagtatacatcaaatcaaagacatgttcaaagcaaagacatgtttgcttaatgaacaaaacagactccagccaaataaataaccatttgagggatacaaaggaaattaaggaatgaagaaaaatagaagatgtctacctgatgcgctgctaagtgccaaagaagataccataaaagaagaatgctgagaatgaattttgagtaagactccgcatccaactgacagggcagtataacaactgccctcttctgcttcagattaacccaggggagctgactatctccagttcttaagagttatcttatatggtaaatagctgtaagaatgtgcagttttaaacaggaggtagtcacagtcaaataaatctttaaaaatgtgcaatgtgatttatctgaactc

SEQ ID NO: 34587 - DNA, 501 bp, Homo Sapiens
agctagtatactatgtactatatatgtctgagggatctaagcaccactatcttcttgacttggatataagcttagtagggcaggaaggacactcttaagaatttttaggtagtatacaggcagatacgtgtcttctgtgttattcagtctgccttactcattcagctgcccaatctggaaattcatttcctaagagttctggtttacatactatagtagattttctacttgggggactagctcttataaatgatatttagtgccaaaaataaaaagttgtatcagagtcgataatcttaactgaacatgctaatgaatagttgattaatgtctcttttattaataccacaaatggtcccatatgactgttcacagaaaaggataatgatacctaaaaagctttcaccctgttacgtaggtcaactcagttaccttggctgttctcaccctcccttatctttttaaaaaatattgtgtatttatttaataaggtctcgctgt

SEQ ID NO: 34588 - DNA, 407 bp, Homo Sapiens
cctagtaactgggggaggagcaagtgtggaggtgctgggggggaggagcaagtgtggatgtgctcgggggagcagtgtggagatgttggggagttccgagcaggtgtggaggtgcttgcggggaggagcatgcctgggggtgttgagtgggaatgtgtaggggccgtctgtggaactgagaggcattgattgaggtacagtgggtgagggtcccagaggaagaagaaacactcagccgcaggagtcaggaaatgctcttgctcttgaacagtggaacacagctgagtgggagtgatctgtgtctgaaagattctcctgttgtatggaaaatggagcaggcaggggagaaagattgagaaatggagagggacggtggcttggactgaggggacagagttgaggtggct

SEQ ID NO: 34589 - DNA, 402 bp, Homo Sapiens
aagtcagtgaataatgcatagtaagtgcctggtggatagatataaatactcaataaaagtccactatcattttctcacttcaaccatccaacaatccctatgaggtaaacgctattattcatccatttgacagataaggaaattgagtcttagagacaatggtgtgctggagccagcttccatgggcttgtgaaagccaattgttaaattttcaaaagttttttgagttggccgacatcatgttgatagtttgaaagtagccatgatggggtatttctgccatgaaaatgagcgaacccatttcccccacagagctgcttgttaacatttaccagcacaccactacttagagcagtaagataacttatctgaggccccatggctggtgagtggcagagccta

SEQ ID NO: 34590 - DNA, 451 bp, Homo Sapiens
tgctgggattataggcgtgagccaccacgcctggcctcactggagtcttaaagggatcataaaccccatagaatgttatgtcactgatgtggtatccactggtgtatcctccaacaaattacaattgaaaaccaaaccaaaacaaaaagaagcccttcacttttaaattaaccatatttttattatcttaagtgctgttatttattaaaagtaaagaagtagaactttatgttaaaagaacattttcatatatgtaatgcctaggttatgaatttttaaatgcgtatataactaagttaatattgaacctaatcttatcttttcgatgatccaaaggcagttatggttatttcagtacctgaaggtcatggtaagcattaatcatcgtgatactgtggctgtggtagaaggtttaatagcactgtaatgcaacggaatttcctgtgtccac

SEQ ID NO: 34591 - DNA, 363 bp, Homo Sapiens
aaactactagtacatcaagtggatacataaatattttatgaaatgaatgaacaatttaataaataaggcaaatagtaagattacttccagaccaagatagtcaagtgtatcagtgatatgttttaaacatctcctgtaagttccaatgagtttattcatagccacctaaatttattccaggaggctatagctggcaagtatctgagaaatggaaaacagtatctttatttgattttaaaaggtgaagagaaccacaggataatgtgtatcttttcttttaatgatctagaagaattagctaagcaatatattaaatctacagatgatcatgaatgaggtgttttcttttggttttttatgagt

SEQ ID NO: 34592 - DNA, 438 bp, Homo Sapiens
gggtgcgccaagagcttagtaatactagtaacttgctttgatgttccaagtttaaacccattctaaagaagactaatgagctctcaaactacccagtgatagaaagacttctttcaaatctccacggatgacagtatttgtatctgctcaagtagaagcttccgtctctcttgtaacaggtcagtgcttcagttaccactgccattgaattacccactcgctatcacttgcctcttatttccataaaaaaagaaacggaggaaaaaactgtttaagttttaccttgtttaaaagtaacacgagtgcttttgttattctgtaaactaaatacataaatgaaggcaaaggaaggaaactgagggaagggaacaaaatgtgagtgatgaaaacacggagttcattaaatgaaggaataaagataaagccggggaaaacact

SEQ ID NO: 34593 - DNA, 493 bp, Homo Sapiens
tgaacagacacaggatgggggggaggtcacagctgtggtgctctcctggtccctccctgaccagttgactacttggcccactgtagggtcctcacctggaacattcaagtgctgggtcccttccaccttcagtcctacttgtttccctaggtatattttttctgtggtttccctttgcaaggacatcctagaaatggatagtgatgggtcttcccattgtccttaaaccctgtacatattgtgcagcctggcctgggactggatgtttcagtagaaataacacaggggacaccagaggcaagcctggaggtcagctcagtcgttaggcagtggaggcacaaggtggggcagtttttcccaggtgtttgatgatgactgacttgagccagagacccctaaagatagagtggagtccagggaatgatctagaacttcaggtgacaggcaggagctgcccggatttaacagcagaaccatatgtatgttcttggtc

SEQ ID NO: 34594 - DNA, 387 bp, Homo Sapiens
ccacagactatgtcaagttctacacagaaaagaggctatgaaactgtggctctggtgactgtaatctcaggacacagctctcacaccacgagaggaatagagaacaatgatgggcctttggtgaagaaatgtaccacgggggaagtgaggcagtttagctgtggatttccactccctcaagccccatccaacaatctcggggactcactgaaaaaggtaaagtaacaaacccccgagtgccactctccccaggctccttcacagcaggcagcttccgcctcaccctccaacacctccaaggcgctgccatctcccgaggtggtgagtggcccgtgcttgttctctccaggctgcgcacatctcctgataccaacgcgggcctatgac

SEQ ID NO: 34595 - DNA, 423 bp, Homo Sapiens
agtcatgaggaaaaaaagcttcatgcatgcaattctgggaaactacatcgttatccccatttgtgtttaggggacaggagtgcactggtacatcaaaggctctgtcattcagtgtcctaactccgtgctgttaaaaaggctgtttaatccagtctgtcccaaatgtatttgattgtaaaaccctatcatttcctatatgttatggaccacttgaatatagactttcataaatactgtactaggctcattctttggtgtggtctcatttctttcttccctgaagggcactgctcttgactgcagttttgcagttgtttgatgcaaggtgtatttcctggttggtagaatttccacaagcaccccaccattttccatcagcaggaattaagatcttgctctgcaggtggcaagtggtacatattg

SEQ ID NO: 34596 - DNA, 648 bp, Homo Sapiens
atgctgagtcgggtccttaccgaccagttctggggcatgttgcgtctgtccccgattacccacgcttacctccttaatatccttttagcaaagtacttctctgcttaaatcaagcatgttgatttctgtttctgcaattaagaatcttaattgatacaccctgatacacagattctggatcagtggttttaaaattcttttcaggcaaggaagcctttcattaaatgaaatcttatgaggaagcgtaacacatgatgctggtaaaagaggtgctgctctgcattagggccctggagggaatgctagtgcataaagcatagctgtaatccattgccctggacattctgtgatcctggatcaattactgcctccctacccatgttacacaggccctggtctccgccaggcagctgctggatgaggaggggttgatgtttgctgctagttctaaatcagtgtgtatttccagggcccttcatatgctgtttgtctcctccaagacaccggccttctctgccttctgatcgctttcactgggtgaatggtgacataccctcctgtgtgcaggccctgtacaagtgtggatacctggatcaaagagattactgcctcttaaaatctcttcaaatacagtcattctagattaaa

SEQ ID NO: 34597 - DNA, 436 bp, Homo Sapiens
gagcggcccagcgagtgagagatataactatgtcatagactaagactgatatgattaagatgtaaattcctaatgtcagatagagctatatattcaacacaatcccaatctcactacagatgtgctttttgtagaaactgaaaagctagttttaaaatgtacataaaaatacaaaagacctataaagtcaatagtgatcttgaaaaggaaaaacaacatagggaggaattacactttctgatttcaagacttataataatctacagtttgtattggtataaggatagacataaagactgacagaacagaatacaaagcccagaaacagaccttgcatgcatgtccaactgagtttccacaaagataacaaagtaatcaaacggggaaaggctagacttttcaacaaatggttttccaacaactggatctctataag

SEQ ID NO: 34598 - DNA, 354 bp, Homo Sapiens
atattcaaatgtgtttgcatatttctaaactgatcatacatcaaaattagagccatattgtttcttttacagtgaaactgtttatataggaaatattgtaccaaacattccctgcttccaccctgagttgtgactgattacagagtgagataaaagcacttacatacacaaacacgagaaaagtctataggcatgcaagaaatcaaaagaaggtgtgatttttaacacaaacactattatcaaccaaaaataaagaagaaggaaaaagaaagattgctggagtttatgcgaattctgagaaagcaaaaagcatagacttacacactgatagattgaaaattagaggttgggtta

SEQ ID NO: 34599 - DNA, 405 bp, Homo Sapiens
ttaggggattcacagtccaattgagtggcaaaaggatgtggaaaagtaaaccctagtgcaagatagtcagtataagccaagaactcaatgagtcaccagaatgccagtgctggaggaataaagaagaaatcaaacgtgtggacgtcctatttgggggcaggggagggggcttcacagagatgctggtgctgcctctcctcctctagattagggaccacatgacagcgaggaccatgcctatctgtccttttagggtctcacacagcacttgggacatggtggcactggacaaatatttttgaatggatgaataacattttccctgaggattggcaggattctgattgatagaaagaagggacagagaatggcagggtatgggcctaacgcggaggcaccaccagg

SEQ ID NO: 34600 - DNA, 483 bp, Homo Sapiens
gagttgtcctgaggagagtcagagcatgtggattttcagcctggcacttccacgccacaagctttgtgaccttgagtattctacaggagtcatctaacatttcattacatgaagaccaggtgatcagaaaggccccttcgtctccagtcttaccagggtccaccagggcctgattcatttgttccagtgatatcactgtggggtgtcagcatcccaatggttcactcatagatccttcaggtctcctccagccaccgcccgtgtaccatgacatgacatggcatgtaccatggcccgatgtcatatgtaccatggtgtggtgtgatgtgtaccatgacatgaccatgtcacatgacatgctatgacagtgacctccctcagcctctcccaggcacacagttttaccccttctcctaaagcaggttcgcacgcccatctaaaggcaacttcagtatttgcttttacttctctttaaagattaca

SEQ ID NO: 34601 - DNA, 511 bp, Homo Sapiens
aaaggctatttaggaactaatgctggcttaattattttctctgtctctcctctgcctcttcgaatgtacatgtgtaggtgtatgtgtgtgtatatgtacgtgtttccttttatacttggctttttgtagccatcattttttatcttttaaaaatgacaaacacaattcactttccagaaattaacttcacagttcatcagctggggagcgtctattcaataagacagaggttactgtttttgaatcttgccattagtaaaactctccagtaagcctcagaagtgggctaatggcaatatttaaacaacttgctctactgatactgggtgtttagtgaaaaggactttggtgtgtcatttaagctcatttcccccactttttaggtcaaatgtaactaaaacatcacacacatctgttcatctctttcttccaaatctccaagcagtgtaactgtttggggggatggggtagggaaagaaataaatgaaccatctccagcaagaaattctgc

SEQ ID NO: 34602 - DNA, 396 bp, Homo Sapiens
caatcccattcctatgctaggcttaaccaccattattagtataattattcatactttacagagccaatcacatagttacatatgtattgacatctcttctcattaacctttttttaatccatttccaataatcacctctcctaggaagataattttttaatgatagtagaggaatagacgaaagagatctaaatgaaagaaaagcaaaaatacagaaaataaggaattacaccaagtataggatatttcataaaattctaattttataatcctataggattgtgagagtaaagcaaatgccagcctatatactataaattttcccacaaaatactattttctccaaattaagagagagagagataaaagttattttaatatgactagatattgggt

SEQ ID NO: 34603 - DNA, 559 bp, Homo Sapiens
ctgtctgaagagtatgggtattacagacttgggtgtttatctcatatttgcaatggaaaagcctctttaagagcaaccttgagacaattcaatagttcacaaaatcagtcaaggaaagctaaaatcaaccatccccaggagagccaaattcaacaaaaacttccctcaaaggctcactcactcttaccagcagaaggtgtgatgtgtggagctaatctaaaagcaaattcacggtgggtaaaataataaaagaatgcttatatgaagcaaaagatattgcttttcttgatcaaaaaaccaaaacaaagcaagatatcacttctcattatgccctgttcttgcagagtagtaaatgactcaatgattatcttgagaagcccagtatcataaagatactcatgggtgcgcaaaaatgcctctgagttctttgcttcttccagcataaggggtatctacagatctcttcattttaccattcaccctattccttccagagctattgctcatctttgccccttcaagaagaattttcagagggaaaaatctttactcattggcc

SEQ ID NO: 34604 - DNA, 440 bp, Homo Sapiens
cctgaatggttggttggttcgaatagggagctgtaggcccactgtgcactgacattaattgtaagagctagagatgggctaagatcaagcttatgggatactttgataaatcgtaactaggaggccatatgttgatatcattccagccaatagtcaactggtcaatctcagaaattcttaaaaacacatacagacgttgcagcttttttcctgaagtacaagccaactgttaaaatctttctctatgccagtactgaagtattttgagaacacacacgcatgttcagtagtctggtaccagaattaatttccactctgggttcgattctgcacacacatcaccctctggttgctttcctaacttgggtctgattactggcctaactcaagtataaagaaatgaggggacactattattcatcttgacaactccgactttc

SEQ ID NO: 34605 - DNA, 478 bp, Homo Sapiens
atacttctcatgcggcacacttttttgaacttcatagaagtgaatataaagggatgggaaaagaacttgagaaagaacaattattgcccccatttttcttctagtgcattaaaatagttagctttctacctttctcttcagtatgattctagagaagataattttgcttctttcattcaacacattttattatgttccagtcactttattaggtacaagggaggaatggtcacaagattgatgaaggtttctgctttcatggagcttaatatgaaatgcagtgtccacacttataagggttaaaaaggagatcatcattaaggtttgtcttctgtattgctacttggatattccttactgtctccagactatttctataattgtatatacttactaagtcccctgggactgttggacttttgattattgtgatgcttgctaccatctcaaaattgtaacatgacaggggtctttttgg

SEQ ID NO: 34606 - DNA, 437 bp, Homo Sapiens
tctagctctgcccacgtattagctgtgacattaactatgtgttaagtagccctcatgtgcttgtttctttgtcaaaagatggagctggtactaactacctgatagggttgttctgagatcaggtatagttgtctgtgtacaactcttcgtcatttatggcactctgtttaggggtgcatcagtcagcattgctgattcttgctgctgttggtgatgatggtagatatccagttggagaaattattggatctttttaaccagttaacccagttagagagggactcaataaaaccaatttaataaagttccttttggcacaataattgaattacaattggggatgtaaacttaaaccttgacgtgacttgtcaccggaagttggaatttaagtcaagggttgaatttaaaagtagtggttagccagaaacaaggggtta

SEQ ID NO: 34607 - DNA, 381 bp, Homo Sapiens
cggacctgtccatggtcacagagctcagtcaatgttgacatattaggcacctgcccaatcatcagaataaactgcttacaaagtacctgtgcacgtgtgcataatttgtttaatctggaagagggcactgtctccagtcctccctgttcctctttaaccaggtcaaggtcagaatcaaaatgcctgagtcactagtgcaaaaggaaccatcagtaagaacaattacaaggttgaccccttgagttatgggcttcctcaggcacccatgtctgtcccaggtctttcctggatccccagaggcagcacacacctctaagcagttttctaaccccctaacctaattcccatcttgttcctctgtcggtagaaataggttgatca

SEQ ID NO: 34608 - DNA, 414 bp, Homo Sapiens
ggtcaattccaaagaacacactggcaatgttccctgctctatataaccaacagactcctcaggcaacttgcacgaaggagaatacagtctggagtctgaggtggtccttaaatatttcctcaagcttgcttcctcgtctgtgttggtaatagccaagtgattcgttttgtggggtagcttccccaggctcccttgggctggactatttatcatggcagcagctggagataagctggacacaaagaggatttgtgtctcaggagagctggtccctagatacagaaagtggaggaattttctcattggaggaagtcagtggtggggactctgggctttcctcctgtgcccccagtgcaaacagtagcaaggagggggcgtcctggaggggagatgtacttgaagatgctttcactg

SEQ ID NO: 34609 - DNA, 410 bp, Homo Sapiens
aactctgataaagtcttagctcctatcaacctctaattattgtcctctgtcttcctttaaacccagaggacttcttaaaatgagaagtcacatctgttacctaaattgccaatggtgtatttcatctgtgctttaaatgcgacacatctacaatcaacattattgctgtctttcctttcccgcccccctccaaacaacactttcttctcctcactttttgtgtttgtgatgccactgtcctcaggcaaccatatatgaaacctcaggcacctttgatttcccccttttcccacagtccccagaacaatcacttggatattatttctgtgccctcctccaccaaacctttcatctatccctttctgttcattttcactgcctcttaaccctctacaaatcctttcccagaa

SEQ ID NO: 34610 - DNA, 542 bp, Homo Sapiens
tggagaaggtggtttctgtgcagtgctgtgagcagcagccagagtggcacgtgcaaagagatgggcactgagggaggaagacactgctctttattaaagacaacagacagtaatgctagagatagaggcggccagtggctgcggcaggagatgtttcaagtggagagaagcaagtcagatgagagacaaggaaagaatgcagggtgagctgcatgggaagccagtggcacagccgcctgccagtcaaactgctactacccctgagtccctctgtccttaacaccccttggctccctgctctctccacatgaccattccctatttgggccctcaatgatctctttctcaggctcttgtaattggcctgcatatgacactccctccctctcagcctagccacagccaggggatttccctaaatggcaaatggggcatgctactgcccacggctgcccaccccacagcccgtgacagcagttctcaataaggcagctaattgcaagcaggtctctggttgccatattgatttggggaggggtata

SEQ ID NO: 34611 - DNA, 533 bp, Homo Sapiens
tactgtagttggtggtttcatcatagcttcatgcacccaagtggaaacgggtgcttcttcctgctcccttgcccctacatcaatctaacaatctcattggtttttattacttaatcttttctaggatctggccctttccctctctccacctcactcctgcactgcactgacccagcctggcccacctctggccattcctccatagactgaggtctctcatggggaactgaggtcaccctttgctgcctcacgctgcctctgggatcagaggctcttggatgtgatttctaaggtcatctcctcttctctacactcctgcctccttcaccagcaccaagcttcctacagctcctggaatggtttcctccacccacaaggaaagtgagtgacctctacacaatcctcacctcttgccaggctaattcctttcttttttgagacatctgcagatgccacctcctgtgggaagtcctccctgattacctctctcttcttccacccttgtctagcaataccatagttctttctcaatg

SEQ ID NO: 34612 - DNA, 508 bp, Homo Sapiens
aggaaaagccccgagggccaacagttaagcactgacttaatgtcacaaaaaggggaaaagaaatccggatagagagagtggacagttagtttaaaggctctaagcctggcatatctgagatgaaagaaggcctctatgactagagtatggtagggtgagaggaaaacagctgtagaagtagaaaagtcaactagggttagacttacaagtcagataatgaactttggattttattctaagtgctatggaaagccactggaagacattgacaagatctgaattacatttttatattttaagaaaatgaatctagctagtgtggagaatggattgtaaagggtcaagagcggagaagcaggggaaaagcaaagaggctgccacagttgtctgagtgaaagatgatggtggcaaagacgagaggtgtggcagagatggagagaagtgagcagatttgggatacgttttggaggggaggaagtgtcaacagggctcactgatgacagactgg

SEQ ID NO: 34613 - DNA, 468 bp, Homo Sapiens
caccattcactcttcagcctactacagtctgtctttggtaccaaaactgttcttgtaaacaccttgtttatcaaacacctccattgcaacatccagtggctagttctgtcttacttatcagctgcattagatatagctgaccatccctattttaaaacacttcttagcttcagtgataactaaactctatttcccttctcttcactggcagccctgtctcagatttccttactggcgtttcctactctgtctgtccatagaatatttgtgcactcctggattcagtccttagtcctgttctctcttctgctgtgtctcctcctcccccccattttatctcctctagtcctgttaccctaaatgtcatatcatatccagtgactctgaaatccttatctcgaccttttccttgagttctagaattacatagccacctgcccactcagtagccccccaagatatctaata

SEQ ID NO: 34614 - DNA, 521 bp, Homo Sapiens
attgatcccctgtggccgatgaacgcgccccagaagtcggcctgcacgtgcacgaggtcgaccggcgggcgtcgcgtcatcgcgcgatcgaggaatcggtccgtcgctcgtcccggccagctcatcgagtactcgcggtccaccgtgatcggcagggacggcagatccacggatgacccgctggaggtgcgccggacgtgcatccgcggcgcgacgaccgtgacggtgtgccccgcgcgttcgaggaatgcgcgctgcagccgcatcgacacctgcgcgcccccgagggagtcgaggtgctgatcgccgaagaagacgatgtgcatgtcgggccgctcgctactcgggcagcggctcgtcgcggtacagcgcctcgaaggtgtcgagggtgcggttgatgtcgtggatcacgacgccgtcgagcgacgcctgctgcatccgctcgtactcggcgggctcggcggtgagcacgtccgtcaggcgggcagcgagttcgtcgacgttccccggctcgaacaggt

SEQ ID NO: 34615 - DNA, 641 bp, Homo Sapiens
agtgggggaaatattttagtctctgtctcaataaccccttgcactgggctttaggggttaaagatgtagccagggtgacagcacgtaggttcttgcacagcacaggctgaggactatacatctgcctgggatggaaggagtgtttctttgtgggtttctacttctgcaatctcctagtccaccttaaaattccaaatcagaatagcagcaaaagagcaaggcttaatgcacactgcagtaacactgaccagcttaatcaggaccatttgtctcctacatggggatctggacattctgagaatgaattacacagtggcctcaattcccttctgccttaaggcccggtggttttgcactgatttctcaaccgaaagagatcatcatcagctttctgagggtggaagtgtttcaaacagagaaccaactgcctctgcccatcaaggtcactttcctgcctttacctatctgtcttcttacctcgaaatgctttaagaacaatttgttggtcacaacaaactctgaggcagcgaagggcagggaaagagagggcattcagaatcaaaggcctaagatttgagccctggtgtctccacaagctgcttgtgtaagctgggcatacttcacctctctgacccattccc

SEQ ID NO: 34616 - DNA, 530 bp, Homo Sapiens
agaggaaaatcagggataccgttgctggaagaaagaggaatagaagcagcaaggaagaaaggcagaggcctgaggtccacgtagaagcagcaaggaagaaagaggcagaggcccgaggtccacgtagaagcagcaaggaagaaggaggcagaggcctgaggtccacgtagaagcagcaaggaagaaaggcagaggcccgaggtccacgtagaagcagcaaggaagaaagaggcagaggcccgaggtccacgtagaagcagcaaggaagaaagaggcagaggcccgaggtccacgtagaagcagcaaggaagaaagaggcagaggcccgaggtccacgtagaagcagcaaggaagaaagaggcagaggcccgaggtccacgtagaagcagcaaggaagaaagaggcagaggcccgaggtccacgtagaagcagcaaggaagaaagaggcagaggcccgaggtccacgtagaagcagcaaggaagaaagaggcagaggcccgaggtccacgtagaagcagcaaggaagaaag

SEQ ID NO: 34617 - DNA, 352 bp, Homo Sapiens
ctatttacatcatcattactaattatactaattataacactttgcggcggttcaaaacgtttctctctacaaaaggctttcatgattattattttggtcctaataacaatcctatgacacagacagaaggaatggtgcccacccattttacagatgggcacatgccattcagaaaggcttcaacacccaatcattaagtggtggaccgggctgtaatgcaagcctttgaattatgagttaacatacctttccatacactgtgcacacactttaatattttgcacgttaaaatgatgtgagatcatctttctatgttttaaatactctttatatatgcccagttaatacatat

SEQ ID NO: 34618 - DNA, 557 bp, Homo Sapiens
gtggtggatataaaatatattaatatatatgccatggctatcttttatgctattaaaatttgggaggataacaggacttataatgaaaatagaatattattaagaaaataaagcttcactagtaattacatttaaaaaataaatctaggccttttaaaccataataaaaatcattgaaaagatctcagttctcatcacattatctgcaagtaacaaatttagggcagaaattatacttttccttttataatactagaaagtgatttctggctaacgtaattttagttctatcacatttgggactgttcttccttcagtaaattttctcatgatgaaacttgctaatcttatcagacgtttttgttgaatataaaacaactactgttatgattaggaaaattattaatgccttatattacctgcctaagggctagaaaattgaaaataagttgtttacttttatatcctgttatcaaaggggtttgaatgacatgctattaattgtatgaaatagaaaatgtctaatgcaatcaattgtaagcagcttttcttacaat

SEQ ID NO: 34619 - DNA, 375 bp, Homo Sapiens
gaggaatggaattgctggatcccatggtaactctgtgtttaatcttttgaggaaccaccagactgttttccaaagtggctgcaccattttacattcccaccagcagtgtataacggttccagtttctccacgtcctcgctaacacttgtcaaactatattttaactataccccacaataagaaatattttacattcctactcagtttatacacatacaaataactgaaacaaaaactttagaaaaaacctacctatactatgtctgatgcactttgacattttcgattgcattctgttctttttcatcaaaacaaacatgttgcttctgatcgctcaagttgcttttacaactcactaattgtgacctgcagcta

SEQ ID NO: 34620 - DNA, 480 bp, Homo Sapiens
atctttttcctcttgtcccctctctctggcgtgccctttgattctccttctctgcttgtttctcagggcctagctcaggggccatataccttttgaaatgttctcttttctatcaaaatcagaattgcccctccttttgaaaagtaaccacatttattcaaccattcattgattagtttaacaataattgggtcagagtccctgccctgcatatgcttagaattttgtaagaaagagaagattttaagaattaccttcgttgtaaggcagcagtaacacagctatagtagagcgtaagggaatcctttattgaagaaataaatgagttttgagtgagaagagcacgcacagagtggaatccgaagggagggtaggctggctgagaaagctgctgctggtctccgctgcgaagttcttcccctcttcctgatgtctcaccttgaaaccaaccctatcctggcctgtaacaaacacaacagc

SEQ ID NO: 34621 - DNA, 373 bp, Homo Sapiens
tataaaagaaaaccatagcaatgaagttaaaaactcaatggtcagattaaatatagtaatcagggtttcataggaaattagtcaattggatgaaaagataaaaagcaagacagaaaagatagcataggaagagatgaagatacgaaaagaggttaaaaaacatgttgacagaaagcatagacaatagaatgagaaggttgaacaaccgcctataataagtttcagaagtttcagaagcagcgaataaaactaatgatgggtcactttcaagaactgaaagatggctgtgaaacctcaaagaatcactctgggcctggcacgatggctcatgcctgtgatggctcatgcctggcacaatggctcatgcctgtaa

SEQ ID NO: 34622 - DNA, 540 bp, Homo Sapiens
taaccgggaggcggagttggcctaattagattaatactagcacaactctgcggatatcaataaaatctgactttgctaaaggtaaagaaatttgtgaacaatactaaacaataacttcccttttaaaccactcttttcagaacttctgtgctacatgggggtctctcgccatctatagatacactggatcatatcagagcacttgatcgcctacaagaagttccccatgaggtatgacttttatttgataaaattctttcagaaaacttattaaggagtggagaagtttaattgtaagttcattagatgtattctctcatataattctcaaaaacaacttgaggtgtgagcactcttgtctgccctggtgttcaaaagaagctgacattaagaaacctgccaagatcacaacagctgggaagctgggcttattaagacctgggttgtctgtcttagactctgaaatttgcataatataggcagattaattaaggcatgttgctgctgggtcccatggatgtcagctgtgtctcgaaagtc

SEQ ID NO: 34623 - DNA, 378 bp, Homo Sapiens
tattgattcaacatctatttcacatacctgccatgacatagatcatttacaagaacatgtttcggatagtatgggatcccatataatcatacagcattattagtgttaaactgctaataacaaatctttgggctttgaaaactccactggtaacatgttcagaaagcacaggacaggtctcttgctatagtgactcagcacagaccaataatacatgcagcttttaactgtgcacctactgctccagtcagcatgtcatacattaatgctcccaaactccaccaatccacagcacgattgtggccacttctcatcaagatttcaggggccatgtattctattgttccacaaaatgtgtgtgcgactgttccatcatga

SEQ ID NO: 34624 - DNA, 540 bp, Homo Sapiens
ggatttcagtcagaatggcacaggatggggaattaccaaaggggtttgagcaggggtcatgctctaattcacgcttttaagagatcactttggctgctgtacagaaaatgggctaaagtggaagcacttttatgcagctcagagagacttggttttatatctgcacagctatgcttattacagtgtatttaaatattaatatttattgactgatcacagcttaataagggttacagtaaaaacctggtcctttccctagagagttacaaaggcatagatgataacagacacagagggtgggccgggggattctgagcaccttccttaggactctcgacagcagaagtaagtagaaggcaactccgtgctcaccctgagacacaacaccattcttggtggcagttttttcttttgtgctttccttgagtaaatgaataccaaacatcattccagcaacaacacttggtctgttctcatgtacatcaagcagtctggttaattataaaggaataaaacctgctcaaatatgtgcactccagt

SEQ ID NO: 34625 - DNA, 380 bp, Homo Sapiens
taggcagggtgaggggtgaatgaccatcacaagccaggaaaagatgggtggcaggacctctttcaacaagaaaggtgccaaaaccctgcctagttatagaatcaacttttctacttcacactcagatcagaatttattaatctttaagctgaatgttttgacccagagataaagggatgcttctttttgccagaggattggctttggccccctctctcctgctaggatattagaggtgggtggaagatggacggtctcctggtacctgcccaccctctctccgccctctctttgacctggctgagatgggctgagattgattacagctaagtcctgtttctgtcagagcctaagcttgggctgccatgcgcgcgcacgcg

SEQ ID NO: 34626 - DNA, 446 bp, Homo Sapiens
tacccctgctactattattattgctactgggcactggattacatgaccgctgaaatcacattcatccttaagagtctacgctaccttgaagatgtatcttgttctcacaaaagtcctttcccacgattaccaagctatcttatacaaaatgattcatttttttattcatagactacaccagaactgctcaactgggctccactacacaccagtcatagcatgaaacgtttattaggtgttctcacaaacagcggtccatgaccaagtaagtctgagtaacaccgcgtaatgtatcttccctcttgaagggtcataggcaaataagcaccaaggctctgaataataattctgcagtaaagaaaggcatttcacctttgggcattttttgtcaaggatcctctttttatccccaaaggacactgattagcactacacagaactaatgt

SEQ ID NO: 34627 - DNA, 355 bp, Homo Sapiens
tgatttctttgctgctgcataaagtgaggtggaagataagcacggtcagttgcatggctaagaagaaccccaacagcagagaccccagggtcagctggacacacaacctccagctcatgatgaggccgtaacagagaggacaacagatggccacaaaccagtcaaaggccatgacggccagcaggatgcagtcagcccttcccaggaagatgaagaagaacatctggcctccacagccgggcagggaaatgaggtttctccccatgggtaggacattggccagagtcagaggggcaatggtgaaaaagtagaagatctccagacctgcaaagtttgtcaggaagaagtacatgga

SEQ ID NO: 34628 - DNA, 381 bp, Homo Sapiens
atttaaagaatccctttggtgataccaacaagggggcatgacatacatatacattactgatagcccactttcacggctagggaagctgattatttctgaatgaccccaaataactttaagcacttaaaagcagcacctatcatgctgtaatgggtataactaggtaaattaagatgtgcctaccagcaaatggatagatttccaaacatgagatgaccagcacatatataccagatcttgtttcccaaggttttgttctaaaatatcactgcctaaaatggcataatgaataatgctaagctgggcttaatgcaaagtatttgctcattaaaagaaaaatattcgcttattaaaagaaagaaatatttgctcattaaaaga

SEQ ID NO: 34629 - DNA, 392 bp, Homo Sapiens
gcaggtgagggaattctcagccatctgtcaacaagcgatgcgatttaatagccatgaatatcatacatgcaacgaggtacaccatgacatcgtgcacttggaaaagttcctcaaatccccaacctcttggtggaagcttcaagcacgtggatgtctgcacacgcattccctctcccacaaacactgtacacaaacatgtaagatactggattacaaaaaccatctttgaaagagtaataccctatttgttaacaggtaatttcagctcaaagtagcttatgcttgtggtccttgatggaaagaaaagcctggacttggaaatgcaggggaaaaccatggtttccctcttacaagaggtgccctggatggggttcccaggtttaaagatacaa

SEQ ID NO: 34630 - DNA, 411 bp, Homo Sapiens
tgttctgttcaataaccaattttagggtagagatagagatggtaacttatagttatgaaattctgataagctaacaaaataaaaatggatccaaccaatcagaatatattagtccttaagttgaaggcatactagtgggacatcataacagagtgaaagcttgggggtcatcctttttgtctcttcgcccccaggaaaagcagggcaggcagggaacagcagtgggtgaacctcttctctgctcagggatttcaggccttcacacttgctctttcctttgcctctaagatgctgccattggcctccaaatggctccttccttcatcttgagatttcagtgctaatattttctcctttgagggatttcttctctgacctagctaatccatagcaacctctatgccccactgg

SEQ ID NO: 34631 - DNA, 432 bp, Homo Sapiens
ccatttacatctcttaggattggttgaatagagtatggcctattgaatatacttttgatgttgttgccagtctcttttcaaatgtacacgtgacactatctgaagaaatactagaaacacctagtaaacatttttctaatatctattgttaagctatattcaggtgatcacattttgaggcttggttttctgcttggctatcagtgataatcaggtaacatatagggtatctgtgagctgctgactttaataggtcagcctgtgtaagtgtataagacctacctttttggagaccaataatgtggtagtttcctgtgcttagacttgaagggagcacttgttttagacctctataccatggtttgagaaatcttttccttagtatgtaatatccatttgcattcctgatgatcttaccctgagcgattagta

SEQ ID NO: 34632 - DNA, 387 bp, Homo Sapiens
cgattcgggccagaggcatagaaaaggaagttgatgattcagcaaatcgacaggaccatcgggtatctggtgggagccactgagaagcacagcctgcagagcacctcagcgtcatcattacatgagaccgtgggatgaccaccgtaaagaagagacccaatgtcaacaagatccccttgtccaactacgtcaagttcagggacctggtcaagtttgatattgtgcgctacggtggctttgggatgcccctgcccaagttggggcaagaggaagccctttaccaggcactgaagaatgcgcaccgtcacctccacgtctacaagaaggaggagtttccagaacacttccatatcgctaaacatgaccgggttctgccaatcgtgatgt

SEQ ID NO: 34633 - DNA, 436 bp, Homo Sapiens
accaccagcggggcatggacagcttccatccctataaggaccaacaggcgggtttctgaggaccagaaaaatttccagctcgcccgagtatgttgatttggtgcctgggctggtggctccctctgatgtcacaccccagtgcagctccccagggctcctctggaaccttcggggaactccagccaacttctgtgaaccttgtttccaccccaactctccctccagactcacatacctgctcaaacgtgcagatgctgctttcattgaacctcagatgtctcaggcatgtagggtgttttaaatttcagacacctaaaataaagtgtctgaagtttaaatgttaacctgtgccagtaaaaatagcagaagtgcctgaggaaggcctgtggtgggtgggtaagaattgttggcattattgaagaaaaaggaaagagct

SEQ ID NO: 34634 - DNA, 432 bp, Homo Sapiens
caacagacaggtttatcattaaagtaacaaaagcaaaaaaacatcaacatctccctgaaaaccaggctacatatcccaggtggctcgttttcattcccctccaggcaccctatctcctttaggatgttatgggtatgatttttatcaaagaacagtacgcaactaactactacctaggaaggcatcaagatgtcaaaacattttaacaaatacatgccaacaggataaaaatcctattctgcctacgtcatgattttaacaaaccatgtggatatattttataaattcaagcaccgatataatggcttaacttcctaagtgactaaacatttcaagtattttaaggagaggaagcataggtctagcaaagcacatttggggtgatgatgtgctacagtcagcatattctctaggaagcccacagcaacatgc

SEQ ID NO: 34635 - DNA, 410 bp, Homo Sapiens
agtaagtatagcacagatattccaaaattccaaaaaaattcaaaacacttctggtcccaagcatttcaaataagagatactcaacttgccccaccctggctggcatcctgcctcatcattaagtctatttctgttttcatatttgaaaacataactaaaattgaggggttctttacctggggcccagagtttgctcccagggaatctaatgaaccacctggaatcaaacatttggagagaaggccagtcacttttatcggaacgtcagatggtcatggaccctcaagaatgattgaagaaatttgtaagcccagttaaaacatccacagtcttctttcctcagtgcaaaagttgccctttttgatatctcatatttagagtaaaaaaatttcgttaataagagatcctct

SEQ ID NO: 34636 - DNA, 429 bp, Homo Sapiens
gatggctggagaaatccacagttatccacctcaggagcatcaacatagaggacaaagattgtgaataggagccaagggtcaatcccaagtccctagcttggtggatggcggtgccattaatcaagttaggaaatatgggaagagggccacagtctagggggaaaatgatcttggttgtcctctaagtactgaatctacagtatggccttagacctcagaaattagggatgtggatgtggttagtctctctacaagagggaaaaccatgggaatgaatgtgacaatttaaggacagagtagtcaggaagaaagaaaaggaccatggatggaatgctagggagtaataaaagttaagaagcagataaagaaagcaaagctaggcaggtgaatgatacagttaatgaggcacaatggtctattgagaaatca

SEQ ID NO: 34637 - DNA, 542 bp, Homo Sapiens
agtaatatcagtcatgatgcaagacaccaagcagggatggcagataaaggaaaggaattaagatgtgaattcctcctaagggctcagaagcacgctagatattttacatacagtatatcatataaccattacaaacttgtgagataagaaacagtaccctctttttacctttgaagaactgaggattggagagaaacatacctatgattagaagtaagatgtgccaggcctagcattacagctagggctgtccggaatcaaacttgcctttttcattccaccaggcttcatgcccctcaaaaaagtaccaaaacacaggatggagtaaataacattcagaagtcagataagcaggtggcattggtaagcagcagggctctaagctcaagccaggactctactgtcccactggagagatggtaagagcaagcaaggacacaagtgctatatctagtaatgatgtcatacttggtaccaataaccttcacaaagtcagctcccaaggcccactgctatcaaagtgaagctagaagtcagggcac

SEQ ID NO: 34638 - DNA, 571 bp, Homo Sapiens
tagactatagagagatcccctactgaacacttgtcgtgcgctagtcattgtgatagtggcgatgatgaagtgatgtatgggtcttcttttcaagaagctttcagtctagtggtgaaagagcacagacatgaatgatacttggaatacaatgggatctcttttacagctgagatactttccaggcaggctgcagggagttggtgccagatagtcctggattcataatccctattgcttctaacaataaaaggatctcaaccagatactcaatctcatccatcatcaatttgcctctctgttagagataaacaatgccacctcataggactgttttgagatgcaatagacatcagaattgatatatgagatttaccagactcatatcatcaaggtgatctgccataacttgcttaaccattgctctgtgcctgatgaaaaaactttgccagagtagtctctctaccactctgaatcccttgtcccttgctcacctcctcaatggcaaccactccccttaacccctgtatatcactccagagatattttaatatttaatatatatgtatatatt

SEQ ID NO: 34639 - DNA, 484 bp, Homo Sapiens
tactctataggagaccctctgctgatacctcgacgggggcatgacatgagagggacattcacgagtggagggaagaagcacggagagagagagagggaaggtagaagagtcagagggaagtggggttgaaagagtacttctcaaactactgatgtctaaagtcaacaagttaaaaattgttgtgttttgtggaatagtagtaacccatttatatgcccatcattgattcaggaagttattcattcagtcagcaatgaatgagaacttactctactccaggaagtagatttaaaagacccaggaaaaggagataaataacctaagtttctggcattcaatctccctccaacctattccccacaacctagccagatcatctttcttcttccactttcttattctgaatattctcaaatacagaggaagacgggagaagggtaccaagcatacttccatgtctcacaggttcaggcatggaacacac

SEQ ID NO: 34640 - DNA, 529 bp, Homo Sapiens
ccttgggggctatgactcagcctaccacattcaccaaccccctattatgggccaagcattggacgacatatggttgcacagtggtaaaaaaactggatatgctctctgctctcaagaaatgtatggtctagtggaagagtcagatatcaatcccaaagtcatacaaataatcaccccaatacaatcattacaagttgagatgagggcactgaaagcctgggaaacatgggagtcccaagggtctctttgaggaagtagcatccaatctgaggttggcagggcagggtgataaggcacccctggatggggaatcagaagaagaccttccaggcagaggcatcagcaagtgcaaaggccctgaagaaaaagagtttgggggatgagggaggtggaaacggcaaaacaagatgaggctgtaaagatgagaaggaccagatcccttgggaacttctggagcatggtggggactttagcttttattcaaaacataacaggaagaggttgaagaggttttttgcttaataaaaaa

SEQ ID NO: 34641 - DNA, 410 bp, Homo Sapiens
agtggggcatcatagtcgtagctggtgggctgtgctgcatagggtgagttggcccctagaagacaaaaatgtgccactagttattactgatggtgcagctctgggacaagttctttgggatccatgagctcagcgctgtagagagagaaaactagaagacacattaaaaccacttgttgggagacacagacgtgaccctcaggatgcaacgtttagaggaaggaatttctttctacaggtagcagttaccaggcaccttagagtttaccaaggactctttccatccactctctacagaagctcacagctgtgattctagcaggtatcacccccactggacaagcagggaatctgaagctccccacaaaaatctgctaacacctcacaagcagtaatggcagggcttatga

SEQ ID NO: 34642 - DNA, 386 bp, Homo Sapiens
gagcatcagacaagctaatgcaaaagccggaagttctaactggatatactgcctggcgactccgatcaggtcaagatcacctgagactggacatcttcgagagagaacattaattagttaataatctggcagattcactagattatattggcctttctagctttccatagtcatctgcctgtccaagttttcaataattttaaacactgaagtgctggtgcatgacatatgcttaggaatgagtaacacaagtctttgacagcactctacacagaataaaagaatttacccatgggaacacggtctactgtttgctatcatgattatgtctgaaagcctacagatgcctaaagataggcttctaaattctcagaagactcaaaacc

SEQ ID NO: 34643 - DNA, 569 bp, Homo Sapiens
cacaaagcctgggtgcctgtcccggccacacactgctgggtgtccttgaacctgttgccaaagtgggtgtagtttctcttttgtacactgggcctaacagtgcccctcctatatacccctggaagttgttctgagacaacatccagataacaactaggtaagtgcagtaataaaatgcgggagaaacattaggggcctttattttcctcacttaactggctgccagggaaaagcaaggaaaggtcagaggctggggtgccccagagaggccccatgtagatgaggctctggctgggcccagagaaatgggatgtacactccggcccagagacctgaagatctgggttcagggcagctttgggacaggctatctggatggcaactaactggagtacctgatcaggcctagaggtgtgtcctgtgacccagtgtccaggcctgggccagcatgtcagagactcagcaagagtatgtgggtccttggctcacattgtttgagcaactactgaatactgaataggactactgaatactgaatactgaataggacaagatgtacatggtacaac

SEQ ID NO: 34644 - DNA, 381 bp, Homo Sapiens
gatggattccttctttttgccgctgctgtgcccacggcaaattacgtttttggctaaagcagagtattttaatggcacaacgctggtgggtaggctgcagaaatggttttttactagtagcgggtcgcgcccggttaatcgcacatccgccagtgctgggcaagacgctatgaatacggcggttgaggtgctgaacgatggcgatcttttcgggatttaccctgaggggacacgttcgcccgatggtcgcttgtataaagggaaaactggcgtggcgcgcattgcgttggcgtctggcgctcaggttattcctgtggcgatgatcggcacgggagacgtcaacccgattggcacatggtttccgcgtccgggtaaggtgcg

SEQ ID NO: 34645 - DNA, 352 bp, Homo Sapiens
ggaagcaattagaataggcttccaaaaaataaaggagggacattaagccaagccttgaaggatgttggattgttcagagtatgattggagctcataggcagaggacactgcaaggacagtagcagtggacataatgtggttagggaatgagaagtagtttgcagcagctggaacctctcgtgcgtctctaccttctggttctaaggtttgcattttaaatttttatcaatttattgtgtgttataacattttaaatctttttggcctaagccagagattctcaatcttggcaagtgacatccctgttggccctgtaatcatagactaagctatattttcttagttgtcagtg

SEQ ID NO: 34646 - DNA, 373 bp, Homo Sapiens
cggaatcactctgtggtctggggaggggctgagaatttgcatgtctaataagttcgcaggtgatgctgttgctgttggtccaggggctggtctgaacccacagggaaagaaaattctcaaggatcctgccttccttttggagtcagttacttcaggcagtggagggctcacttcctccttgtgcaaacaacagaagagccctgtgtcttaaggcctacttcctgagttccttagacaaactctgaaattagccattctaggaagatcgatctttcctccagggatatctttaaatcaaagtttgtggttgttcaattgcctgaagctattttcttaaccattcctacaaagctaaggaaatcagctgcatttt

SEQ ID NO: 34647 - DNA, 433 bp, Homo Sapiens
tttcagtactgaaaaatcataaaaagtatacatttaataaattaagatatacaccactattgtctttgggtggttctagggccatgatcttatgctcagtccccctactgcttgccagttattttacagagatgaataaggtacctaataaagaatgtaagacagcaaaatacaaatctgtcatccgtataagaaaaataactcctgatacacatcctttggaaagactatccaaagattataaatggtaccctgtttggatttaatctgcatattgccagtacttaaatagtaaaaacagtttgattggcaagccaggatcacagttgcaaaaaatattcaaatggttgcatattatcacgcttcatcgttgtctatatcaatctgtacctgcttgctttatgtaaatcagatttactactgatgggaactc

SEQ ID NO: 34648 - DNA, 564 bp, Homo Sapiens
gctaggaaagaagggggacgccactccttctgttggattcagagataccagtctcttctagtatcccacccacctttgtcagtttcttttcagtttcccctgttagctcttctttctgcttctgtccttcagccgtcttttatgactctgtgttatgatggtaggagaagtaaaccatttccgtggcttcatttacctgtagtttgacacctttaaatactttatctccagtctcagtctcttttctgaattttccttctccatttccaatttcctgttgcatatcttctcttggatcatccacagtcatttcaagcttaatgtatttatcatggaatttattaggcttgtgttaacttgttctgttttgggtaatggcactattagccatctaatggcccagactagacttttcttctctttttctcaaacccactatatccatttgcttatctaattctattgattatgtttcagattctcattatttctccctttagcaaccaaaatgatttaatactttctagccaatgtcatcttttaatttatctccatatgggcaca

SEQ ID NO: 34649 - DNA, 352 bp, Homo Sapiens
catcctggtgtcaggctccggtcttgctttctccctgatagggtgaccaagaggggttttctgagctcctttccacagggtatcccaaggacacctgatctaacaagggccagactatatatttactataggccctacacagggccagaaggtgagcagaggggtcttcagacattcagagcacacacccataccacagcgagagatggaacctctaaagctggcaggttttaatgcaagatcccctgaccacaagcaggatgctggctgctctgaggagtcagcgagggtgtgacccccactcccactgcggtggaaggagtgggcatcttttctgtaaacttgagattcc

SEQ ID NO: 34650 - DNA, 460 bp, Homo Sapiens
ttaagacatggcattaaagagtttaagaacagttggtgttattcacaattctcctagatgtaaaaactagaagtaaaactagaagatggtcaaagaggtttaaaaatcagtaacaccatatacccctcccatatttgtgtaaattcactgccttaaaaaggcatctattactcaaatttgaaaaatttcacaaaagcactatcccttttcagtgcaatcatgtcactttaaaccatatttttgcagagtttacagtgcaaatataaattctttatactggccttttggcagcactgaggatccaagacaaggcaatgctactgatcacctgaggataatggtgaaggacttttgtatttttatttttccaattcttaaaagcttatttgatcagtagcatttttgtaagagcattatttgtaaaaagtactaaaatactatgtctttttttggaataaat

SEQ ID NO: 34651 - DNA, 412 bp, Homo Sapiens
ctgtatatctagtcttcagatcatgaaaaaagaaaattgccagtactacaagaagccctttcttgtgttctcttacagaaccatcttcccatctcccaggataatccctatcctaatttctaacagtatgaattaattttgcttattcttgaatttcataatagagtcatactctttattcataggagttctttatatactgtgcatattaaatcatttgttggattgtgtatgtgaatccgcatacatgtattgtgaataacttcttccactctgtggcttgcttgttccctgttttaatgattttttcgatgaaacagaagttcttggttttaataaaatcagaattatcaatgttttcttttatggatattacttcttgtgtcctaatttaaaacttttgtcccctcca

SEQ ID NO: 34652 - DNA, 697 bp, Homo Sapiens
gactcctaccctggctgtgtggcaccttactagaatacaggacttggggtttgggaagcagggagacggaaaggatgcagggggggtgatcatgtacgagccatggcactcctcattggcaatcccaagagagacttttagccaggccccaagccttctgactgcccttgcaccctcccctacctaggagagagcaagccacatcagtgctcctggcagatccctgcttccagctacgctcaatatgctatctcctgggacagccagagcccccagcacctggcactgctctgccagcccctgaccggaagcgcttctccctgcagagctgtgagtgggctggtggggcaggtcagggaaatctggggctgggtcgggtcaggagccttaagaacagcaaagtcctaggctgggaatattcaagaggcatcacatcctcagctacctctgacttgacactacctaccactccccagatgcggattatatcagtgccgatgagctggcccaagtggaacagatgctggcgcacctgacctctgcatctgcccaggcagcagctgcctccctggtgagtgggaacacggtgcacaggtccatgccacttgaatatgtgtgcactcctacacaggcacaacggacatccacatagccaggcatccaactccagcccacccttcactctcctccctgcagc

SEQ ID NO: 34653 - DNA, 372 bp, Homo Sapiens
aaggtgtggggcaagggagggtgaggagaaagaaggaagacagagactacagcactccatggtcaatggcataaaagagggccggctacctgttgtcagggccactatcacaacctcctgctactcccatgcatgggaggggcagggctgggcctgggtgctacctgggaggggcatccatccataatctggatccaggccccacctgtgccccttcccttatggaactcccaccctcacccgcttatctatgctgggttcagtctttccgtcggggaaacctgtggcactgtctgtctaggtaaaatcagggccccggctttattctgggaagctctgaatactaattactagggagaagagggaggaagc

SEQ ID NO: 34654 - DNA, 597 bp, Homo Sapiens
aaaacgagctcatagactgaattctccatattctgttaccacatcctgggtagaaattacaaatccctgattttctatgctttcagagatgaattttatcactacaaaatttcaaattaacatgacctagctatttcaagtccacaagtcagtttgttgaatacttttacaacatcctttgtaaggaagtaagtaatattacattggtatcttaatattttctgaacagacagtaaaataaggaatgaaaggaatttgacccaggacaagggatacaggaaaaatattgggatattcagagttaaagaaaatggcaatggactctagagcacgtaatggtaaattggtgttatatctgagcagtcagctgtttttggatgcctcaccattaaacagatggagcaagactcagacacatgttctgatccattcactatagttcatacctgcgtttgaactaatgaaggcctctgtgtccgcatttaccggatcaaactgaaaacactgaagttctcaggaattatctattatattaaaggcgaaaatattccttttcatattttgttaataaaatattgctacttttcatagacttga

SEQ ID NO: 34655 - DNA, 426 bp, Homo Sapiens
tgtcgtggctggataaaatccccaagggagtgggagagagacaaggactgaggcctgggacattcaaatgttagggatcagggaggtaggagcagctggcacaggagtccctggaggaatgccagtgaattaggaggcaagtcagtgagtgtggtatcctggaagccaagtgaagagatgatggtaccagtattgcattacttacaatatggtaagtacaatatggtacaaaagcttgagctcaggagtttgagtcttcggttagctatgattggctgcaattagctttatagaaatataaaggcaaattttaaaaagaaaccactatcagctaaaatgtttgatttttctacacgtctctttttagctttgtctcatgaatatgattcagtaattttaagcaaatatgtatataattttgtattc

SEQ ID NO: 34656 - DNA, 417 bp, Homo Sapiens
ttatagctaattaatcaaggtatgaatctgggtatctggatgaaataaggctgaatagtacctttattttgtgtttcagagagtttgtacagcccctcacccctgcaccctacacaacataaaagttttgggatgggtgagaagtctgccttattttgtatgctaggagaagggggactggaatactagcagaccatagacacattcccaggtaggtcaattttacggagtgcaaatggaagctgagactcagaaattggtcctttcaagctgttcctgcccatgtacatcatagaaattcttcaagttcccccaagggtacacatcgcaatttgaccaccattggagaggaggtgctatgccattttgggaaatgctttaaacaggaaacagtgcatgtgattaaataaaccctat

SEQ ID NO: 34657 - DNA, 352 bp, Homo Sapiens
cggaagccgagctggacgagttctgcagcaggggaggggccacactttgggaccaattgaaaccgagccacacaccaccaaaatatattggataaaaaaaggaatggggatgggagtggggaagggcacacacagagagaaagagacagacatatacacagaagaggggaggatgagagaagcagagggttagggttacttttcccccaaagttgcatccatgcagaggctttcgagcccttgaaaagaagcgtgcgacccggccagccctaggtcactagactgtgggtccacaaggacacagatttgtgtgtcttttgctgggacccagaagcatgcctggcacagaaat

SEQ ID NO: 34658 - DNA, 359 bp, Homo Sapiens
tatgttgtatggactgtggtagcatttatgaagagagactgggggttggagaaggaaaaggggagagggcaagtcaacttgccagtaccttagataccgggggtctgacatgagctagaagcttgtacacctcccagttgttcatgaagctcctgtaggaagtacaaatagagagaggtgtcttcaggccattccccacagccagagccatggagatcctggtctgaagtgttgctcccaaagggaagttccataaggcaaacctctgaagacagaactggggcaaagcaaggacagggcaggggctgcaaaagggccactagttcatcaaacacttccttagtactcttcttcaagca

SEQ ID NO: 34659 - DNA, 467 bp, Homo Sapiens
tgttaatgaaatgctacaattctgcttccaaccactagtttgaatgtaggtgcatgtgtttagtatttcaattttaaatatgattgtcttttaatgatagttttaaaagactggaggtttacttgtgcatgggcctgatgcccagcctgtgtgatactagttcattcctgatgagccatgactgtacccactaagccccttaaagagagggtactcttcctcctacttctctttctttgagttaagagtattaatagcacatgcattctagtccgtattcttgatgttaagacatgttggaaatgactgaagagcgttgtccctttcttgagcacacagacagttgctaaatgcaaggccttgcttacattaatgttctctagtgtcttctattaccatctcactccatcattaaccccagtggtcttaatactagacataacaatggtttgcactgtggcatccat

SEQ ID NO: 34660 - DNA, 437 bp, Homo Sapiens
gctgcttgagaggggaaaaaaaagacacctgcttgggatgattaaagttctgtcttgactggtagttatttgaattaggtccctccagtgcttttaatcatggtagaatgtgctagcaagtgagtttgtcttacatggaagagttctgtgttcaagggctttcggccagtggcattcctaaacacagtgttaaaggcggtagggaatgtgaaaagtatgacatagttcctgctctcaacagcttgtaattttagtattattatcgtaagctcaattgtaggtactacttcttttctggactttcaagtgcttattaccgtgcaatttaatggtatgagttgaggactaaatgtttctatatcacatcctgataatctccacagttatgaaaactaaactatttccccttactcctacactttttcccaactttattt

SEQ ID NO: 34661 - DNA, 684 bp, Homo Sapiens
acatgtcgtggctgccgataaaggcaaggggtgattttattttactggtcatttaaagatttctttctttttaaagaaaaaaatctatgatagttgtacaggatttcaaggcaaattcatcagttttgtttcaaacacacccaatgggtgttccccttgtctccaaatgaaaagccttaatccaccttttcctacatgtgtttctacagcatcttctggctgtgagtttgtacaccactacagaattattattactatttcaactcccatgaaatgtactacgactggcaggcatatgagttctgaaatttaaagtgcgttactagagaaactaaaactcatgttggccgcaaggatggacaacaatacgaaatgctacagatggcaatgggaggcctaaaacaatgtgcagttcctttctattctggtttgccccattgtgttctgaatagactgaatcactgcccagcttcagggccagcctctgaaaggccccattgtaagggctatgctttccagagcagagttaaggttgctgtagtaaccttcactatgaatttcctgaccagtgtgatgaaaatctcaactgaactgcaacagtactacagctacaaacaagaccgcgaaatgaacgtgggtcttacccatttagggggtctttcttatctgaacataaccgactat

SEQ ID NO: 34662 - DNA, 623 bp, Homo Sapiens
gtcgtggctctccattccccacttggacaaaagctggcaggttaggcaaatagaaatcaatatttggctttatccattaacatccgagtcaaagcaactctggatatggctttatccataacagatacggctttatccattaatggatatgactttctccattaatatctgagtcaaagcaattctggaattcccagctccatagtgtggagcttggcatcatgaatccaaaccacttcctttcagaccaagatgtctgttcaggcttaatgcgggtagctaactccagatgtggaatgctgatttgtacaatctccaggctaaaagggaccttaaacttcttccaatgaccattttcaacaacattcctcattaagtgctcaaccagcttctgcttaaacatctccaacatctggagcagttgctggattctgttgagccaaaatctttctcaatttcctaattctgcccattctgaaacacatctgctcctcctgcctctaggacagttctcctcaaatcttctcttctccagaggcccatgcccagccccgaccactgtggcttagagcacgcgattactccctgggtcaactgggagggcaagggctgctgtggattgt

SEQ ID NO: 34663 - DNA, 534 bp, Homo Sapiens
cgtggctgggcatagaattctgcatttatagtgtgtgtgtatgcatctgaattgtgttgttcatgtttgaaaccccagattttacattatgatagggcagtgtgacaatactgaatggtggttcctccatgacagccatcagttggaggtgagtagcagctgccttttttggataaggtgtgagctttcagctggacacaggtcacagctgacctcatcattcatttaagcttcctctctgccctctgtgggcattagggtttctgccccatggtccaagggactgagaatggaagaaggagaaatgagtgtttaaggtgtgagtgggagaagaggagctagagacagagtgactgtggagatagaagtatttggagaagccaagcaggaatcaagttctaagaagtcagggataatccacagaatcactctttgccagagttgagtcagactgaacagtgagacatttttattgacctttgagagaacagtgttattggagtataaggacaggaacagactgaggaacgagta

SEQ ID NO: 34664 - DNA, 599 bp, Homo Sapiens
gtcgtggctatcattagtgttagcatattttatgtgttacccaagacaattcttcttccaatgtggcccagggaagccaaaagattgaacaccccaatataaatcatcaagacagatcttccctggttacagtctaggagggaggtggggaagatacattttcacaagtgtttacccctcaagacagaattcgacacagaaatagagatacaacagagtgttaagagcatgacctttggaatcagagacttggctccaatccctggccctattacctttcttcttatctttttaggagacagagtctcctgtgtggcccaggctgagtgcatagtgattatagctctctgcaccagctctgttattttctagcattataacttggggaaaatcatgtaatgcctctgtgggtaagtcttatacccatcctatagggttgttatgagaatgaccggaatttacagataagcaaaccgaagctgcctgcaccaccccctgcttctgccttcggaaatcctacccagccttccagcgcaagtgtcaccttttcatccatgaagcctttgtcagtcttcctggcaataaaatataagtccttt

SEQ ID NO: 34665 - DNA, 647 bp, Homo Sapiens
actgggactttgtcacaccaggttaacactgaaataataaggtaggtgttatgaagtggaaaaaagctattattacaagggtagggattaaagaagtacaggtatcaaatttttccttttaagaatatgttaattaaaaatcactgtttccatttttctgaatgtggaagtaatgctactgcatgaaacgattatctaaatggcgtctaatttgtttaaaaaggttagtgctattaacacttgatgaaatagtggctgtcatttcctgaatgcctcctctgtgccaagcacttccttgaccacttttccttcactgcttatagggaggtattctgatgaggaagtggtgacaaagctaagtggtttgctagtgatagaaccaggttagaattcacgcctgtttgattttgaaggctgtgcagattttcctttatccccgattgagtcatcttatttcacattttgtattggaatggagacgagagtctattttctaccatgttctgcacattataaggatagcacctaactttctgttgagctttttataactttaaagctagaaatcaggccgtcactctgacctatcagggcttctgctatgtgcaaaatcatttctgctttcatggttcacttaatgagcattt

SEQ ID NO: 34666 - DNA, 513 bp, Homo Sapiens
agttatgctagttacctctggagaaaaaacaatataatatacgttgttgatggaatttctttctctttatcattaattcatcaaaaatacgtattgagtacttactctgttctatatcccaaatatagtagaaagctaaagacccagtaattgatagtagctcatggcagtgatgaaaagacgtataaacaccaggcaatgtggcaattgctataacagagaaatgggttagaaatgcttattccatcatcactgcataatttcaaactttgtatttgtttatcagttgggcttttgaattaagatttaaaaatcactttttcaccctatgcctcaatacaaattcagcaactgtatatgttaaaatgtcccgtaggtgtattctgtggaaaaatacatccaaaaaattcatagcagattataggaggagaatctcttcacaggcgagacgtgctctacaggcgtttcaactctgaatccgaggtctcagattcaaggatatgctacaaatct

SEQ ID NO: 34667 - DNA, 656 bp, Homo Sapiens
agatgcttacagttcttcatatcctacttgaaaggaccttctatcttcagtcactgtattttgctaatttcttaaagaggaaataggtggtagtgagtggccgagtttcatttttcatttctgttctccaaagaacagaatggttcatgtaggaatcctttgcagcttcagtctgcaccaagaaaggccaagaggaaagaatagcgagtggcttttctcactctcagcctcaagactgaatttaaacacacttagctttgtgagggcaggacttggtcttcacatagtggaaagtgtgcacttggctactttttcctggggcaagggctctgctttcctgccactgtgagctgtggggtcagactgcatccttaagccagacattccactctcgctcccctggaagacttttaggcgaggttcatcctggaactgttgactcagaacaggtagagctggaggaagaacaagcggccaccctgctcccatgagccctcttccttggtggataggttgtggttctcctgtttgatggggaggccgctgcatctgactctccaactcagtgaaaagaatcacagcacagaccagcctcaattctttctgcaccactgctctgtcgagttgattcagtacctgtagtcccacatagttag

SEQ ID NO: 34668 - DNA, 445 bp, Homo Sapiens
acaacttttggtgcatatgtgtcacacgccccgtttgtgacaagtccgtcccagacacactaatcacttgttgaatcagtcctgggctttctcatgcaactccatatggctgccacagtgcccagtcagtggaggaggcttttcattgtcatctccacatttctatgggtttcttgaggacaaggactactcattctgggtccctagtggctggcactgtgcatggctttccctctgtaaataagcatttgctggaatggggtggagttgagacttctccctgtgtggatcaccttctgtcttcaggttccagtttgacgatatcccttgcctggaattacctatgataccctcagtattatccagagttcagtggggactgcgccctctctggtcctgggactttcctgtaacagtgcatcctcagtgtctgtggtcagctgac

SEQ ID NO: 34669 - DNA, 681 bp, Homo Sapiens
tgtcgcggctctggtctttttgttctctaaattccaagacatccatatccagtagttctctctaaactgtctcacttgactttgaggaggagaattaaagaaaaatctaggaaataagatatggtggtaaatttattttctgctcacaaaaaggaaaataatctgatggattaattaagagttcaaattgacagtcttcctcccctgcaagttcaagcattgagtgtacatacagcttaataaaaaatgaattgtagtcatgctgatttgggattgacatacttttttggtcactggctgaatctacatgtaaatttcaggatcctaatttgtcatcctcattgaattattttcaaagttagggtatgttagactaagtgtattcctttaaatgtccagttttatatttgcctcatttgattggtcattaaagcaggatagtttgcattaggaattttatcctctgtgtatctgcagctgcaccttttgttctcttcggtcatagcaaattggcctcattaacagcagaaccctattacttaaaagaaaaatatattcgctcacagttctggatgccagagctctgaaatcatgggggcaagggttcattccttctggaggctctagaggagattccattccatgcctctctcctaacttatgggggttgtcagcgatttt

SEQ ID NO: 34670 - DNA, 574 bp, Homo Sapiens
ataccctgctttcttttctctcctctaaagaagtccttgaattagctctgctggtaaatccactggtaaatccaaatttactctgctggtaaatccactggtaaattcactggtaaatccaaatcccagctttgtggctgcatatgatttctagatcttttcccactatggattttaaaacaactactactgggaagaagatgcatgctctgatctttggtgaaacctatagcttgaagagcatttagagattgtttcatatttcctgccatagctataaattgactttaggctcgtcattcaggagtccttagatattcacagtagggtctgtgtgaaggaaaggggaggatatccgtgctgtagatcaaaaactgattccactgactaaggctgatcttaattcccaagctctatgttctgctgaacaagaattacattgtaagaaacagtggagcagcttgatttatagagaggttaatgttttatgaatgctgggctcactttggcttggaggcaatctctgttttgggtaaggcatggataaatgcctatggttttctaagatggggtg

SEQ ID NO: 34671 - DNA, 426 bp, Homo Sapiens
atttataccagagcctcagttctgtttggagcaggagtgtgccacaccccaagagaaaaatcactggtctaggtccatcttggctttcccatctctttccactacatacttgtcttcccagctttccttgaactaggggagtctgccaggaggtttctggggaagttttgcttttggataaaagaaacaagggcactgaggaaaacctcttctcctcctgcctccagcttcagacacgtaagtgcagacatgacagctgaagctgggacagccagtttgggttataatggggcaaatacaaggaccaaagacaacgcagtgaggagggcagagaggaaggaagggaagagagtgggatctggctgacattgatgatcatcgttgtagcgctgttttaagcccatcatttcactcatccaacaaatg

SEQ ID NO: 34672 - DNA, 588 bp, Homo Sapiens
cggctttcttctgtgaatcgagctattagatccctaccactcccaccactcctaccatcattactagaacgcatgttagtcaaaatactctacatcccactgtggcaaaccaagctgagtctatcagaatccttgtcaggcaatgttctatctgcagttggacaaagagttaaacctattttttatttctgactgccaagctgttgactttaaggatgtccttagtcaataatatcctatacctcatgtggaagatggttttgaggtaataatgctgacaagcagcggcaaaagagaagtgggaagtcaagatgacatcaatctctgattctaggcatccctaagatcagtttcacctgtgcaccagacgtttggttttgtaaggcaacatatctccctctttagcctgaagttatgatgaagtgggtttatatcacttgcagactactacaatagtcaagttaagatgtccaatagacagtttgatatataaatctgaagccaaggagaagttttgcaatcatcagattatgactaaagcaatgaatgatctctaggcaaaacggtatcatgacaagcaaagtgtgc

SEQ ID NO: 34673 - DNA, 574 bp, Homo Sapiens
gcacttgtcgaggcttgcaacatcacatgttggttatttgtaaagtattggcttactaaggttgacagattttcctgatattaatacttttcatcattatttttaaaaaatcatatttgttacaaaaaaatcatatttgttaataccaccactgatctcatcagaaagttctttaaatgttgagttttcaagcccacagtggcaggtgtaagttttccagagttctaatttttgctcaaaaaaattatgattatgagaaaagctcagattttattggtcacaaatagtgccaaattgccttgaagtgacggactcattttgttcattttggaaaatatctgacaaatatccaagtccaaataaccatagtttggcccatcagtcactttttgaagtaaaattgacatttcacaggtgaagggccattcatctcacaatgcacagtgagattcctcgaggcggactcttcctggggcgtgccggagaaataaatgctctgtgtattacttcccacttcgtcacgcagaatattcaaaagacttgtgctcaagggttgagatttatgcaaataatt

SEQ ID NO: 34674 - DNA, 485 bp, Homo Sapiens
tcgcggcttggatgaaaatgatgagggtacaggtggttaggcgaaagaggcctcatgactttctggcaaacaagatgcgggagggcaaaaagttgagtcaaaggacaacactcaagctttttgagcaactagaagaatagaggtatcatcatttctgagatggagacttctgcaagacaggctggtcaagtagtagtattggcaacgtcaagagctgttctgaacatgtcaagtgcacaatgccttttagacattcaagtacagttggattagtctggagttaaaggaaaggcctataataaagatacgaatttaggaatcatcagccaacaaatatttaaagccatgaaactagatgaaattacttacatcttttgccaacatttagatgcagggggagaagaggaggatccagtaaagagtctgagaaaagccagcaaggtggagaaaaggccaggaaattgtggtattatagaaacctactg

SEQ ID NO: 34675 - DNA, 520 bp, Homo Sapiens
tcctcgacctgaataactcttctccatccacattctgttttccaattctccttccaaatgcagcccaggaaggagcccactgtacttgccgggcagcctgtgcttctcactgctagagcactcatcgctgtataggaattgactttcccatcaccccactacactgaaactccttgggagcagggactgtgttttaatctacttttctttctccattttattcagcagcattagacatagttgaccactctgtccttcgtggagctcgtttttctctaggcttccatgacaccatgttctcctgggttacctcctacttcactgactgttcctttttaataccttggatgactgctcctcctctgtttagcctcaacattttcatatccaaactccaccctgagcccttttctgtactttatttacatactctccctaggtaatctcccccattgttttcaatgccatctatatattgctggcccccagatttctatctgaatctaatctcctccttgag

SEQ ID NO: 34676 - DNA, 423 bp, Homo Sapiens
tttactttctacatatcagagaaggaagaatgacccatttctgtgggcggttgtagggtgcggttaaaagcttgctgatccattgttttagatgtcaacttacaatttggtgccagattttcatcttaggagacacttattcatatttgcctaacaatgagtacaataatagttgcagtataaattctagactgaaacactactaaattattactgttgtactagattaaaattcataggcattcctgtttaataaacccaatataaaaaactgattaggctgggtgcagtgggaaagggtattggcaatgcagtgctcgttttaaaaaataaatgcaggccaagtgcagtggatgctaacaacatttttaaattaaaaaggacacaaacacttctttaaactttctataatgaataaattaa

SEQ ID NO: 34677 - DNA, 565 bp, Homo Sapiens
tttcacttgagaagaaaatgtggttaagctactgatgtacattcaacatgatgaggagcttatctttatctaaagtagtttgcacattttcaactggaaagcgaagatactatgtcacaggttctcacaaccaacctggcagaatgcatccccagtttaacagggttcaacttctaactcatctcaaacgtttaccctttctatttgacatcatgaagttttgtctaacatgtaaatgttacttctaaagcctcgaaaattctttcagtctttatgttgaggagaatgtctcctatacctgttatcaaataatgctatgagttttggccactagatggtgcttttagaaaaatacagcatctttttcaatttctgggagaaattgagttgagtttactgtatgttagtgagcagttgaacactcatctggttgctgagccaactgtgttggcttagttagttagaagttcatattacttaaggtacaggaggcctgtgtgtgtgagagacagggaactttggcaagatcagccacggttaaggggcagatggtgactggatacca

SEQ ID NO: 34678 - DNA, 366 bp, Homo Sapiens
ctgtcgtggctgatgagaatactcttgattccctgaacctaaccattgtaatgcttttgtctgtaatctagtttttttctgtggcaactttcaggaattttttttattcttgaattctatttcacaggatgtgtcttaggtttgatgttctacacgtggcaagccctttcagggtgacggccttcttcacctcctaacagttttatccagattatttctttattttcccttttcactatctactttcttgctttctgacttattctgtcactttatcaagtccctgctcaaatggtaccttatcagatcatagtgatcactctctgtgaaagtgtcatcctgctactgtcttcttatcctgtatta

SEQ ID NO: 34679 - DNA, 399 bp, Homo Sapiens
tgcagtgactacaggcttaggtacacaacactctttttgatttgattccctggaaagccccctggagagtgtctggaatgaacaaacccaaactgtgaagactagctcttcaatgcctagacatcaatgaatatccacaattatcaagaacatgtaggaaaacaggacctcaccaaacagactaatcctggagcaataaagatacgtgaccttttagatgggaaattcaaaatagcggtcttgacaaagctcaatttaattcaagatcaacgagataaaaaattcagaattatatcacagaaacttaacaaagagactaaaatgatgaacaagcagaaaattctgaagctcgaaaattcaacaaactgaaaatgcgtcagtctcaacagaagaacaata

SEQ ID NO: 34680 - DNA, 489 bp, Homo Sapiens
atgttgctcaggctagtctcaaactccttggtttaagccattttcgaatctcagcctctgtatctctgtgctccctgtaacctgggattacaggtgtataccgccatgcccaatttcatcctacaccctttactcatacacttttgatcaaaaaactcaactcttgacccatttttcagtctgaccacccacggtgagtgacagccagttctgagccaactcagaactgtcttttaggtccaagagacataatactctcaggtccaagtattagctcttcattatttctgtcctcagaatattacttccaaagacaaagcagagccaaaacaaaaataaatttagacagctagaaatagataaaggtagaaatacattctgtttctggcagcaaatatgcttaaagtcatcctgccatgattaccaccctcctataccgacaagaattctggccaattcctaaagtgtttttgccttgggaaaaggtgg

SEQ ID NO: 34681 - DNA, 358 bp, Homo Sapiens
caagtgtgggccactgtactcagcttgcatacagtttaaatattaaaaagagtaattaagtttttactcagaagaggtaagaagtttgattgagatcaaagacataggtaaagggtttagctcttagaagagtagcaatctttctgcttagaaactagaggactggaagagaggatatatcaaggaatttttaggcaaagaggaagaagctgtaggatttcttttctccttctctttctctccccctcccctccaacagggtcatactctgtaggaaacataatcctcaataacagactatcttcaaacaagacctagcatcccccctactcccactccctccctacctcataggtta

SEQ ID NO: 34682 - DNA, 369 bp, Homo Sapiens
ggcttatagagggaaagaatctgtttttcattataaatcatggtttcgcttttaactattaagcaattaagaatataatacaattttaaagaaatgagaacaattctacaagtatccacacagaaaagaaggatgaaaaaaggaaaactaaaccaaaggtctcagaatcctcctctgggagactggaatttccaaaattggaatggccacaataattatctcccacatgagctgtcctataatgtgactttgctgctactccctgcacatggagatgaaatctattctcccccattagaatatgtgtgggccatgtgactgttctgaccaataggatacagtataagtgatgtggtgagttctaggtat

SEQ ID NO: 34683 - DNA, 469 bp, Homo Sapiens
tctcataactcggtctcaaaataaataaatacatacatacatagatgaaaatttaaaaaataaagtccaactcagcggttttcagcatatttacagagttgtacaatcttcaccactatctaatttcagaacattttcatcacccccaaaagaaacctaacccattgactatctctccatttcctccctctccctagcctctggcaaccactaatctcttttttgtctctatagatttgcctattttggacagttcatatacaaggaatcataccacatgtagccttttgtgtccggcttctttgattaatagaatgttttcaaggctcatctatgctgtaacctgtatcagcacttcattcctttctatggctgaataatagtccactgtagggatgtgccatgtttttccactagctgatggacatttgggttgtttccaccttctggctattataaatattgctgc

SEQ ID NO: 34684 - DNA, 371 bp, Homo Sapiens
ttacagaccatctctaaaccaagtgtatttaagtcagaaatcagtaataagacgaaacttttctgtaatcatcattttaaagtttaaaaatacagttcaaaataactgatcgtctaagaagatacactcaatatcaatgtaatcagtacatgtaagaatttattggattaagaaatggtaactaaagtggaaattagggtctccagtgctcatattacaaaagaataaagtccaaaattccatgcattaagcattgaaataaagacattataaaaataacaatagagtaaagcccaagagaaaaaaatctttaaaaagcagaaatcaatacattcaatgccatcccaattgaaatcacaacaggatttttg

SEQ ID NO: 34685 - DNA, 372 bp, Homo Sapiens
caagaagatcccacttaatcccacatgaaccccaggaactgggccagctgggtactgtttgtagaaccaaggctagaggggggttaagtggcttgggtctctgtcctgttatgacttcaagaatgtcatcctgagcagctgtccccagacgagcaaagatcaatgagcttccacagtcacttgactgtttccagagcatagttgtagggagatgggcatagctgacatgtgacccgagcaaactgactcaccttcaccttgattttaaaaggggccataactttcttcttggccctgttcaaaggaatgagcacagaaaagtttagagaatatccagaggagaccaaaaacaacacttgtcccgagatgtga

SEQ ID NO: 34686 - DNA, 603 bp, Homo Sapiens
tcgcaccccgaacatgtcgaggctgctctacccctcagttcacggtgattggctcaaagatatggtcatgtctctcattaggccaattaaatcctgcaagactcaatttcagaactcttgggtgactataaaggaagcagacactctttcccactggaagtgtcataaaagcctgaggctgagaggctaccacatgcagccccaaaacagaactgaggctgagaggctaccacatgcagccccaaaacagaactgaggctgagaggctaccacatgcggccccaaacagaactgaggctgagaggctaccacatgcggccccaaaacagaactgaggctgagaggcgaccacatgcggccccaaaacagaactgaggctgagaggctaccacatgcagccccaaacagaaccgaagtagagctgcagaatgaaccctggtaaccatttttgtatactgaatcaagtcacatctcactcctcggtttctagtaacatgagccattaaattctcttttagcagtagttaaggtctgtttggactgggtttcctatcatttgcaattcaaataacactaatatgctaagtcacccactgtaacggg

SEQ ID NO: 34687 - DNA, 691 bp, Homo Sapiens
ggatctgagcctcctgacatccgaggcccctcttggtggggagagctcagaaacccaagatactgccgtcagttaaagactcgaagttcacattttaaaaagtgcaaggagacacccggttttaggtacgttggggtgcaaggtctgaaggctggaatctgtggctcccttctttcagctctgtcatccctcttgtctgggtgctgcccacctggtagaaaggggacctcaccttgccactccactagcctgccaacaccaccaggaaggcgacccttcatcctggtggctccagtaaaaatcccagggaaggctctgattggatcagaagggccaagtccccatcccaggatgaatccctatggccaggggccctggagcctctgtccagtctgtgtcacatccatattttcagcccagcaatgggatctgcctgatctccaccactggggctgagcatagagaagaggaggttccagaggagaacagggggcccttatgagaagaggggaaggatggtaaacaccccaaaaatgaagatattcatgacagaccccctctgatgctgaaatttgtgttgtctttggaaggtgctgggctaagctgtggagtgcctgcatttagcctggctctgctggggatgaacagtgccatgtggcaaaccccgtacctttttggggcattcaacacg

SEQ ID NO: 34688 - DNA, 751 bp, Homo Sapiens
tgtcgtggattggcctcactttctctctgtgtagcctctctgtgatttttatttatgtggttcttccatatgatctctattatgatagccagacttcttacatggtagctaaggacttcaaatggtgcagaagtggaagccactaggcctcctgaaggttcaggcccagaactgtcacagcatcatctctgctaccttttattccttaaaacaagtcataggcttggtccagattcaagggcatgaataatgggaggctgggttcactggggggccacgctacacactcacctttcaagggcttttgtgtttttccatgccgcatgccatatgatcagatgactttcattatgagtcttgctagcattacatttaggcagtcctcaaacaatgaggaaaagtaaaacactgcctcagaattttcactccctgtgtcatgtcattttgatgatcaaagtagcttcactagtagaacacacttacggaaacaataatgtctgtaaagctttttacctctaatatttgagcatgaccagtcttggtcattttgttactaaaaagtgtggaaatatttatatttaacatactttctttgttcaattcagacatactgtcaaactagacaaggtaactagaggctgttaatgataagaaattttttttctgtactagcataaaagttaatttctggtggagaataaactttttattggtgactttttttccattctattattaaaattactttacc

SEQ ID NO: 34689 - DNA, 559 bp, Homo Sapiens
tgtcgtggcttttgggtcgaatccacacttcttatgatatggcagaggcaatgattcccattgtttcacgtgttcccttatacttctcagctgacttgacatcacatcaggctatgtgactggttcaggctaatgggctgtgagtgggagtgacaagtgtcacttctgaaacgaggcatttagttggtgatacaactcactctttttcatgcgtccctactgtggaaactaggaagcccacatgttccagatgatgcagctaccagatggcccagccctattagtttgggttcctgagtgactatgtgagcagagcccctcatcactctgcactgaacatggaatttaggtgaggaataacattttctttgttaagccactgagactttggtgccgtttattgccacggcataacctaacctatcctgactatacaggatggtttatgaagtcctctgtgatcttgcttccatttacttccctggcttcattatttgttactcttttactctctaagctccagctctggtacttcctttttcccctggctacaccacat

SEQ ID NO: 34690 - DNA, 596 bp, Homo Sapiens
cacatatgatcctttcttcagagtatatatctagaatcagaacttctatgaggttgtatatgtgcatccttagttacactgcatattggtacatgcccacgaaactgattataccagtatatactcctaccagctgtacttgagaatttgtttccctatgtacttgacagttcttgatactgccagattctcattttccattcctcacaatggaatcttcttattttaatttgtactaatttatagtgagactgagctcatatattactggctggatgagtaggtcttctgtaattacttatacagatctttggacgatttttctaatgaattgattttttatattgacctataggattttacatattctggagactgatcctttgtcaattatatgggttacatatatattctcctagtttgtgacttgtcttttaagtcttttgacacattttaagggaaataagtttttcatttcaatgaagttaaatttagctatttttcctttataagttctgcttgttgtatgatgcacaatccacccatattttatttttgcatagaatagacatggagactctatttattatgtaaaa

SEQ ID NO: 34691 - DNA, 579 bp, Homo Sapiens
attctattttagacacaattgtgctaatagagtcatttgcctgtatttttaaatgctctaaagataacaaagacattctattttggaagaaccaaacatgggtatgctgatgttttgccgagggtttatacacactgtgactaacgacacttctgtttaataggactgtaccatgccctgttccatggctccaaccagagccgcccagagatgtgggtgacagctcccacccctttcacatccttgggagggcattcctactccctgagaaagcaggtcacagcaatatcctcctctgatcttcaaggagctgaggcgcttggcgtccctgctgaaggcatatctctaactatggcctgcagaggtcctgcctgccaccccctccttctgctggttccagcaccccaactgtccttggcaagccatcttccttacacccctgacccagacccggccagtcacccttgctggtgcccccaccccctaaccagagtgactggttctgggtgggcatggacatcattcaggtcggtccccatcagggcacaattgcaagactctcgctaagaaactagcaca

SEQ ID NO: 34692 - DNA, 388 bp, Homo Sapiens
aatgaaagaagaaatgattaatgctgactgtgacatttttgttcagaagcaacaaggtgctgtgcaatacatactaatttgggagacagaaaaccaaaattctatttgtctttgccatcaagtaaacaagttattttacttatatgatcttgattgttcatgtgtaaaatgtggatatcatgttatgttttattcaaggtctcaaatattctgtgagactctgaaaaaaggtctaaaagtccataagcagctattgtgtagcaggtgcaagttaaaagatgagtaggtgtaaataagaggggacttaaacgtttgtggaacaatgtaattaaatgataaaaactattaactctgtttttcaacataactacattcaattcaagacccc

SEQ ID NO: 34693 - DNA, 547 bp, Homo Sapiens
tcacttcactgtttgctttttggcctgaggcagagagtgcctcccatggcagctcgtacaggatgaaccaagaggcagcacccaggatatctgaattgcctaaagccactgcagtgatgtacacacatagcgaagctttatttctttacagccatagacttgttgaaaagctgaatcacatactttgcttgatatttgactttgtggttaccaattccaggtgagccaccttcgagaggggtaacatcctgttgtcggaaaggtgcagccgggcagcagggaacctgggttccactttagccctgacatagaaggttttggttcatgtccctttggtctggtaggcccctttttggtgcttgtttacggaactgatttatcttgtttataatgttggtagacgggtgtatataccaagacctctggtttactgaaggtagggccaagagctttccagcagtctgttgagtggagctacgggtcagtcagcacacctggcccaaagcaccgtgagctggtgaacctacttgtcccaggtgttgtagtg

SEQ ID NO: 34694 - DNA, 468 bp, Homo Sapiens
ggaggaaattttggcccagcatttgctaaagggctgcagctagaagcaggtgggtggagagagtgggaagatagtagccttcttaaagggccagttgcaaaatgatccagcagactagggagctgctgttgggggagaagcatggtttctgagagccactgaacagcaacacagctctcttactgaggcaggggccagccaggggtcctggcagctggtctcctgattcctggggagcctcatacttcaggcacaccctaccccctcacagtggcggtcattcaaagaatgtggtcggtcattctcatttgccagatgagaaaacaggctcagagaggggaggggacttacctgaagttacagttaatgcgaagcagaatcagggcagaaacctaggactccagactccaggccagtatcctttccaggaagccacccctgctccttaaagccaagctcagcctctta

SEQ ID NO: 34695 - DNA, 502 bp, Homo Sapiens
ctgagtctttacgtcaatcacattagtttggattcttcccccaggcttctctgcatgttgattcccaagtagggctaccagatttaggaaataaaaatacaagatgctcagatagatttgaatttcacataaacaatgaatatgtttttagtagaaatatgtcccatgcaatatttgggacgtatttacactaaaaagctattcaatttttatctgcaattaaaagtcagctgggcatggtaaatatttttcatctggcaaccctacccccgaacaaccctcaaacctatcttcttgtaccaacattctcttctgggtgagcagccggcccttccaactcaaaatctctaaaaccagctcatccttttaatgtaggtgtcatctttcaggttctccttcatatcggtcagctgttaagcattctggatgctggttcccaaatgtctctacccttcccctatagaagagtctcattccaactgttgagtttcacctacagctg

SEQ ID NO: 34696 - DNA, 531 bp, Homo Sapiens
agagatgaaaaggatgatgtttagagaaggcttatggaggaaatagcattttatctagtgcctgaaggctgaatggagaaaattagaggtgggaaattagagtgggaagataggaaaagggcattcagtaaagagagagccttgactgcaaaggtgtggaaagtgggaatgtaggttattttggggaagaatgccagcatcccaacattactgtgatattcatgagggccttctagatgggtaacatgggggcgtattacacctctggacttcagattcttcctttgtggaactgaaatagtaaaagtagttattagtttaagggttgttacaaggattcaggagataatgtaggcaaaagtcttaggccagaggctgacacatggtttataaatactagttatttttatttgacaagagaataaagctggaaagaggtttcagtatattttgagtgtacctgtataataagcaaagaagtatggcctcaaatatgcaggcactggagagccattcagaacttttgtgcaa

SEQ ID NO: 34697 - DNA, 377 bp, Homo Sapiens
tgctgggattacaggcgagagccaccttatctggctgcctcctctttaaaaagaaatgaaagtttgattaggaagacttttagtaaccaagaatcaaagaaacatcaaaagagaattatcatgaattacatttaaaatggaggcactgaaattcatctctctcttttaagacattgtagaatgtataaggggagctccttagaagtattaatattataccatttcttattaaataatgcaccttatagcattggaatttaatagtaccaattattatgtcttaaagtcctcttagaatgctttgggtcattttaaggttattataacgattggagagttcttaacgttagtaaaagcatggatttgcctacacagaa

SEQ ID NO: 34698 - DNA, 437 bp, Homo Sapiens
ttagcacaaccttccagatgtgatttggtatttcatactttgttgcttttgtaaatgctgtacccactgcctgagatattcttacctttttctttgtccccagcaaatgcccagtcaaaatttagcctttatttttttcccttggtgaagccatctcatacctcttaagtagagtaatcaccttctctttcacccacttttacttggtgttcgcattcacagctgttacccgctactattagagtttgggttctttgaggacagggaacttcatttctttatctcagtgtctgtagggctaagcctgccatgtcgaaggcatctaatccgtgtttgtggaatgactgatgcaactaaggagtgcaggatgaatcgctaagttgctgcttgatcctgccaatagaccaacctgcctcggttgacacgagtgaattgtg

SEQ ID NO: 34699 - DNA, 487 bp, Homo Sapiens
ggtctctccagcaacacaatagacccaacgttaggctaagatctaagataggctcttctctgaaaaaggcacacagtgttaccacgtagagagttctagggctcactgtgagattcttagaaagcaaggccatcagtgacccggctcattgtgtcctgtgagttccgctcccattcacctgaatggcaagataaatgcaagactatggagccctcagttaaatgttggccatgcaattaccaaggtgggacgaggcgggggagcctcgttggaattccatcctccaatccgcctggctgagagatggcaggacaaaaagatatggaaagggaaagaaaacttggttgcaggcatggaagacataccccaatagtgttattggcttttcaaggtgtttttacctacaagaaaggaagtacaatgggaagcattaaaccaggaactccagggccaaaaagtgctgggctggaatccccgctttgtcatt

SEQ ID NO: 34700 - DNA, 439 bp, Homo Sapiens
cgaacatgtcggggcttaacaaaataaaaatttatttctcattcatacacagtccaatgtgggtatgcatagtcaatatgcggccgcctatgtggccattcagagatgcaggcttcttgcatcctatggctctgttttcctgtatggccttggagtcctctgttcaagcctctgtgtctaacagatagtaggtatgggaagagagagaaggtgtggaggatcatatcaaggggtggacatcatatccacccacattctttctgtgataattcagtcacgtgaccaagcctaactgtaagagaggttgtaaagtgagttctgatgaacatatagcatctctgccctacccacttaaatgaagcaacagtaccagggagtaattggaggtaaagaagacatgctgctttatatactaggagaaagtccagaatcataggct

SEQ ID NO: 34701 - DNA, 528 bp, Homo Sapiens
cagcatattctttttaatggcattatggtattccatgtaaatgagtattatttaacaaatcttttattaatagatatttaggttgttttcagtcttctgcttttatgaatattactacagtgaaatgccttatatatagatctctgtaccttgtacaagtatatttttaggataagttactggaaatagaattgctgggtcaaagaatatacatttaaaattttgtgtattgcaaagttgtcttaaaagaagttgtgtaccattttaaatgtcctccaacaatgtacagagtataaatacatcagattgatttctaaaagttccccacaggggaggttagatattctcatctgcagggagagtacagagaaataacaatccttttttgtggttagcaattacaagggcctttgcctccctcattgtgaatttgccctttctgtttacccgtattagtttcaaaactttctgtctctatcccagtgggaggatggaagatggacagtctctctgggtttcttcttgatt

SEQ ID NO: 34702 - DNA, 527 bp, Homo Sapiens
ttcaaactctgctccacagagtctcctcatggctggtggaggaggaggaagaaggtgagtaccctattttcttcccttcaatcagagtaactctggtgaaatatcatttgaatatcatctcaaacaagatgtgatgttccaacttgtttgaaaatcaccggaccagcagcctctcaggcctcatccatttgcagagtccctagagtctccaatctaccatcagttcctcaggaaggggcacacttattggcaccaccgattagctctctctgaaacagctctcaacaaaatgccagagctgaagggaatgtcagggttcatgtagttcaagtgccttaatctgaatttgcagaggagagggaaacaaagagaggttaagccatgaggtcaaggttcacagccagttaaaatctttaaggttaatatcctcagcttaatatgcaactgttctactcatacagaggccttccaatcttgaaagtgatttcacagtgtattcctgtgtcttgcttggtgggcatagtgaa

SEQ ID NO: 34703 - DNA, 572 bp, Homo Sapiens
actagatcatgttgggagcaggggccaggaaaatactctcagaagaggtaattctagagtatggtcctgaaagaagagcactgaagcaggagagggagcagcataaatgaaaacaaagagccatccagggggaaatacatctgaggaatcaaagaagtttcatatggctggagcgaaggttgcatatggcaagaacatgcttgctagtgctctctccttcccccatatacaaaatacacagataagacacaataaaaattaaggaaaaacaaaatgtgccaaaggaatgttgaagtttgatttctgccatgctagagtatctgcaaaacctgcattatctttttagaccaatattttgtggaaaaagcacaacctgaaaaataattcaaccttacccccaaacaagcagatgatcagtgttcactgctctgcacaacaggtaaagaaagaatctgcttattctgcttataaagagatggattcctatacaactaataatgcatttattgagtccttatgtgccagcacctttccaaatgcctgtgttttatctcatttcatcctcacaataa

SEQ ID NO: 34704 - DNA, 355 bp, Homo Sapiens
gaataatattacatgtactacaaatatacaacattttatccattcataaattgatttgggttgtttccacttcttggctattatgaataatgctgccatgaacatttgtgtacaagttttcctgtgaatatatgtttcctgtcaattttttaacctaatgttaaacttttaaaattataactgcttctcgcaagtacctgccatgaaattttattcagaatggaataaaaatatttctcgtgaaaagatatatgaatgaacagaccaggctatcatcatatgaaccacaaagcaccacctaagaagtactctgtcaacaaagatggactttaatcgaatcaggtctaatgagaac

SEQ ID NO: 34705 - DNA, 452 bp, Homo Sapiens
caattgggttgtccagatgaaagcacagacggtgggttcaaagttacacatggttaaataatttgtttaaagttgcactgctgatactcaacagcagtgtagttcaacagggctgctgcataccagcagtataactaaacaaatgatttaaccacctatgaccttgatttcttcttgcataaagttattatgtctgtttcatgggttctgatatatataataaacctgttagatgcaatttcattattattttatatctttacatcatattctccctgagcctgtaatagaaagttggaaaattggagcattcaagggtggcagggtgggggatgagggtggcagtgctcaaagccccaagctgcaaacctgccatgaaaagatgaaaagagataatggaacaagataatgactttgtttatccgtccaaggagcttctggggctccctgat

SEQ ID NO: 34706 - DNA, 738 bp, Homo Sapiens
agaggatctccccgaacatgtcgcggctgttaagctctgacaggttaggccttagtcctaggtgctaaaggttgacttggttacaggattgaagctagatttggagtttacagattgaactctgtgctgagggaatgcctgttgggaccagtgggtgtgtgtgtctctagaagagatctataaggttaccaccttaagtatcttggccaagccgtataaaattggcagtagtcatccatttttacctacagacatgatagttctctatggttcagcctaatatctacaaaggagttggtttaagggcaattcatagttagtcctgaagctgggagaatctccttgtgtgtctctaggttgcaggttagatgggagagcgagcacagcagatgagctgtgcaggaagagacatgcaatggaggctcctctctctcacagaaatacattttctgtgatagtagaacgaaaccctttcactctgatccattcagaaacttttcatacctggactttattaaagggactgtcccttccccattatccctctttgggagaatgcaaggtatgctcctttgcagaagttgttactgtttacagagttgacattgtggacacatccagtgcatacatggattgggaatgtgggagcccctgcttaaaaggtgcttctaacctacctggggtgaataaccctcttctgtgggcaggggagtgtggttctaggtccaggtttccctg

SEQ ID NO: 34707 - DNA, 446 bp, Homo Sapiens
gacatgtcgcggctggaaaggcagtggttgatgaccagcgtggtgggagagtccagacctgagtgagaaggtggggagcagcaagggaagtgagggcctggaggcctgggaaccggcgaccgatgctgagtagtcacctggccagcagccacaggcacagcatttgcccctcaggcccatcccggccttggcccaactgagcccaattcctggcccctgcctcaggccagggaaggtgtggctggctgggcaggagccatagtgccagcgtctactttggtcttagttgggttgtttggattttggtcctgacctcgtttctgaatgctgcttatgtgagctggagggagagtggacactgcccccccatcccctctcactgccttgtgatgggatcttaagagaggctgggcctcgaagactcaggtgtggccccactgggtcag

SEQ ID NO: 34708 - DNA, 435 bp, Homo Sapiens
aaaaatatactttaaggctgctggtgttggagtttctttctttcatatatttatagttgcttaatgcagcaatcacattttgcccattggcactgctgttttcatagttcagtaaagaaacctaccatccaactgtaaaatctgactggttttgggccagttcatttagaagctacaaagaggtagtgcatgcatttcaaattagaagaagttaagcctgttaaaagttttataatcttttatatcaagcttccatctgaatggataaatgcaggaatgtcagaggcatctctgacttcatgaaaggtaagttcataattcaaactatatattattatgcatgaattaatgtgtcatattctgaaatatatgttcagaatcattacacaggactttcagagtagtccaagtagcaagttaaaatcaagtgtttcc

SEQ ID NO: 34709 - DNA, 448 bp, Homo Sapiens
ttatcccccgaacatgccgtggctttgtttgaaaaacattaagggcaggaaataatgtttttgctcatagatattcaaaagtcatagtcataaaaccagcaaagagaaaaagaagaatgtttaacatattatgatgtcattggagaaggttcattatactttatgcttctgcataaagtatagttttccttccttttcaaactttgagaaaatacactattctcttacaaaacataatacatacccaatagttcctccagttaaataataataaaataaaatactatgttcattctttcatactcatggatatgctgacttaactttgtaaaaagatgccaaagcttcgtaaattaatctaaatcaaattataatctcaatcttaatcaaaattacaacaggacattttggggagggaggaaactagataaactaaatctaaatattt

SEQ ID NO: 34710 - DNA, 610 bp, Homo Sapiens
gctaatgtataagggcacggggtgggggagtctgaagcaggtagccaccccaggagcttcctaagccctttccaaatgaacaaaatggacggatgaacacacgctgctccctgggttggctctccacaagcctcagcatgtaacccagctctggggaacaggcaacttcagatgccacttttaaaaagggctgagagcagaaccttggaaagtatacatctggagcagaaagaaagcaacacaggagaaccaagatgaagagatgtcactaaggtccagggagagtttcaagaaggaaggaatggcagaagtaccaaagcggcagtggttagagaggaaaagcagaggaaagaccacccaacttggcaatgaggaagccacttgtcaggctgaggatcggaaacaaagtcacatttacaagggattatggatgaagcacaactgacaatctactcactctacaaaaattacctaactcctttacatgacaggcccggagcaaataacggaatggaatagctaatacaacccacgcagtgcatgacctcaggatgcctcagctgggtggggatacagacattaaatacataactacataatgatttaatga

SEQ ID NO: 34711 - DNA, 673 bp, Homo Sapiens
aggactacagcacatgtcaccatgtctggctaaaattgttttctgaagagatggggtctcactaggttgcccaggctgcttgcatacccttaaaggtagcacattcattcctctgagcactgggattcatcctgggtttttagcacaggttagctctttacatagtatttggagtcaccgcagaaaccttccaccatctagtccaactccttcattttacagatgcagaaaataacgacctccaaaaatatttcgtatgactttacacaattcagatattaattcatgaaaattctagctcacgctaataccacatatcactgcttatataatataacgaaacgttgtgacagccatttatcattttgaatattctttaataataaaaatcagtctgttgcctagggggaaaaaaatctccccaagatttttgggtaaaggtaaagtcaaacaatttatttcaagggaaaggcggaagcctgccaccctaacagctctttaccatcttttgcttcatgttcagatcatcatcggtacactttgcaaagctacaattggcatgtaatgcatgtaattttggaacttgcttttttcggttatcatttctaccattctagatttttgttttttaaagacacaggggtcttgctctgtcacacggctggaatgcagt

SEQ ID NO: 34712 - DNA, 475 bp, Homo Sapiens
aatgattagtttcttaatgaaattttacaagctcagttgaacacagaaaacatttgcttctctaaaagcaaacaggtctgtttctattataatcagacatctgaaccacagaagacccccagcccttaggagtacagaggtgaatctgttcaggaacttccgagttttctttgaagatgatagtggccaaagagtgatgggagaagggagctggcgatcaacaagatttgaaactgcaggatctaatgccacagaccctgacataaactttgggcagttgtgctaaacacagcagctctcaagtagagggacagatgatcaaaggagctaatatagtcagtggttatgctagaatgtctgtttgggagggctttggagtgacagtctaactggaactacttttacatttctggcaggctgttcttacttaggttatatgagaaaattaaataaaatgaaatttaaaattcagtga

SEQ ID NO: 34713 - DNA, 498 bp, Homo Sapiens
gttagataaggatgaaattttcatttggaagaattcttacaatataaaagtaacatgtaaacaagattttttcaatgttattgctatttatccccaaaactcccaatttttaaaaacgtggtgacattataattactaagcactactgagctgtgaaatctggcatcattatcatcaggcctgtaactctgaaaaagtacatgacaaggcaagaaatatataaatgggtaaagtaaggaagaactcagagaactcagtgaagactctcaaagtgcatttaaattaattaaaattcttaagaagtttgttaaaatacctgtaatgtcaactgaaaagatttcactttcaaatttacaggctgcttgagttcaataacctaaaaatgaaaaacctctggaccattccagtacaggttattcaaaggagctgtgataaagagcatatagcaaatgtgctcagttatatgcactaggtaaggcacaactgctatcatcccaa

SEQ ID NO: 34714 - DNA, 562 bp, Homo Sapiens
tggtatacatattatctcatcacccaggtaataaaaaatacagaaagcttcacaaatttgtgccatccatgtgcagaggccatgctaacctctgtattattcaaattttaatatatgtcctgctgaagtgagtactggatgtggtttttaaaaagaatttgtgtattcttaggagacgcatgttaaaatatttaaggattaagtgtcacgatatcggcaacctactgtgaaatggttcagaaaaataaagataaagctaatctggccaactgttaactgttgaatgtaggttgcagctatattagtgtttattatgtacaaggcactgcatgcacagcacgtacagagaatcaaggtggtagtccctggccctgggaagagtcctgtggaaagcccataagacatacatacgaataaccaaagttcaaggcaggattctcataaaacccttagagagcagggagcttggcaggtggtgggatttgttgaatacgaaataggagtgtgacatgtgagttcaaaggaggcattctccattgagtaggagaggatacacagaaga

SEQ ID NO: 34715 - DNA, 411 bp, Homo Sapiens
ggaaattcacttcaaagacatcaaaataacaactggagatgcccttccatttactaaagtgatctctgaccagtgaacttagactaagttgcaaacccagttctaatggagcagggaggcctaaattcaggccttccttgcattgcacgttgacctggcttgtcacacagggccattttcttgagaaaccagccagtagtgctgagttggtggcaggcatttttgttttctcttgtattgtttacttaaaagtgttaaagaccgttgctgaccttgccagcctaacaaactgaacacagatggactagcccgttaagattcccttgtcttggggctgatgtgagaagttgtctttgctgtggaattaggacctgacatgaaacgcagatctagtggcagagaggaagatga

SEQ ID NO: 34716 - DNA, 427 bp, Homo Sapiens
ctaaaatatcttggtttattgaattaacaaagttcccttttgtggaatttttttaatggtaatgaattataagtaaaataggaaaattatccttgagataataaaaaagatgaaattgagctaagaaaaaagtaaacagagctaaaatgatctccacactagagtttgaacaacacagaagtgagcagaaatgcagaaggaaaatttattggaatacagagaaaatatttagctggcatagtatgtaacatttcctagataaaacaagaaaactctgggagtaaatggctattctatggaagattaagaaaaggggtatctgtaaaaatactcactgcattagagaagatattataatctactggaaaaaacctatacttcttgaaacttacctctaagacatttgtaattcttaatgaaaactaaa

SEQ ID NO: 34717 - DNA, 445 bp, Homo Sapiens
gaggaggcctcatggaacttacaatcatggtgaaatgggaagcagtcatcttcttcacaagacaacaggagagagaaggattgtgtgtaggaggagctgtgaaacacttaacaaaaccatcagatctcctgagaactcactcactatcgtaagaaccgtatgggggaaaccggccacatgatccaatcaccttccaccagatcctgccctcaacacatgggtattatgaagattacaattcaagatgagatttgggtggggatataaagccaaaccatatcattccacccctggcccctcccagatctcacatattttttacatttccaacccaacatcatgccttcctaacagtcccccagagtcttaaatcatttcagcagtaactcaacagcccacagttcaaagtctcatctgagacaaggcaagacgttttggcctataa

SEQ ID NO: 34718 - DNA, 367 bp, Homo Sapiens
gagcagaactgaatttggtgagcacctggctcacgccactacccaaaatcacagatacatacacacattcacgcacacggcaacctcaggagcgtgacacaacacacacaaaaccaccactaagcaagtgcaatttgcagccttggagaccccacactcaaaatcaccaacccctcagtctctcccagggtctctgaaccccaaggagccccaggatgtcagagtgcagaaacaagtcttactcccctctgcctacaaaagcctaggacgttgcttgaagcagaaagtgttcagtcactgtgtgcccagagaatgactgactggctttgggggagcaagctcactttttccccaggcaaaactgcca

SEQ ID NO: 34719 - DNA, 411 bp, Homo Sapiens
cggggcttagagatgaaaaggaccatctatctattagaatgtcaagtcgccaacatagaagtgtcccaaatgtaccgctacctcatagaaaaggcttaacaccacccattgatggaattttccttcctctcgccatggttttgtttgcatagcatggaaaaaagagaagagaaaaagaggtagatggatagattgaacctataatttgcctatgtagagcagtttctcaaacttatctgaccacaagatgcagtgagaaatatacaattctttgtgatcagtttttaaaaaatctttcattatgtgtaatccaaccttcctagtatttaaataaagcctgtagtagcaagcagtccactatattgatttcacaacccataacttgttcaaaattgcaattaaaaatttttt

SEQ ID NO: 34720 - DNA, 526 bp, Homo Sapiens
gtcctgcagtctccactgagcttctaatgtgttgatcagacccttgaatgatgagctcttttcatactaaacttgaatattctcctgcccattcgatttgttaattaggattcattggctgtttctctgctctcctcttttctctctgttcctgctggttcaagtttaacctccattttctttctcctctgggaagtttcccttatgcctcttgaacagggtcaagagcacttaggagctcatatttacactgtatatcatgagaaaagcattgaaagtttcaaagcacgagagtgacataattagctttatgttttaaagcggatttttgactttagattctggcaatacagaggtcctgtggtctaagacatctgactaaccttcctgctagcaacaattaaaaatgctgagtgcaataaaaaactagcccttaaatggaatgaatgagtccactacttggtaaggatgctcaaaggcttaaactgaatcaaagcaggaactcttaagaagtaaatagtgtgtt

SEQ ID NO: 34721 - DNA, 648 bp, Homo Sapiens
gatgtcctgcttggccaaaagccctaaatggaagagtagatgaaaaagacacaatgcatatatttttcatttttcaaatcacccttttactgttcacattttaaatggagacgaacacacaggaaaacaaagaacacttatatgcaaaattcattatccaaacataagacgcagtatgatttctctcaagtagcttctacagattgttttgtatatctgaaaagttccatgtcctataacaaaattcttgatattaaacacagtatattatattgaaaaacgaaaattcctcattcaggtaaatgatacagttacaattcagactagccccaaaggtagctcaggagacttaatcaagacaatgctaagaaaaccctccatgggtagcaactatggtccaatgttaagacaggccaaaaagttacagatttatactttaaacagcaaaatctgtcgggacttttttgagggaaaggatctagggactattcactaagcaagtgggcacacagcattttgcatccactgccacttcctcctacaataaaaagggctctggatctttcttacacgtcaactggtgtaacactgcctattacttttgcactttatagtttacaatatgcttatcaaaatcttcacagacaa

SEQ ID NO: 34722 - DNA, 402 bp, Homo Sapiens
atgagccactgtgcccaggccccatttttatcttttacacagtattttaactatatattttccatgtttacatacacaaatacctgccattctgtgacagttgcctttagtattcagtacagtaacatacagtacaggtttgtagcctaggagtcctaagccataccgtgtaccctaggtatggtggctacaccacctaggtttgtgtaagtatacgctatgatattagcacaatggtgaaataacctagtgacccatttctcaagctcctcacgtggcaagcaatgcatgactgcatatgaaagctcttaaatagggattgtttctaaattaatctcaaaacagtcattatttactatttatggaattttttttaaaaaaaggagcaaaagtatcatttca

SEQ ID NO: 34723 - DNA, 486 bp, Homo Sapiens
ccagcatccgttcttctcatctgcctcactaacaagaatctggattttgtccaggtgtttagcagtgcgcccaacgctttccagattaccacccacctagtggtcacgtgacctgcctctggccaataggctgcaagcggaggtcgaccacaattgctgagttttgctttcccgatgcaggtgcgttgcttgtccctgcctggactgaggctggaggtgaaggactatcacagtatcctgggatcctgagctgccttcagaataacacagcagaaaaaaacaaggagcctgggctccccaaagccacaatggccctagacttccaggggttcctgctactcttagtgtgaggcaatcccagctcatacactggtctcccagggctaagaatgcccatgaggcgttaggcccaaaaccagcacataaaatagtgtgtatttccctggagggtctcctctgcccaggagggtcctgcagtaacagcaa

SEQ ID NO: 34724 - DNA, 672 bp, Homo Sapiens
catatttccttgttggtgtcaaagatattctgacttgttaagatactttcctacacttcctcattccttccagcttttctccttgatgcttttcttcaagttaagccttttaacatgtttttttaacttgaatagttcctaatattcccactacttcttcgctggctgttcctaaagcatcacacagagaaagatacagatcttaactgattgatcctcaagattttcaaatatttaagctttctccgatttttaatcccctctttctactaactcctttttgaacacaaaccacttcttgataaaatagggaccatcatctcttcctttcataatcaatcaatctaccatggaaatgagatccatccccacctttacttcagcagctgtgaagatcattaattcatttttaaaaattttttgtctggtgggtgggggcactcaaaaaattttttttgttccagtcttttctttcctaaaattctattgattcatgagggcttccacaatgagatgtcccccctaaccccactgtcacttcctgtagcataatctaatcctctttattccttcatcgagtactactgcataaagcctcccatgattgccactagcagcgttactggttacttctatgttccctcaagaatatgccctgggaatttgcgatat

SEQ ID NO: 34725 - DNA, 480 bp, Homo Sapiens
tgcacagagaggatggtcactgactcagtgaccttaagctggagttttcatcacaagacacatgagataaaggcgagacatatgacaagggatggctggctggtctgcagaggaggcagacacacaggaagggctaagacaggtgagtgaacctaggtcatgccctgtgcctgggtcacactgcaggcctgtcatgccatggtcccagtggtcacaggaggcagacactgttcctccccaatgtattctatctaaattcctccatttaacatttgaaaactccacctaatatgctcagaagccatttctgggactacgagacaatctcctatattgtttgactaacaagcaatgtgcctgaccttcctgggcttgtaagtggtggaacaggactcgaaactaggtcggctccaagcccagtccgtaacaccacccaacgctggtgctctttccatggtgggtgagaaccctggagggacc

SEQ ID NO: 34726 - DNA, 478 bp, Homo Sapiens
atgtcctgccagttatcctaagttttcagtgataacctcaagcttgtttagctctgctaacttaatacagggtcaaactgttgccaaccccattttaaaacaaggtccaaaatcaagacaaatggaaccaacaaacaaaaacatgtaacttctcattttaacattaggaaaacatcagctcactctatagtaataaagtttttctgctcaaaatttctataaatagcttttcttgtgagtttgtgaaaccctgtaatgagttttagaactatccacagcaaaaataatgtagcattgttttataaaaaactacataaactctaaaggcatatatatgttgtaagatttcttccatcagattctaaactttgattgagctatcaatcagtttttaaactgtgaattcactttaagaattaactttaagaattcagagtttaaaaacctgacatttacccacttatacctgctgttccat

SEQ ID NO: 34727 - DNA, 593 bp, Homo Sapiens
tagagacagcatacccaggttttctgactcacgtcacatagaactacctttagagaagaaaactggatcctaggcatgagtcctctaaggcttgcagaaacactgagccagtcaggtacggtggggagaggggccaaggggactttggctgaattgccttctagccctgggttagtcagagaccctggcaaccggtagatactggctctcagccagggacacacatcagagtctcctgtgacacttgctaaaaatacagaccccccacctgggatctgctgaatcagcgcatgggcaggtgggtcaggcatgcatgtgttccaaatgctccttgtggctctgacaggtgcccctggagaagagccaggtaggcacagcagtggccccaactgcctgttttgccccgagcaggagaattcctcttggtggtcccgttttactgtatgttaaagatctgtggctcttcaaggggagtcctaaagttttcagagtaaatggacagagtaatgatccatccttgcttacccagtaatggttacagccaatatttatagagtacttgccataggcaaggtactattcctagcatctta

SEQ ID NO: 34728 - DNA, 545 bp, Homo Sapiens
ctgccttagtagctgctaaggccaaaagcctgattctttcatcagcaagtctttttggctcaacctcatcaacttctatcaattctcattacttctaatgcctccatctatcagccccccgccttccattttcattgctagtctctgttccctattttccacacaatagccggtgatttgcttaaaacataaattaattatctgtccaaaagttacaaataacttcacataacatttaaaataaatttcaagtttcttttcatgggctaaaagacattacatgttttggctcctgacttcctctacaactgtattttctgtgactctcctttgctccctgtactctagccacaccaacattcttgctgttcctcaatcatcttcctgcgctggggtgtttatactgctgtgtcctctatctgaattgccctttgcttggattacttatggacatcatatcaaggttgctggataaatgtcatctcctcagaaaggcctttcctaaaatctatacctatatttgttttccgcctccccaaccttga

SEQ ID NO: 34729 - DNA, 498 bp, Homo Sapiens
gctgctctgtggcacatgcatctcggtccagggcacttccaagaccaggctgggacacactgaccttgaggactgctgtgcaggagaaactaagcatgtattccctaatggcgggcagtggttcctgccactgttgctctgagagtggagtggagccccaggctgctctactcctcagacctatgcctgtttttccaattctcttccccactcataattgcagcctcacctttcccacctgcttctcacaaaataaagcatacttcttgccatctgccttgaccccaacaccccactgcctgagttgggaggaaggttttagagaatcctagagagaagggtgcctgtaaggcccttgagaacagaaagaacccctctggttcatttcagtgcccccatggatcactaccagagagtgaatgccaattacctcacggttaccagaatcaggcccaagcagagactcataaaggaaaatgccttcttggcttactaaaa

SEQ ID NO: 34730 - DNA, 372 bp, Homo Sapiens
tgagccaccacgcttggcctattcatgtactttcatatttcttgtattgtcaggtatatattatctgttatctgagggagtcatatcagccgttatctgtccaacgaatatcaagttgcaactgtgcgccgacaacataggcgagcttgccgacatcaacctcggcacaggcctaagggcactaccttccaatagaccctcagaacagccgcttctcaccattctgctgctactaccatggggcagcccacactcatctattccggcagccccctggattagtcagggttctttagagggacagaactaataggatcgataaatatatgaaggggagttgactcacacgatcacaaggcgaagtcccatcat

SEQ ID NO: 34731 - DNA, 613 bp, Homo Sapiens
tgtgcccccacaggcccctgctctgcccggctcgtgtccttttcattgggaggcgccatctgattgagtgtttagtaccctccaggcactgtgctgcaggctttgtaggaatcacttcacttaatccccaaaaggtgagtattcatacaaacccagactacagatgagaaaaccagggcctcaagaggtatcgctctccacacatggccacgcagccagtgaaactcaaggatgcagagtccagggcccacactgggagccattgcctctcgctttgtctgcttcgggccacacgtctcccgttgaagcagaaatcaggtccctttcagttctggctcccacatgccaggcacagagctggccttgaaggggcctcagcaaacatttccttgattagtacatgaggcaggtgtcatcccctgcaacttctgtaactatctgcttctatgttgcagcttaactatatgctcttcaagggcacagatctacattctgaggcctaacaagctgtgcgttcagcaactatttgcaactaagtaaatactggctacaatgagagctctttcaagtagttcctatttcccaggtactgtgctcagttcttcatgtgtat

SEQ ID NO: 34732 - DNA, 368 bp, Homo Sapiens
cacacccgccctcatttatgttggtccctattaaccccaccttttattttgaagatgataaacaactaaaatcttgtgacttgtacttgcaaaatcagcaatctcattgggttggtaaaaagacacatgcaaagcatggttttctctttcaaaccattgaaacccaccattcatccaaaggaaagccacctttctcccagatttacagaacctctcctgacctcagcgatgcaagactcccatgaatttcttccaactgcctcagctaggctatcaaactgtccacatgcgcaggtcttcacacctcctccaggtcaccttatactcaatgctgctaaaggcatcaacccatagttggaggcctgagt

SEQ ID NO: 34733 - DNA, 576 bp, Homo Sapiens
ctgtgatcggagaaggcggctgggtggcagcgggggaatttaggacactggggttctgtttcctggtttctgtgggagtctgtgtgagcgctgggtagtggaggaaaatggataaacttatctgcttcacacctgcaaactgccatccagagctccactaagactggatgggaatggccaaaggaaagtggggaaggaaggctaaagggagactgttggctcacattttaggcttctgtccttccttggatcacaaactgcttccgtgggcaaattaaccctgctgaaaggagttattacagcagcagataacagagagagaggggattttcctgggttgggcaggagaggaaaccttggcctctttatcaccctccttcaataagatgcttgacagccctcgtttttgtttttgtcatctactaaacttgggagagcattagtcatagctgtccatagcacccaggaagtaagcaacacaccaaatactggggatgcaagtttcccacaccaacagttttccaggccccaaaataccagtcacgctttaagaaagccacagaagtggagataggc

SEQ ID NO: 34734 - DNA, 575 bp, Homo Sapiens
gatgtcactgcatcgcatcgtttacttctagcttgacccatacagaaaatatccagattttcaaatgacaaagccaaaatcagaactgtagcgcctatttcagctcacgaactggatgacagaactgtaagctagaaaaagctgacttcacctttaccatcatacctttaacaggccaggcacggtggctctgttccttccattgctatggaacaacatgacttaaaagagagagccttacttatgccttaagatttctccttggaaattgctgaagtcttctctatctagtgatgctgttcccttctccttctgacatctgccctttacttgaggttaggcctagaacaattttccacccttgattatcttactctcccatcagtaaacaagttgtaactagctttggtgaacttgtttactgatgggagataaagaaaccaaggcttggagggtcaagtagttcaccagacatcacatggctcgtaagtatccaaggcaggatttgaatccaagtctagtaaggataagttccaattcctatgaaaacatctgcttaaaataacaattttatc

SEQ ID NO: 34735 - DNA, 571 bp, Homo Sapiens
tgttgtcctgctgttgattgagggccaggatctgttaaggtccatgggtcccagggttcctagttagtctttcagtttttgcttataaacttctctctatacagcctctatgaggctgtgttagggaaaaatttgagacagcttcttctctggacaatattcattctctcattgcacaccaactctgcagtaggccctcttctagccatcgggcctagagtagaaataaaaaagaagtccctgatgtgaaacctcctttctggtcaatgagagaaaagatgataaataagcaaacaaagcaataagtaagatcattttagataataaatgccacagagaaaaatgttaaagcatgaaggagtatctttttataagagatatgaggtagggagagcatcagttcagataagatgatctgagaaggtctctctgaggagggaactttgattagaggcacaaatcaccatcccctttggagatctaagactggttatcatgcccggttgctcctgtcttcctaaagaatccctttcccaaagaatccttaattataacaatcttttggcaagcc

SEQ ID NO: 34736 - DNA, 530 bp, Homo Sapiens
gtcctgctgcggctttctaggaaaattatgcttccatgagagatgtttgcccctttatgttttcagcttcttctgctttcaacatgagcttgaacctggaggtagaatatccatgcatcttgtgaccaagagggaacaaacatgaagataaaagtcagcatgctaagggtggtgaagtgaaaagataaaaaatgtttgagttttcttttacttgtaaccaaacacattcctgagctaatagaccacagaaacttgagttgggaaggaattaagcccagcctgacctcatcgaagacttttccaacgtttctggtgacataatccactgctttgggagggagtctaattttgatgcagatctatatccattacaacaggttttctcttacagtgagtgaaatttgacccccaaagcttatgcttatagacccaagtgtgatgctgacctgagagtaacctggacagtcacttccacactttcatagatgtcagtgaaaaggtcattctgatcaagcttggcgagtctactg

SEQ ID NO: 34737 - DNA, 504 bp, Homo Sapiens
tcctgcacacaggttctgatttgccctggcgtccccactacagtatgccttgttggtatgaaccattcttcactttttctgttcttatttattactacaattaggaaatttttctgtcatacaagtcacaaacaccttgtcatccatgacacagaatgcacatatgctaatatttcatcgtatttaatttagagacctgtatgtgaaatgattctataaacactatggatacattgtaagtatcctatttgcacctttcaccagtcacacccattctccatgtttttatgctttcaggaacatgtgttgcctctgtaaacattacatcatactattttggtgttctcagctttacttttcagctatacgtactatactgtttttgcccttctgtaactttcttactcaacattgtttttgaaatccatttatatagatatcttattgtaatatatgcattttaactactgtcggctattttaattatatgaatttatcatcatt

SEQ ID NO: 34738 - DNA, 489 bp, Homo Sapiens
tgtgctgccgcataccttacacctaccacaccatcattcagagcaactacaggcttcaatgtttgggaatggaaagaaagatagggaacactcccgcttttctggtctttatggtttttattttcctgcatctaatcctatttgtttttctgtctatgtctcacacacacacgaagagcttctagctatggccctggggtttggacgaaaaagttggtcattaaattctccttatgagactgtggagatatatatatatttatacatgtaggctctattaactactgtatgtgcctgtagattaattacacctcagttggttgacctgaagacctgattaccatgtctaatattattcctgttggaataattttgctttgacccaaaccactgccacattcagaatggcagtccatttggacatcagaagattcccatgggcgcggagatagccaactccaaagggcaccattcacataatatcccgtg

SEQ ID NO: 34739 - DNA, 602 bp, Homo Sapiens
cctgatgtcctgcatgagattctcactggtattcccagcgtgacagcgaatatgtactatgttcaccctggaaacagccacttaggacactggtgagctactccttagggggttgtggaaatagagcccaatctggccttgactccatcgtagagcacaatttactgagcaaattctaataaatgtaaattgaaatttacatatgatgctgttcttttcagaaccaagattcgttcgcttactgcttatcaactcttcctcctgtttaggtctagttctctcctgtgcaagattgcgacagaagctgagaggagccttctggtgtttgatcgatacactcccttgaccacaatttattcactgtagtcacaatggatagtcttatgaaatcttaaatagctgctttgaaagtccacaggggtgtagacagggctcttcactctacctcacatgatagaagtttataagataagtaattaaaatccagagttcaaattattcttgctcctcttaggaagttcagcttgctaatttaatacttaatgatgttttaagggctatgggaagataatgagtgaaattcatatcaagccattagcggg

SEQ ID NO: 34740 - DNA, 378 bp, Homo Sapiens
ctctcagacgtgtagcaaaatccagacagaaaaacagtagaaaaggcattggaaagtgtcaagcaccaaatgcacctaagaggtttgttgctttttcttgttctgagccttgctactgaggccttggaatagggtcgccaggattagcaaacaaaaacctgggaggcacaattaaattcgaacttgagacaaactgaataatttttaaacttttaaagtataagtatattccatgcaaaatttgggatataagtaaatatactacaaggttatttgtattttacctgacaaccctatgttggagcctccttccctgctgcagccaacaggggtagaggaatctgacctgcttatttgtaactgaaagtccatggaact

SEQ ID NO: 34741 - DNA, 485 bp, Homo Sapiens
atgatccaccgcgcccggcccaactttccttgactttctaattgagcttcataccttgctttcaagggcctcctcttccagcaagcctgctcatgtcttctcagttaacctctcccatggagaaactctctgtcactcagagtttgcttgaatcttagctttgatgcaaaacaggtctgggagcctttggattttaagaccaaaggcactactaaactgccagaggaaaaagaagacagaatgctggacataagactgactctgattctcactgaatgtcaaggctattttgtgaacagccatgttggttatccaagatagaaagccaaaacatttcaacatgtttctgactctagtttctgttgggtaactaggggagagggaaaaatttgggatatgttttatcagtcctttaatcgtcctctatttagacatttacaaggccaaatataactgtcagctgcaagtgttttgaattgcatagt

SEQ ID NO: 34742 - DNA, 482 bp, Homo Sapiens
atgtcctgcaaccaccccctctatctagttccaaaacactttcatcgcccccaaagaaaactctgtatccatcaagcaggcccccctcctctctccaccccactccatgcccagcccctgggatacaccaacctaattggtgtctatggatttatttgttctgactatttcctctaaatggaagcataccgtttgaccttttgcatttggattctttcacttggcatattgttttgaagtttatccatgttgtagcttgcataagtacttccttccttttgagaccaagtaatattccatatggatacactgcattttatttatccattcatctatttgtagatatttgggttgtttctaccttttggctaccatgagtaataccgataggaacatttggatacaggtatctgatggagcatgtaactgtattcaagtctctggggcatatacctaacaacgatattgctagctgtatagtg

SEQ ID NO: 34743 - DNA, 428 bp, Homo Sapiens
ctttgctgtatcccagaggttttgataggttgtgtcattatggtcattcttttcaaagaattttaaaatttccatcttgatttcatttttgacccaatgctcattcaggagcaggttattcaaattttcttgtatttgcatggttttgaaggtcccttttggagttgatttccagttttattccattgtggccagagagagtgcttgatataatttcaattttcttaaatttattgaggctcgctttatggcctatcatatggtctatcttggagaaaattccatgagctgtgaatagaatgtgtcttctgcagttattggatgaaatgttctgtaaatatctgtcaagtacttttgctctaggatatagtttaaggtcattgtttctttgttgcctttctgtcttgatgacctgtctagtgctatca

SEQ ID NO: 34744 - DNA, 498 bp, Homo Sapiens
acagcccttggcaaggaagccactgtccttgagcacataacagggctccttcatctcctgcaacagggacaggccttggcaaggaaaccactgtccttgagcacatagacagggctccttcatctcctgcaacagggacagcccttggcaaggaagccactgtccttgagcacatagacagggctccttcatctcctgcaacagggacagcccctggcaaggatgtcacttccttgggcacacagacagggctccttcagcagacagcagatagatatgcaatgcaagccttggttttttcggatgattccaatgcagcaccagatacgtgtgtccaattctggggtttgctcataggaaacccatgtgccagcaaatctatgtcacattctccagtatcacctttatatggaataaagtcaatttactgttcttctgtaaaaagaaagaaacgtattcatgactgtagcttggctgtcactcaagtgcaagtgaatg

SEQ ID NO: 34745 - DNA, 562 bp, Homo Sapiens
aaccaccttggagtctgggatagcccaaaacagagaaggcatccttgaatttctccctggccgtgccctgtctggcccctagctagtccttggagcagattggtgtcaaacagacctacggcggttgctgtggcctggtcagacccagctgctggccccctgggggtcattttttggagctgctcaagtcttctgaaatagtttgtgcaggctgggattatgtgtttaggggcccagttatttcagaactgagatagccatctctccgtgttatcagtatgtccagccagctggccaaacactgtctagcaaaagaggaatcgttcattcagtagatacctgccagcaactcttctaggtactagagcctgtgagagtgaatgagacaggcctgctttttgccttcaaggagtttatgagcacgaagatcaagctggcttccaagagaggccctaactttgtcaaggaactgaagacctcaccgcaagagtggttagaaacacatccaggctgtggagctgggccagcctatgacttaatttttgtttctgccactcccttt

SEQ ID NO: 34746 - DNA, 358 bp, Homo Sapiens
ggggtgcagctcttataccttcctacgtctgattgtcagacaatgcgaacctaaattaaattcttggagccatccaggataaaagctgctgtagctcgcagacatcactgaagtatgacacttttgttttttctttctatcccacttactctccctctatcagctgactccaaagctcccagcttgtccttccctccatatttaatttattcagccacttttattaacctctgttgtctccaggggctgcagtcctcatccctctctgccctccttgagcccatttaacaaaataagcatcgtattgaaataaatgagccttgcagccagtcaacctcctcaagaataaaggtcttga

SEQ ID NO: 34747 - DNA, 492 bp, Homo Sapiens
ctgcctatagagacctgatcaaggctccagttttagtaataagacttcaaggtgaatacagattcaaaggccgagttgtttgtgttgaagtgcacaaagcagacaccctatgaaaaccctcgcccaaaaatgtgaacactttagaacaagaactaatacagataaacgatttctgacttaatgaaccacagtggccagaaacctgctgatcctgctttccccttccaaaacttgctgctctcggctctggccccgagggtggcctatagtttacattaaaataaaatattggaaagattagtaaaatttggttaatttgtccatcttgtttcataagcaacacataaaagaattaagattagaaatatacataatacattacacagttgagtggtagcctcttgctactttatagtggcttagattttcttgagaaggaggactcaaagcatgatttctgacagttacaccataacaactgcatgcctctga

SEQ ID NO: 34748 - DNA, 405 bp, Homo Sapiens
tatgcagtaaacccctcttctccatccctcggactacagctctgctctcgtagcactcgaacacccagcctgtgggcaagagggctgcctgtgaaagcggggaaggctccagaaggaaggagttgaggggccatccatcgggacctcaggaagagaggagagctgactgctcttagagatagggagaagaagggaaccacacagccacatctctagggtcctcctgcccacctccccagacaaaggtctaagcccccagtgctgactagaccccactgctctccaggcatctccgcatcccaggactctaatcccagccattgcctctggaagggcaatgctgaggtccttgatgccctgtcctcctccctttcctgcagaaagaagtttcttccaaaggctgtt

SEQ ID NO: 34749 - DNA, 456 bp, Homo Sapiens
tgtattcctttgcttttcactcttctcaacagtttcacataagctaacaattgcttgtttaaaattaattttttgtattgttggaagagctggctgctcttccaaagcggttgttcctaaccaaagtgtaatgaaaacatcagttgagtcaggagtcaggagacctgatttcaaatcctctttctttttactgtaactgaggaaccccaaacacctttccttaggctctctaaacatccttttctgtaaatgaagataatgccctatctattttaaagacaaaagaaaatagtaggttacttgttaaactttaaaacatagtataaatacatgctttatttttgtggacagcaagcatttccatttcttactgcttggtcacttataatagcttctgaatttaaaactagcctccctcaacttctgagaaggacagaaaacaaaaacaccttttgg

SEQ ID NO: 34750 - DNA, 519 bp, Homo Sapiens
tgggattacaggcattagccactgcgcccagccgtatgtctccatctttttatttcttgcaatgtgttgttaaagaagtcaggtggtatgtgtacacaagtaacgtatacttgttgaatatttcttatttatcataccctgtctcgttccaaaaggattttacatgacttataattttaatataatccgggggagatgggcagattcagctctgggaggccagcagaatggcttttaggtcctccttgggttcagaaaatacttcttgaaagatatttgaggtaaatcttacaggattagaggttagccagatgaaatcaagagaggagagaggagcccccacaaaggactgacccagggcaataacagggggaaagaacttggaggtacagaggcagaccttggtgtttcccagggtgtgggacattgggggtagtaaggctggaatgggtagaggaaaaggctatggtgacaccacggggtattaggtggaactgagggaaacagaaataggagcag

SEQ ID NO: 34751 - DNA, 531 bp, Homo Sapiens
tttattcggagttgaccgtctggtcatacatataaccagcattttttatggtagctttttactcttaagtttttctaaggccactgcaccataggttaactccgaataaagtggggcttgtcctctgtactgaatcacacagctagtaagtatcatggccaagggcatctacaaacctaggcttgagacagaatgaaaatagtccccaaaccaagacacagtatccggagagcccaaggtcccacagacgcctaggaggtcccacccagctttgccatggtaaggcttgatccatttccccatcctactttgaaactagattttaccatcaggactcccgttgggataacaaaattcatactgcttgtgtaggacaggaaacttgtattttttaaaaaatttccttctcttgggcttccagcgacccccctcccctctgcttttcttgttaatccccatcagctgggcattcttcttagcataaaggatcccttgtgaggctaaactgtgagggtagtttggttataatgg

SEQ ID NO: 34752 - DNA, 540 bp, Homo Sapiens
tccattactaaccatagagttgaatcagggtactgttgcctggcccttttctctgtatcacaaatgcagtatttacaggggccagatatgtaaccttacttaataaggccggctgagtggtggcaggaataggattggtaggctctataggtcagggtgttttctctgaagagtgtagccacactcctcagctctatttgattattgctttgcacagtgtgggcccaatagcagtaatccctaccatttttcacgagaagcctggaatctggatattatgtaaaatcacctgattttaaaatattggctcaaattttttgaaaatattctgcaagccaaaacaatcacacctatagactgctggtggacatcctgtgctctgtgtcatgtgcctttccatccgtggccacctgatccccttcttcctgacagtattgatgggaatataagaggacttgtgcccctgtaagaataaagagaaaatatctacttcccaaatgtactgtctttagtaatattctgtaattagtaaacatgtta

SEQ ID NO: 34753 - DNA, 453 bp, Homo Sapiens
ccagcttacttaggttttttaacctccttctaacctttctccctgagtggagagtttttaaacatttttaaaaactgcctctcctgtgaattttattaccaccaatatattgtgtctctctttatgtactgtatgtttatctgagctttatatctaaaaagaggagggctttttcacgtcccactaactagttttagatctctttgagggtgacatcactcctgatgagaatgctgagctaggtccattcagtttatgaaatgaacttaagtttgtagttggtaacttttttccccattccaaaatctgtactttgaaaatattggtaagtctgggtctctatatattttctatcggtactgtgttgttttgagccttctctgtagcacaactttatgttgccttatgatacttattccttatacaatgcttttatttttctgtatttttcgg

SEQ ID NO: 34754 - DNA, 492 bp, Homo Sapiens
agtctacaccagcggatttttcatgatgttatcttgcctagaggtagcaaaggcatcacatccctgcgagacagaaaatgtctcaaataggcatctgtaaatgagaacagcatgggaaataaagcctctatctggtgatacaggcgcaatgctatgccgcactgtgaatgacatggcactaagcaaatcaaacttctaatgttgaagatgggctctcaccagaagagacagatgccatccacattgatgagtactaattgaacaccccagtgtggaataccacctggccctcctcacacattccagagaggtggtcaaagttaataactttagaggctcttctcaatctagcctctgggtagcaaagagaacagtgggaggaataaagagaaaagttccccaaacgaaaaatgctgccaagacatgcgtctgctccccaccccatataggaggggatatatacgtaagcctgaaggttcctgattaactaca

SEQ ID NO: 34755 - DNA, 518 bp, Homo Sapiens
ccggaaccttggggtcaccacctattgtcccttggagaatccacaggtctccagcccaggatgagggctcatgagggccacaccacccagcctccagggcagctgtcttcatcttcaaagcatttcaacccagggtcctgggactgtcattctatttctaattctacaatggagctaagtcagaaagcgtgctctgtttgaagggcagcttagcattacagatgtattatatgatctgaaccctggggaacatctataaagtggggacgtcccagagacctgcggccttttccacctgagaaggtgcctcagccgattcaaataagaggatgttcctgtgttcccttcccaagaggatctaccaggaacttcagcgacagctgttcccaggacaccctttattttatgctgggaggcatcgtcctccgtggaccactcatttggggttagctgcctgtagaaccgattcctgggacaaacccgttgtcacgtatccacagaatggaatgctgcatgag

SEQ ID NO: 34756 - DNA, 557 bp, Homo Sapiens
agtagtaagacgccctatagagaagaaaatgtttagtggagtacaaaatttatgagacatttttaaattacttcaaaaatcacagaattttagaactggcagagattttgcaagcccaactcctttactttatacataaggaaaacaagaacagaatagttaagcaatttgtctccctaaggttataaacctcaaagagacagacactagactagaatcctcttctaacaattcctagttcagttatctttcaactttatgatataaacatactagaattcctttatattcattaaccactacatagctttcgttgcagctaaagagttgagcatgaaagtatctgtctcaggaatgccactgtacctgcttcacaacagtaataatgaaaaacttgcaattcaataatataaatcaatgaacaccaccacagtctagtagagaaagttcagaaattcttgtaaacatctggccttcaaatccccaaaacttgattctaagtcaaaataaaaaaggaagatgaaaattgatgctttgtgaatggcatgtccaacaca

SEQ ID NO: 34757 - DNA, 495 bp, Homo Sapiens
agaagaaccccatgcccacgatggcgaaggagtagtaaaagatgagcagggtgaggcccaggctgtggggcgacaggggcagggtgacgcggggccggcaggagggaacggctcctctgcagccccggcctcctcggacccgtggggctgactgcagggccatgcccctggtcggttcaccaactggaaagtgcctgcggggaaggggcctcgtggggcagctctggggtgaaaaacagctcaagtcaggacgctatgaacaaatgcccctttcccagagattcaccccttacctgtgaaggtagactcacaggtgaccccttacctgtgaatgtagacacaggtggtaagcgagttgacagctccctgccctccctactaaatatgtcagacaggtcagtggagaaaaatggtgcccaggagacctgtggtggtcaagattccaggctccttggagccccgtcaggccctcgattgcagtcctttgtggaactc

SEQ ID NO: 34758 - DNA, 354 bp, Homo Sapiens
tgtatgtgtgtgtgtgttgctattgaaaaatactgctgtatagtctacgtctatctttttcttatttcttgtcaatgtatttttgggatcaatgcctagaaaggaggattgctaagtcagaagggtaatgtgcatgtagtttcactaaaagttgccaaattcccatccataataagtgtgccaccagcaatatacgtgagtgcctctttcccaacagggtgttgtcaaactattggatgttcgccagagaggcacagcttggtttttgaatacatgggatgtaatcaggatgtgcagactttttggttcctaaaggctgactgggctctgagaagcatataacatttcctcaag

SEQ ID NO: 34759 - DNA, 540 bp, Homo Sapiens
acactataaggatcccctgcctctgatgtcctgcagtaaaaggagagttacacagtaaattaatagtaagtgtgtgtatatgttatttaaaagtgatgtgacagggaagctgattattagagattattaacagaaaaacacttggaggtatgtgatgggatctgtgcagttgggacagatttcagtctcatctacgtttaaataactgaatagtgatatttgataaaagctataatagttaacagcagtccttattatgggtcagagtatgaagacttattgactaggtttaaaataaggaagggttacaggaactctaaggaatcatagatagcagctgtggaaagcagctccccacctcttgacctaggggaataaaggaggcagttgaaattactgctaacactgagatcttttaggggcaagtgttgtgctgctgttgctgtctcttgaagagtggccccatgggcatgggatcgagacttcaaactgagaaggaggctccagctgcctggtgctagtgtctctgatggagatgat

SEQ ID NO: 34760 - DNA, 413 bp, Homo Sapiens
agagatttggagcacagagcatcagggccgcctgtgaggcacagagcgaatggggcaccagcctgccctcggcctcagacacggagaggctcccacggcactgagccacgcatggccacgcgacagagggacagaatgccgtggccgtgtaggggagctgcactctgcgtggccctgggatgggaaaatccagggaaacagacactgttatggatgtgagcatcggctgccagaacgagaggaagcagaagaggggaaaaggccgattatcgtagaagagttaggaaaatcaatcaaagatacccccttgagaacagttaagttcacagctgtgagttctggaaacctttatgttttaaaaatgattccgaggactcagagggtaaagctcgcaccaacttaatttgttattg

SEQ ID NO: 34761 - DNA, 459 bp, Homo Sapiens
ctcagttgcggggacttgaagactgaggctaggggcatctgaaggtgcacccgctcacatgaggggctactgacaccaggaagacctagcaactgaggtttcctggcacctgtctctgtctgcctggcctccagcatgcagactcagggtgtccaggcttcttacatgttcgctcagggttctcaaggcagcagttccaagagaggcaggtacaagctgtgtggctttttatggcctagccttagaagtcacatggtgtcacttccgtctcattctattagttagaaatgcgtcacaaaggccagcccatattcaaggagaggggaatcagaacaccttttggagggaggagtatcaacgaatgtgtgaacatgttttaaaaccatcaccaagtctttgtgggatgttgatgtgggtaggttcaagagtgacatatggatttctaagagaaagagctgg

SEQ ID NO: 34762 - DNA, 452 bp, Homo Sapiens
ctggtcgcctggctcctccacgtgcacttgatgctccagccagatagactgtgcacacctgggcagagggagtgctggtgagtgcacatgtctacgtgtgtgtctgtgtgcggtgtgcacgcgttcctgcgcaagcaccctgtgggtgcatgcactagtgactgtcaatcctctgtctgtgggctggctcccataatccatgctacgtcctgaattccactgccggtttttctgttcaccaatctcaaggacctggcttcagtttctctggtaaccaacctcagcccttagcttcaacctctgagcacaggaagacagccagagtggggaggggtgttgtctcacccacagggcccctgccggagctgagcaccccaatgggatgagtggcagcacggttaccaagacaacagaactctcgaccccttttcacctgcaaggctcttttccct

SEQ ID NO: 34763 - DNA, 590 bp, Homo Sapiens
ctcagccttctgagtagttgggactacaggcgtgagccaccatgctggctagtttttctatctgaaagcgtagattttaactcttattctgagcgtccacttaatctcccatgtactacttgtgtttttttaagtaatacagtaaattacttaaatttactctttgtaaattcaacaagcttgaatttctaaatccattaaggtggcttgatgattcactgtggtactgtggtgggaactctgctgtgcactggttgtagtgtgatccctgctcttaataagttgctattctttaatagaattaagccctgcatccaaaaaacaaaatctattactaaacaaatagatagtatcccacagtggtgaatttattgagacgttagagggagagataatttgggagccattggtatgtgttttaggacgtgaatttcataatgataatattcacacctgattaccatccaagtaacctgccccatgaagcagttctagcaattccagtcagtatttatgctttctgactgttaacggatcatttgagaaacagaagatgttccactggtgttgctatgaaaaggcttcgtgaa

SEQ ID NO: 34764 - DNA, 442 bp, Homo Sapiens
tgagccaccgcgcccggccgaaggccttggattctagcaagctggtggctgagggaaaagatcagcaatactggttatggctaagtgagactgctgggctcacagtggcctttattcacttttattatttcttctgttttctccacgatcaacggtgtgactgttgggtggttgaattgaaacttaggagtgtatgatgttcatatgttcccacttgatctttctcaggagtgtttgtacatacagcctccctgtctccccttcctccatcccttcccagtcatttctagtaaccactgaacactgtatgaggtggaaagtccatcatgtagtagagaaaaagattcaagcatctcacctaaagttgtctatgaagttttcaaaagcaaatataatgatctccttgtgccagtggacttctttggtttatttggggggtaaa

SEQ ID NO: 34765 - DNA, 481 bp, Homo Sapiens
acaacatcttgtgtgttctgagtataactctacttaagttcccaaagtacattactagtgcatgtgttctcatcattcttgtacttgtgaaagggagggtgatatagactttggttttaggatacccactacctttggtttcaggctacccactacctttggtttcaaaagccgctcctcttctgatgtctgttcttggtgtattaaggacaaatactggaaattatacacaaagaataagtatgtgctgatttatcatgagtcacatggacggtcttggcaggaagtgacagctttgtcattctttttcataattcaggaaacacaggaacaacatatgccttgggttgggcacagagtgagaactcaataaacacttcatccagtgaaatgatgacacagaaatctgtggcagtgctttaattgagtgataagggcttgaacccaatgtgtgaaagccagaatttatgaaacaaatgag

SEQ ID NO: 34766 - DNA, 482 bp, Homo Sapiens
cttgatgtcctgcccagagacatttttccattcatgtaaacatagagaagatagagacaacacaggaaattgagaaggaacagctagtaaggtaggaaaacctgggacataaaatgtcttgaaagctaaggcaagtgacatggaagtgaaagaagtgcttcaagagggaaaaagccattgctagtgctgctgatgtatcaaataagatgagtactgagacctgaccactgcgttaagcaacatagaggtcagtgtccatgacatgctggaaccagagcttgattgcagttggttctagaaaaaaatgggggaggcaatgtttgagagcatatatagacaactcttttcaagggatttgctatagggagaaaaaaagcgatgggacaaaactagagggaccgggtggtttaatttttttattttagaggggcagtgtggtttaattttttattttatgggaagaataacagcatgtttaagat

SEQ ID NO: 34767 - DNA, 560 bp, Homo Sapiens
ccctcctttgggagaccttgtcagtcagcatctctagggcaaccgtgattgccatttgtagaggggaaggaatcaagggactttaagctagatcaaaatctggggacaaattctcctgctaactgcaagttaaaataggcccttcttactgaatttccctgtttgtttctctgcagacaatgctttagccctactcttgggcccccaagtcagcagagtaatcaaagcttcctaccgtttggcctactattccagactagtccttcgaggggttcccttccaaaatatgcagggctcaggctcccaattccgggcctgtctgctttgcttgtgtttctcctgtccctgttctcccggagggcccaggtggaactcacgacagggagggagacgcttcccaaaaacctgcagggctatttcccagaatttggttttcaagtacaagactttttgtcctgtaagatatatgcagcctcacagaagcagcctctgcctccactttaccagctacgtttttatcttaagcacatggggctcccttagaacttactccactgatt

SEQ ID NO: 34768 - DNA, 682 bp, Homo Sapiens
cgtaatgagggcttgcgactggctgaatgacccttggtcttccacccacttatgaggtaacactgactattctgacctgcatacctggtccaatgctgtcagttgactagtttgggttttttgtactgctcaaaggcacccagctgagatggttggggtggggttggaatccagtctcactgctggccaagccctggatgctggcctgaggtcacatcctttggggtgggggcacattttcaaattcatccactcagagggggcacatgtttctaactcacacacagtctccctgtgtgtggctgttctgagtaccattcccaacatcatctgctcagggaatttctaccccccatcaacctcgtgtaagacagagcttgagcttttgacctcctctgtgaagtctattttgctctcagtctcttagacagaattgctttttgtctaggagacagaagtttctaagtgcttactcttgagttctatacttactttgtggcagactagtgacaaaccatcagccgaccaggcccaggtctggaggccacacttcgagggctccaccttagaccagccctctgctgcacacagggtgaccttctacatgtttttatgatggaagcaagctatctctgtgaattgaaatatgtggacaagcacggagccacatggctggcagaac

SEQ ID NO: 34769 - DNA, 568 bp, Homo Sapiens
atccaaaaaggatgtgagtttattgaggctgaaatagccaacattcttaccacacaaccattaaatgtataatgattttataaacattatttgattcagatataacatagatatgaaagaggatccagttttattctggcatatttaatattctcccctatgaccttattttaccaaattagaatctataaaatatgaaatcaacctagcaactgctgacctatctataggaactcaaaacatatacacacataagaatgaatcctcagtaccatagctagaaaaactgataattacacaggtgttagatctgccttccatctacttggtctgccacaacaatatataaacgtgtacgtcaaaaccaccatttgacagaatcatcactttaagtaatactccatgttttctacttgcacaaaattatcttggaatttccctaatggtaaaatcctaatacaaatgatcaagtgtaaaaataagctgagaagccagatacaggaactttgcattatgttctcttaatgtttttctgcacatctaccctttcttcttttaacaaggtctc

SEQ ID NO: 34770 - DNA, 576 bp, Homo Sapiens
gcaaactgtgtgtcaatcctaacttcccacattatttaagcactggatttttctctggcattaactcaatggaacttcacctgaggacaaaattggctgttacatttgtaattatggagtaaagggtgattcttatccaaaccaggctggaaaactgaaagaattcaaaaagtaagtgtgtagatgtgacgctatcttgctgatgcaaagtttctcaagtcaaaacatttacttgaaactttggcttcctccaaagcaataattttttacattttaagagcagctttccttgtaaaagcctttacacttgtcaggccttctgccttaacaaagattgtgaattctcttctaggtgattaaaatcaattctgaattaaatacagttgccctgatcatgtcaaaaacgatgcagctgctttcctacaggttaacttatcttgcagatttaaaaatcagttgtttttaaaacttggtttgtactgccatctagtgatacatttcattgacagtttcaacatgctaaatttatatagatccacagggttatccttaagggcaatgtagtgccacatctat

SEQ ID NO: 34771 - DNA, 612 bp, Homo Sapiens
gagatggcgttccactgctcttgccccagctggagtgcaaatggtgcgatctccgctcgctgcagcttctggctcctgggttcaatctgcttagcttttaaatggtagcatacattaatatgggtatacaagggtacagtaaacaaacacttaagttaggattaagagaaaccacgttcttggcttacggttatttccctgagaaggccaaccggttgtccttcatttctttgtcatattatttttgtagcgttaagattaaatggtcccaccctgaaagccaccatgatgagaacaaaagccattgggtttccagaattgagacaatatcattgcagaaatgtttgggtcacatgtcagccatggccctcagtgtagctattgctggtttggagccttgggtgcaagggatcagaaaggcaggtcccactggcccagggctccaccgggagcctttgatggaatcaggccagacccctactgttgacaggatttggtggtttgttttatgttttccgaatttggtagttacctgtctcctgtctttccccccaaacctctccactccttagcttttggctttcttctgcacagctctttttcaaaggaagg

SEQ ID NO: 34772 - DNA, 640 bp, Homo Sapiens
aaaagtgttaacaatttatcttaaaaagtcaatcaagtttaacatatttttatttctccagtaaaagtaacttcacaacctactaaaaataaaaatttaactgcattcagtttctgttcatttttctattaaagaaagcacaagataaaggatagctgtgttcaagtaaatgtgtaattatgacacagacagaatcaagtacgtacataaaatgttaaaacatgaaaatgtatagttcttttaccatttcctttctgaactcataaaatataatcagaaaaattaaaagaaacatgttttattattgtaaacttatattttatttaattaataatgttttggtgtgttagtaatttctgtaaagtagcactccttaaataagttcctaaaaataatattggagccttgaacatttaatctcagctaaaaaaattattctaaaactgttatgataaaaaaggttacaaaatttctctttattctagtcctgaattccttctccagaattttaatacaaaacgaattttcaggcacaaatagtcaccagataatgcataccgtaattagcagacttaaccaaacaataaacacccctacaaaagtgtcactattttatcactttgtgctgtactcttctccc

SEQ ID NO: 34773 - DNA, 484 bp, Homo Sapiens
aggttaatatcttattctagttataactggcatttctccagtgacaaataatatcaaacattgtttgaatgtccaatgtgcaaagcacgatgttggaaattatacagaggtgaataagacaaaaactcttgctctcaaagatgtcagtctttttctttgcaaggataacacatgtagagtaaaatgcataaaggggactaattttaaatgtacagcttaattaatttttatgtatgttaacacccatgtcaccaccatgtttaggacatttccagcacccctgaaatttccttcatgccccttcccagtctgtacctacacctctaaatctattttcaatcttaatggccttttaaataactgggcttctcacaaccatagtgaacagaaacagctgggttgtcaacgtctaacctaatacttcaggaaaactcatgatggtttccatgttaagagagacatggagcagggcactggcatggtg

SEQ ID NO: 34774 - DNA, 357 bp, Homo Sapiens
gaaaacaaacaaacaattaatgaatgaagtaataatgattcttatggtaaacccaattttaaagaaacacagcactgctagaaccatcttcacttcagaagaggaagatgtttatttcatgtctacatctatccccagggaaaaacaaacaggcaaataagctccttccatggaggagggtacttgttcccttagttgtaaagggaatgtggttactgccgccttgtcctagacaaattgatcactgcacacaaagaataaagggctgccctcaggacaacagacaaaggtaccaactccccaccaatcccttggttactcagtaaatatgaattcagttgcatatgagctcctaaa

SEQ ID NO: 34775 - DNA, 529 bp, Homo Sapiens
cacacatcccaccagcaacatcttggttccggaagtctggcccatctggtaaggctctccctcttcctgccacatccatgtcctgtccatccttgggccccacttcctccacggagcccttcctggtcacttcagcccacagcaaagtcccttctctggactctctagctctgacctgcacactgctatcacggcaccaatgactccacaccttgcaccaccagcagtcttcatgtgtgtatatcttagtttcttaaaagggaaggaccacctgctgtcatattttttggtccacataatgcctaccagtatgttttgcatataataatgtacagttgatgattaaaaaaataattctcctgatttggtgaaagagagaactgaggcctactgagattaagtaatttgcactgaaatcacaaagtgagaccttcaagggcagagatctagtacattattcactttgcaacactggagcccagcacacagtaagcacacaattctcttccgctgaatgaaggaacaaaag

SEQ ID NO: 34776 - DNA, 454 bp, Homo Sapiens
ccttactgtatttgtagccagaattgggaaagatgttaacagtgtttcacatagcttcatactccataagtcagtttatccaagtattacttcttggctagcattctgtctgttaccactttctgaatcctattgttccttcaagtactactgaatagcatactctggtatattggacattactgaaaaagaaggattccgtagatagacatttttaaaataggagcttctttttagtaattatctatggtaatgagagcttgtataggaatgcaaacttctagtgagtggaattttttttcccatacattctagctcattgagaaggaattttgttaattgagagaatatacttttgtaatagtttttattgcttctttctctcctaaaatttgaacactgctgcctcatgctgtaacaaaagagttgtcagatgaatcaatgatcaacgact

SEQ ID NO: 34777 - DNA, 392 bp, Homo Sapiens
gagtgtttattgggcagtgttgacagcagcttcagtctcagaaaaaggatgggaagttgctctcagactcggaaccctaaagcttggtcggaattaggtttctgccctgatcctgatgctctttctgcccggtggagagcacctttaaaagtagtcacctgagggtcaaggatgggtacaacagcttcccattttattctaggagatgtgtctggagataaaatgagcatgtgatgtttggcagggctgcatgcctcgagggtcatagccattgtccctgatgttcaggacctggtaactgggggaagtaggacttaaggtacatgttttcctgtttcctctttgctgtgagttgtatgtgagttgatttgggtggtaaatgaaatcatatc

SEQ ID NO: 34778 - DNA, 416 bp, Homo Sapiens
caaatgtaaacactaattgctaattacaatgtcaaaaataactgggtcacaaacaaggatgaaagagtaggaagttcaaagctggtgtagtgcaaataagcctagactagggtgctgataaatttggatgatgtctgggtgacactgagcaaactgcacaaccccagttccattccatctttaaaatcttacgattccacagaggaagaaaaaggtgatctttattacacattcaacattcacaaaccctcctcgcacacatcacttgctaatcagggtgtgtgctgggcccagggaaaaaaggcttggcctcatagaagcggcaaagggctcctgggacatctgcagcctccctggccaacataaaagtgggggcagggagagatggagccgcaagttgagaagtgtcacaaagc

SEQ ID NO: 34779 - DNA, 419 bp, Homo Sapiens
catctgctgctttcctgtgctccatgtctgtcagttcattgctgctgcctaaagagactaagaggtaaagcagttcttaagacaggtttggacactctcttttgggaaacaggatcgcttgtgtttatgctttgttagagtattcttccactgtatttctttttatttcataagttttaaaatagatttaaaggctataggattattaagtcaagtaacatacattgaaaataagtttcaaaaaagatcttgtatgtgtgtgtcttaagggcttggtacataatttaaaattacatgtttgtaaattcacctgctcttttataaataacccataatttttaaagtgtacttagtaacaaaattcttcatttactttgtgtgattatatttctacataggtgtcgaattagaaagttact

SEQ ID NO: 34780 - DNA, 556 bp, Homo Sapiens
agcgacatttgctaagttcttggaggggtcaaaaggggaagtaatgagaaatcaaagatggtccctacatcaaggataaactatctttttttagtcactcaaagtcataaccctttggaaacaaaagccaacaagtacccccagattttgaccacagatgaatcagtgctacaaggactggttagagggttgaatgaatctgtatactcagcacttaacacagcactctgggtaaaagaaaaaagatcctcaaagatattagttggttacatcaagaaaggacaaacttaggttaatctataacttcatctcagaggaacaggaactttggagataaacagggctctcgacattggcaagttgcaccatccctggtttctccatctgtaaattgattaaaacactgcctatctgataagattaaataagttagaagcattcagttaaatgtcaactgaaactattgtgcatgtaaatggtgcttgatgctttttctttctagattcaatgattattgtcatgttacctccatagggcctccataagaatcagttgc

SEQ ID NO: 34781 - DNA, 580 bp, Homo Sapiens
taattgaataacttcagacggagttgaaggcctggcctcaaaattgactcaaggtcctgtctgtttgacatagttaagaaaaatgtagaatgttgtgctcattctggttatctgaagctctgcacctgggttgggattggggctgtttctctgggtcaagggacccgcatgctgctgaggaaagactgggatgtcccatcttccaggcaagagtggcttgtcccatttctcactgatgtgacttcaaacagcaaacttgtcatggcctttgattttagcagccaaggtttccccgttctatgtccttaatgttaatgaacagagccacgttcttatgtgtccacagatgaaaagcaggtcagacaataagcaggtggttccatcaggctatcagtatggggtatcaggctattattattccctctagacttctatttcttcttatgtttgtagagaagaagcagatacagctaggagggctgaggagaatgcgggtgtgggggcaggctggcatgacatgaatttgccaacttgtctgtcatgtcccagagagattctttaatcttcccctttattgtac

SEQ ID NO: 34782 - DNA, 384 bp, Homo Sapiens
aggttctgggattataggtgtgagccacctgacattacacctgagagcaagaactatttaaggtcagaatttaaaatatcaagaagtcagggcaacatcactatttctggaggagggacaagcaggttgtcaagcttgctttccttgttcagcagtgatgcttgtggacttacagatccagcatgccatgggtccagattgtcactgctctttgagttacatagaaaacttctgagacgcagtaaatactatatttgagttgagggagtaaggattctcatcataatagagttacaaatgttcccatcaccttccaaaagggaggtcccagggtgtgtgcaacttggagggagtcactcggaaacaatggggttgagtgtaatt

SEQ ID NO: 34783 - DNA, 369 bp, Homo Sapiens
agcgacatttgcatatcctagctataacatttatctttttaggtttaaaagttgtcttttacatttaggtctttaatccactgaaaattttatgttggcgtagggcagggatacaaggtacaatttcatttttctcatgtggatattcacttgtctctccattctcctttcgccatttatctgcaatgtcttctgttttatattgcatttccaaacatgtgtgactacgattctaagccctttagtctgtttcactggttagtctattccacaccaatgccacactaaattttacttgccgtagtactgatattgggtagagcaggtcctcaaatctatcatctattctttccttctttattattatta

SEQ ID NO: 34784 - DNA, 527 bp, Homo Sapiens
cagggacatttgctggagtcccagctgacctgtgactggctcagcatggttttaaaataacaacaaaagtgtaaaactgtgctcgcatttcgagggccaaagagctacagtatctatgcccccaagggacacagaagcttttttaaaaattgaggtaaaatctataacgcatggagtgcatgggcttgaagtatatgaggttctggtaaatgtgcaaatccatgtgaccaccaccccagtgaagacacatttctatcaggccaaaaagtccccttccaattcttaagcaatcattccctccagcccaaccttggcaaccaatgtttggattttgacaagagagattagttgggctaatcctggaattttgtgtaaggggaacatcaagtatgtctcctttggtgtctggcttctggggctcaacatattttcttaaagattaagccaccgttattgtgtgcgagtagatcattctgtttttatagctcagaagtagtctgaatttgtatgaatatgccatagtctgt

SEQ ID NO: 34785 - DNA, 495 bp, Homo Sapiens
aggcggacaatttgctacaagatccgtattcgcacccaccaagctccaccttgccaacatcattgtctgcaatctttgtaaacgtccgatgaaaatgagtgatgaaaccgttcctgtacctggtggaggcctatgagcgagttgaggaaaacaagcaggtaagcatcctagtgaactgttagaaaaaactatgcgagtatttaacacagactaagactaggcacgggatatgttagaagcagttgatagtacttctgatattagggactatgcttaatcagataggatcatggccaatggagagcagacagaaaaagcctcagattcatcctttacttcgtgtatggcacattccctttaagcttcaacctcagaacccacaaatgatcctcaggctagtttatctccaaggtctgaaagcagcctcaggtatttggcaatggggagttctgtgatcaatgcttggcctatctccataatagggctcttcaatag

SEQ ID NO: 34786 - DNA, 453 bp, Homo Sapiens
cagccaatcaggacatcatttagatctaactagacctctaataaagtcagtgtgaggagtaaggaaaagagaggaatcaagaattgagcccacagtttgacttgaacagcagctgggtggatatattgccactcacactgaggcagagaagatgaggagataaactaacagaggtcaagaagatgaagagttgtttcaaacatggtacagttgagattcctagcattattctagtcagacgtgtctgtcaagtaggccattggatatcgggattgggatttgaggggaatccatagatggaaatataagttcaagaggcatcagcatggataccctatttggatctggatgaaattacctaaaggagaaaatgcaggaggacgtgatgctgggtgattttagaggagaaaccatgaaggattccaaggagcagcagttggtcaggtggggtac

SEQ ID NO: 34787 - DNA, 514 bp, Homo Sapiens
agcggacattgcatattactcttgtccaccctttcagcttaagtaaatagtgactcctgatgtgctcaaggtgagtctctgaagacagcagatacttagttggggacttgtatccattctgccattatatgtattttaagaggagcatttaggccatttacattcaatgttggtattgagatgtgaggtactgttttattcatcgtgctatttgttgcctgaatacctttttgcttccattgtgtaactgttgtgtaggtcatcagatttacgctttgagaaggttctatttgggtgtatttcaaggttttgcttcaacatttagaactccctttagcatttcttgtagtgctggtgtggtgatggtgaatcctctcagcattagtttgtctgagaaagactttatctttccatttatgaaggtccctttggctccatatgaaattcttggctggcaattattttgtctgtagaggctaaagataggatccaaatcccttcggtgttgtagggg

SEQ ID NO: 34788 - DNA, 445 bp, Homo Sapiens
gacatctgcaatatttataaagaagacaggtctgggctgggggtagaggaggggcaggtggaaaaggggatcaactctctccttccttctttccttaaatttatgaaataagtgcatggccaaaacacttgatgttagcccccaggatagttcaggacctagaaaatttgggaggtgccaagatgaacatggcaagcctatctactcagtgattttcagacttctgaggaagtttttcaacatacatagaaaagaagtgcacgtgatttacccctctactattgtggcagcaggagcttgaaaaggattcgtagcacaagccaggttcatggtgaggtggcataactagacatccaaacaaggatctgctcagagtcaaagggagtgccagtaataactgtggagggaaaacaggcattaaccaggacacatggccttcctacca

SEQ ID NO: 34789 - DNA, 666 bp, Homo Sapiens
actctaaagcttataactctgagttatagggaggtaagaacatattttccccataaaaataagttctatatcatggttatgatccaaggtgaagctcacagaaacctactttcttgggttccttcagataaacattaaaagcctgttatttgtgaggcactatgccaaccattaggtatataaaaccaaataggactcagtctctgcccacaggagcttaagagtctagtggaggaaactaaattaacatttgcaagaaatgctgtgtttcctaaaatatctacaaggtgttttggggagcaaagaaaacgggcaccttaatcagactacgaaagggagagtcacagaatgctttcccttaagaggtcatatttgagctgaatttgaaggctgatgaggaattacctacactaaaaaggaaatcacaggtaaaaaggtcgaacaaaccgtatttagtgatttgctgaatcatggaggtgggtgacacaaaggaccctagaatgactcaggtgtctggtttggataaacaatccaacgtaggcaccattcacaaagaaagggatgctaggaggtacgagggccaagatgacaaggtcatgcgcagaccggaaaggttaaaacttcggctcacatcttgtttggcacagcagtagcttttacttagcg

SEQ ID NO: 34790 - DNA, 572 bp, Homo Sapiens
atttgtccttgattgatccttccacattcgaatgggttcaactttccaacaaaggtagatctttatctctactgaggacctggctcctgagcttctgactcacatagtaactgtttgctagtcagatatacctatatccctcacagccatttcaaagtcaagtgaacaaaaccaaactcatcatcatttcatggctcaccactgcaacaaaaaataaataactctaactctgtctccattattttattttagtttatggtatcaccatccatttagatacccatactaaatatttggtggttatcctgtttttacttcccacattcaactttccatcaaggtcagatagttttagccccataatatttatctagttcttttctcctccagccctttgacaacgggcctagttcatattgtcattatttttctttcagatgtctacagctagcaccataaaatcaacaagcagccaacctaaaatataaatctgataccactaccctcctgcttttatttttcaatggcccctatagtctggaggataaaacccaactatcttaatgttgttt

SEQ ID NO: 34791 - DNA, 559 bp, Homo Sapiens
cttgctaacatgaatgatgctgcagtggccgtgtgtgtagctgcatcatttcacacatgtacgtttatctgtaaggacatttcagttaaaataatttcagtcttagtggaaatgtttcaaaacaatacaaggaattcccatatacccttcatccatattcccccaaatgttaacattttactacatttgatttcgctgtttagctatttttttcctgaattttctgagagtgacttgtagatataatgcccttttaactgtaaatattttttagtgtgtatttcctaaaatcaaggacatccttgtacataatcatagtaaagtcatcaatatcaggaaattaaaattgacccagtactattgtccactgtaccgaccttattgaaattttatcattggtgtcagtaacatacttgataacagatgaaaaggattttgtcaacagttacactttcctttggtaaaaaggaataagttttgataaacagttatactttcatgtagtcatgtagatttacccttctaggagcaattattggagcacctgtattctcacagc

SEQ ID NO: 34792 - DNA, 571 bp, Homo Sapiens
accaagcgaatttgcagtctgcagtcagagcggctgtttgtccctgacttttcgatagggaatctctccatgtgaggacaggcagtgccgtgtcacagctatatgaggacaaaactaataagatttaaatcgttcccatggaaaccttagccaggtctcccctgtgtgctatcctggggggccttttgtgatggggatgcttaatagcatcccccactgttgagccaggagggtggacaggaggtggtgcatgacaaatcacgtgcttgaagagaccgagacccagctttgggatgtctgctccttgctgatgtcagaagctcctactgcacaggagaggtggggacagcagtgagacggaagggtccctagcaggcagcgctgcccttctggatctagcctcagagctatatcgggaggagagcaaagagcgggtgaggatttctcttcccgcgcagcgtgttgtttagtgcacacagcatttgcaccctcccgcagggttgggcagacatgggcctcctatctcatcagggacaaagctgggctcaccccaagagtactcacagagggg

SEQ ID NO: 34793 - DNA, 561 bp, Homo Sapiens
tctggcttttgggataagactaatgtccatgtcaaaatgattcttgataaaagcatcctagatgttaaatatttattttaagctaaatgttctacttctgagaggttaaaaaacaaatgcctttccatgcagagccttttgccagtcaatgtttgagtttctttaggcttttttatttggctctgcagcagctagctaaccaactgcattcctgagatgagctgacaaggaggcagaaatgaagaaataaacaaaaagccatgttaatttcaagcttcagtaggaatacaaagagaaatattaacatttgctgaatgacaaataatgaaatggctggaaaattttaatgcttctagcatgcttttataagctctcctggaattttccccccatcaggtattgcacatttataaccagcagtgcaccatgtaaaggcagttcgataggttgtttaatttaaagattggtatttctgagcatatagtgttcctaatgcaattcctaagcccatttacacttctctgtctacccgaagtacccacatcttcttagcataatctt

SEQ ID NO: 34794 - DNA, 498 bp, Homo Sapiens
acatttgcacagaggaatgcatgaccagctggagctataaaaaggcactctgactgccgtgtagaggctcacgccatagagggtccaggtagacagaggaggccaattaggaagtcctgtagtaatccagacggagatgacggtggctggcactggagtggagtggtggaaggtggtgagaagcagttgtattctagataaattttgaagatagaaactacaggatttgctgacagatacgatgacctcaaggtttctgggtctgaacacctggaaagatagagttgtcatttactgataatggggaaagctacattggaagcagattgggagagaaatcagttcagttttgtacatattaagtctggcaaacatcccactcatgctctcagaatagcaattgactgcatgagtctggagtttaggggaagttcgggctgtaaataaagacttggacggataggcaaatgtccgctcagcgaacattgcgagggtgtg

SEQ ID NO: 34795 - DNA, 436 bp, Homo Sapiens
ccaaatgttcacagtgacgagtttgagactccctgttctagtccttatcttccctattctttcagtggaccacagtttgatgatatctgcagtcccaagtgtaaatctaaaatcatagcatgtgagtctattccagttgaaatagtaataactttcaaaacaaaggtcttaaatccatttgatctttctttcatcattgaaaatcttccaagtgctttgagttttccttttactttctgtagcctttgcccctgaatgaggccccttctcgcttttcatcttcagccaactgaaaaaacattggtgtctgttaagtgcactttgtacactgtctgtcatgggaagcgggctttgccgctgaaaggagggtgttcctttcagtttctcattccttccgggctcactctctaggatgaatcaactggagaaattacgt

SEQ ID NO: 34796 - DNA, 509 bp, Homo Sapiens
cgcctaagctccagctgcgtgtttatgagtcagttccacagattttctcccttcaagctgggatcagttcagttccccatccctctgctcctccacccccaactccactgcatgatgaatggtctattccaggcaagagcctttctccgaggtgggcagcttgtgtacatgtggggcagggggcactgacatgatgaggggccactgttcgcacacaggcaccaggtcatcgttcccagctgtggctcaacccagtagtctgcgcatcccaggagcactgcagccccctcacccctatccaaccctctttcagccatcagagcttctgagcagaagggcctggcccttctttagcaggtaccatgaaaggctgaatagccttaggcctcttggcttagaaagagtccttacattcaggtatctttgcatgaattataatggtacatgctaaccttactatcatgtgggcctacaagataggtggcccctacctcccattctgcactaaa

SEQ ID NO: 34797 - DNA, 492 bp, Homo Sapiens
gcgacaaggccagagtgtgcacctggccaaaaacacccagctaacaagtgctgaagatcagagtgggactgacttctcatctctttctacatcatttcctaggtatgggcttaccttactctactgagacctcttcattttgcttctcttttctctgagttctgagagtcaggtgtaatcccccacaaaagacacaattattatttccttctttcaactcagcaacgacctttgctcttacttctggtaaggggagtaagaaacgggagttcctggatacacctgcgtgcgagtggggcccacctggggaggagggtatggctgcccaatgtaccgtggctcctaacttcagtccccttgagacagctgtccatctctaattcagggttgtaaggaccagaccactctatctctagggactctgtctccgatgtgcaaaaatcttacaactctctgcctctttggatgcaccgcgatagactgagctgtgac

SEQ ID NO: 34798 - DNA, 504 bp, Homo Sapiens
gattacaggtgtgaccatcacacccagccaggagtttattaagtattaacttacacaatcacaatgtcccgcaataggctgcctgcaagcttaaggagcaggaaagtcagttcaagtctcaaaactgaagaacttggagtctgatgttccagggcaggaagcatccagcacaggagaaagatgtaggctggcaggataggccagtcttgccttttcatgtttttctgcctgctttatattcatgggcagtggattatattgtgcccaccagatttagggtgggtctgctttccccagcccattgactcaaatgttaatctcctttggcaacaccctcacagacacgcccaggatcaatactttcatccttcaatccaatcaaatttgtgagaaacaaattcacccatctaaacccaaacaatgaactcagagacccagagaacagcgaaagtgagacttttaatgacggtcttgcaagatcgggtgtctggcatgcaggcacac

SEQ ID NO: 34799 - DNA, 436 bp, Homo Sapiens
ctcgggtacagcaatgaccactgggcagtgcacgcccaggagatctgaccaggaagatgtgcacgggggctttataaactggcgtgatgctcatggcctacaggttggggattggaagcttgtggcctggaaagtcagattggctgttggctaaaacaaaaatatcaatatttcccatatagcttaaataagacctacagtatcaccacataatgctcataaagtccaggatgcaatccaaaattactcagcatacaaacaaccacgaaaatgtcaacttgcctggaaaactcaatcaaccactgtcaacacttcacagatgttgggattatctgatgaagactttaaacaggtatttttaagaattgcaaatgcttgcaataaatgttcaaatagaaagtctcagcgaagaaactgatgataaagaagaattcac

SEQ ID NO: 34800 - DNA, 452 bp, Homo Sapiens
gcagcttcccaaggtcactaggtaagtaagtagcagagccacccaggaagtactcaacagaaagattgttggtttgtcttccctagttggcctagggatgataaacatggcatgattagttatgaagctgcggtagcttgagagttagagctctttgcgttctctgtcatttcttcccatcccaggttgtctgtttggacagtgtagcccctggctacgtggaggtgtgtcatggagttagttggtgcatcctgctcatactactggtcattggtagaactggagggtaggggcactacttgaattaaaaaaagatttcttttggcaggtcagctttctcaaatacagaagcaatgactctgttttccttacattcacttgtatttgcttaatgggctttaaaggtgtgaatgaatccaagtcttattaattcgggggcctttaattcttga

SEQ ID NO: 34801 - DNA, 459 bp, Homo Sapiens
gagaaataaaaaatctgggacaatgagcccaagtaatttaagacattcacagttgggctgtgggttgctcttgccaatgtgcagatgcaggctgcatatgttgcagggtcctctcattcattcctcaaacatttatcaagcatcagtgatatgcccaaacacttagaaatagtgctaagccagatgggttctatgggaaaggaaactcaatagtaatgataattatgtgccaggtattttctacatgctttccctgtgttatctcatatcatcccaacacagctataaagaaagtgctatttttaataaacttaattcttagagcaaagtctaaacctctgttttaagttcacagcaacattgagcagaaggtacagagatttcccatatatcctcagcccccacacaggcattgcctctctcattatcaacatccctcactagagtggtacattcatt

SEQ ID NO: 34802 - DNA, 480 bp, Homo Sapiens
ggtaccataagatatgagagctggatgctggaaagaaaaaccactgaagcttctggaggatgtgtggggatggtgcaacaatttggaaatctcaaagtccctaagcatatggtgcttttattcccatggtatattttaattgatgtacttgggggctgcatgggaagttagggagctttgaaaagtcagacagaaatctccgatagtacagaattatttcagagacaaagagctgcttgaggaagagagtctgcttcaaatacatggccagtctcttcatcaagacaccaaatttggaaatggtatagggcagaaggctgaagaacagaataaatctcccatagtttaggaagtgaaggagaaagaggcccaactaggctctatccagctcccgattctgggcatttgaaatcaaaggtagggttgagtctaattaaaaatgcaatttaggggcaggcacagtggctcttgcctgtaatc

SEQ ID NO: 34803 - DNA, 433 bp, Homo Sapiens
ctggatgcctgggctggcaatcggcatgttggagtttgagtcccagtctgccactccagctctgtgaccaagaggaagtgaagtcatgtaccctttctaagtctctagcccctcttctgaaagacgaagatgccaccaccaaccatgttagtggttgtgaatgccaagaaagtccatgtgaagcacatagcatagtgtctgccatgcgttaagtgttccaaaaatggaagctatgactatttcacagagtacacttcccatcacttttcagttcattttggccttctccctcaaaagcactccagtgttctgatccagctgataaaacaccaaacattcacatagtgctttaaaagtgacccactgtttttacagactgcattacatatgaccctaacaaccactgcaatatagaaattcgcatctccattct

SEQ ID NO: 34804 - DNA, 441 bp, Homo Sapiens
gttcacagagaccccctttcatttccatttgatttttttcctttcatccagctccatcttatacatgcatgaaacaagtcttattgataaggctttctcagtttatcacagccttttttacatttcctttcccccatagccattatcttggatccagatattggagaacctctatattgcccagacattttctttttcctttctcctccacaaattctttttataaaagctagttatctttaaaaatgcacatgtaactctctctctctcagcttccagtgatttgtaattacccttttgagaaagtcgagcgctctcagcatggcttagaatatcttcccagtttgaccgctgccttccccagcctcatctcccatgtctctctttctttgtgctccagttacattcctatgtcagtttctcagaaactccattctcttt

SEQ ID NO: 34805 - DNA, 375 bp, Homo Sapiens
cggaatccaaaaaggcttacattgttgtgagacagagatgccacttagacttaaccattcatagtatggaccatttcaagaggggtcaccatacttttcttcagttccatgttaactgaacaatctttttcttgctaatctgaacaccctgtgcaatagagtctgactccattttttgatgtttgactgcagacatcttttcagcctaacccttccatcttctctttctgtccaacactggggcaagctgacaaaaatcctcaggtgctcctcttctgtaaccagcagtaagttcgaatcatacactgccaccctcaccccaaccctgtcccttaaccacattaaaacccaaagccagtctcctttaattttatc

SEQ ID NO: 34806 - DNA, 406 bp, Homo Sapiens
aaatgtggaaatcttaagagggactcagaccaccttaggaatacaaagtgagaagaccagcaaatgaattctgaggaattcaaacatttaataggcaggtagatgagggagaatgaacattaggtattgagaaagaatgatcaagacaaagggcttagtatagtaaacgtatcccgaaaggggaaacaatcgtcctaaagtaggaaatgtgccatgaacaagggcagtaggacgaagaccaaaaatgtgccacttacaattaaatcatcagacctcaatgcaagtttcttggtgattgagggtaacggagtgggtaaaagtccaactgtagtgatattaaaagaagggtggatgttgagatggtgatggtgattttctaagatagatgataatttagctttcatga

SEQ ID NO: 34807 - DNA, 433 bp, Homo Sapiens
gggcagtgactgtgcaggaaggctttgttgatcagtcacatcttcaggcaaataggataactcacaatggagaaacactctatgaacagaagcaatgtgggagagcttttacttactccacaagccatgctgtgtctgttaaaatgcatactgcagaaaaaccctacgaatgtaaggaatgtggaaaattctttagatattcttcatatcttaatagtcacatgcgaacccatactggggagaaaccctatgaatgtaaggaatgtgggaaatgcttcactgtttcttcacacctaagttgaacatgtaaagaattcatactaggagagaaacccttatcaatggttaggaattgtggaaagagcctttcgctggggggctccagggctttactaaaccatgtacgaattacacactggccttcaaaacaatg

SEQ ID NO: 34808 - DNA, 655 bp, Homo Sapiens
agcctggcccatgtttgaaggagtggcatcataatccttcctcttctatatttacttttttcctaaaaattcaatttcttaataaaactaaaaatgcaatcatgacactgtttgaatattataaattagatggagtggaggataaacaaagttggcacagggaaggcaagaggcatttactgaatgtctatcatatgccctctcaatatttagaatcccctcatgagatactggcagcccattttacacagactaaacagagacttagaaaggataaatcttttacccaaggccatgcagctagtctatgatggagccaggattccagccctgacatgcctcattccagagctcttgttcttttctgtatactgcactacctacatctcaacagtcgtgagttcaacattaatcaggtctgaactaatgagatttactataatgccccggagatgactgtaccctacagctggagaatgcatagggaggggcacttccgttacgtatacctgaactatgtttgcgattcacacaaaataaagaattgaccaggaccaatcccagcctatgagaggcaaagttactgctggccgcttttacccaacctagagcgcctctgatcacaatccacactgccttcaacatggggatcctc

SEQ ID NO: 34809 - DNA, 389 bp, Homo Sapiens
aaaaagtaaatgagaaagctctctgccctccactgcctaaatgcaggatatagatttagaaggataaaaggggtctgctccctctctcgaccagggaaaagttaaccactgaagacaactttagactcttatgggcctggagctggaaccagaggaatggacatgaaggcgctttactaactctatttatctgccagttacttaccattctacaagttctccccttagacactcaaagttcttttcctttgtcctgtcgcttccctaaaacttggcttttctttgttgaagatgctatacaagctggaattcaaagctaccactttgagaactactcaattcctgcgtgtctcccaggcagatgtgaaatacacatgttaataaacttc

SEQ ID NO: 34810 - DNA, 567 bp, Homo Sapiens
aggcaggaagaacatacacaagggaagaagttagatacaaaagaacacatacattcatcattcctttctcaatgctttccaaagtcttctcgccaactggccctaaacaacttgattatccttgtcacactgcactcaaatattctctctaaacactttcaacttgcagcacatgttaacagttaatatctctggatgatcttctgagtaaagcttgagaaaaatgtgcttacaatgacaagtatgagggaaaaaaatgactggattgctgattaatactgagaagagctcctctgagcatagaaccgtgcatatttaagagagctattcgcaaatttcctccagactactctggtaaagctgattctagaattcagtactatttggggaataccatgttaacagaaaaagcaatacattcaaggcatggaaacctggatctgaattttggttctgcttaatccttttagacattcaatttctccaaatataaagcagatactcttaggtagaatctgtatgaagattcaaggaaaacacagtagagcattgttagggaccagaaca

SEQ ID NO: 34811 - DNA, 480 bp, Homo Sapiens
gtggacccatgtttgaaggcagtgcctctctacagttaacctgagtatgtattaatcctgagtgtgacaggtaattaaaacacattatttgtctaaccacacttcctgggaggaggaaacagtagcagagccaaacagatgaagacccaggacctaggcacaatacttcaccatgcgcaacagcaaagtgcgtgcaccacatcctagaaaatgacaggatcaaaacctgaaaggtcaaatctctcgccaagtcaacgggggtaaggatgaggacaaaatggtagctttctcctcaccctctgctctgaaaagggcaggggcttctcaattttattcatcacagtcatgggaaagccacctggttgaatggcacaggagggtataaccagactcctggacttgtctgtgagcctcctaataatgcccaaagagaaaggatagcgcttctcaattttcacctctcttcctcatccacacttc

SEQ ID NO: 34812 - DNA, 612 bp, Homo Sapiens
tacccattgtttgaaggagtggagttggtcagaggagacacctaagtgtgagactcggaaacagcagaagagtggaatggggtctgatcacagggtcaccaggatgcccaggggcatcaccagacacaggactaggatgaggaagtctttgaattcaaacaggaagcttgtctcaggtgatcaataatccatttcttgtagaaactaacttctgtgtaaactccagggtatcctttgcgaccgcagccaatgccccagctcacaatccccacctggacccatgtgccatttaattcacagaccaggggccccccagaatctccctggaaaaagaaagacagtcactgtaggaaagaaataggatccacatcagagcaggctaattgcactgcaatgcgctacagagctaagcactaagggggcttccccaggaacccctaagaccctcctagccttaggtatctgtcaatatgagatctgagaattgacaatttccaataaaccaaaatcatgtacctactaaaaaggcgtgttccaaaaaacggaatatacctcatgaaattgtgcctactctgagacaataatgagtcaagtgctaacctgagtacactg

SEQ ID NO: 34813 - DNA, 448 bp, Homo Sapiens
gtgaaggcaggggataaatactgccagcctgcttcaaggctgctctggtttcaaccctccccagcaacctaaggaaattcctctcactgcatccctcatcaaaacattcatttgatatgtgaaaataatgtcttccatttgtagaaaatgaagttgtgctccccctcctttaggctagagtatctacacatgttatctggaattctgctgcacaagggatggatctcttcttcccatttattaattttttcaaccatttacttagatcagtacggactcatggatacttatgaggtataagtcaggtataccttgagttatatccagtactatgtcattgactttgttcctgaaatatttccagctttggtcactgagagctctttcagttggctcatgcgtccttttgacatccacccagcaggttttttttgtttgcttgtttgag

SEQ ID NO: 34814 - DNA, 466 bp, Homo Sapiens
gaaggcagtgactatgtcatatttatatttgtaccccaagtgcagtgcctgaaatgtgttagacattagatgctaaatgcatgatgctaaatgcatgttggatgattaaacaagtatagagcatctgcaatataccaggcatcatgttaaggcccggggatggtccctgggagttcactcacagtcttgtagaaatgagtaaatgaatatattggtaagtttgctgcattcaagtagactgaataattgttactaacaaaacaaggaatggcaacaattaggtcactacagtaattgctcaaagcacaattaacagactggagcattcaattatgtggcaaccatatggttatgcatttcaccatgttgacatcatactgtaaaattcacacattatatgacaagaaattacgccaggaaagtacaggctaccacaaagtaaagtgaaaaacacattactgaaatt

SEQ ID NO: 34815 - DNA, 450 bp, Homo Sapiens
accattgtttgaggcagtggtcatgaccctgctcatgatgaaacggatctggtcaaaacaggatgcactaaagaaaccagctgaaagcagtgaaactgagatggcaatgaacatcaattctagttgccctcattgctcattatatgctcattataatgtattagcatgctaaaagacactcccaccagcaccatggccgtttacaaatgctatggcaatgcccagaagctacctcatgtagtttaaaagagaaggaaccctggttctgggaactctccaacctttttctagaaagttcatgaaataacgacctcttattttagcaccataatttaggagtagctataaatatagctagccaacaatccacgggtgctactttgcctgtggagtagcccctgctctgtctgtggagcagccatttcctgttctcttgctctcataaacttg

SEQ ID NO: 34816 - DNA, 365 bp, Homo Sapiens
agtggagtcacctgctgtccctctcagtgactgctgtctgctggtcttccgcttgcacctcgtcatccattgaggacttgtgttcctggctgactgcgttctccatccttcttgccgtcttgtagagcagcaacccctctacattcccccagcaggtttgcaacagtgatttcatacaagacgttggtgtcgtcacccacgtggacaggccagcctactccgcatctctctgggcacttagactgctgcagctccagtgagcttttccaacatgcctctcaaccaacaatccctggctgcggtcacacctgggaccctccatcacccagaaagggaacttcagacagctctctggtgaactcttt

SEQ ID NO: 34817 - DNA, 467 bp, Homo Sapiens
cccatgttgaaggcaggtgtccaggagtggatatattttatatggtactaggagatagtagtgctcctgagtctgataattgtttattgatattgtgcctgctgttttctgtttttcctgtgcacccctcttaagggtacagtggaccctctcagtctatctcccacattcccacgctgcagtctctgctgtgtcctaggttctttcttcacatctttattccaaatgattaattctcaccagttatttctaatctgctgttaaattgccaacagagacttttatttcaacagtcatgatttttacttctagatgctttattattttttttaacgaagattcctggtaaattgtgatagtcctttgttgcctgctcataaatccagcttttatttcttcgaacattgcgattatagtatctgaagtcattggaatgctttgttctcttggtctgccctcattcaggc

SEQ ID NO: 34818 - DNA, 360 bp, Homo Sapiens
catgatgtttagtgagaactatacagtggtagaaaagatagaactacttgagataatgcattattcttagcattttataggcattataacatagaatcctccatatcatttcactttctttttacaggcaacttttttgaaggacttatctctactttgctaccttttcatctttattttctcatctcccattgttactccttataggatagcactccactctggtttctcagttgtccaaacaggtgccaactaaagttgctattgagacttaaaaatgctaaaatctaatgggtctttttgtccccccatcttcatcttgcttttcctcttaatatcattcagcatttgctgatcatg

SEQ ID NO: 34819 - DNA, 537 bp, Homo Sapiens
cccatgtgtgaaggcagtgaatgagccaggagcatcaaagtatatttagcaatggggaaaaaagtagaaacttggaatctgacaataggaactcattacaatgcaaccaggaagtaagagctccctctgcaggctcactgttgcagcatcaccaagagtgggggagttggggagaccctcaactagcaatgacctccactccctgcctgctcccacctcggcctaaggagagctgatctcaggctgaggagaccaagtgccatcagaagcactggttgcttctgacctcaataccatgcatggattttattctaagggccaccaagagccactgttgagtgactaccacatctgtgtttcagaagctcacttaaccagcagtctggcaaaaacgtaaataatatccagtgtcagtgagggtgtggaaaacagtcactcttgttcacgccaagggggagtactacaggtacactctttttggagagcaattaacccagcattaaccctagtggcaattccacttctaggaacctgccc

SEQ ID NO: 34820 - DNA, 595 bp, Homo Sapiens
ttttcccatttatggaatagcataaagcctggtgtccagcagaggggtgcaaaaagggaggagaattgggaagccagagtgttttggcaaagggctgacaatgtgcctcatggagaggattcctatgccactgggtagggccgttgacctttaaatgccatgtgctctccagaccaagggcagagagagacctcactatggggagaggaggggaagacccactgttcctagaaaatcacaaaaatggcattgccttgagctctacctcagttactacggtatttcctgatcttgcctaacaggattacttccttgaactgtaaaaattcccactgcttcagaatgttctccccagcaagcctgtcccccaagtcttgtaaggctgccagccacactaatcatttttaaatagctgaagggggcccagtatttgatttgattttaaaatggaggccaagaaccttgaaatgaaaggacatggttgaggtccactcctgtcctcactgttctgatgatgataccttgatcccacctggggccccaaaatgaagcagtgtcgttcatctgggggtaagaccaatgttcattgtctcat

SEQ ID NO: 34821 - DNA, 597 bp, Homo Sapiens
acgcgtggcgactgtggtttcattcagcattttttgatgacgaatatggctgaacactgctagaagctttagttttttttaacctttcgcattgagatctacaattagcctataatttatttttgtaagtgatggcaagcaaggaccaaaattagttttctttttcttttcatacagataggcaattgacgtaggatcatttatcgaaagatccttctttccacattgctgtaaagtgccattttaatcataaattagtatctacatatatgggtctgattcagggctctattctgttccattatccattcatttattccacactgtatattcaatagtgtgaatcctacaactttgttcttccttaatattaccttgactattcttgccatttgcactgccatatgaattttagaatcaacttatataaacttctgtaaaagtttcaggtatctttcttagatttattaccagcatttgatatttttttgatgctattataaacagcatctaaacatttcattttctgattactgttatatagaaatataggttttgtgtaataacctcacattcagtaatcttactaaatttttg

SEQ ID NO: 34822 - DNA, 488 bp, Homo Sapiens
tggtccatgtttgaggcagtggaaattatccagacatggatctgaagtgggagataccctaatatatgtagtcaagtggaatgatgacagaaagggtcagatttggccattgaaaatcaaattaccgatgactttggagagagcaggatcaggaaagtgggtgcttgagatccattttggaggagttgcggaaagaatgaaatagggagaacgggaagccggcaagtataggtgacttgtgtagcccatcccctgatatcctctatattcgtttgctagagttactgtaacaaagtaccacaaactggcttaaatgacagaaattggttgtctcacaattctggaggttagaagttcctgatcaaggtgtcatgagagttgtgtgagaaccgtgaggaagaatctgttccatgcctctctcctggcttctggtggtggtttgccggcaatctttgtcattccttggcttatagaagaatcgccctgtt

SEQ ID NO: 34823 - DNA, 495 bp, Homo Sapiens
tctgaaggcagtgacaatggtgaggaagtgactgatttaagaaccatttgagtgaaactggcaggacatgaggggaaaagaggcaagaccacgagtcccctgaccttcatgaagcacctactgtgtgctggccgctctgctgggggtgcacccttgtgtgctggcctctctgctgggggtgaacctactgtgtgctggccgctctgttgggggcacgcccactgtgtgctggccgctctgctgcgggtgcacagggttgagagtcttccaggtcttcatggcagccagctccagcctctggttgcttgttccaagacctgtggctcccttagctgaaaggtgacagaggctggagccatgaaggcttttccagaagcctctggatctacatggcagctaccgtttcctcatcccagtgcccatggtggattttcataactgaccaggcacttcctcccactaagcttcagtgcggtctctgaattcttccctaca

SEQ ID NO: 34824 - DNA, 517 bp, Homo Sapiens
gaaggcagtgcatctgggagttgcagattgtctgccctagctctgcttacagtatctggaaagccaagtagtggagacaggacacaacctgccttagtcacaatgagaagtgctccagacaaatgaccggcagacagggatactgtgcacataccctgtccatccatctaaggagctgaaaaggggcttgggtttctccttctggcttggcctctttcagcctcagagtgcatatatacagtccagagagatcttttcatatctgaactgcaacccagagctagaattttctcccttggcattcctagagccaaggagaataggaaatagctatttccacctctggcatgggaagtacagtgattaggatcaatccagcttcctaggataactaagaagtctgggattaccttttgaagcatctaacatcaaaacgcactagtgagaaattactgagctctaatctaggagaggttaagaacctagagaggtaagcccagtgctcagaggtaaaggc

SEQ ID NO: 34825 - DNA, 354 bp, Homo Sapiens
ccatagctcgcaccattgtttgaggcagtgtggcgaaggagtgaggatatatgtcatccgtgaggacatccatgacaacagccactgcacaggccggtggtcaggagatgaggtctggacgggggacagccttgggcatccgtccaggaggggggctgggaactgaacctgggccctccagcctggacgagagagcaagatccatctctaaaaataaaataaaatgctccccaggtaatgataatgtcccaggcttgggccccaaaaggaatgtttttgttcctaagacagtctcaaaagtgggcactgtttcccctgctctgcctaacaaatggaatgttcaataaattattg

SEQ ID NO: 34826 - DNA, 391 bp, Homo Sapiens
aagtatttaacgaaaaagaaccccaggatctaacacgatcagagtcagataatcacaattgctaattaaaaagcacttatgtatttggtgattttctgaaattctggctcagtttcgttatgatatggagccatgtgggtccatgatgagtgagtccctgctgcattggtatatgattgacttttaccctcatgtgcttctaatttgggatgttcttcactgtgtgccctttgagtgtctcttgcctctggtttcttgtttgactaaaaaaccagttctttaagatgacagttccaatggtctttgctggagttcggataatctttcatgatttactactttattcacgtgtgttttcacctctgggccatggtttctagagcactacact

SEQ ID NO: 34827 - DNA, 434 bp, Homo Sapiens
cattgtttgaagggaggggcagaaagacaggcccagagagcagcaacagaaacagatcgtctctgctctgaacagaaggacttggcagcctggatggcaaaaggcaccacagtagcccaacagtagtcctgttggaaaatgcaaagcctgtatttacacgtacatcccatgaagacaatcttttccacttttcatgggctacaatgccattagcagtgtcatctttaggcaggaaggacaccgagaggcatatctatatcccctgtccatagattaaaaaatatgagctctaattaagctgttaagaattcagaagagtccagaaatagacccatgcttacatggtcaactgatttttgatagaggccaaggtagctctatggggaaaggataatttttgcaacagccatgctgaacaactggatatccatagg

SEQ ID NO: 34828 - DNA, 536 bp, Homo Sapiens
gaccaggcttcatgacaagctgtgacgagatacaggagccttccagcaagtgtgttcacttagagtgtggggcttctccagaaggtttataaggagaaactgcccctctgagcagtccattgaagggaggaaggagaagtaacttagtttcctaagttcttccatttcccgttgatcctagtttgcccacagggctgtgtcatctcgtcctttggtaactgctcaggaagccagatctcgtgctcagtggtgtggcattgcatctacttctagaaggatttctcaatactttataacttcctcatgtttctggtcatgtctgtgttcagctatatctctagaacggttggccaattcatagcatgaaatgatttcatgagtggtgacaaagaaagggtgcaatcagcccttggggagtgggttagtggaatcccagtcctgaggccattagtgggtggcagagtttaggagaaaaggtaagaagtttcagtccttgggccctgtagtaaggagacaaacgggtacacgaggttgtc

SEQ ID NO: 34829 - DNA, 357 bp, Homo Sapiens
gggtgaacaacggcatggctctgactaggcagcactgaagacacgtcatgtcaaggggtcaaaattctcgggggagcgtgagaggagacagtgagaaaatggggaggggctctgtgcacaggagactcaggacagtggggggaaaagtcacttctccacataagaggctcaaatcccaacgccaccctccgtcagacccctttggccccagctccgacccctccagggtttaccaagttgggctttcacagcatgtctgagcaaacacgcagcgaccttttacataattgcaacctcctccagagaggagagaggccacattctctcggccccacccccaggacttcaaacacactg

SEQ ID NO: 34830 - DNA, 395 bp, Homo Sapiens
ccattgtttgaaggagtgtgtttatggagagacaccccactggcgagatgtctctcaaggcgcttgccggatgatgagtatgctgactcagcctgtatgagctcctcagggctggaacccgactgcaaagcacagcaggtgctcagtaaagctgctgaatgaaaaaccagcagccctccacaatctcaaccttgctaatgtattcccaaaacaccgaacttaccttcctaagtgcaaaagcgccagactaccccttacctcacagaagaccttcctgaacctttctacccgcctcactcctgtgagcaacagctgtctgctgtgtacaacattccgtgatttactcaaaaagcaacttcagggaatcccttgggtttttgctccttttcttactc

SEQ ID NO: 34831 - DNA, 527 bp, Homo Sapiens
attttacatatacaaaagtatgagagagccagtagtgttcaagaaattataagcagctttctatcatttggtatataaaatgttatcagatactggtggtcaatgggattggacagtgatagacagtgggctaggtcacagcaggctttgtgtgctataccatggagattagattttatcctctttgcaaataggagccattgaaaactttagctcagaagaatgatgtaagatttgcttatcagaatgagtattgtgagaactgtataagtggtagggtagccatatgaggatggtgaaactttaagaacaaagactccattaatgattaggtactgttacaattgttgtagatgaaatatggatctattatagctggttctgttatgctttcctttgcttcctttacttcagccttggcagcctccttgatcttcctcatacacactaagcactctccctcctcaggtctttggatttactgttgcataggtctgtagtagtactgtttgcttacttgccttgct

SEQ ID NO: 34832 - DNA, 395 bp, Homo Sapiens
acacgatcagtcactgtaaccttgaactcctggtctgaagcgatcctcccacgtgtgcctctaaagtgtcgggattacaggcatgagctactgtgctcagcctcactctgttttctaccttttatttgttgcaaaagcaacatgtttattttaacaaatactggtcttcctcatcttactcccctgagatttcaatgttaaaagttgatttgtgtgtttccacgtaagtctttataacaagcttctgctgacactccttggcccagctttccataaacacatccatccctacctattaggttgaactgtacaaaattgccatttttataggtccccactattctttaataccaagcctcaaatttagccagacactaaatgtcctgttttatata

SEQ ID NO: 34833 - DNA, 653 bp, Homo Sapiens
taggaagactgtgcagctaattttttcaagcctcagtgaataaagacttcttttctggtatctgtggttaggtgagaagatgggggtaaatccagaaagcagagtgagtcaagcttggggacaaatctggggactggaatttcatgactttcactcaactccttaataatgaattgctgatagaaaggcagcattgtttggaagggacaggaacagacacaggaatagaactaagaggagactgaacttacaatggacttctatcatatatgcccaacacccatccatctgcatcagtttgttgaggaggaccatcccccatcactccaaccgtgtagttctgagggaggctgccaatcagtatgacctgcccctggcccaggctggccaatcatggcagcccttccctttctactgccagctgtccagagatggcatgtgacccaggcctggccaatcacagtccttatctgggattttctttttggagccactaggaaagatttcttaatgtaagaatgagattttggaactgcccgagtccatgtttcttgctatatggggaagaaaagaacttgtcggtagtgagagagaataaagccaacaagaacagagctgatgaacctaagatgtctgacactaatgccccatct

SEQ ID NO: 34834 - DNA, 407 bp, Homo Sapiens
cacccttggcgaaccctttcatattggcaccattgccttagtcctctgtgggttggtcttcatccagcattctggtgggagtgactggcattaacaagactggaaatcgggggtcaaagtaaaatatctttgttttgctttcgttcacaaagtaatgaagccagctgccaattacattctcccaacagcactttggtctgtggactgctgtgtgaatattcagaagggaagtaagtattcaggtggtaaacaggtctcccagcattctgagtgttccaaaccagtaatccacatgccaattcaaatagaacagccccttgctagatattaccacagatgatgactgttacatcgtacaactgcccatgccacaaatatttatttggaaaagtggtcttaaatgaacc

SEQ ID NO: 34835 - DNA, 582 bp, Homo Sapiens
ggcagtgctacaaaagagacagacgagaatctgaaacttcccgacatgtcagctgggcttcctaactttctttgtccttgggctttttctttgttgttttggggattcatttgcttttgtttctaagtttttagcctagttccccttatgggaatgggatcaatcattaaagcgtttgatttcctctgagagaccaaggctaatagtgcctgctcagaactgtttctgtgatcttaggaatggattaaacaccaagtttaggtgtagtgaacttagcaaaaattgcaaggccatctgcttcgcatatgtgtttgagccacaggctaaggatctctagagatctgagtgagaaagagaactgagcccccagagcctggcgctccctccacagacctgtcttcagtatgccagccaccgggccaagcattttattctggtcacatgactttctccaaaccttgaaaaactactgtgaagtcagcttattaccatagttcatcaaattcaagaaaccattcattataatatacaccactattttatgtaccattattagactatgacacactggcttcaaacaat

SEQ ID NO: 34836 - DNA, 561 bp, Homo Sapiens
cattgtttgaaggcgtgtaaaggttaatcatttaagaaatatataatagctctggaagaacaagccattttataataataataacaatgaaatcactgccatttagtgtacggagtcagccgtaaagaattagacaatccagagctaggaaggcaatacgtattttgagtctatttactacagaatacggttattttgccttaaactatatggtgcacataggtgtgaaacttccagtagcaggctgtatgtactgaaccaaaccctagagatagtcatcttcttcacccattccccaaatactgctacaattaggtgatgatgtggttgtaaagacttagaagaggcggctgttctgggtaacaggatgtttgcttcccttgacccagaactagtattctgcccaagccagcacagcctttgctgtaccttcctgaggggttctatttgcttctactacaagattctgaagtctccacatcatacaaacataaattagttgcttataacaccaacaaaagaaaaccttcattcaacaaagatttaatgggttatgtccac

SEQ ID NO: 34837 - DNA, 501 bp, Homo Sapiens
cattgtttgaagtgcagtgtatacaaaacctttggcctcagagccacttgaagtggtttaaatctcaactctggcacctgttagtgggacggtctcaggcaagtcacttaacatttttgagtttcattttctccattctgtaaaatagaatcgactaggatcagttgtttgtaggattataatctatgtgagatatgtgtgtgcatatttaccttatgagcaggtggtttagtatccattgattcaatggtcctcacctttatttctaattttagttatttgtgtcttttctttttttctctgtccagctaatggtttctcaatttttattgagttcttcaaataaccaactcttaattgcattgatttttcttttcttctattctctatgtatcttacccgtaatctttattattttcatccttctggtaccttcgggtttactttgctcttctttttctagctccttaaggtgtaaagttaggctgctgacatgagatc

SEQ ID NO: 34838 - DNA, 516 bp, Homo Sapiens
ggcagtgagacagttctgtgcttggggtaccaggaaggagagttgggtagctgaagtgaggaggccatcaaacagcctttacctgcttttgaaatttgccgaaagcagccctcatcatgcctggcaagaggcatccaggagagcattcagaattcacagtgctgcctcagcagaaaagttttataatttccttgagtcaagatcagaattataggcagcagcatttcttcctttgcaaaagacttctcaggtctgtatttaagtgcatctgttttaaaaattctgttctaaaggctgatgtctttcactgagagtgattcctcttggggccagctctatggagctgacctcctggctccttggccttaggaactgtagcacacccctgggaaatgctggagtgcagtcagcccaccgcccagtggtgcaggagctcggaagggggatcctaagccctaggcttccttgctctgtgccactgtcatgctgggttatgctggacagatcactttctat

SEQ ID NO: 34839 - DNA, 455 bp, Homo Sapiens
aggcagtgctgggggctttccagagccacattccacacacacagaacccctctctccagttcttcctcccatttctattttttcatggatttagagaacgaggaggagagtagggaacttcaaaatgacacgcagggcgataaacctttcagatgaatgatgtcacttcataaggggtcagggggccaatttattttcacgtttcgaaacatagtttatgagcctgataaaatttaaaacacttctagggcaaaatggatgtgcaagtgacactgaggtttgaactctttccctgccttctttttatttttctgacttactcttgaaacacatcagtcaacaaccagcttatactgagggtcctttgcatacaagccctttgctgagcgctgtgaaaaataatttttttatggccaacacctggtttcttccctcaaggagccttatgcctctgt

SEQ ID NO: 34840 - DNA, 434 bp, Homo Sapiens
ggaagagggagagggaccagagatttgaaacatgattctgcctgttcctgagagctttctagtctcctggctcccccagggtcaagctcctataaggaccagctgtactcctataagttccaggaggcacccatgtatcattacagtccatctccttttcttgtttaagtttgtttgggttggtttctctttcttaaaatcaaaagacccttgactgaggaagtgcccgtatcttatcactgcaaaacatctccaggaaggaacctccccttccttcctgctgtgtacgttgtggtcacagcacaacagtgagatttctcagtaatccctgatttcaaagtaattacaggggaaaaggagtagctgaaaaattggctcatgcctccatctccatctagaatgcccagtgttaaggatgacctctttaataacaa

SEQ ID NO: 34841 - DNA, 376 bp, Homo Sapiens
aagtggggtagtgagaatgggtggtgggtttttttgctttaatgtttacctaattctactactagaattatttttctcccccttaactggaaagaaaaaaattacacatttattgagacttcttcccatccccaacacaatgatctaatctttttgctttaaaatcagttaaagagtgtaatttttaaaatcctaatcaaatgactcagattgtaatagtagttttagacagaattttataggatgatgttttaattttatctgttgtctgggatgatctgtaatcgtgtatcttactagccgaaaatgacttcaatgagattaaaggtctgctctttaaaatctgtaagtctcctaccactgtctttaaacaatg

SEQ ID NO: 34842 - DNA, 399 bp, Homo Sapiens
agagcatggtactcatgggtagtttcaacccttgtccctgtctcacccctcctgtctagtggtgctcagtgtctattgttcctctcaggccttgagtttctaattgcctatggaatgctttattttgtagaggtcctgcttgaagctttgttcctcaccgtggatccctacatgaggtattatttatttcgcccctcaaaatgctaatgctgtgttaaatgctatctggaagtagttcatcttctaaaatatccaactgacttaaaacattgtcactttccttctgtttctcccagccagtatcagtgatgagattcatgcacgctcgtcttttgcaggcaaaggtctaagtagcttagtgagggatcacctcagtccctttgtcccaaccatctccta

SEQ ID NO: 34843 - DNA, 457 bp, Homo Sapiens
gcggccctgattttatactaatcaatgggacacgtgcctatgtatatacttactaatacgtttaattccatattttagcaagaagtcacattacttttgagaaataaaactgtgtattatgtatacttccaatcatactttaatttcatacaactgaaactgtattagtatatttatcttcatttttcaataataaaaaagtatgtaaaataagaaattattctgataacccaataaatctgaattgggaaatataaggagaaaatactcatgcaatctatgcctatagctttctacttctcctattctaagatttatcaaagttcataaacataattgtttatctgtctctccagcttcaatgcaagctctaggaagataaggactaattgctattatatctccacagtccactggatgatgttcaaaactaattataaatgaatgaataaataaa

SEQ ID NO: 34844 - DNA, 426 bp, Homo Sapiens
aactgacaaaatttggtgaatgacttgataaggataggtatgggaatggagaaagggcaatcaagaatgttatctcggtttctagctcgggacactggatggatgtgatgcctgtaactaatctatccactcttacactcattgtggcttcaatagattttgctaggaactaagtgaaacaaatatgtttaggtaataatggatgtttaagtaattcattcatgatctgatgtattaaaccgggcaaattttcattcacacttttatctagataatatctgaattgagtcgtgcttccttttaacagttggaggaaaatgtccttagatgcttcatattaaaaggatgcattttctagtctctaattcttaggctgatttactttaaactaacagattaaaaggaagcacgactcaattcagatat

SEQ ID NO: 34845 - DNA, 389 bp, Homo Sapiens
tgtttgaaggcagtgagtggggagagagcagcagaattcaatttaatctgaggccaccccaagtgttttgtagaattgggctgaagaggtttcctaggcagcctcgcaggctgcacagcacaccacccccgaggtgcccacgtgcagccccgtgatttgttctccactgacagaatctataccggccactgggacacgttgtgctttaacaagatcgaaattgattgctgccagcgtgtccgtgtcggctgcttcttttggagggagccagtgggggacgggagtctcagcaggctggggtgttgcacttttccttttgtctgcagcctgatgtttgctttgtgctgaagggtttgttcctactgactgtgctaatgtgtacacgcaga

SEQ ID NO: 34846 - DNA, 390 bp, Homo Sapiens
ttacaaacaaagaatgatcattagttggaaaggataacaacccttttgttccttcctccttctccttgatattattagatactggataactaaaaccacttaaaaatgagctaattaagatcttaccttctttttttagaatgccttttgccttaagtgtaattaagaagcttacaccacaccttggccccactcccacctctaacccttcatcgggaagagacaatactaagtagttggtgtttccttggcatcaaaggacacggtataaacctcaagtattgatagaaacaaaagccagaggaccatgtgacgatgactggccctctttctctcctagacgggggtagccgtgtgtacacacgtgtgtgagtgtgccgggacgctacc

SEQ ID NO: 34847 - DNA, 427 bp, Homo Sapiens
acaggcgtggaattggatcgggaattccaactgccaaagatgaaattagaatgagtgatttttggctggcagcttgaagtacatatatatcagtttgtgtatgatacgtgtgagtatgtagtggtttttccctcttcaactgtctttaaatatgtgtgcgtgcgtgagtgtgtgtacaaacacacgtagctttaatatcaaaaaggctatttttgtaggtctgttaggagacatgaatatgctcaaaagggaaaaaaatacatggatagggtgagaggagtttgctttatttaaggacatgataaaaggcatagcccttctgcctttctggaatgctgtaacagaatatagaaataattgtatcatctcctgtacttctcagagctggtgtttgcgtgaggctggccctgtgccaggttggcagggt

SEQ ID NO: 34848 - DNA, 430 bp, Homo Sapiens
ggtgtgtcaagggatgcgggttttcgaatactttcccagctggttacttgagtggtggttagggaggggctgttctggggctgctctggagctgttgaggtcgggtgtctgtctggatactcacagctggtctgtcgaggagaacgctgttctcattctgctgcctttggtggtgctgtgtgtggctctttagatgtgggtggagatgagttgggggagttaatgagatcttttttagctgcttttgataaagtagtctgtactacaggattcattgtgactttttcccttaacctgtgcatacttctttgctagcctttgtgaaagagagttcagcccctcttgccctcttgctctttcgctctctcttgcccttctgccttctgccatgggatgatgcagcaagaagaccctcaccagaggcaggttc

SEQ ID NO: 34849 - DNA, 369 bp, Homo Sapiens
aaaggacctgaaaattaaaatatgagatttgggggcaaatcatcaaacctgtgtgataaatggattagattcagagatcaacaatttcagattgaagctggtattgggtatacactgtccttttggatctgtgatttagtagccaaacgaaatccaatatcctaattggtgaggcaggacagtgaaatcacctgtactatttggaaactctcactttacctctctgcctccctttcatacttttctctttttcttggctacttggtttcatttccttgtttgaatcgtgtggagtacacatatttgaatctatcaggtggtatttacttggacttggctccattgcattgtgtttgaaactctggcaga

SEQ ID NO: 34850 - DNA, 457 bp, Homo Sapiens
cattgttgaggcagtgacttaccaaagacctcccaaccggaagtgtcagtatctggaattgaatcagggtctctgggaccaaagtccaaatctgttctactctatggattaggatgtttaaggcttgtgtgcacaaggctttcagaatcaacacatctaggctatttcaattttggatgctctctgataccttagacaagcgtatcatgaagctgcatcccttcagatcaccaggcttattactgagtctgagcttaagcaatggaccctaagaaagtgatatcatgtgtccaatattttagaaataatggcatcttagtccattctggctgctataacaaaacagcataacctgggtagcaaataagcaacaaatttacttctcacggttctagagtctgagaagtccaagatcaagggatcagcagatttcgtgtctagtgagggccctctctcc

SEQ ID NO: 34851 - DNA, 464 bp, Homo Sapiens
cagttgttgaaggcagtgagcacgttcaagtggctgctttacagtgctttggggataccagccacagtataggttcggtttcagaacacttaggcatctaggatgggaaagaacaggacttgaagaggccatgagcgagaaacccctggttcaaaacaagagtgcatccaaggtccagaaagtgtcagtaaaatcggctagcaggctttgtttctgcaggcaccacaaactctattccaggagtcttcttgggacaccctattatgaacaaggcatcgctgcttcagagccagggaccccatctcttactgtcggccatgcaacaaaagatcagaccagaaagggctcacctggattgatcacagaagacatttaggctaaaaagtttcagatttacctcccactgcagctatgaccagaccctcatcccctaggcacctggtatctgcccaactgaacttcac

SEQ ID NO: 34852 - DNA, 383 bp, Homo Sapiens
aaaacgtctttaaatgttttattgtttttacaatcagaatatgaatgttgtaataacacaatctaaattttctgacaaactgcacttattataaggcaggattttcaaacaatttaccacaaagccgttttacatggtatatatgccacaagaaaaaagtgtcaggcgaaaaacatgtctacatacaaacagaatacaaaatgagaaattatatatttctgatgacagaaccaaaaatcatgtatttatggtaataacagtttatgatattaggtacataatgtgactgatatttgtcctataaggacacaaaagctatttattatagggtaggaagtgtaactttgcttggattcatgcacagaaaggtaccgataatatat

SEQ ID NO: 34853 - DNA, 454 bp, Homo Sapiens
attgttgaaggcagtgctagttaagggaaagggccaaatgtagaatttggaggatagtgctggtctgctgtaaccactttcctcccagttttttctaaaggtgaaagttaacgttaatattgtaacaaaataggaataaggaattgtggaggaagatgagaagctgccagagggtaattggttttcccagaagttcttaaatttgggagctgtcttgccgcaagccattgagactggaaattcttggagttggtattgtttttgtaaattgactaatagagagttagggaagcctggagacttgttgggggtgagttctctaaatggttttaggcttgtctgtgtacttttgcaacgagattgtctaattctatgggcctctgaggtttcaaagtaaaacttgaaaattaattattttcccctccttatttgtttttgttttgctgctggctgt

SEQ ID NO: 34854 - DNA, 452 bp, Homo Sapiens
cattgttgaggcagtggaactgatagacagcccatatctatgtacagaaaccacaagacaaacagggtaagtgaggagctactaaaataacatgtggcaaacagaacctttgttaaacttgttccctatcgacattactcccattccctaaccaggaagttttacctgcttagaatcttcttccatgtcacttgcttagaatcccttttcatctcaccctatagacaaagtcttacacagatgctcctcatgttaacaattggtttacctggatgtaatcccatcataagctgaggaacataatggaagtgcatcatcataaagctgtaagttggaccattctgagttgggaaccatttgtactttaagtaccaaataaattaaatagcaagggatatattatctttcaaaggacagctagaggaagaaggtaattaccactaaggggatac

SEQ ID NO: 34855 - DNA, 437 bp, Homo Sapiens
ctaataacccttgcagttagacagaaatccggcaggaccacctgtgccctaattaacagttttactacaagacataagatagtagggtaatcaattccttctgtcaagctccagatgtgccagctatcattttaaatacttttttatttgatgtatattagcttatttttcttctcctttaaaaagtattcaatagttttaaaaataagaagcatacatagaaaacaccattctgcagctggaactctacttaattaaggccatgcttaatggttctgcgtttgatcacctcctaaaatcacaataagaagtttacctttctctgacagtcactgactcattaatgcattctatttatgaaacatatgctatgattttaaaacagcaggggccatacttgtccttgctcactattgtatcctgtgtcttacactgcc

SEQ ID NO: 34856 - DNA, 446 bp, Homo Sapiens
cattgttgaaggcagtgatcatgtctgtatatatccctgtctacctagaatactacctggccacacagtagatgctcagtaaatgttagttgaattgaataagtagaattgaaattatgttccttatggtttcatatgcaatataagtcctgtttggcctttttagtaaaaaagattaaaaaacctattactatatcccatcatttggtcttacagagagtcattggctcaataatcacttgttaaataaatgaaacggtattacttagagttgtacaaggaagtcacaccttccaaaacttgagctccggtgacctctgatgtttcactgtgtgctatgttcctaacttgtgaatgggttgtcctgaagcctgtaataagtctgttgcacctggccaatatgtgtccttcatattggctttacactgatgactcagggtctgcgc

SEQ ID NO: 34857 - DNA, 443 bp, Homo Sapiens
acattgttgaggcagtgagaaggataggttccctttattgaatgttttttgtggaaacttagtttttcaatgcttcataggcctaaatcagtgtgcactactttggacattatccttggaagaaggaacagcttttcttcttctggcaccacagtgtatctgcatttgaatttctcccattgtgcatgagcacctcatgggccacaaagatgcgctttgagagcaccctgagatgaagtttattttaaaaggaacaacaaccaacaccaccaccagctccacaggggctgtccagtgtacattattctcatcttcttgggttattagtcttgatttttagaacacagtttggaaagtgctaatttagaatattaatgtctttatctttaatttaacttttcattctgtacacataactagcttataaacaattttgtttcaaa

SEQ ID NO: 34858 - DNA, 400 bp, Homo Sapiens
cgattgtttgaggcagtgattgtgcggcctgtcttagcccatcttccgtcctagatacccatccagtgagtcatgagacttcacctccggccaccaaaactgtggaaccctcagtttctccttctctagaatgggttgaccaaatcccagcagccccttgggttgccgtgtgcacaagtgacatcccacgggcagatggatgtgacatacaaatcccttgaggagtaaaagggtgtcgaagtggtggctgagctgatgcactcgggcagagcaccaaatcagaatgagtttccatgccttaggtgcaaaggcaagcccagaggcattcgagtgaggagtggtagccagtacccactacctaccgcatggcctaagcgatattggaggcactcctccccat

SEQ ID NO: 34859 - DNA, 461 bp, Homo Sapiens
cattgttgaggcagtgagaattaccaaaatgtgacagagagacacaaagtgaccacacgctgttggaaaagtggtatggagagaaagacttactcgatgcagggttgccacaagccttcaatttgtaaaaaacccagtgtctgtgaagcacaataaagagcaagaaagcagggcatggcagcatatccagaccaaagcgctgccttgcttctgctttacacaaacttactgcaaatctggagcatctaatgctcctatgactggacaattttaggccctttctggattacaaagtcagcatgggatgctcaatgcgaaagttttaacaatatataaaatgctataaggcaatcttcacaatgtatcacaaacaaagcaaaacaagggtggcagagattaatttctcatctctccttcctcaaatctaaatgatactgcagatcactagcctgtcatgctta

SEQ ID NO: 34860 - DNA, 452 bp, Homo Sapiens
cattgttgaggcagtgagaatgaacagaggaagagtgcagaccctggactgaagggagaggaagctgggaaccctgcatggggttgctgagcactggaactcactcctggccctgagcagctactggagaagggatgaattaaataggcatggagtggccccctctctccatggacctccaggatcctagctgcaggagaagccataaaccccctggtcatttgagctgatagggagagctgcttggagaattgttaaggacaagactacagcttgtgtccagcccagagtgtttggcacaggagaagctacagtggaacatggccaaaaatgcccatctctcaaagctcaccatgctcctttggggtagctttggctttgttgactgtcagacctgaacagaacaaaactaccttgcctgtgagatgaggccagtctgatctgagcacccc

SEQ ID NO: 34861 - DNA, 392 bp, Homo Sapiens
catgtttgaaggcagtggcagttttgcacacaatagcttgagtgaagaaaaactgagaatgaagcaatcagtcatttgggcattatggaaaatgggagactaaaagggctttgtatgtcagtgggtgtgtgtacatctttgcatggatagacttgataacagtatatttaaattgtgttgctcttttgtatatctattgcaattaatagacatgtatatttatttctagctagaattgaaaggaaaatgggtgggatatcagaaagattacagaattcaggtttaaattcaaacagtgctgtttatcacctgtgcagtaatagacaacatattctctcaaatttggtgtcctctcttgtaaaacggagaatatgccactttgcagtattgag

SEQ ID NO: 34862 - DNA, 637 bp, Homo Sapiens
catgtttgaaggcagtgagaaaaactacatattcactatcatcatacttagttttgaaaccatctgttcagaaatgatcctattaatttaaaaaagaaagtatttgaagtccagctgattataataaaagtgatactgattctagcaatgcttttgacctctcatacacctttagttcttttgtttgggtcccagacaggagaaagcctttaaatgtctatagattctttaagacataggagtcaataacgattcactgactaatggaggaaatatttttatcacataagattcaaagtttggtaagggaaatctcattataaactggtgtagttaatctgtaactatatttggattgaataaacatgttagtaatttctcaaatgcatacttgcctccctgcctgctgccctacaaacctacagtcttcctgaatggtagcacagctgcacagaccacagaggttttcaggaagaaaactctgcctgcctatccagaatgggtcggtgaatgcagatgtcaccttttcttttttgtctacaacttttgtgacagttattagccgattaagatagctttaaagcgttcagactttggcactgactgtctttcttcctttaaacacatgagaagttat

SEQ ID NO: 34863 - DNA, 475 bp, Homo Sapiens
cattgttgaaggcagtgctgacctgagggtctccctaggaggacaggcgtgagcagagaatctgtctgaagacaaggcaaaactgaaggtgcagatgaggacttagtttgttagataagaacagtggattcacgagatctgaactcactggcccttggtgcccttgagacagggacattcagacctgtgttagttcatcctcttcccaaggagctcttcacaacagaaggtgacaaggacagacggacacacagaattgttgttaggagcaaagtagtttccacaaggatcaaaatcttcatctcatcagataatcaaagcacacgtaagaaggctttctcaatcctggaacacaaggagctttcacaaaagaaaaccagagggtcacggggagagtgctggttccagtcgcaggtctcaggccatcctggggaggccgtctcagccgaatcccatgggaacatttaggaccatt

SEQ ID NO: 34864 - DNA, 362 bp, Homo Sapiens
ggtcttaactcacctgtttccagattgcattgcaaagcagaacccacttctgctctgccttgtattcagaggcaggccaaacacaaagtgattcaggaaggtcagaatgaaacattaagtaaagggatgctgaacttgacttgtgctaactcacaagagtagattgatacattatcaggaattttatgaggtgagtgttagacacagccattgaaaaaactataatcctgggtaaaaactcgtaattaaattaaaatacccagtacttgctaattattcaactacattttatccttcttcccatggaataattatgtagaatggtgtgctgttcatggctccctcttccccggcaaactcca

SEQ ID NO: 34865 - DNA, 497 bp, Homo Sapiens
catgttgaaggcagtgacctaatacagagaacacagagttgaagaggagaggaagatagcctgaaacaccccagaaagttctgtcccctgtttagcattaagaaaattatgttacatgttaatgaattacaataataaccaaatcctcataaggaatctggtgagaagctactaatttatacccatactcagagttttaaggtcccacaggtggtaccagcagaactgagcctgtgagccccagccctggagctcactaacagaagttattaattccagggactaaagcctacagtgctccctctgtaaagcccaattttaacgcattgcatgttggatttcattttcgcagaatatattaataaatgtgtacactaagactacagccaaggagcaggtaatgctcaaagggtggcgtgtggccacgtctgtgtgctgggattgcagtcactgtgctttgctcatcggtgctgtttatgtttcctgcaatatctaca

SEQ ID NO: 34866 - DNA, 457 bp, Homo Sapiens
gaggtatcccccgattgtcgaacgagcagtgcaggtggtactgagggcagcctgatgaggtatgggttctatgagggcattggggcattctagagaaaggtctgagctgaagctaattttgagtttgtccctgtatggatgattttttagaccatgggagggggccagtcatcaaactttgtggaagttctgtctgtgtaggttctatggtttgctttttgtcctctgtaagtattaaacagtaatctctcagagcattgtcatttggctgaagtttttcacatgtatttcctgttcaaatctagaatgtgggatggctctaatccttatgcccctgtgctagatttctccttttttgttgctgtttcttttagaaggcagaggaatatatgggattttattgtgggctgtacctgtcttcaatgacaatctcttggagagcatgagctctgtagtt

SEQ ID NO: 34867 - DNA, 419 bp, Homo Sapiens
agttacaccatgtttgaaggcagtgaggaagaggattaacagagaccagatcatcttcagctccgactaagatggcagagagctgccacctgtggccctttgatgccaggtaatttctctctgatatcctttctagtcacgcaggacctttttgccatattatctatacatatggggcaggatcctaacaggacctttgctctctagtggtaacctgtcactgaaatgggaggctccagtttccagcagggagagtgcctggaaggcttggctcttctggtacagttatctttgtaacttgagaaaatttattccagacctactacaaacattcgtgtgctcacaagcaccacagacagagcagcagccaaagctagctgcagcctgagcatgggtcagtgtagggaaagaagctaact

SEQ ID NO: 34868 - DNA, 384 bp, Homo Sapiens
cacattgttgaaggcagtgggtgagagagatgctgctaattacatctatgaataaagtgacacagtgcaccggctctgagcagagaccaacacaactcgagagagaaaatcagtctgtcatatttgtacaaatatgtgcacttcgatgataattaccatagtcattgtttactattgctgcattatattaattatctattcagtgatattaaatacataactctaaacatcatccccgaacaaattaccttttatcaattgaaacaaaccaattaaaaatttcaaaatgcaaccatgtaatcaacggcttactacacgataattatgaccaaaatgccaattaatgtgttaatatatgacctcaaatctacagaaacaaacaac

SEQ ID NO: 34869 - DNA, 384 bp, Homo Sapiens
gatttacagagttgactctttgggtgttgtcggatcatttctgccaaggtctcttgggcttcagcaacagttctctgtgagttttggagactggcatgcttttctgaaaagagctccttaaaagtactcagcattcgctcaccttcttctgtgagtctcaagtctagttctgaaggcctgtttggctctggctgagaagtttcagggtccgtatcttcagtgctggcagtgtctaactgctggcttggctcaacagagagtgttctgtgaccagcccttacccagacactggaatttgggcaaggtctggagagagaccaccagaattcatacagacgcccataaagaaaaaaggcctccaaacttttgaaagctggtgtggca

SEQ ID NO: 34870 - DNA, 416 bp, Homo Sapiens
taccaccatgtttgaaggcagtggacaggctggaacctggtgaagtcttaaagtagactcctcctatcggggtgtagaagggaatctgttaatcaaacagagcaatattagaaaggctacagaggtcaactcagtggaacacggttctcccaaacagattttgtaattccgaaaatccacgcatgcgcaaacatacgcatacactcccatgttcctggacagtttatagctaccataacctggcattttccaaaacataccatgtagactcttggatacacaaggtaattttagagccacattaggatgaaccttttaaaaagttatgcatttatttttatgttcccccactggctgtattataggacaatttttatatgtgatatgtatttaccttagtgtgttaaataaacact

SEQ ID NO: 34871 - DNA, 396 bp, Homo Sapiens
aaattatgttatattctaggcagatagataatgaataattattatactagggctttgcccttgcaaggcagaaagaaagtgatagaagtataaaatgtgattcttgccattaagaattgtcatagtctcatgaagtaatagtgatcactacaagaaagtatctagtcctgagttatttagtgcatggactgtaagtgttcagcagagaaaactggtcaagacagatgtagtacatctccattgttaatggaggaaatgagacttaaacttggtcttaaaatgtgggtaggatttagaaaggagaaaggataaatatatttcaggagcaccatgaggtaagcatgttcttggaatagtggtgatggctagcttgactagagttagaaggttcacact

SEQ ID NO: 34872 - DNA, 362 bp, Homo Sapiens
aggcagtgctgaaaacctgggaggggtatacctacagatagaacagaacggaattataaagagtacaaagtaggctggggtcggggaaataacaaaatgcaatacacttgaggaaccagacacccaaaacaagaagaaagtgggatctccaaaaaagatgagttttcttagcaagaaggattaagagaagcatatcctgagcggtcagccagagagcaaaaccatagtaaaacactgtgtagctaaagcctctagtacagctctatgtatgtaggagatgtgacacttggacagtgtgattatgaaaaaaggagactgcctcctgaggaacagtaagcacctgtaccaaaaggtcaagctac

SEQ ID NO: 34873 - DNA, 353 bp, Homo Sapiens
gggacaccggagttggcatgttcggagaatggtttcctaatcctagtacatccactaacttcctatcagtacatctatgctctcagtggcaaagggaagctgctaccaccctatctgttttttacaaagttgttctagcaagtgatatctttcttacaaatgcaagtgacacaacagcaacgctacaaacttaaacaccaggtaactaattcaggtaaaacagctcctttaaagttaaaaactaaatatcattatattggtcttcattgaaaaatgttacaatgaaacactaatcaagcctaaaagagataactaagtataaaatgggtgttcgaagatttagctttaaattt

SEQ ID NO: 34874 - DNA, 398 bp, Homo Sapiens
ccatgatgacatatctagctccatctcgagacctcatgtcttactgctgacactacatcctcgctggtactttttcttccttggcttcaggggcattgctgtgtaggctcagatccatgccagatggggtgtgtagggggaaaagctgcataagggaggaatgtcacttggcaacactcaacaagggggaatgggcctgcagtattctcccagagatgaatgagcagcccattctaggaaatatccctttgaaggaatatcttctctatggtacatccaaacttttctctggaaaacatgcctcttcattctgatgactttctatttattctcttcatcttaccatggttttacaaaagaggaattttaacatactcattcagcagagttaaggacct

SEQ ID NO: 34875 - DNA, 378 bp, Homo Sapiens
aaaaatccatttggctgcagcctcgattcatagttccctcttccagctcccaagcaaatatttttcaaatagccgtgctaagccttttccaggcatgattgcgggcttacttgctgtcattctatttttcagcaaaactctgggtaggaatgtcggaaattataccttttgaaatccctccttgaaaacatggagatttgtaggtatgcagaggcaattgtaacaatataaagtattgtatctcttccactagagtaggagggcctgactgtcggcccctggggtctgtcttccattacttgtcttgacttccgctgtaaaagcattaagtgggaaggtagcagttctgctgaacaagcagacattgccttctgtaag

SEQ ID NO: 34876 - DNA, 362 bp, Homo Sapiens
accggcgccactctcatggtagggtggatttagtggtatgtaatgataatgattgcttccatgttacaacatgcgaacagcttatttatagatcatgagctgcatccctctttcctctttttgtgcatgtttgctttcaaggagaatatagtgacaaaaattttaatctgccttttagctcaatgctaggttcttggtaatttgttgagcaaattaatgactttcatgtacatttacagataatataagcaaagtatcataatattggcacaaaaaaacattaaggttcaacttaattctgtttttcaaaatatattttaataaaactatacatgtaaacatctgtacttgattttaatcat

SEQ ID NO: 34877 - DNA, 375 bp, Homo Sapiens
tgcagcgcggctcctttccttcattcccttctgctttcttctgcgctcagatgccaactgtgtgccccactccagtttttaaaaacagtttttcttttgaagtattaggtattcagttattgactgaaggaaaaggagacgtgaatcctgaaaggaaagtataatcatttgaaaagacaagtattatgtgcatgaaataattgccaaaactgctattgccccacatataccagtctcctatccctctggccattgaagtcccttcttcgctcacagatatttactaaacatctcctctgtgctggcccaggatatacaaagagcccaagaacctgcaacttaacagtctctgtgggaaattcttaagtcatagga

SEQ ID NO: 34878 - DNA, 563 bp, Homo Sapiens
ataaatgaagtatcccacataagcccttcttttgttgctataattagctttgcatgtgttgctttctcacagataggaaactggattacttagcgagtttggagcactaactggggttcagatcacctgggttctgatcttgaccctgtcccaacggtgtcttttcctttccagaccgcaatttcttcactcttaacatgagagctttgaaggaagtgattctaatgctttctagcaatttcctcatagggcatgctgtgtcagggcacttaactgatttcctgtgaacgcaccatgtgcgcttaaccctgcacaaactcaccagccacatagccttgacatttctttccacagcttggccacatttggctggccttaacagcctctggtctaaccttgaccaagtctgcatgcattggtcacttggctctctgcccttttccccttccagaactgaaatttgcatcagcctctgtacagatcagttctgagcacccaaatttctgagcacctactgtgtgtcatgcctggtgctgggggccctaaaggtgagtctgacccac

SEQ ID NO: 34879 - DNA, 519 bp, Homo Sapiens
tggtttcagaggcggctagaagctgagacatgtactcagaactagtaacttccttcttctctcccttcctcggttttttaacttccttccaaattttggtgtctttccgactctaagccaagttcccctcaccaatctttctgtttctagaactttctcctattcttttccttgggttcgtcccacccaagaataagttgctttcactcttgctatttgctacagcaatgcccattcccctaccatttccactagtctaaaatatggattttacacagtggttttaaaaaagaacgacgttgctaatacgttggtttgggcctagggggatcttctgagatccttccgggcagaggaagaactcttaaagtcatatttgaaggcactgatgctggagctgagaggactggatgatggccttaactcagatgccatggcaccaggtagctgcctcctactgttggtcagtttctcccttcaaggaacaaaaacttccccattctcacttcaccagacaca

SEQ ID NO: 34880 - DNA, 454 bp, Homo Sapiens
accctacagtgagtctcagccagcataggactgagacagacttccctagtaagactgccctcttgagactcacaatactgaaagagaacaatggctgctctctatggagctgctgactcccagtagaaagggaagaagcatgccctgtatctccttacaacaaaggtaagtcattccactcctcatgggggtcaggaagtaagtgaacagcaagagaagctacacagactgcacccactattggaaagacacaccagccatggagaagtgtcctctcttttctcgagttaggaggcaaaaattatttatgtgaggacctgaaatccatggctattcgacatcacatctatccattgcacaaatatttatttgagcagctaccatgtgccacgtgtataatatgctgagaatgtacactctgtgtacattgccccttgaagtctgtgggtcacac

SEQ ID NO: 34881 - DNA, 505 bp, Homo Sapiens
cctctcagagcacctggataggtgacgggtttctcatgtgaatctacaagaaaaggtacgcctgggccacacgcaggacatggcacccactagggttgtacaggtctcattcactgcaagcaagaattcacgtacatgagtgcacaaaggtgttggagcttggtctcctcaggcttaacccaaggctgactcactaggacagcttccaagaaccacagatgtaactgcaaacttgaagagagtcagaatgttttcaactgagtcacgaagctgtcccagaagcacccgacatagggtggaggtcagacacattccctggctgcccacaggcgtgagccttcctgccaggggacagtaacagggcccgaaggtctgggggtgccgctggcttcccagggccaagcgctcagagctggggcggacttgcccattgctggcttcagttcacattgccaaggaagatgtgtatcggggcctgtgcaggctgccacattcttgcttttgc

SEQ ID NO: 34882 - DNA, 492 bp, Homo Sapiens
cccaatccattaatcttaggttgaactttaagaagggaaaaagtcatattcttaccaatttaaacttgctcagtatttaggattgaaaataaaacccaagccaaaaaaacaataaaaccaatcacaacaaaactttctgtgctaatttgagaaataaaaatttagtcatcaatgacccaaagagataactctcagttgctttcacacttttatagaactattatacctgagaaatattttagacgacggaatcactgtttgtaaaatctaagtattataattcatggatctgaaacgtaaatgacatctcaaccatttttgtcttagtggtgcaaaagttgagggccaaaggtctgcagcccatatgtatttttgtgtatttaatcttacctcaggtttattatttccctgcctggagcaagaatccctcaattatctaactcattctttttatgtctatcagcgaaccagtctaaatccttcaagaacatg

SEQ ID NO: 34883 - DNA, 413 bp, Homo Sapiens
ggcttcatagtccccagccgtgataacgaccagctatggagtttgcagttacattatagtctagagaaaaggggaataatgaccagattaaggcctttagaataaattttacctaggcagcaaaaatttgttccataaatgctccacaaacctttcttgttcttagagttttatcattatggcttcttaaatggaggaagagcatgtcattatcttccttgtagttttagtcaagttgtaactttatgtaactacaattagggagagctggaggaaatcaagtttattatttgattctcctattaatttcttacatatcctcaaatttttgatccccaagctcaacgttcacactcttccatactcctgtttctacttaactggtgtcctatcagcccaggaacaggcaattt

SEQ ID NO: 34884 - DNA, 363 bp, Homo Sapiens
ttctacttttcataagatatgctcatgcttaaaaagtcagaaataagacactcagggagaaatacagagtttctttaaacagaataaatttttagatatttataaaaagttaagagctattccctctaaagaactgcatagatatataaatagcatatgatagaaaagtgtctctataatggtattttagtatacattaaatgagagttaatataagaaatactgtaatttagtgtatgcagtgacagaagaccagatttggaatcaagaagcctgagtgtgagccccagttctgctctttgcttcctgggtgacccaagacaaatcagctaatcttcctaaacctttgtttacctatctata

SEQ ID NO: 34885 - DNA, 415 bp, Homo Sapiens
tcccaagagtttattgtccacaaatcagctagactgaaccctataaactctccaaaagattcccatcccactcagaataaaatcctacttccttatgatatacaaatcctacataaccagtcatcagcaatccccatcactactcccacacaattcttttactttctttttcctcttatatattatcccctaccattctccttcagccttcttctccagccagtctagcctcttctgccattctggaaggatatacgcctctactgtaaatatagtctccagacttttgcccttgatggtcctcttcctgaaatgtttttatctcaaaagccaaaagtttgactctttcagtaattctctgctcaaacgttaccccatcagaggctttccccagccacccaatctaaaacagcac

SEQ ID NO: 34886 - DNA, 494 bp, Homo Sapiens
tgtccatgggacatcagcataatttatttttgtgctgctgacattttggtcatgtagtaatcaagctgttaataactagtcacatttattgcatcattctcttagtaaaaagctatttttaaagcaaattaatacctcctttggagttatagtttctaaagaaggatcaaggatgaacatttaaaatggaaaacagcagggtgaaataaaccatgaacagaacgttcaaattagttgtgatctcaacatggattctttgattatggagagagaaaaaagcattttttaaaaggacaagctgtctttaaacatgtacattgggaagataccaaaagctactgaaaaaatgacactgtcaagatgaaagtgatttaaaatcctctatctgttattgcataatagactagaggtagcagtcaaatatgctcttctaaccaggcagcatccgggttcatcagcctgtgagagaaccatcctcaactccgtgcttcctc

SEQ ID NO: 34887 - DNA, 408 bp, Homo Sapiens
cccccacctgctgtgtgttctcctcgagtataatgctcaggcaatcttcaatagggtatggacacagataatttcaagatttagataacatttgagaatatgaaggctcttaactggcactcactactggaactcttaggtctgccttgattctagccccactggacattgacaacttaggggaaagactgccttttagtattttcactatggaatggtatactgtatttattacttcaacacatattaattgagcacctgctatctgccaagcactgtattaggtaagtaggatacattagaaaataaaggcaaagatctataccctctaggaacttacgttctagtcaaggagacgtgaaataaacacaataagtaaaacacactttattcaaagagaagtgtgtc

SEQ ID NO: 34888 - DNA, 353 bp, Homo Sapiens
ccatcccattcatggcagacatcattaatcaatcaaagtctcagatttattcacacatggtgctgtagagagccactaacaattggtggattgtggctgtgggagctgctgtgtatctgtctcctatgatgggatatgaattcacaagaggtgggttcaagtcttgccttggccactggaggtctgtatgaacttgagcaagtcattgaaactctcttgtattttcttcagttgtataaggattttttaattctaaagattttacaatatgagatttctggagtgatgaggcattggttacctcaactgcaaaactgccaaatactaaatgaggctatgttgagagagggggt

SEQ ID NO: 34889 - DNA, 491 bp, Homo Sapiens
tggtcccgcgcaaagtctccccacaggtaaagtgtggaaaatactaaaaaagatgagggctacagagaatggctccaaacattctggacctaagtaagaaacacattgtacagctgtgacccaggaaacacacgactaccaaagcatagcaaagcgaaaacgaagatccctgaagcgccatgctgcgtgcccgtggcggacacacaccgctttctatgacattctgtcctacatttaaaacaacgttggtcataactcatgatactgatttccagctccagtaataagctgggatttgcagttgaaaacacactagcctagagtcaggcgccgtggatactagctttgccactactacacgtgaggcctcggccaattcagttaagcaggattgctgtgaagattcaaatgaagtcagtggcatattgaagtcaaatctacaagcgtagttttcctccttcctaaaaacatattttgtcccgcgttgtaat

SEQ ID NO: 34890 - DNA, 614 bp, Homo Sapiens
tttatatgctgtgtgacttacacaaattactttatttaccttatttctctaagcctttgtttatccatcttttaaatgagaataacaactattttaatttttatgataatagctgacatttggtaagcactttctatgtgccaagcactatgctaagcactttacatagctgatggcatttaaccgtcaccaccatcttaggaggcaggtattatcattatcctcattgtacaaatacagatgttccttgacttatgatgaggttacatctcgaataccgtaagtcaaaaacatatttgatacacttagcctaccaaacatcatagctcagcctagactatcttaaatatgctcagaacacttaacattagcctctagcttggcaaaatcatctaatacaatgcctattataaacttgaatatctcatgtaatttattaaacacagtacagtgtgcagtattggttgtttgccttcatgactgcacggctgagtgggagctgcagcttgttgctgcagcccacatcatgagaacgtgtcagtaggccaggaaatatcaaattaggaattcaggtgcgttctaataacatattgggttttgataatcgagggtga

SEQ ID NO: 34891 - DNA, 433 bp, Homo Sapiens
ctctgtccgaacccaagaaagagaaaagtccatcggatgtgttaaaagagctctgggagatcgcgtaaatgggagtacagagcattaggcagtccctaagagtgagtagggacaaaaacaccgatgttagaaagccatcatttctggaaagaaaggaggataaaaaggggagtgcaagaaggaaaaagtatccagcaggaaaaatgagaacccaaaccaaaagactatccatcactactgccatcaagcacaaaaaaagaagaaagttattcattgaaaaaaatcacactatgctacattttcagaagaggtttgcacctggactagaaaacacaaaataattaatagatgaaaaaatgcctatataaatatccaaagcttctttaagaagataacaaacatgaaagtcaaatttttcagctaatgaaatcca

SEQ ID NO: 34892 - DNA, 486 bp, Homo Sapiens
ataagcttgattcctccctcctacaaggatgcccgtgatgaccttgggccacccagatgaccaggatggtccccacctggaggccccttgctcagtcccatctgcacaggccctactgccgtgggagaggcacatagcaggctccggggaccaggacgggggtgcctcccaggacctctttcccaggctgagcgtttcatagcaggctccggggaccaggatgggggtacctcccagggcctctttcccgggctgcatgtttctttcctagtccgactcctgccttctaacactggttttggtgtcttttgttacacaactgctttaacttcttatgtaactgaagacgtccatcttgtcctttttgggattagaatttggggtagaaagtcttttcctccaccggaattatacaactattccatttttcttcttttaaactttttttgcaatttagcggatttatctgcacagaatttaactgtc

SEQ ID NO: 34893 - DNA, 602 bp, Homo Sapiens
ataagcttgattcgtattctactccaccttccggaagtcagtgggtgggtgtggtctgagcacctggtaggacctgccacctggaaggaaagctggccgtgaagcgcaggaggtcaagggtaaacgataatccatgaggtcaaactgcaactcatctatgacttcctccagactcagtgacacaagtgacccgcacaagatgcggatgcccttggctctggagttgtacaaaacaccgaagcgggagagcctgcagcaagcagctgggggacctgagcccatggctgccccacaccagcagggtgcacaacatgccacagcttctgcagggcctggcgccctgtgctggcctcggagatgggcctgctgtttccttctctccttccaggttcctcagtttctcctgtagccagaccatgcagagcaatggaagtggcgttccagttagctacggtgacatagcataaactcactacaacgctcgttggctgttttggtttcagacacagatttcagttttattttcagctttctaatttctctgttttgccctcttccctctccctcctccagggggattggttgaaatggcatttctgatg

SEQ ID NO: 34894 - DNA, 351 bp, Homo Sapiens
tgatatgagttgttggtaagattaacagtccctttgattaccacacaagcagtcgttattaggttatttccaacatttccgtactcatcattgacttaggttaaacttttttgctgtaagctttcttcatactgtctagttcctttttcatgtatttattttgcttattcagcactctcgagtggactttgggcagttagaataactgaatcatgtcagtaaagtgtgttctcaatcatgtggacaaaagaacttattcaaatgctaccccttccctgcttttcttactgtagtgtggacttacatctcaatggtaggagtcttatgtatcttggagttggcggtgccttg

SEQ ID NO: 34895 - DNA, 549 bp, Homo Sapiens
gctattgaggagtatcctgaggcatgggggtcaggtgttgaggtcttggtgagtgtcttcctgggcttagttccctcagcccccatcgctctaaactaggggtatcattatgggtttagtggatactcatttgcttattttctggttgtgcagttgcagtttcacatgaagaggatatcgtgttttagtccttttgtcaacctcccatgttgattctttcaagtatatatttctgaacgtttaagatctatttatagtttccagggctgattcaggatattcctctgttataatcaactggtcatttctttggtaatctggcacaaagaaataagcttatagctttcttatttggaaattgtattttatatatgtgatttgaatcataggggggatattgaggtaatttagacccagtgattgtaaaggaatggatgaatgatccaataaataaatagatgacaaagctcatcttttgcaggtgagaggcattagaagtaatttacggttttgagaagagaatatagatgagaagagtgcctagagata

SEQ ID NO: 34896 - DNA, 520 bp, Homo Sapiens
attgtaggatagtgctgcttcacagttggaaacaaaaaggaaagctctgaacccaagaaggaaggagaagaagcacttgaaaatggagagccactgaatcaaggaaaagacaagaaaattctaatgctatacaaataaaccaatgaaatgggtatttctgataaacatgtttttaaaagtaaagctgaaactctatttgtaatacagaataattaatcccaaacttcaattccgtattacagctagctgaggagaaggagaaagggggaggaacatggtgacaaaaaaggatacaggctaaaagggggcttgagtaagtacacaggtgggtgtgctaatctgaggggaaatctcaaaccttgctgtttactggccacaagcctaagaacatataatttgttgtatctgccctttgaaatttcagatgacttgactagcattttagtatgattctttttgtgctgggattatttaaatagaggagaaaagaaagcaacttacttgaagacgagagaagtga

SEQ ID NO: 34897 - DNA, 532 bp, Homo Sapiens
actcaataataatacatggtataattttaatcatggttcttattttattttactttaatttctgaatgttttgcaaacacattctttgttgacagccctagctggaaatgtttcagctcaccgtgttctgggtaaaaaacattgtcaagtctttttttaacccctcacgttagatggtttttcttgtgctgcatttcagtgtccattaaccttagtgtcgtaacatcttggagttagaagcaaccttggaagccacccatccaacttcccacccagtgggagaattgttctgaagcttgcctgatcaccagcctcagatagcttgctttctaagggcattgctgtacagacacagagtaccatagtttaccaattccccataacattttgcatacattttcatgaatcttgcagaatcagaaagcagtgtgagcaattccaagtttgctaattaaattaaaatgagcacagactcttacaaaacaggttttagagtttcaggaggccttacatggtcaaagacggcaagcgg

SEQ ID NO: 34898 - DNA, 616 bp, Homo Sapiens
tctaaagaggaaaggaaacagatgaatgctaatggcaatcatttaccaaccctatcctgggtaccacagaccagactaggccctctttatgcactatctcaatcaatctttacaacaagacaacacctcattaccccgttcacagcagagaattaggtggcgtgcacagggaggacagagaacaaggtgtgcagttggaaccggagcctggggactcaggatcccttccttggtgttcaccctgggcatgtggcccccgtgccggagaccagggagagccagactatacggtgcagccaggctacatggctgcactgaccctctcttctcacaaagtaagggctcaggaggaaaactgtcatggtctctgtcaaatgctggtgccaagacacatctaatgataccacatgaacaaagatggtgtttccaaatgacagatttccttattaccagaagctacgctgaccaaaggaaactcttgggagggattcttacaaactttgcaaaatgtagtagttgagtgtttctctcactgttcagcaaaaaagtctgtcatcatgatttcaatcaatccctgacctgctcataccagacatgggcggtacgaccgatcgat

SEQ ID NO: 34899 - DNA, 431 bp, Homo Sapiens
tgctggatttgctcccatagtgctcccaggctccttgctcttttacactgctgaaggataaatgaatggtccagtgaatatgtgtctcttatcagcttccgagcactgaaataattattctttgaggcagtattaagcctttatgcctgaagcttaggcttcgcgatgtctatgcttactgaaatctactttgacacttctatagttaaactgttttgaatagtatacaacagtaatatccttctactggagtctaggtgatcacttctccagagggatttcagtactataagctacataaaattagcagctactttcccctcagtgctacttagaggtaacctctaggggaaggttaaaaagccaagggaaggcagggcacagtggcactatcttgggttactgcagactcaacttcctaagctcatgca

SEQ ID NO: 34900 - DNA, 569 bp, Homo Sapiens
ttggcacaaagtgctggcttataggcatgagccaccacacttagccacccatttacacatttccatttctgcttatatgccttcaggtcttggagaatctcctattcatatttcaacgtgcaacttaatttaaatcacaaaaacatgaaaaactgttctctcctctcgcatcttcccaccctgccgcctggactaagtgcaccataacagcttgtgcaagtctaccacaatgtattacgattctctctcccactagactatatgcagttaagctgagaccatgtttcattccttcatttttgaatctttaatgcttaacaagttgtctggtacatactatatatgcaataaatctttgaactaaatgtccttctctgcttcaaaaacatctcaggttctgcttaatgatttccaatgattagtcaatgtatcttttcagattttcatcagcagaaaagaaatgcctgattgaagatatttcaggttgggttttttctttaaccctaaaaatctgaaagatacttatatacctaaataccaactatacactttcattgagtagtgagaat

SEQ ID NO: 34901 - DNA, 514 bp, Homo Sapiens
gcttcacctcacagtaagaataggtctgcttatttctccatagctctgacaaggacagtgtcttaatcaacttagcagtatccagcaatattgggaattacaaaatatttttgctgaattgaactgaatattcattcgcttctaaaatattgtgactgcttagagtctgcaagacagtttgacatgagaaattaatctaacatctttttaagcacactctgaatataaagaatgtattagagattatatagttacaccgttagcaaatcaaagtgtattagaatgaatttgtgccatgaattcatgtttcccctacccattttgaatagtgtattctaattttctccactgaagctgcattttgaaaatatattcacaaatataacttctgtataaaacaaaagttaataggaaacagtgaaagcagcatagttattcaaactggaaaggtactgaataactctggttatactttttaatgaattaaatccaaagttaagaacttcttaccaca

SEQ ID NO: 34902 - DNA, 398 bp, Homo Sapiens
tgttctccagatgagtactgtctcatgctgcatctgtgttggcacttcaatcggtctgactatcaagaagggatcagagattaattctagtcttgttcattcaccctcttaccttccatgggcaacacaagagcctggtatgcgccagcaaagcacagagtaggggctcaaaagatatttggtgacagatgcacaacggaaatttagtgacttgaacgtgcaaggaagcaaatttcagagggagtggtgactcagcttggatttcttgatagagcaagacttcccaaacataggcaaccataatttaaggcgatgattctcaaactttagtgtgcgtaagaatcaggagagcttgttaaaacacagatttctgaacctaacacccaaagatttttttt

SEQ ID NO: 34903 - DNA, 372 bp, Homo Sapiens
cttcgcgcttcccacaacgcgagtagggagtgacaattataggatgagggccaatggtaggtacacaaaatttaatttcaaaattgtataatttttccttagaacaactacgttatggaaataattttttcatgagacttctgtattttactggataaatttttattctatatcacaatggaatgaagttgaaaaggcttataatattgcatcatccacatttggtcagatattcaaaagaatcataaagagagacaattaatatgagagcttgatcttgctaaagttttcattaaagacctatacactgagtggaagcagaaagatagttcctttaaaaatattgggaatgaaatatttatgctttccagt

SEQ ID NO: 34904 - DNA, 446 bp, Homo Sapiens
atgagacaccgtgcccagccaagaagaaaaaacattcaagcattccctataaatatttgccatgaggaactacttgtagttcccataatatgacacattctctcttgagacttcccatggatattctttttcctagaaagttctacccttattcattctctgacttaattctattgctttccattctcagctcactcttcactattccagggtgttgtcctggaccttccctggctagactgagtgtccctcttctctactctcaatgtttatcatagcagtcttcaccttttgttgtaattatctgttcactcataatctgtatcatttgactattatgtttttaagggcagggattatatatttatatttccgtctttggtgccttacttactgcctgaaagtttgcacataaggcgtccacagtgtttgtcagcacatatagt

SEQ ID NO: 34905 - DNA, 514 bp, Homo Sapiens
ttaagactaggttccttgtcttcaaagagctccaaggttaaggaagaatctggagatagtgaagtctatttttctatacctctaggacagagcagagtgtgctaagtgaaataagttctaagaaagccagtgacagcttaaagagggagaaatagaatcagctgagggattgcaacagtagagcgttaattatttaccctgggttttggaggatggatcagatgagaaaaagagaatggagaggagaatgtcccaggtggtgggagcagcatgagttctgggaggcagcatttggggaaacagggaggcatttagtttggctgaaatagagagtgtaaatgggggcatagtgggaagcatggaaatgagttagaatcatgctttaaagaatcttcaaagctacagagagtcatacttccctggggaccaggactagaactgggcattcaaaacattaatagctttactgtctttctttgcagccactctgcttcatttttgggaaaaaactctc

SEQ ID NO: 34906 - DNA, 445 bp, Homo Sapiens
tgtccgagggtatcgggtagaaatactttcagctccaaaccatgccaggtgtgaaaagtgtctaactccattgctggatgcagtggaaggagagttgaggtgcataactgagaccccgttctagaaagtcttcccagatctttagagggtaagatgtctagaacaattatactctcattaattcataattaactcttaggtttaggagttaatgcgatttaaaggttttctattatctgaaagttagtattatggagaagagatatgtaatgattaaaagaacaacctgggatgcagtttaagggtgtgaggccttgcccctggcagcgaatgtcctttgcctttgctgacaagtggggattgcatctaatgagcatgagggtattcttcattatagttcatctactttctcacgttccccttttctttaacatactcacagttg

SEQ ID NO: 34907 - DNA, 477 bp, Homo Sapiens
cgtcttattacaaacagtgctgctataaacatttgagtacgaatctttgtatagaaatatttcctgttttcttttggcaaataaaagcagaatggctgaatcattatgacagatacacgtttaacttttaaagaaaccgctgaacctttttcaaagtgattgtaccattttacaatcccaacagtgtttgaaggttctagttcctccacattctcaccaatacttgctatggttaatgttaagtctatttaattttagccatcctaataagtatgtcgtggtacatctcactgtggttttaacttgcattttcctaataactaatgatcttaacatcttttcacaaatgcagctttgtttttaatagtaacatgtgagagataaaccaaaagttcaccaacagagggctaacaaaacatccaatgaaatggaataccatatggattaaaacacaagaaagctctaagaactgacatg

SEQ ID NO: 34908 - DNA, 358 bp, Homo Sapiens
ctgatcctgccatgtgtgcgttttgtggtagtgcttgtggtgtgtggatgccagcctgccaaagctgaaaccatttttaaaaatgtctgtgtaatgtcaccggcacaagggaatgaacgacttggaaacacgcacagatgcagcggaagcccaggatattaaaatcttgaacagtatcattcttgctgagatttgctgggggtatggatgtgttttcagagacaggatgctagagaatgtacaattatagcaattggctaaccagccccagaccttaattagcacaggatcccttgtctcactgttgtatgtaaattaagactttcacaaagggattgtttatgaagacggcaagcgg

SEQ ID NO: 34909 - DNA, 656 bp, Homo Sapiens
ggatcttacgcttgcgtcttgttcctctttacattgataagagaacttgggaggaagggactgaggaatcaaagcttctgagatttgaggatctggagctctatagatattgagaacaccctgtgacctctggtctaaatcagaaaaccgtaatatcccagagctgatcaaacatgcctacaccactgatcatctaggataacatcacccaccatgtttggagaattgcagatttgggacaaagaagaaatgagtgtttcactagaaggacagccataactctggtaggagatgaacatcttcaggacaagagataagcactccctcaaacctgtcacttttagtacctgggatatctgaatcaactctatataatcaacaagagaattaggcaaataacatctggttgcactgatggacaaaggacataaagatgttattttcaaatgtcttctcctgaagaaaaatgaaaattgtgtagccagtcaccattttaggccactcattcttgtccagtcatctgtaggattatggtttgagggactttttaaaacaaaagtaaaagcaatacatatgatttgataagttcatgattaaatgaataataaaatagaaccatcaatgaatatgcatatgtatacaagtatgtagtgggt

SEQ ID NO: 34910 - DNA, 365 bp, Homo Sapiens
cagaggattccgctgcggctggtgagggaatgatatggagttaagacctgaatgatagggaactagccttgtgaaagatctgagacagttaagtgttgcattagatgtctgaagccctactcttacagttttatttttacttatatggagagccacttatgaccctacttatgatctgattttacatacaacttctacataagcttgattatcacgtcgctgggcctatagcatgatgaacatgaaatgtattgaactgtatttacatgtaaagacaacggtaagaaggcttccggagctgtgctggctgaacagggcatgttgaccagcaaagaagtaacacacaccatacagaaaagagcaag

SEQ ID NO: 34911 - DNA, 434 bp, Homo Sapiens
gaggatccccgcttgccgcttgactcctaacttgtgatcgctgctcgcgctccaaagtgctgggattacaggcgtgagcaccgacccggcttttgagatcatatctcttacagcattgcttattcttcagagggaagtctgtaatattgttattgggttgttattactgttcttttccaaactataccccacataatgcttgtggcattcacagtctagctgggtttcccctggaaaaattatttcaatgcaatggttcattgacgggcggcactcctcaggcatcactgtgacattttgtgggcaggaatttagtggtactcttggcccatgtgtcccttcatctgggatgctgggatgtctcagactgaagggcagatggtggtaggtggatcctgggggaagggcttatgggaaggaggtggctgggtgat

SEQ ID NO: 34912 - DNA, 412 bp, Homo Sapiens
gctgtcttccaattaatgaatgcaggatatctttccatttattgttgtttatctgaaattcaagtttaactggcatcctgtcttttcacttcctacgtatgagagttccatgtgggggttatcagtgtgcatttgtgagttcccatgtgaaggactgtctccaagtgtctgtaggtgccaggatggagatggacagagaagatcctctcgggctgctttagtgacacctagaggctgtggggttggacacttcagccccagaggcctgggcagcactgtccagcacctgcctgctcctgtcttcttcacgggggctgacttccctgccatctttctccaaatacggtggcaagagctatcccatccacccccatctggagctcagctgcccagccagacaagacggcaagcg

SEQ ID NO: 34913 - DNA, 600 bp, Homo Sapiens
ggcgtcttgaacctttgctagaatggcttacatggtccagcactagagcccacagtcaaacagcctacaagaggaccagtttgggaagagctggacatggggtaccctctggtcatccccaaagcactcacacaggtaggaaacaagtctccttcacaagacacttttctctgacatccaacttgctgatccaccaaaattcacacaggagagcagccacaccctaaaaatgggtggcgagacctccagccacagctctgacaccgtacactgcctgcactcttatcatgagccacaagtcccaggtgtagcagaagctgggccaagacttcatgctgcccaggcacccgcatttccaagtgcaaattcagcctcactggcacctggagtaagagtggctcacttccagccagcctcctctaggaccagggtgccatctatgcacagggacttcacaaggaagccagcctccacctgacacacagccacagcagtgagaggctccaagcccaggaaagcctctgataagggctgcatcttgacccaacaccagctaatccaaggcaggagaaacttggggagtccactggcattgtcctg

SEQ ID NO: 34914 - DNA, 534 bp, Homo Sapiens
atggatgcgtggttatgaaatcttcagtcacaaatggaatgtgactaggaactagagtaaagccttgcaggtagacaccaaagtcatcacgaagattggtatgtttgtttatacacagcattaaaaatgtcctcatatccctccgcgtcagccccaaaacaaaaagcacagtgggtttttgcaacatatatgactgacaaatgactagtttccttaatttccaacatctcacatgattaaaatgtcaaataaccaatataaaaataaggaaaggcaatcaatgtggaatgtaatgtacaaaattagaagggatcaataaagatacttaaccttacagaagaaatgaatgtcaaaatatttcttctctgagataagcaggtaaaattaagtttcatgaaattctaaatacgaatgtcgagaaacagacattctcatatgcttcggtagcagagtataaacgggtataatcgtgctctgagaacacattagacaatattagtacataaaaatgcaggtgccctatgacctagcaac

SEQ ID NO: 34915 - DNA, 456 bp, Homo Sapiens
atggttatcaaaggcaattaaatagtgttgagtgttctgcttttacctacatttcatttttcatgtacttagttacaaattgaaccctcttctatttttttcctgctcctgtttctgtttcattttagttttccttttccctgattatcatttaggcatgtaagtgacacccagtagcattgctttaattctgctggtgacagtgccaaagctttactatactctttttgttgtctagttgcttttctcttgctaatttgcttgactagataactaagaattcaggtaagcattagctctttgctcactgagaataatacaacttgcaagataattaatttggattgttctacatgtatttcgtttatttctctttaccttgttcatttattacgacattttgaattatttacatacccatatttcttctttcttttatggctcagcacatgaaaa

SEQ ID NO: 34916 - DNA, 595 bp, Homo Sapiens
gtataacagctatccctttttgttacttttctacctgtgagtcttacgtcatcagcactcatttgttgaagattatggtattggctttacttcttttcctccatgatcccatcaacattcttgacatcctcaacatccacacatatgatccattcaacctcccgcctgtctcccacccccatactctgtttctttgtgtcccattagacagatgggccatgctgtctaaatcttctgtgaaatcccagcatccacccttttctgatttctagcagcaggatgctttaggataataatggggatgtcagacagcagctgtattgtgttccagttgatcttggaagagcttcacttttgggtcttgcacatgtcccaggcttctttttttaaagagtctatcacctctttttctcctttctactttgtcatgtcctaagaacccaggtcttaggaaataaagttaattgctttgggacaaaatgcactttagctaatacttttgcttaaaattttatgtttaatggctcactaggcataattttgctctcttgatgctctagtaatgaactgtttcctattttacagagtgcttgtg

SEQ ID NO: 34917 - DNA, 396 bp, Homo Sapiens
gtgtgggagatgggagggaatcaggccctggaggacctgggtgcagaattcagaaatatgaaggaactggggggcccgatgagatttgaggaaatctgggggcgctaggcatctggcagtgacagggtctgagatgataggagcaaggtctagggcgatcctaagtgctattgagaaagggttttcggagtgggctgagggtgagattgagggggtggggtgagttcttgagggactctatcttgttagcagaaagaagggagctggctgaggtgtgaaggcagcacatgacattcagtgcataagaggaaggagcagggtatgagggcagcacagtgcccgatggaatgcaggagatgggggctcagattgagggagagccgaaatctggggtaa

SEQ ID NO: 34918 - DNA, 547 bp, Homo Sapiens
aatagattaagtaattaattgttaaaaaaagatatactgggcactttcacccacaggtgtgtttaaaaatacaaatttcatcacaaattattttgagtgttcaagatcacaagcaaagaaaaagctacaaggcctgatgacctaaaaatgtgacatcattactttaggtcaaaagagatctaaattaagtataaagcatattttaatccttctcaaatttcttctttgtgcatgaatataaattatggtaaatttgtataagtaaataccataactgttcttaactaataaagtttaagggttaaaacaaagaattcccaagaaatgtgaataatggcaatcatgtagcagtagtacatcctttcacatggtatttcgggaacattcttttattcaataagcctagacattacagtatgcttcaaaaatagtccaagctggtgaaccaatccaagttttgacttcaagcagactgtcagagcagcactaaggcagaaagtgacaacactgtccagttcgaaatgaaagctgtcatttgccgcgcaga

SEQ ID NO: 34919 - DNA, 388 bp, Homo Sapiens
cccctgatatttctggggctcagcgttagcctcactcgtgtgcttactcactttgactgccttttgtctatttctgggaggttggtagaatgaaagggatgctccaaggcaagcagatggcctgtccacctcctatatattgacagtgccaatgagtgtagagtcttgttacaagaaacaaagtcatgagaaatgccaggcttcctgttacacccaaagactgctggccctcctactctatcctttagaccagaaactttttcttctaagcacttgcctaccgggaaggttgaggagtcttgttttaccgtacgtagagaatctacccacaggcactgaagcggctgagcaattaggatggacttcccaggaccagcatggcatcaat

SEQ ID NO: 34920 - DNA, 526 bp, Homo Sapiens
ataaggtaagagtcacaggttcccaggattaggaactaggatatcttaaggggaccaatactcagccacagagagtagataccactccccaccccttaaaaatgcatgttctacaccagtaaggaagaaagaaaataagaaagaagagtaaaagataataaatatgtaactttggctacaaatgaattctttattatatctcattctatttggggcacttgctattagaacaaagagagaagatatatttaaaattaataggattcagaagagtagagttgatgatgttcacctcattgcgatgatctcacccagttcataaaatcaaccgcattacccattcctgcctgaagccagtcagcagaggagggcagtgagtcactccaaggtcagacagtattattaccctcttatagtgatgggcaaatccaccattaagcttcagattgagagaaacaccactgagtagccaaatgctttcgatgtgtacgtgcagaaagtcatatgtatctacaattttccagac

SEQ ID NO: 34921 - DNA, 452 bp, Homo Sapiens
tgtaacattaatgcagatttgaaagaaagattgttaacctcaggcacatcttctgttaatatctaatagtactacttgaaggttatttcctgtatttaataaattccttaaaaaggataattttctaataaggagagagaaaatgattgaaacgtctgaacttgaaagaaggctttgcataaaattacagatcatctagatcaatgcctaaacccaatgtctagacattttagacttaaatgtgcatatgaattacttgggggatcttattaaatgcaggttcttattcagtaggtctagggtggggcctgagatcctgcttttctcagaaccttccaggctatgcttacgcttatattccatcatgttttgattagtaaggggacagacccttattttgttaaggagattgaagcttatggagaaccactgacatgtccagaaatatcaag

SEQ ID NO: 34922 - DNA, 481 bp, Homo Sapiens
attgagtttagacaccagtggtctccttattatgaattactggcctgctatttattagtctttctcaatagattggcatagttggcccatttttctctgtaaactctttcactcctacctgttcccaccaacacatgtatagacatgcataccccagattgactcatactcgttttggagatgttttgccatacaaattaaatgtctaagccctgtggcatatggtttatagatctcactcaaatattttgattggccctatgccatagctctagctaggggttgccaaagtgctaaatctattggttgtgtttcagtccttaccttatttgaattcttagtaatatttgatgtcaatgaccacaccctccttgaaatactgttctccattggtttctatgctataacagcctctctgttttcttttcccttgcctctcggtcgatttcttctctactggtacagtctctacttggccaga

SEQ ID NO: 34923 - DNA, 486 bp, Homo Sapiens
cggagagagctgtggtgtgtatgctgtagagtttcacatttcacatgcagtgtactccaaaaagcgggtttgggtcaaccatttcccatctcttaataagaagtgactgctgtggggccagggacatcatgggaggtggggctgtccagttagctgtgccctgcaccttcagcccaggaaagatttgaacagagcaaaggcttcaagagagggcagaatgtattcggcagaaaagggactcaggtaagcccagcctgggatgagagcagaaaagcattcaagatttgcaggccttgctatggatgcgcttaatcaccatggaggccagcaatacccatctcagcatggctttgatatactctacttcctggcctttagaaatgacctataatttttcagtttgctttactatattttataaagaaaattctatcttatggttgattgagcattgagacttatgaaggcattaggatagatagccca

SEQ ID NO: 34924 - DNA, 636 bp, Homo Sapiens
cccagtaattctggggttttaatagtagccattctagtgggtgtgcagggtatctcatcatagtttgatttacattttcttatgagtagtgatgttgagtatcttttcatgctcttattagccatttgtatatcttcttgggagaatatctcctcagctcttttgcccacttcattaaattgagaggttagtttttgctgttgagttttagaacttctctatatattctggatattaatcccttatcagatataggatttgcaaatattttctctcattctgtggggtgcctttttactccgtagatagtgtctttgtacaaaaatttttaatgttcacgaagtccaagttgtctactttttgttttgttgcctgtgcctttggtctttgtgttagtccatttagcattgctataaaggaatacctgaggctggtaatttataaagaaaagaggtttaattggcttatggttctgcaggctgtacaagaaacatggtgccagcacctgcttctggcgagagcctcaggaagcttccaatcacggcagaaggtgaagcgggagtaggtgtctcatatgatgagacaggcagcaagagacaggaggttccagtctccttttaacaaccagaaatatca

SEQ ID NO: 34925 - DNA, 376 bp, Homo Sapiens
cagatcctgtaacatgttagatgtagctaccttcaaattcctgccttcaaagccctcacttgatagttaacagcatcccagccatacacatcttctcttcttgagaaggtgactcctctgatcatagaatcatgctcatctgttttctggcttttcagaccatgcatggctttcccctccctggctctatgcctgggttgtttttggaggggttttctcctttccactgtatgcctctgcagttagtcaaggccagagtagacccttctcccatgtcatcttccacatttgttttggttcctcatctgaggctgtgggccatgcaagcagagctatggccagtccccgaatatggcttgaagcaatgctcaagaaa

SEQ ID NO: 34926 - DNA, 408 bp, Homo Sapiens
tggttctctaccttaaacaactctaatcaatgtgcttcaggttttttaatgcaatttaaactgatgacaaagtttaagctatttcctcaaattataaataccactccatctggcttactatccctgcagagcaaaatatttattttcagcaatgttgtcatgcaaaagcaaaagaacaggaaactgtgtttaagaaaaacaaaataccacaataagattaacaaactacatacaagtttacacttacctttaggaagttgtctttgtatgaaaagtatattttcgattcaattgcatacacacaacaatgaagctttacttagttaaaataattagtcaatcactgggaaacaaatgaaactctgagataaagtgaaaaaacaaattgccctttttagaattaacctg

SEQ ID NO: 34927 - DNA, 377 bp, Homo Sapiens
agaaaaaaatattcatgcatcacattaacagaatagaagaaaacaatattatctcaataactatagaaaaaaccctattaatactattaatatattcaacccctatttatatacactcggcaagcaaggaataaaagaaaatttggcttgatctgatggatatctatgaaaaactacaactaatatcttacttgatgtttaagcatgaataaattctcaagattaagaacaaagcaagaatattagctctcaacatttaacattttactgaacgttttacccaatgcaataaggcaagaaagaggtcagagattccggaggcagaagataaattgtctttattcattgtcaacattattacaaactatacaataagg

SEQ ID NO: 34928 - DNA, 419 bp, Homo Sapiens
ccacaaaccaagagacactaatgggggccagatgccccagacacacagatgtaccccaagactgaaggggaaagctgggacaaactgatcaagagtattccatttaaaagcatcaccaaaattctagtttgcaagttttaaagattaaagtaagaaaatttctccaaagtgtcagattagcacattcacaactcggcaagaagcccttgagattccaagtgtctgtccagtctgggagcaaaacagggcagggcactccaggctaaggtgccccaacaggtgtccagtgacacttgcctctggtctcccgcatccaccctccgccctcccacgcttgcttgctgactctcacctggcatggtctctcactcaaggttgtcccgggctccaatgtcacttcttaaacccagacacccacc

SEQ ID NO: 34929 - DNA, 449 bp, Homo Sapiens
ctcctccctttatttcccactttcatctggtctactaccaaatcctatggactctatttcaacatatatcacgaattcaaccacttctcaccaccctcactgtgaccactctgtccatttcagtcacgtcttaatctgtactaatggtctaccaattggtctgtttctgcccttgtcccctttttcagtctatgattaacacagcaaccagagtgaccttgctaaacataagtcatactttttcactactctgctcaaagacttccaatagcttcccatctcacttataggtaaaaatcaaacaccttattatgatcaaaatatctgtaccctccattctctctatttcccatcaattacttttctaaagctacactggccacacctcgagttcttcaaacacatcaggcactctcactttggggtttccctattcactacccagaaat

SEQ ID NO: 34930 - DNA, 425 bp, Homo Sapiens
gaaatgatattgtgttcttctcaggaacataatattaaaaggttcttctctgctggtcctatctatatttaaaatatcaccttgtatgtgaaagaccctaaaatatgtggctataatctgctgtctatcaagttaacaattttatttctccagccttctgaatgttgccacatggacttcccaccatcatttcactttaacatgtccaaaactgaattaatcatgtaactctaaaaatctttctctactctaactttcttacttttcttaatattatcactgtatctgtttaaccttgacttaaaaccccaagtttgctttttgatcttccctctcctttgcttccattgtcctctaactgcttaacctgcttttagtctgtctttcaattttgcctactttgtaaactgtcagatagttttgac

SEQ ID NO: 34931 - DNA, 653 bp, Homo Sapiens
ctagaggatcccactgtatatttctgggtgaactttgtctccaagcactgcaagagcactgcatctaattcaaagattctatgtctttggtgaagaaggccagcatagtatgacctaagtctgtagtatctgagttaggaacaagacctagtttcctcacgcctggatgtgaggtttatctttacatgagagcaagggacgtttatgtaatcctcattagtgcggatggctgttctgactccaacagccagtgcatcattgcaagaacagttgctttaatctctaaagaaaacaccaaataaaatgcatttttttaaatcaaggaaataaggttccgtcaatgcatattgtccaagtgacaaaggatttcagacagctacgtaattagcctctaatagcaatatacatgagaatgcaatttacttttcatcattcttgttcgggtcatgaattgaaatcacagtaggagcacaaggcggtcagggataaaagcaaaggaagaaaacaggacttggcggctgggaatattcacacccaagcaagaaaacatgcaaatgaggttaaaatgaacttttcctgtgtgccttcacaagttcagaccaagaggaaaacattcttccctcccctaacccatttaatacttagacaggggt

SEQ ID NO: 34932 - DNA, 520 bp, Homo Sapiens
ggcgatctagaggatctccctgatattctggcatatgaaaatgacagtacctgatcaggccaggcagcagagtgccgaactgatcaggccaggcagcagagtgcggcgccacaaagggcagctcttgggccaccccttatggccctgtgttgcctgaggaccctccttggcatttttcaatgccaaggaccctccttggcatttttcagagtacgtgttagaagtttgtatttggcataggaaataactccttaagtatgcagacaaacagtgtgtttaagaataccctgacaattttttggcttcacattagtatctttaaagcctccattttcatgtttagttaaagagggaaaattgtaaatttgagttagatacacctagtgggtgtgaaagtttgcatatgatttaaagatataaagacttactaataatattatcagctgaatttgaggcatgaatgcaaatccagccttactgggtatggactgccctttgtacaccagaaatatcagggggg

SEQ ID NO: 34933 - DNA, 621 bp, Homo Sapiens
atgaatgctgggggagccagataaatgtagaagaagcagaagtatatcacagctcaagcagatcaaatatattgggtgagatagcaaataagtatcttacctactactatcttaaaattgtttttattttattttccttgtgtaatgtaagcaaataggctttaggtctcagcttagcaatatgtcgttggagtagagaggtaatacaaataaccctaaaaataaaataatttaaatgtggttatgtaacttaaaatgatggtaggaatttctgttaccactacttttctttatttatttattattgaaattagcatggtgtaatagaagtcccaggattcttaaatgttaccttctctaactaatatatatggcttgactatctagacttatacttaacaggtatttacatctttgaacacagaacagctgatggagaaagaagcattataaataatatacataaactcagttggtacagataatccgtaattgttaatgttgaacttgtctaaatgctatatgtaatatcttgcatcagtaagataaagtaattatcctttcatatcgttttttcccaccaaataaacaataaaggaccgaaatatcaaggggtacgag

SEQ ID NO: 34934 - DNA, 595 bp, Homo Sapiens
aggcgatccccttagagtcgaccggctcgacgtgcacagctaggcgcgggcccgtcgtccaacatggcacgtgctcctgctcaatgcatctcatcaaacaagggcaattcgtcaagagtttctatgggagatcattaagcatccaccgaacccggcccatcccttcttaaagacagttacccatatggtaaactgctgattgtcgtaggggacgatgtatcataaacgtatcataaagcgtcaatgttttcaccacttcttccacttaagctctcaccacaaagttggagtgtttgttctttaatcgtagcagaattcatgttgctctgataggggctcttatcaaagcgatagttcttagtgcctcaatctagatcgtgcttagagcatgttaccgagtaagtgggtatgagttcatttccatgcaaaaaattttgagatccatgcatagtttcttcataatatgcatcttccatgaacattttgagcaccctcatacgttatctctattggataaatcctgatgactgctgattctcaggctctgtgtatattacgtcttaggctaccttccccaaacttgcatgtgtttgca

SEQ ID NO: 34935 - DNA, 627 bp, Homo Sapiens
ggcagaccctaatattctggtcaataatctttatactgtagtatctcatctgctattaatcccatcacatatactatttatctcacatgtagttttaatctctaaaagtttaatttggttcttttaaaaatatatatttcatgactctacttaactttttgaacgtatggaatgatgttacaataactgttttcatgtacttgtatgctaattctaacatctgttttatgttagagtcacttttgattgataaaattttgtcctcattatgggtaatttttcttccttatgccttataatctttgattgaatataaaacattgtgagttttacctaggtgtgcattgaggtttttttatgacaaatacatttttgagctttgttctgggatgcagctaaattacttagaaacagctttaacttttgagataatgcttttaaccctttctaaggaatgactggagttgggctaagatacttcatatttgaggcaagattcttctgtgtactctaccaaatgcccaatgactcatgaggttttctaggtggtctcatgggaaaaggtacaatttttggcaccttgtgagcaccaagcactcttccctttaatcctttcacattggtcag

SEQ ID NO: 34936 - DNA, 542 bp, Homo Sapiens
gtccctagatattctggaataacacagctgtgtttgtttctccacgcagcgctccagacagaacggcagcctggcccgccgcgtgcagctggaacctcgcaccttgggacagatgccgtcagggagccgagaaaacactcctcccgcaggccactgggagctgtcatgcaggcggatttgcacggaggccaattcagggcccctaaggaagcaagtgatgagaccacagaggtgctgaggtcccagaggggaagtgagcattgagacacctccagaggccttttcccttcgggattgggggtcatgatcaggcaggacaacgggccttagagttgtcggccatgggaagatcatccctagtgtgatcagtccatgtgggaggaccgtgaaaaggtcagaggccagccctggaaccttccaggtgggaaaactgaagtccagaaaaggggaatggggggattagggtaagagacatggtctatccagcacctacttcgtgccaggccccacaatagttcccagaagcactcacctggctctgc

SEQ ID NO: 34937 - DNA, 513 bp, Homo Sapiens
accctgaatatttctggactttgcatctaaatttatacttgacaagtaaacttttcatcgtgtgcattttcccgtaatctctcaacagccaaagacaaggatagacggattagtgatgggtgaaaccaattcaacccaaaatggcaacacttaattacaagtcttgttgtttataattaactgtgtaaatcactaacttgaaagtttcttttcaaagtatttaaaaccaactcttttcccagggggatttaatactgtatattattgcatagttaagtattattttgtttgctctatgaacaagatgtgaaaatggcacattttaccgactatcttgctagcaaatttggaaaatgttcatgaattgcattactagcaccatttggtgcttctcagtatttttggacattttttgccttatatatgaaagccaacggaaagacaatccaactacccaaatgactatgagtaatttctgagagtggagagtgagggtcaaattctcaatttcag

SEQ ID NO: 34938 - DNA, 504 bp, Homo Sapiens
ctggcgcatcttcagaagataacatgacacactgctcctatagagcaccatcagaagagtctgtataaatttgtcagtcctgtcacattctcatgagaaaacaagataagattatcttattttaaaatgacatattggatttaaataatggcagccagccttcattatttcaatttcataaaacaatgcaacaaattccttttcttaatgattctttaatatggtgtcccaatttctctcaaatcactagtgtgaatgtcaagtggatgctggctttggcactactctaagagatgtatctaagaacctaacagaggactaagcaatcttgatgtgtgtaccacggatgtcttagagataatggcagggaattccataggaagttggcagatggtcttttattcctataacactccttggtctttcataatatcttaggtactaactcataatgtcaaattttagaggcttaactccttgtctttcaccttagaggaaaagctt

SEQ ID NO: 34939 - DNA, 645 bp, Homo Sapiens
tccctgaatatgctggatatatcacttatcgtcatctccatccctatcacctacagtccaaggtgccataatctccaaactgcaatgacttagtaactagtctcccaacttctactcttacctcccccttggactgattattcacatagatagcccatggagaactttgcaaaatgtgaataagaaagcactgtttccctactttaaactcttcaatggctagccattattcttgaataaaattcaagaataaaataaataaaattcttgaataaaattattgagtaaaattcaaactccttgccatgatctaccaggtcctaaaggagctagcccataccaactgctccagcttcatctcatactattctccccttgctcactgatttggcacactgactctctctctccattcctgtaatgtgccaaactcccacagggcctctgcacatgcagctcattctgcctggaacactcttccactgagtcttcataaaagccactcattttttagatgtcacctcaaatgttatctcctcataggggtctccgttgaccatcctatttaacaaagtcttcattcagactctcacatcaaagttactctatatcacatcattttgttcttcttttattccttcatac

SEQ ID NO: 34940 - DNA, 502 bp, Homo Sapiens
ccctgaatatctctggtgagaacatttaaaatctactcctttacactttaaaatacgcagtacattattattacctatagtcatctattaacaatgtgctgggcaatagatcaccgaatcttattcctccgcataaccaaacgttgtaccctttgcccaacatcccctctttccctatccctccacccttgagcccttggtaaccaccattgtattctctgcttctttgagttggacatttttagattccatatatgggtgagatcatgcagcatttgtcttttcatgcctcgcttatttgaattagcatcatgtcctccaggttcatccatgttgttgcaaatgataggatttccttctttttaaaggccaaacagtattccattgtgtatatgtaccacattttcttcatccattcatccaccggtggacacttaggtggcttccgtatcttggctattgtgaacaatgttgtgatgaacataggctttttcactgcagc

SEQ ID NO: 34941 - DNA, 350 bp, Homo Sapiens
taactgggggtgctgtatacaacgactgtatatgtttaggaagatccttaagatactctacagtagcaactcccaaacttttttagcactagggactggtttcgtggaagacaatgtttccacagaattgggttggttgggggatggtattcactttggttgcagaagaatatatagttgaaccagcatcatttattgaaaaaattcttctttccccactgtactgtgtcacctttgtcataaatgagacaaccgtccatatatgggtttgattctaaattttttagtattctgttgagctatatttccttgtgccaacaccatcctgtgttaacttctatagtaatatg

SEQ ID NO: 34942 - DNA, 524 bp, Homo Sapiens
agagtattaatatttgatgaagtccaatttaataaatgtagttggtcatgagttgtgcttttggtgtcgtgtccaagtgtaatggaactttcaagtggctcatggccacacctcgcctttctcgtaacggagggtggtatgtgaccaagttttctggtcaatagactgaacaggttgttgtgttccagaaatcctcctgaaattttggttggtagactttccctggctgcttcttctagtctcttccattttgtttttgggggtggggtggtgacagctggagcaccaccttgaggcacagagatgcaggccacaccgcaggcacggtctggtggggagacggaagtcatcgtgtgcttgagggcttgtggagccgagcctcatgccaatcctgcatggcctgctactggcttttaggggaagaataagaaacttccattttacttagactactgttattttttattttccatcatcctgggccaaatctagaccaactggatgcagggatattcatgaaactc

SEQ ID NO: 34943 - DNA, 481 bp, Homo Sapiens
agtgactcgcgtcttgacgagtggaacagagaatgaacaatggtatgacctacacggtataatgtggctttctttctggaaaatcagtaattaactcaaggaccaaattgtcttattctaagatgtttgtcttcaaaacaatcctcttcactattttcatcttcttattgtggtaaatttgtacatgacagtattcaaagcattctcttacttcagcaaccattcgtttatgaagttcctgtacattgcctggttcactgagaacatgaagctgaatcagacagttccttcccttaaggaatccacattctggtagggaagatagagaagtaaacaaatgattacagtaggtacaaaaggtaccctggagtcctgaggaggactcacctctgctttagcacctgacagaggaaatgcctgaattgagtcttggagggtggtcagagattgctaggtgaagagatagcagcagaagcacaaa

SEQ ID NO: 34944 - DNA, 558 bp, Homo Sapiens
acgcagagtgaaagggaggccaggagttctctgcagactccacctgttctccttactgccctttgtagtgaatggacattgactcaagtttgtctatctacactctttggggagccccttaaaacccggatttgacttggaaatgaagcttttggttatggcttctgatcatgctatatgtggtagaagcttagtgtctgtatttttaaaattcagactggcttttaatactgggtaactaagtcatagatgaggggaagttgatggagtgatggaaatagacaattgccattttgcagcccatcaatgaattgatggatctgggcatgagacatcgacacttggtaatatcctccagagacaataagctgttgtttgcccctgacagtagaatactttacctccaaggaagtagtcttataaaaacaaatacagctgatctgttcaagtaacaatttacagtaactacagaggacacgaaaacatggtaaaacaatgttgttagggatacattggcctattccagatgaccaaggtctgttcttaacaataatacag

SEQ ID NO: 34945 - DNA, 429 bp, Homo Sapiens
tacttaaccatctatgtactgatgccttctaaatgtctatctccagtatgatcttttcctttaagctctagatccattgacaccctcaccatctctaaaaggcatttcaaactgaacacatctgatacagaacttttcatttccttcccaactttgcccacgccagcctgctcctccttcacgctttccacttagtatatgatcccactattcactcagtctctgaagcttaaaacctaggattcatccttgactactgtattctttacaatctactcctaatgcattagcaattcttgctagctctaccttcaaaatatattctgaatagactatttcttgccgtttcccctgcttcccctctaaatcaaaacccccattctttttactgtgtgtaactgccgagcctgctctcaaccagttctcctt

SEQ ID NO: 34946 - DNA, 508 bp, Homo Sapiens
tctcgactattttaataatcgccatactagactagccatgagattgtatctcatatgtggtctatgataatgcatattctctaatgatcagtgatagtagagctatatattatatatttattggtgcataaatgtcttctttagaggtctctgttcatgtcctattgcccactttttaatggggttgtttaatacttgtaaatagtaaaagtaactagtagatcctggatataagaccttagtcagatggatagattgcaaaaattttctcccattctagtacgtatgactgtacactcttataataggttctatttgctagtgcaaaagctctataattacgtcccatatgtcaatatttgcttctaatagcaaatgcttttgacataaccatcatgaaatctttgcccatgcctatgtcctgaatggtattacctagatttttaactaagggataaatagtaaagggttaacattaagtctttagtccatgtatgagtaattttgt

SEQ ID NO: 34947 - DNA, 480 bp, Homo Sapiens
tatctgggaaagttatgtaattttttcttacatattaaattataaaggataaactctccctttgtttttgttgtccaaaactggtagtttgtcttgcaatttttatatttatgtttttttgtcactatccacaccgtattttttccaaagcctgagccactctgtggttcttgccccaatataacaatcatcccttcactcttagaattccttttcccttgtcattttgcctttctacagtttataaaaaatgaggactttggggagggaaaaaacccaacatttctgtgaactcgagactataggcagtgcctaaaccagtaggatcaggcaaataaaactagttggacagcagacatatcatgaactcttgcaacagcgtgttatctgtatgcatgtctaaagtgttatactgattcactattacaataaggatcatgcagttgaccagggtgaagcaggactgtctacaggattatt

SEQ ID NO: 34948 - DNA, 498 bp, Homo Sapiens
gaaacagaaaaagtcaatttacccacgcttaaccactagtttcactaaatgtctgtttggctatccctaattatagaatattccctgcacttagtatatctgtcccatagtaacaaagatgtctaacacatttgattatacccaaccagcaccctatgactctatgttaagtatacctacatttaataatttccaaggccttcttaacaaggtgtccttacacaaactgtatgacatgacagttcatgccaagataacttggagtcgccttttttacttggggttggttccccttactcttataagggtatgggaatcagttcctttatcaaaaggggtggtaatgtcccagaagcctgccgaaccgtcagcaagcatactctaaggtttggacagatctccaaatgacgtgtccaaaagctctctgtcttgcattcccagaagttcagtctctaatttgcccaaaatatcaggggacctctaaatcaccgcagctga

SEQ ID NO: 34949 - DNA, 675 bp, Homo Sapiens
cactaagttaatcataataataacaacaattataattactgagctcttaaatgtactgtctcccatagttttcacaacaaccttatgagaaaagtactgctgttatttttcccattttgaggaaatgaagaagccggccatgcaagtttaagtaacttgccctaagtcagtgtctcaagctcagcactactggacaactgggcccggtaattctttactggaggggtagaggggctgtcctgtgtaccataggacagttagcaggagtcatgtctttacccacaagatgccaatagcagcccccatccagtggtgataactaaaatgtctccagaccttgccaaatgtgccctgggggcaaaatcaatggagaagcactgttctaagtgatgctggagatgagagtcaagaagccagggttctggctgaggtcttaccactgcaaaggcgccacggccccctcccaagagaaggcatcaagccccctttgcatgctccaagcaaaggagccggcaggagctcttgcctctgtcgcacacacagtctgtcagcactgcagacaggcctgaagcttgacaaatatccaagtgagacaaagctgtaccaagtgccagcaatttcagacacagagtaatccttcagtacaagtatgccctgtgtaacttctcctatcta

SEQ ID NO: 34950 - DNA, 639 bp, Homo Sapiens
atctggtcagtgctgaatcacttccttcctcttcccaggatatggtatcatcctgtacattccaccataataatggggccatctacttgcagagttactgcttggatcaaacaagataatgaacaaaaaagacctttcgttgtaaaggataccatcatacaaggttaccgtcagagaaatgtgttaaggatcggcagaagtgccaactaaacacaaaactattgaaggatgtaaagaaaggtatagtttacctaattgcagttagcttttcatttttcaatacggaactgcttggttctgaacaggacaaaagttcatctgataacccacaggacatcacccaaggaccgtgcaacgatgatcatctaaggaaacaagcatcagcatctgagcccaaacaacctacaggtcagtaacagcataaagaagcttcaatctcaggtgtctgcatcaagcaaggtttaatcatagtaactaaaaaaatgaattatctgaactaactttggcaatgtctttgaaaaaaggtaatgatctctactggttgtcttctcagacttccctaaatgttctacagacacaatttagcagaagaaagtattacgaacaacagcctagaatggtggctcatggctgtaatcc

SEQ ID NO: 34951 - DNA, 545 bp, Homo Sapiens
tcttggacagctacaggcaaaaatacagcagcctggggaaaactcagactgtacctgcacagataagcaggcaaggtccagcacagaagccttttgttctttgtgtgattagcaggctcccaggaaaatgttttctccccttttcagattgaacacggggggatccatgggagattgcactggaaacagagggggtttacctaaaagaaacccacaattactcaaacaagaaaaaactatgctttgtgcttacctagagacatctcacagctgtataggtaggtggagttgtgcagacaggttttcaaataagagaagttactcaaacagctacagagatgagaggagtttcttataaaagcttttgcattcagctgtaaaatggcaccccacttgggctctcctctccactgtggagagctttcttctttcacttactaaacttttgctccaacctcaccctttgcattcatgctccttaattttctcagtcatgacacaataagttcaaataacaccttagacaatgagacaatggaccctga

SEQ ID NO: 34952 - DNA, 705 bp, Homo Sapiens
ggcggccctagatattctggtagttaagaaaaggtgaatttttctaaatagcaatatagaaataataatatatttgggattctttactgcatctaattttgaattacccatacctgcatgtttggtggagctggaactattcagatttctattcattgggatacatttaacccatattacatgcttatagagcaaagacatcaaacaaactgttttagaatatgagatgttaaagaaaaacatgatctcaaatcctaggcaaacgcagtgcagcatatgaatgtgttgggtagtagctttcatgtatagcagaatagcgttaggcatgttgcaaagttctagtatcaatttccaacaatttcctttttatcaattcctgtgatcatctctgagaagcctctaacataatgtgtcttctgctaacactactggcacagcattatccacagactttttacatgctaatcctagccacagacctttggtgattctctcccttatcatccactccctgggctctttggtgtgggatcgaagaagagaagcctcagagaagcattgcttctgaggaagaactagatacgtggcgaaggtgtagtatgtttgagagacaatacagtgaaaggaacgaatgaaacaagaggtgaaaattaaggaacttgagaaaatgaaagcaaacaagacactgactggtctctgctcacg

SEQ ID NO: 34953 - DNA, 599 bp, Homo Sapiens
tctggcagagtgtcctctgggcgacattaaggtagcaagttgggaagggcagttaacttattagttcatatcagattagggaggcccttgtgagaatgatgggcaggaaggcctgtttgtcataggacagcaccaggaaaccaggcagaagccctgtattgtactttcagctctgccaccaactaccagccatccagactgctatgggcccagctctacatcctacttgaaggcctctgaagagatggtttctaaatttctcttagcactaacttttttcattgcttttgtgtcctctttatattattttccttaatgtatttcctaaatatgtgtctctgaaaacagaaaaagcacatcaagtgtttgcttagattggtaggtagagttctgatttggcctacttttagatttgatatcttctatctagattatgctttgctcttgaatatgagcctcaaatgtaaaaggagcagtcttttacttttcagctggcatatttcagagatggagacagcaggtcattttcagcagatgtttgtgatgccatggaataacatgaatagtgaaacaattactgtatcctggaagagatctga

SEQ ID NO: 34954 - DNA, 485 bp, Homo Sapiens
ctggtgtaaatatggcagtcagaaattttgtcaaagagcctatttttaatggataagccagatttctatctaaagtagttgatttgccctggtactatttctacagccaagtttcctcggctgtttttgattgttaaatatattggtatcactagggttaagaattgcttgaacatattgggttcttttaaatccttaaaataaccatattatgtatgaaggctcataaaattagagctggtagaaacttaggtagatcaagggattcttagaaaagtcagttatcagctgtaccagctccgaagtgacactgtaccatctgctaagtctttctacagctactgaaggacacatgtactggataaaaagatcattccttagaaaagccaaaaagaaaatttcctgtgctaagttgggtctagcaaagattttctgttttgcactttcatttgacctaaaatactattttagaagttttttaaatc

SEQ ID NO: 34955 - DNA, 608 bp, Homo Sapiens
cggtaccctagatattctggatggcagacatgtctgaaaacgtgaaacataaatgaggctgaagaaattgtgaaaagtttagcagaggaggaatagttcgtcaggttctttaaatacaagtaaaggggaaaggaaggaccatttttaagtttagatattccaagggttagtggtgaggttgattatggtatgtcttctcgttgatgagggaggagactggtgaatagtggaaaataaagttaaatggctagggtggggccaaattatgggctttaataaaagccaggcatagaaatttagattgggatggtagaaaaaggaaagctttaaaagtttttgagccaatgaatgacatcatacaagttctatgagcaatgatttcaggatgggagagaatggcatcaggaagacccacttgaatgctggtaagtaatgttaccaacagtgccattagtaacattaatgttactagggcctggactgatatgctgatggaagtgagaatgaaagagattaactaagcctgcttgcgatggacagcaatggggttgctagaagattagctgtggggaaaaagttatgcatttacctttgggcataattaaatg

SEQ ID NO: 34956 - DNA, 361 bp, Homo Sapiens
aacgataaaagtatttaaaactaagaaattttccctgagtataacttgtaaaaaatcttacacattgctatgttaggttgaaccaataaaattggcaatagttgacagttttgagataacaaaaatgataatttcatatggatcaacctaatgcacagtgttattgacagaattgttttcttaatattctataattacaatttgatatgctttcttgtttcaaagattatttcaagtgagagatttaagtgttcttaatgacttaatttttactcacatttttctcaaaacatttttaaattctaaaaatttgaaagaattaagaattctaaaacatagctctaatgttctctttttactc

SEQ ID NO: 34957 - DNA, 574 bp, Homo Sapiens
ctttaaaagacagaaaaaagtagacaatgacaagaaaataacacgctatccattatacgagaggttattcttataccataccctattgtaaacactccctgttattacacttaataatccttgcaacgaccctagtaaatataattcgtatcctcatatttaccagtagcagatagtcactgagcaagaggataaactgctcaagcatcacccagcaaatgagaggtccagtagcagcctgcaatgggtcagcatcaaaccttggctcttatacactatgctgcaccgcctacaaaatcaaataaagttgattatccaacagacaaagggaaggcacacacaactcctttagtttatactactgtttctgattactaaacaggttctgaaactgtttctgattactaaaaccaggcttagttagggacttttagcatcagtattcctaagtggtcactagtagttaaaacactgcctgtctagaaaaaagaagttgagtatcatccactctgtctgaatgcttataccctcaacaaagcttatcaaaatgaggtcaatcccagaaatatcacgg

SEQ ID NO: 34958 - DNA, 657 bp, Homo Sapiens
tatttctgggagtctaacattctttgtatgttactttttcttgcataggcagtaaatttttatatctttgctttacttttatcaagcaatatatgaacagcattttctaaattaatggaaataaaatatttaaaacaaaaagtcaagaacgttctagtgatgccttttcactattccagaggctcacctctcatctgcagcatagactcagctttttattttcatatttccatatatctgaataacatatactgttatcttttgattcatcaattttggaaaagaatattgaccttctgtgatggtagataagtatctagatctttgatgtcattctttctacttttattttcccattatacttctacagttatattaaattttagtaaagtcaatattgaatgcctatactatcatgtttgctcaaatattactcatagctgaacactttagtgtgctgcaattatgtctctttaatactttttggtttagctaatacttgccttgttttataatttagtcaatatctttgcacccagtgaaaattgatggatgtattaattttttaggtcagccataacaatgttacctcaaactaggtggcttaaaataacagaaatgtattgtctcacagttctggaggccagaaatatcagg

SEQ ID NO: 34959 - DNA, 514 bp, Homo Sapiens
tctggtttggaagtatcttcactgactataaaactatacaagagagcaaacttactcagaattatcccaattagattgttgttttagcagtcactcactacagggcaagatatagtccaccatggctagtaatgaaaccagctgcatcaccagcttatttctggctgcagagaaaaaaatcaaaaacattagctgagtttgggtttctgagttccccaagaatgatggcagtctcctggactcttctcatacctccttctaaaaactatacacagcaacaagaagaacaaatagaaatacccatgctctgtacctacagagtaagtaggagacagaagagagctaccaacacaaacgtatgagaaagtagggaggtaaacactgaagaacagcaggataagcgctggagctgaccctagtgtggggattatagcaagagcttcacagaggagttaagaggtcagagaactctcagtggctgtaggactcagataacagcagccaggatttctcc

SEQ ID NO: 34960 - DNA, 555 bp, Homo Sapiens
gaattttctggaatgcatacacacaaaggaataatgcacacaccaagggatgaatgaatgcatacaccaaggaatgaatgagtgttcacaccaaggaatgagtgagtgaatgaatgcacacgaaagaaagaatgaatgtgcacaccaagtaattagtgaatgaatgaatgtacacaaaggaatgaatgagtgaatgtacacaccaaggaattagtcaatgaatgcacacacacaggaatgagtgaatgaatgcacacaaaggaatgaatgtacacatcaaggaattagtgaatgaatgcacacacagaggaatgagtgaatgaacctgccacttgtggacgagtgaaaaaagcactgagagatcccacagatgagggagcccccatgtgtgccccgtgccgttgaagcggcctggacattgctggtgcatggtgtaagggcttgggcttgggctgagctggctcacaggcgacccatcaagtgtcacaaatgaccttgaaccgctgccacaaatgaccttgagcagcacgcttcccctcccgagccttagcctcc

SEQ ID NO: 34961 - DNA, 576 bp, Homo Sapiens
cctgtatattctggggttgtgctgtgtcagtcacatcaacgttatgtggcaggcattctggttctaactgccaggctcctggaagccactgagacaccaaaccctatgggaggtgtaaggcaggttccctgtgaaggaaaggggtatctggttgggtaatttgcacaccatcagtgacgagaaactgaggatagagaaatcttgctcaagacataattcagacaaagggacattatggtaatttagacaaaagactcaccctagagtgtttttatgcttggcctctgccaccatcatttttctttcaatgtctgtcattgtatataaatgtttattatactagagttctgtcataatggatatgagttgagacaaaggatagagaaagtaatatgatgctggctacttttactccaaaaaggaaattctaaacaagcagagtgaagccagctgctctatatgtcacattgatataagtcactgaaatgctgagttcccaaaattgtgttccttccttttcacaatctctccttgcttacatcggaagtggaagtgagcatggtcactggtggacat

SEQ ID NO: 34962 - DNA, 705 bp, Homo Sapiens
tctaggtagttctaccctatcctcccagtgtgcatgcaggccttagcttgagttactccatactggctttgttccccttactgcgcatgtctcaggaaatggaattttccattgtgggcatctctgggcaagtctcctgtgtagtctttcttacctaggcagctgtggacatgtctaaggcaagcctccctgtacaagttctcttctctgtgcctgcagtttgatttttcaagctgttcttttgtttggaagaattttacagaggacccaccctaactgcctgtctgactggtttcttccttcctcctttctcattccctgcttcaggagtggagaccccaactgctgttggggaaagtggacgatgaccactcctggctgcttcctgctggaagggggcgtcgttggggttacagcagttagggctcctcctgagattggtctaagggtccccagaagaatggcgtgtctatgtgtggttctatctgcagcaccatttggagtttaatagcctctaagtgagaggaaacaatttgagttacagtattgaatatacaaagtccaaacattagtacaaaacacacgagcaaaagggggcctaataaaggagctaaccagttccaccaagaagactggaatccatttaagagggattgtcgccactgggactgagcccgcatcctcttatctgtcatgttctatttg

SEQ ID NO: 34963 - DNA, 364 bp, Homo Sapiens
aaggatcccccttgatatatctggaacagacaaactctagactacagatacagaggatcatatcatgcttggagtgaatgagattccatacagaaaagtcctgatcagaaactataggatttgaaagtttctgaaatggcttataacactgactctccctcttgggactaaggacctgttatcaataatcaggcttttccaaccagatccttcttgtgactacgctgggcactacgagactgattttttatttttaacaaccaccttatactgactatatgaggagtatgaacctgcctaaaactatctgttagtaccccctaaactctctctggtaaaaaactttcattcacctgaagataac

SEQ ID NO: 34964 - DNA, 364 bp, Homo Sapiens
aagaggatccccctgaatatatctggcaaagtagacagcatccacaacattgctaggtgtacaaattaaaaagacttacatcctgacgccataccactcattttatgaaggtatctctattaccttggagattaacatcaagaaagtaattaacaggaatcaacagaacaacagtaaagtcacctggcacccagaagggcacattgtttgctatgctacaggagccctccaaactctacagctgagaaagcatacaggggccctagagtcagcattcattccaaaaacacaggaatgatggttgctatttctgcttaatagatcaggacctcataaatgggtgtcatcttcactggacgaatca

SEQ ID NO: 34965 - DNA, 361 bp, Homo Sapiens
cttgatatgtctggaattatcttacagcgcaattatatggcttcctacattaaggagtgtttgcagtccagcacactctgcaggagaaaaaaggtgtggtgtggcagaaagaacacaagtttagcagttaagatagttgttaaattcagatccaaggtttgtcacctttctcgctggtggccttgggagagtggcaatctgaacctcagtctcctcttctgaggaataaggctgccacacagggatgttgggagatcagtgatagcccacataaagcacctagcccagtaaaatggtctctacttttcacgccaagctgcctatacctcctctcacccaacatatccacatgctgaccaca

SEQ ID NO: 34966 - DNA, 359 bp, Homo Sapiens
tatatttctgggtgctcctctgttgggcatgtatatatttaggatagttaggtcttcttgtagaattgaaccctttaccattatgtaatgcccttctttgtctttttaaattattgttggtttaaagtctgttttgtctaaaattagtattgcaactctgatttttttccgtcttccatttgcttgctagatttttatccatccctttattttgagcctatgggtgttgttgtatgtaagatgggtctctagaagacagcataccaatgggtcttgcttctttacccagcctgccatgttataccttttaattaggacatttagcctgtttacattcaaggttaatattgatatgtatg

SEQ ID NO: 34967 - DNA, 567 bp, Homo Sapiens
cacttgatagtacgtctgtgcttatgttttcctccaccttcttactacctgttttaattccttgatattttcttctgattcataatagctttctgagtagcacatggtacttcaccccccatgctctccacctgctccctcagaaagcacgtttccttggtatgcagaatgctcggatcctgcttatacattttcacgaagtcccgaagctcgttcactttgcgaaggtccagggtcggaaggcagtgggcgaagctgaggggctgcaggccagtttcaggcccaggcactggcttggcgtaacctcgaagaaggggtgtgtctagtttaatttcataacttgtgttggctctttgtttgataagaaggtatatcactaaaactattctttttagtgcctagggttggtttctaattatatatgcataaaagagcaagaagaggtttgtctatagtaactatacaataattcggaacgagatgcagattaatgaggttaaggtaatatttatatgtatgagaaagattttctgccactgtaaaaagggtggggcagtaccctctgac

SEQ ID NO: 34968 - DNA, 532 bp, Homo Sapiens
aatcaggtctttatagatatattagtattatcgtcaccattgatacatggtaatttttttcagatgtggacatgaagtaaatattctgatttttaaatgtttccattataatggctacatgtcaattttcttattggttctgatacttattcggtttcttagttttccaggtaataatttatctgcaagtcagcgtaacttaattatttgttttttaatagttcagtattaccattgcctttgttgtttcattgagaacttccagtacaatgtcaggagggggaaaaaaacaacggcaatggcaccaatccttctcttgtggttcatctttatattccttagaacatacggaatgcgttctgacatagaacttatggaagagtaattcggaattttctgatgaatcaactgtctttaatcttggcaagttcgaaaggtatacgttattgtttccatttcccagatggagaaattgaggttcaggaaggttacacaaagtcccaggtctaagaaaaatgtctcccagattcca

SEQ ID NO: 34969 - DNA, 529 bp, Homo Sapiens
gctggggctggactctggtcactcctgaatcccaagtatccgttacctttacaagaaactggtgtggttctgtccgctaggggcaagacctgttttctgaatttactttctgataacaaagtaacaccatggaaaagaagaacctcagaaaaatatggggtcaccacatgggctttcccagtgctagctgcctgtttgggaaagctgcaatgtaggctacagagggcagtctgaaaagagtccttctgctttcgcttcctggagcttaagaagaaaagaggaattaccaaggttgtggtgggttatttactctggaaatatcttggtcacactgtccgtggcaaaagcggaaagcctagcttatgtggatagttgaaggtgactgtgtgggccatcattatctacaatagaaatgactcaagccctagcatgtaatctcttagggacttaacaagttaaaaggaaacaaaaaaatcatatcggaaatggcctcttggtttaatataaacttggttacaacattcaaatt

SEQ ID NO: 34970 - DNA, 447 bp, Homo Sapiens
tggaggcagcatctactaagcactgagtcactgtacaaggtatactcataagtgatttcagtagtactgccttttaagaaaagagcagaatagacaactgcgtgttctggccaaattttgtaatcccttgagaaactcaaatagaagaagttccttattaatgtttttaagttgccatttgatcttcaaacactgatttcacgtttctttttcagcacaccaaatgaaaagctgtagggtcatttggtaaaggaaaaggtaagactctttatatgctggatttctttttctaattctgaaatgtctcttgggactaaaaacaattgcagaggggtctgagcttcctagaatggtatgattctggaataaataaaaaccgaagaaggacaacattaaaaaaattttttcttagaaaattgagaaatattcagacagcctgcctttctc

SEQ ID NO: 34971 - DNA, 504 bp, Homo Sapiens
gtatatggtagccacagatgtgaagcaagatgagtgagtcatggatcacatttggaaggggcaaccttcagattatggtggtgacactactaggaagacaggaagtggaggttgggtttcatgcttgtgtacctggtgatggtattgtacttcagaaaacaggtgagggaggtaaatggccatgaagggagaatatatctggtagcctagtttggcaggtgacataggcttccaaggaatgaatagacatgagatgcaggcagaagcataggagtagctgagggaagatgacactcagcctggaccttgtgctaattcgccactctgtggccacaccacgatattgagatgacttttgtggggcctggggtgtttcattcagcctggtggatatggaggcaaataaggtcaccttgtgagagtcactaggcccgagattgacggccaatgggtctaggctttgaatggagttaggtggacagaagaaagtcataatttctgaag

SEQ ID NO: 34972 - DNA, 581 bp, Homo Sapiens
aagattaatagtagaaaaacaatccagcaaacaattagggaaacatgttattttacatatgaagggataaaattttctcttaaaaaagaacagtaagaaaaaagtgatgtttaagagttaataggatctaacaacttaaataaattccctctgtcaaaaaaccagttactttcttaattagaagacatttcacatgacttgattaaaaagtgagttatgttctcttattaaattaatttacactttctggggattcaatgaagggagaagaaacaattataaaatgagtaaagtttagaatgtcttcagtaaacactgttaagtaatttttacattttgtctacagaaaaccagtctatccaagaccaggcacctatgttggaaggtgaattggttgtaaaatatacctttggaaatctttgaataattgaatacaattaatgaatggacattaacaataatgcatgtgaacttcaaagatgatgatatcccaaatctgctcaggatcatttattttatttggcttcttaattgaatcagattttacaactgattgaatatacgtgattacacaagtagct

SEQ ID NO: 34973 - DNA, 462 bp, Homo Sapiens
cagcttcggtcgtgtgtgatcagggaaacagctccatagcctcaaacgttaatatctgaagattgagatcccaggcatgtggtggtgtgcacacctctaacctcatttaattaggcacagatgaccacattatgcaacttcccaacagctttctccatctacccgtgctagtccagcacctcagaccacacttaccccaaagtatctcacaggccacactataaaagattttagctttcagtcagacaaatagctttcagtcaaaacgattagactgaggtggtagaagctcaccaaaaggggaaagggagtttcccaataacatgtacgtttgctggccctagcagtctcagaggcctgtcagcctgcaggtcccgttccaagcacagggcatgccaagagcagcccactgagagcagaggaagagggctcaaacatttgggacccagacaatatatttag

SEQ ID NO: 34974 - DNA, 528 bp, Homo Sapiens
atgtctggggtgatgggttggcgtaaagaagagcacaggctccgtccaatctcctgagacagccacgtctccgctgacatcccactgtgatgctttcagatagtcaggaatgtttctgataaccttcatccagtatctgaaacacaatgtgagagattatatggttttagataataacatcccatttagttgactaaaatcttccaaactctgaaagctgcacactgctactccagagagtgcaggtcttagctcttctcctttctgacttcaagatgaatctttgggacgatgtttctggtgcttggtccacagtgattcacttttgaaggagaggccacatgacatgaactgcctggtgttacaacctagctaacatatttgatgctactcctgttgtctgtactgcttattcaagtagtattctaagttatgttactaaaaaacatggtgggtaaagcacaatcctacccatcattgtcctccaaaataattgtatgacatacacggcccagcccattgccctcc

SEQ ID NO: 34975 - DNA, 521 bp, Homo Sapiens
gggatgttaagagggtcacacgtcagtatgatggtaggagtcaaagtagtagtatttatccaaataaactttaaccaaatttcatatttcctctatgggagaaagcatttcctaatgtgattttcctgtgactacttgttttccagttcatttatttttcagctcccaccctgtcacagtacttaccaatctttattagttaccaaagttaaacacattttttgaatcaactagccatgtgtatgtttttctctgaccagctttccattaccaccataaaacaatgataggtaaaccactgctaaatttgaaaagtaaatactatgcaaaactacactcagagtgagaagattaattttacaagagaccactttaccttagtagcaacactcaagtcttcatcatccaatgtaggcaatgaatccacacacagttcatgcaaaatgcttgagagcaaaaatacacaatgaaaatgagcaagtcgatttctttacaatttttttaactgccagaaatatcag

SEQ ID NO: 34976 - DNA, 547 bp, Homo Sapiens
ggaggcgttcagaggatccccctggatatttcggtatagtctagaagccgttggtaggtacattgtacctcggctacttgaagtaaataattttagataaataagtgcttacctaagatattatctttagaatagaaactttatgatcatgtataattgcaacagtaatggctgttattttattgcagttaataaaatgtcaagtgtcaatgaagcaacttgatagtaactaattctaccttcctgtcctcatgagtatatgaaatttggctattcttaatgctcctaatcgtttttcattttcttatctaacttatttctcctttatttccttgctatgctagagtatgctgaatgtggaatcctgccattataactaacattatagtgcacactcttgtacgtggacagtcttttatgctgatatttgcaaggccttcttccagcatataagggatccatgggcctttttgttttaagaaaggaatgtcgcaaatggaagtccaatatgagaaaggcaatttgtggaagcagagtgtaaaaacac

SEQ ID NO: 34977 - DNA, 511 bp, Homo Sapiens
acgttctgagggtcccgctggatatttctggacgtgtatgatataccctggtgggtgtgtaagggatgaaagtaacacaacaggcctatggagaaggcaatgagacccaggcttaagaagaatggcttgaggcattatctggggtcggtggggaacagaggtggagaacagaagtgactgacttccaggaatatgtccaagccttctgatttttcctgcttccaatgtctcctgcaggcaaaatgccacctgcttattgcaaatagctgagggtttaaagccacttagacttctagccaagtcctgctccatccttactggttgtgtggcctgggacctaatgattaactgatctgggcttcagtctcttcacccggggatcatgctgtaaggattggagatggtggaggagaagcacaaagcacacagcagtgcccataactggaggctattgactgtgtgggtattaggttattacccagctcaggaatctccaagggcctctaattgc

SEQ ID NO: 34978 - DNA, 442 bp, Homo Sapiens
atctacagatcccttctgatatttctggtacattacagggatagttctgatggatggtggtgttggtggtggtagtagaggtcagaaatcaagggacatgacaaggtgcaggtacatcacaaaggcagtttccaagaagggacaaaggtcaccaggtaccagtctatggaagtgtcacaaagatgaaggtctgaaattctagccttcacatgccatgtatcctcaatgggaaatgggaggtttgccattctgactatatagttaaatagaagagccaaacggtttcgtacatgagcatggagtacagataatttctcttaattctctccacttacctttcaggatatccattaattctgcatgaatctgtgctcagtgatagaaaatctgtgctcagtagaaaccaaatgacaaaattaactagcagcaatatggcacacag

SEQ ID NO: 34979 - DNA, 731 bp, Homo Sapiens
atcccccctttatatttctgtgggagatggagagaggagagattacggagaataaggtattccggagacctaagtggggagagatgagcagaggaagggtcagatgatgatgctggcaccctctgagagaagaatgggggaaagaagccagagagaaaagactttactgctgaattgtccatggggcccattgagactcaaagctaaggtgggaaggtcttctatctgatcaggacccaggagagaaaggtactttgcagatgttccctgagagccttgggaaaaatgccttcctccctcaacaaagcaggcggggcctgcccagttgccctggcagtaaccacattgtgaggtggttccagttataggcagaggggtctgagtgggaagagacagaggtggtgggagcagtgggctctgcctgtccccaccccgacctggggcctcataccatcccactatcatgggtagtgcctaccactgggaggcccggcgccggcagatggctttggaccgaaggagatggctgatggcccagcagcagcaggagctgcagcagaaagaacaggtgcatgggataggctgggttcttcagggtcctctctggagcaggaagggaatggagaatggagagagaccctaggaagctgcctactatttggtgaatgctgttgctgagggtaggaggaagcaagtcattggcgtctctcgatagactgtgtctggttggg

SEQ ID NO: 34980 - DNA, 509 bp, Homo Sapiens
ttctggaaaggaagtgtcaagcagagatgacttttcctagcctccctgataatcatatggagtcaggacgtgtctgcttatagttgttttctctgcctaacatagtacacagctcagaggatgttctcaataaataagtatgagataaattgatactttacctctctggttgcagcttgtctttttgctaattacacagatatgggaaggttgtaggattcaaataaattttacaataagctgtttcctttttaaacttagagagcatctctcaagtctaggggcatgtcacttttccatcagcttccctgctatgaacactttgtgaatcatcctaaattacatcaaaagaaaagacatcatgttctcttctgcttggtgatacaagagggcttttccactggaaaaaatactaaattttctatttcctgtgtgttaccagcaaaaacttttttcacaagctgctgctttctgggttagagtgaataagtaactaaccaattagctcg

SEQ ID NO: 34981 - DNA, 592 bp, Homo Sapiens
gctggcaaactggtaggctccatataactgtcattacttcctgatgttttatagctagttaaggagacaaaagcctttttttcttctcctagtattttaacatgttagtaccagatattatctatgcttaggtatgaattttggctcagagattttctcagcatcacaccaatgataagtttcatgatcctagaatgtactttccctgtattctttctcctctgctggtgttctgtgagtccacgtgtatgtgtgtgcaggacaacacttaaagtggttcttctttcttcaaagactcagtccaacacacccctggtggctgttgtagctcagggttgagtagtgatcctggtattaaagatgagaaatttgttaggtagccgctatgagctgcaagatttcctgaggcagaggtatccggaacagagtcagggaggccatggggccagaggccttcctgattctggacacacagagtaccttggtttccccaccctaccttaaaaatatattcggattcacttataccgattaattacttagagagagtgaatgtattatagttatgtgaacctgtactccctggctgtct

SEQ ID NO: 34982 - DNA, 508 bp, Homo Sapiens
tacgtgttcatatgtgacaaataggcaatcatcactaacattcagtgtgataatatggtttttcctctaaattagaagggattagcaaatggggaaaaaactcagctcttacagaaaatacctatcttcagaattttatgtacagaaaataggatcctctccttttgagtttaaacaaggaataaccgagttcaaagaaaactatattttaacttctataaaaggaatatacatttttaaggctgtgtcttaaatactggaaccagattttgctcgtgtcatgtgctatctacccccatccttgatagtcaaatgtttatcacattgaaataaacgacttaatgcccaatatagtaagaagaaataataaggtaacaatgtctgcaagaatagctgtcaattaacaatctggtgatttaaaagaatttattaaaagcaaatttatatagcaacacatgaaaattcagaccaggagtggttctcattcctcaactagaacatatctaaa

SEQ ID NO: 34983 - DNA, 538 bp, Homo Sapiens
cgtgcttaatctctccctgtagatggggctctctgcaggcttctggccagcctccctctctgtgggattgattttccctgggcaggagtggctctgcttccctctgctactggaaaggccctcgccctcctgtcagggcccaggctgagtcagctgtccctttgtcccccatcaaggagtagccatgtctgccaagggccatccctgtctgggctggctatgtgctggagcccagaagccggcccagccccttcaagggagccccccctggggccctgctctctggatttctctccctggctctcgatgctcccagactcttctgcccctgatgcctgggctccttgcctctgcagttagtggtcagcacttgtggacctgaagttctttatccttcccagcttcaaccaccagccaggcgctggaagtgtcgagcccggtgcccagcgaataggggcccatgtctgagaaacgtgccccctcagcaccagccggtgggtcagcccgtcaggggacacatacacttcatatttgtcat

SEQ ID NO: 34984 - DNA, 528 bp, Homo Sapiens
gaggcacaggtagaatgcgtggcagtaagcattcttacaagcaagtaatgactcactagtaggtggagaattgaatgagtttcttcttaaagtcaatttcctgaaactccaagtgtggcagacatctgtttttattctctaccattcttctttcatctggcaatagcactcctccctccctttacagatacgcttctaccctattccttgtgggtctgccagtcacaatcctcttgcccttggttgcagggtgagcatgtgatccaggactagtcaactggtatatggcttcagcaaattatccaaggataagtatataatccaggtcaggccaggccaagcagggcctttccctgggacttttcgtactgaagatggaagggaaatgtgtctagaaggatagaatcacctagagttcctggccatcatggaagggtctacaaagaggaagccagtacataaaaagccgacaattccttatataaaagaacaagggagagacgcagttaaaattggaatactatttta

SEQ ID NO: 34985 - DNA, 384 bp, Homo Sapiens
aagatatgtctggctcccgtcagaacttctattcagcacagtataccaagcgtttctccatcgagtgttataatatgatcaaaaagcagggagagatgcggcttggttaccctgtggggccttatcggggctcagtgcagtctttccatgtaggcattctcaaatactcaattgaaacctgattgaggatcatttgatctctgttggccctagtgcagtaggctgctgagaaccactgatgcaatagactgagagactaactgcctgcttccctgtcagcccaggctctgctaaggccgtcttagttacagaagaaagtggggcagagagccctgcaaggattacattccattcctaacggagacaggcaagcgttcagtgccc

SEQ ID NO: 34986 - DNA, 559 bp, Homo Sapiens
tcggggcgtgccagaatatgtcaggcatagtttctaggaatgcacttcagcaataaccaggaacagtcgtactcacagacagctccttatctcaacgctaatcatggattccatttcctgggtaaacagaggtatcatctcacgcactactgcttctctgcagttccttcacactttgctgtggtttttcttttcagatgcccttaaaccatatttagggcattgtggcacagacccacctatctcctccaaccttacatttaccattaagtaggtggccatgtgacaagtcagtacagttgttcagcatcactggaggagtggataggcaatatgcaaagcggcaaaaaatggaaacgaactcatccaagagcttctaacataaacagcaatgctaagttgattcaaagcagaaatcagtaaagccacatatccctatgtgaagcaaaacagatttcgaggtacatatacgacaagcctgagtaggaagttcagatgacaataactgatttactaagggatcttggcagaattcttacccctgaagccagaaccacag

SEQ ID NO: 34987 - DNA, 537 bp, Homo Sapiens
agaatgcaggagaaggacatatgatgtcagatacgttcagggagatcagaatactattggtgaaccgttctgcacctgtggaagtaaaagaataagactggctcacacaccccgcgggaggatggtatttatatgggctctccctctgacctcttggcagcaaatgtaagaaagtccttttttgagccttaggggcgggcccaggactttcaactacccattcaaacagggttacaattcccctcctccacaattaagttcctttcctattctccatgcatgcatgaattgcagtgacattgacatgggggcttgacattagtctttgaaggtcatttaaatcatcctccttccaaactgccttaaaagcagtgtatcatccattccacaatgtctgagtgtagggtttgactagatcgtactcaaagcagaatcacctgaagaataaagagagttccaaattcgggtatcataaaaagaacaaatcaaagaaataaaaagtgatgaaactcagttactcaaaagacaatagtaaaa

SEQ ID NO: 34988 - DNA, 529 bp, Homo Sapiens
ggcgggaagaggaggagtaatgtaggttccaggatagtccttccatactcttcgttcctttcatgtgcccctctcgtgattattggtcctgatcgtgtggagttttcctagactatgaggcttgcacgtctcattcttcaatatcacaaaccatggatttctcatctataagttttctcactgttctttttctcagcctgtatttccatatttaaatcctagaaaatgtggagtccccatgactctgtgctcaccaagctcttgaaccttcttacacactcagccccttctgtacagcacctcttgtccaggtgcatctcatacacctgaactcatttgcatcattttaaccatcttttccttgctgtctcccttctttctatttgaacgtccttcactcatcagtaaaatgtaataattgccttgtgccatatggtccccaatattttattgacatttgatagcaatttttttcatcattttccgtactcctaaggaaaactgacctatacctcataaaatgagaccg

SEQ ID NO: 34989 - DNA, 539 bp, Homo Sapiens
atatgcaggtctgggaatgcgagctttaaaaagaaacataggcagcttagtttataaaatacaccagccaacaaagacatagaacaatgtgcagcaaaacctgccaacaattggcgctttttagttacctaatcaattacacaacattaagagaatatggaaattctctcaaagtagaaacgtttctactgtggtagttataactatacaagccaattcttcaaatctctagttgaattatgtgtattcttatgtacatgttgtaaaacactggtcaaaatgttttacagtcaagaattatctatataaagtaattctcatagtcagtgggttatctgatttgcttatgggttgactgaaagaaagctgagtagttccatgttaacaaaccccacagaacatctagctacggcagaatggcaaaatacagtacggagtggggaactgtgtcactcagactacccctttcatgtgaattcattaaattcccttagaaaattctaaaatggcattagataaaaatacaactatgtacaaca

SEQ ID NO: 34990 - DNA, 484 bp, Homo Sapiens
acccgggatatgtctggcacgttcagggtcagaggcagcgcatgttgcctctgaacaaaacatccggttatctgtaaaaatgcagctgcagatgcaggctccgcagtgttagatcaagaaggccagcatttcacagaatcctgaaagtggacagatggacacacagacacactcatacagatgcacatgcacacataatcttctacataccagtctttgtagctacgttattgtaggtggagtatcttgaagcatgtaaggagagccacagtactgcatgtgtgcatgcacaatgtttttggttgtattgacacacagatgtgtcttcaaataccatgcaatcttttcagacactggtaagtaataagtaagtgacacttctattacactgattgacatttcattatctaaatgctttgccttcttttcgcttagggaatattagtcatcagttcctcaaagcaattacactgtctgtgttact

SEQ ID NO: 34991 - DNA, 416 bp, Homo Sapiens
gtgggtatgtgtggcagaaagtgtcactaggtgccctggtagtcgaggtgagtttcatgatgagggtcgccagggtctacaagtctacccagggtctctgggatgataacctaaatttcaagtagtaatttgagagctgaagaacggggatagagaaaagagagtaattttcaatgaggacattagatgccacatttaaacaattcagttaactctcagtagagaatgaaagactttacccataatggttctttattatcagccagcctacaaagcttatggagctcagtccgactgaggccacctacaaagctggtatgttaataggcttatttccaaacatgtcccaggaaaactaagactacagtgtggctggaattaactttgttcctcacagcttataacctaatagaaac

SEQ ID NO: 34992 - DNA, 482 bp, Homo Sapiens
tagtcggtccggcgcatcactgtaaagtcaagcttacaacatctcacctcatctaagagaccgtaacctatgggctacagtgcgtcccaaacaagaatattccattatgggctgtatctgtcagcactccgcctccatatctacaattactggtcgcctatgtaaaaaattccccaaccacagccaggcaaagctagcacattttaatctttccaaaggcagcagctacgatctgcccactcgcaggctctgctgtaatgctttgaatctttttcctggtaaattcctaccctgcagggtctgcgacctcccactctccctcatgggaatgccctctcccacccaatcccatccattctttatagtcgggcatcaccgggccgtggcaagcccccagaatttctccctgtcatcaactccagcccttacttatctgtcccactcaaccggaccttgtaactatatggacacagccctgtgat

SEQ ID NO: 34993 - DNA, 524 bp, Homo Sapiens
tctggagacgctcaggaatccgctccgaactccagccactgcctgtccacaatcaggtgcaagaaacccagtacagaaccccacccctccgcaacttccggatcccaagaaatggggagaggtaaaaaaaatgattgttttagtaaaatgaagttttgaagtgatttgtagacggaaacaatagtgctaacaatatatgtagatggaaagcaaacacaggaatgagaaaagcaaggtcaatcctaactggctgaggggtgcaggaaatcgggtaactagaaggaacaaattaacacagctggtataacctgaacagctcaagaaccggagaccaccagaccaaaaccagatttaaatcaagagttggtaaagccagagcatctgaccaccatcatccctcttccatagtagacaccaaaccagaaacgagtagggctcacacggatgaggtggtttgtgaaatggccacacagtacattaacagcaagtaccgaacactgagaccctaagcccctcagcccagc

SEQ ID NO: 34994 - DNA, 511 bp, Homo Sapiens
aggtgtctagaggaccccctgatattctggattgcaagcactgcctggaaaatcacaagcaatgttatgcatcatcactaacagaaatagttatacatattgacaaagtggaattattctaacaaccctgcagaaagaaatcatcaacctacatcaagttcctcaagctagtttggggccaaactgactaatcaattgaacaggatttgtgcaatggtaaaaaaacaaacggcagctgggaaattctacagcaaatttggttcacaatgctccttagtatttggagttgctgtgacaagcactaaatctaccagtctgcaggcaaacccatcagatttagtagagctacttgggttttcttttaatgttttagctatgcagcatgttctgttactaatgttgcaactgctggttggtttgaatgcatgaatttttaaaatctaactttccctttggtaatccaccagttccttttgttcttgtgtgactgttaattaattttctttcattt

SEQ ID NO: 34995 - DNA, 537 bp, Homo Sapiens
atattctggatggcaacaggagatgcagcgacatccctaatttctctggcttcctgataggtcctggtagggtcgggggtccaccgggatttgcctagtatggtctacctctgactgaaattaaactctaagtaggtaactggggaacgcctttctccagagagaaggttttgatgtgatctcatcatcggggactggattggacctggagaaatcagtttttctatagtcttgtttctagagtggcaccctggtcttgggcaggtcggaaggacagatagttggtcaccatcttcaacacaaatcatggctggaaacgggccccagtagggagtgcctttctcactcaccaatcaccaaggctagaagatagtctgcagattctttcagatgccacaaagctgtgattagagctgcccattggcaaatcaggtactagttttagttaatcacattgcagtcttccttcactgtttcttcccctggtcccggaattaaggctgggctccatttgacaagttatcttctgtgcaggta

SEQ ID NO: 34996 - DNA, 506 bp, Homo Sapiens
gatgagagaggttaatggaacattttcccctagcctttcatttcttaacatccttcctctctttgttcctgtccacttttctttttaactgtaccaaagcaatcaaaaacatgactactgtatttttccattagatttgccctggaatcacagaatgccagctagcaccaaaaacagcaatcccaagatattttcgttgtttcatttaagacaactgggtactagagcacagtattaaaagctctgatttctacatctggccacagcagccagtcacaatcacttctcaaattttcttgctgttgcttgcattcataagacgctatttggtcagatgttcttaagcaccacaagcacgcgaagacaagttatgctttgtcattctgaataggactcaaataacataaggaaagcacatgccactttaaggcacacatccaaaaagacaccctgcacattccacccgcttaaccaaaacagctatgttagaattagtttgtgccagg

SEQ ID NO: 34997 - DNA, 421 bp, Homo Sapiens
cttggatatgtctggagatcttagacagaagtgttccaactgtcattaagtagccagatatgctgaatagatatttgtgtgtaaaggactcaaaaatactaggaatatatagcagtaggatacactacttggcctaagaaacatgcagtctgttttgtaaagcagaacacaggcacatgaattggcacaggaatggcattcgccatccttttagacagatatggtagcagtataccatatgaatatcaaaagagcacagaataaataaaggaccatggttttgaataaaaggacgttgattttcaagacctgtacagttgactccgagagatttaaagctagggtcagtctttggatggaggatatgcaggcattgcaggtgtgttaataggcaatttaaatacgctgcttatcagtcagt

SEQ ID NO: 34998 - DNA, 465 bp, Homo Sapiens
ctgatatttctgggaatgatgaggatcctaaagtctttctattaatactaacatttcctaagcattactgccttcaaaacagatgtataaggatattcctataaaagcaggaatttatacatatggagttaagagggagcactgttaaaagtctacatgtgaccaccactgccactccatcccctcccttcactcctgccatattctaatgtatttcctagggaggccagtccttgtacaataacggttcagcttttagtggagttaaaactaagcaatattatcttcaagaaacaaacttacaagaacagtaagccttttaaaatcaaagagaggtttcatccattttataccttttggtgatcatgctactactatttggattatgctagacaactctgaaagccacattcattctttaaggtttctaggatactctacatgtattccttcaatgcagttaag

SEQ ID NO: 34999 - DNA, 525 bp, Homo Sapiens
tgacatatgctggcgataaatataatagaaggaaactgcaagaaataaacacatagaaaacaaaacagtgtagtttccaggtggttaccactcgggctaaaggccccccaggctgaggcctgctccctttgttagaaagggatggcaagtgttggtgaggtgttaaagacccaccagcaccaagcagagactttctctttgaagtcatcaggtttacaagagaatcaaaggaaataactttctcaatgtgattcagggtgtaatgtaaggtgtagataacccttaaaattttccatgtgtgtatgtcacacttgggaaaaaaacttgatctcatctggtcgaggtgggcagggcagcaccttgtccaggagcacacagcccctcttggctctgtgtgtcatccggccatactagactcgaacatatggctcatgactggatgatgcttgattcatcttcagtttcaagtgttagtgcttttgaggtttggtaagaaaccaggacacattgaaaatacagtcattt

SEQ ID NO: 35000 - DNA, 563 bp, Homo Sapiens
atgcatggacagaacacaggaaataatatgtccaagaacatttttcttagcttaatactaaaagcctctgatctgtttcctatatcctagtcacgactgaattttaagaaagtcgaggtcatgttggtaactccatgtcaatactgctttgtgtactaactgcaagatcaggaatcgtccctcattacttccatcttggctttcaaaagagcctactgtaattttttcttctgaaatagtatgaaataacttttttcctgaaagaaaatctcctttctatggttctttcttctgaaacaaggctttccttctctgagcttccagctagaataatttcctctgacatactctgatctaggaggattgtagtgtggtcacaatgcctcagctgatttcagttaattttcttgagctgaatcaaatgaatgtcttaacaagttgtcctttaaaaggatagacgtgcttttatacaaaacttgcatttaaatgaaaccactagacttcttcatacaatgtaatgaagtcttggtattccagcgatttggcacctaaatgcataggca

SEQ ID NO: 35001 - DNA, 442 bp, Homo Sapiens
cctgatattctgggagccttaagggtgatcttatcaagttgtctctgtacttttgttctgtgatttcataatactagggcaacataaacagcagcgggaagcatgatttctattcatcctagccctaaaaagatcaggagtaagagctttttagaaatatgtatttagagagaagtacctatctattttgtgatctctcaagaaagtaattatgggtgacgttctccttttgttcatgtaccaggatttgtgaaatattattcacacaccgacccaccatcccacgggcctggcctctcttgtacaggatatgcaggaaactctgtatgtgtctgggacccgttattaagagttatgggagctcatcctaggatgtctgccttatagttatctcttcttgcactgagacattacagatatcatttggggactatgaagtttg

SEQ ID NO: 35002 - DNA, 414 bp, Homo Sapiens
agaataaaaacacataggcattttagtaacctatcaatccttcctttctgagctttattttttactataactcatgtaactgttttcagatctaattcctaaataaacatgccatgacattttctcagcatcctgatcttttctgcatatgccttcccattattttctagcaattccttgaaactattaaagcctgtttttctaaattcatttcatttttttgcagacaatgttcctaatctttccttggggtcccaaacactattaaacatttgtggcaacatttatcatagttttaaatctcagaccaactacatccaggcaaatcactgcaaacatctgttgttatcttttctactaagatcattctccaaaatcccccaaaatgtgggataatctgtaactctgctactg

SEQ ID NO: 35003 - DNA, 559 bp, Homo Sapiens
gtcagcaatagcacaggagatctggtgattattagactagggcaagggagaggtggaatcaagcaatcacagctgtctctcccactgagaattacttcctcacatgctatcagagaatgtattgaagcacatcacgttctctttcctgcttaaaacctttcattgattcttcaccacctacaggataaagcctaaacctcttggtgtggttttcaagaaccctgctagccccttcagccggatctctcccgactctccaaatgagtggtgctcgccctgggtctttgtacaagttccttcctttgtttagactcctttctaccaccttgtcctctggagaacttctacacaaccttgaagactcagctctgagaagcattctctgacccatcttcctctaggttatgtcttgggcaaccctgacaccaaatatctacaatactcagagctaccacttgtgttaagcataccgcacttgttggaccctaacattaaccatgtaagactggattgtcttttctttgcattaagttcacgtatagaatgtcctttcgcgaaa

SEQ ID NO: 35004 - DNA, 465 bp, Homo Sapiens
tacaagaggcttgattatggagctgaagtaagggaggaaacttctatattcacgtagatgacgagttgatacttccggcttcaattatgtgcagcaaagtctttatacctgacactagttagcctgatttagcctcactttatgaaatgagtagggaagtatggaatagactcagttgggagatcttaacacaaaatgcatctcaatataggtctgaaatagaaatcttggcaggagaggaccacccatcatttcaatccatttatctctctctgcttcagaaaggcctcccctgaccactcaaacaccctttaacccatcagtcaccccctactccctagtgcctgaactttcattatagtgcttatcactacctgaaattctattattttaacttgtttttggcctttgttccccacaagagcttgaggaccttgtcccgtttatccccatattctcagccag

SEQ ID NO: 35005 - DNA, 714 bp, Homo Sapiens
agggtggtgcttaaaagcaaaagtagataacgtcagtgtggacaagaataactgatccattttattaactgataaatactatgatttaatgctgttgcctttaaatttcagtagcatggattaaacctataggggtttatgaaaaggtgctataacgtggaagggaacaacaagcagattaaaaagattaagttcagatttaaaatattaagcaagatggctgattagagactcctggtgctcgtactcccaacaagaaaggaccacagcaatgaatgaacagctaagatttgactggcgtgttgaagggagagtactggagtgcagcagggaaggggaaatgtgtagtgactgaaaatccaggagggtagtgtgtaggcacctggcctctgcagctacatctcctgcaccccgatcaaatcttcccgtagtcaggagggacttcccgttctggggaaaaggtaagcagaagatccccaccagtcctcaccgccatcacaaacacctacggtccttaccacaggagaatcccatagtcctagcaagccctaagtcaaggtggacagctgctgggaattcaagcagttgcattgctccagatcatgagaataaggtatgcactctccaaccctcacccacctgtaggccaacctgccctgctgcagcatggcaccattgaggccagagcacctctgttgatgcgggggatctcta

SEQ ID NO: 35006 - DNA, 501 bp, Homo Sapiens
ctaatcgctggagttgttaccagacagcagggaaccagaacggtgacatgtcctaactttttcccgggatgctcaacattgtgactttggagggggacattgacagcagaatcatcctttacaggtatgtgaacccaagatatcccaacagacaatttgcctgtagggtaagcactgctatacttaccataaacaagccccctgaggacagagatcatttccatcttttcagccccatatatttagcatagcgcttagtattaacaattaatacatacttgtttgtataatttttgaagtgtatttctgttccagaagaggttaaaggacattgttcacattctgtgcaatgcgaaatcttagagaagagtataatgtgtgagcagaccacatcctcggagatgaatgcttattgtgaagaaggagaggcaagaaagacggctaaccagtttaaacagtttcattagacggtttcattatgaaacaaaatactcaacacgc

SEQ ID NO: 35007 - DNA, 365 bp, Homo Sapiens
cagaatttacttgcccaggataattttttcataattttagagacatatctggccagagaaaatatttaactctttatacttctttctatatacatttcattcatttggacctttaataactaattcactatcaacatttaaaatctagaaaactactattttttaaattgggtacttttcactctaatacacgctaactaacatgtaacaagaaagcaacattttcagatgggtattaatacaattgccttcaatttgtatgtttttaagtgctagttaagtcgttaaggctataaactaatggtctaataattgcaagcttatcaaaacttacttgtatctgatggctctttttcttaaagctc

SEQ ID NO: 35008 - DNA, 528 bp, Homo Sapiens
aagaataaagaaaataacacatatacagatacaaaggatatttaaatatgagagtatcgtgttcacacttatgaaattaccttgaaagcatgggtgaattaattctcgagaataggttaatcaccaacattgactcaggaagaagtggaaaatgtaaacaaacccaaaacaatacaaaagattgaaaagctacaaaaggatctactcagattattttatagaataaatttacccagatcttcaaggaagagaacatttcaatattaagaaactgctctagagcatagagaaacatgaaaaacttcccaatgtattataccaagtcagcatacctagatactcaaaactgaagatagaagcaaaaaatgaaaacaaaataacaaaagtatagatatcttactcctgaaaacaggtgcaaatatcacagataataaaatactcattagtgtttgcatccagttaagtattacaatgaatattacttcacaattaaggctggtttagtctaggaagccaaaccatttcaga

SEQ ID NO: 35009 - DNA, 437 bp, Homo Sapiens
ttatggcagttgtatcatgattccacattcacacaacattctttggtgaataccgaagaatgtagactaaaacctaatcccctcccatgttccaaataggtcatctcttatacttcctattgtcgacacgtgaataagaatatgatttgtatggaaagccacctttggctataaaaatattttatcccgcttactattcctttttatatcatacctaatcattcccagtttgatatattgcttcttaattttaattttttatcttaattttaaggtttaacagttggttgatgtacagttattcattatagtctctaatcattctttgcatttatgtagtctaatatgttatgtcccctttttcatttccgattttatttatttgggacttctctcctttttacttagtccaggtgaacgtttgtcaaatagtttaa

SEQ ID NO: 35010 - DNA, 582 bp, Homo Sapiens
atgtgtttgtttcattacgcatgatttgttgcccgcgaaatacgagagaatctcagacagagtaagtttccttcctctgcctatttgctgggggaatctacagtgctatgaggtcaaccttgaaaactttgtgtgttactgcctgaatttactttacatacagtcatttcaggggcatgtgtgatcactctgtgcttcataagattaatgagtcaggcaggatggtacttggagaattcccgtgtggtgagtgagttcacacagcagtgacttgggatccagtggactctctgtttcaaaatctctactcatagaaacaatttctttagttcatccacacctcttcttgtaacacatacaagtcctaatttcatgacagagttgaggcaccacatctctgtgccaatgtagtaactatttccctaaagtctttccaatgaatgtatgagtgtcactttatcatgctgactaggattgtagagtatgtcaacctgattctgtaaaattggaaaattatccagcttttgaacacaggatgagtttcttaagacaatgtggaggcatgtgattagaagaattatt

SEQ ID NO: 35011 - DNA, 497 bp, Homo Sapiens
gtcattcatttgcttacatatatgagaatacgtttttagaagccaccaggacacatcttgaaaactttgctgctaaaaatttcttccatcagataccctaaatcatcattctcaagttcagattctgcagatcactaggccatgggcacaatgcagccaatttcttctctaaggcataacaaaagtaacctttgctccaattcccaataaattctcagttctatctgtgaatctcctcagcctggacttcactgtccatatcactatcagtattttggtcacaacaatttaaccagtctctaggaacttctaaacttttcctcagcttcctatcttcttctgagccttccacactcttccaacttctggcctgttaccaattccaaaactgattccatattttcaggtgtctttatagcaatgcccccactttttggtatcaattttcagtataaggctgttctcgcattgctataaagaaatacctgagaaggggt

SEQ ID NO: 35012 - DNA, 421 bp, Homo Sapiens
atgagctgacatgcctggcctgatatgtcagttttcagtggtagtcaagtgtttctttgttttctcctctgtccttaggcacttgtcactaggaaagtgcctaatgactccatcaggtgtggcatttattattgttgcaacagggaattgataagagaaaagaaggctatctgggggatgagttaaccaagaagtggaagaagacagctgttattaggttgctgtcaaaatagcttgctttaactctctggcatgtatcactccagggaatgaaataatccaagaatgataagctctcaattgccatctgttggtttgtgatgctgcttgccttgttctagttaacattgaacactgacctcacatggcacttgcagaaacttagaggaggataagatgatcatagggtgtaaagcaaact

SEQ ID NO: 35013 - DNA, 504 bp, Homo Sapiens
ctcatttccaagtagtcgccttttaagggataagaacccacagaagttaagagtcaggcaaaattgggagggaaagagtaagaaagccaagtattggatgtgtgtgatctaaccaaggacaaatcacaactctccagaccaaggccactgcaactgaaaggttacagaacaaaagatactggactccagccacaccctaactccagaggactcagaagagatcttaccacgacctcagctagagaagcctacacagcacacaggagcctgaacttaggaccactttgttaggaaagggacccagggacaagtcaccactcactttaacttcttcccaaatgggacaacataaaatgtgtagagagacaaaatccatgggagccccactatttttgagaagtcaagaatatctgctgctctctgagcgccagggatttccaaaatgaagcactgcatacctcataacagttcccaccaatagaagttaagccaatatatcactaa

SEQ ID NO: 35014 - DNA, 439 bp, Homo Sapiens
caagattgctaaggtaaactggtgaaactccagaatactcaagacaaaaggcaagaaataacaaggagctcaccttagtcagtagtagtaggaatacagaggaggggacagatatgggagatgctacagtagcttaaagcaatagtattttatgcttggcaaaatgaggggaaatacaagtaaactgttgtaaggttcttacaccatatgtgatgtggtattaatattgttggaaagtagactgattgattaaagatttacattacaagccctagatcaaccacaaacaaaacaaaacaaaacacgaagaggtaaaactaatgctgcgggtcgtattgtgttccccaaaacaatatctcgaagcctttactccaggtctacgtgaatgtgacgttatccgccatcaggtctttgccaatgtaatgacgtaacatgaggc

SEQ ID NO: 35015 - DNA, 630 bp, Homo Sapiens
aatactcctagatcatatatactatatatacccatgtaatgtatttaaaaatccactaataaaatagttttgtacacagcaaacattttataattactctgtatacacataaacgatcacatggtatataccctcaacactatttgtgatgtttatctctttgctacatatagctttaattcattcaattgccataaaataatatttcactatatgagtatacctcagttcattcatcaattgcttgctgatgtacttttactgttatcattttttaaataaaaataaaattctgtcccattcattctcttaagaaaaggggaggaaggaaggaagccagccaggtagccaggttgaaagctctcaaggcaaagtgctatgcttagcaacaggccttacccacacatggatgcggtgagcgaattccaggtgcacattcttattgatacctgaataatccatgtctagagtaaagctatgtcaagtaccaaggatgactctttttattaaggatgtgggacttcaggtattttcttcaggtataacgaattcttctttatcttttctgttttcttatcagtaaacataatacacttatttcatttaaacggaattataacttaggagcgc

SEQ ID NO: 35016 - DNA, 532 bp, Homo Sapiens
acattttatgaaaatcagaaataaacttttcagaagcagtattatctacttggaattctgttcaaattttggtagtgatgagacttacatactaatgtaggtgagaaatcactctgacatactctatgctaatgtaattaacagagaacctgaatttcagagaataatataaccgaaggaaaaagttcaccaatcgaaggattgaaaatatctttgaatgatataagtaaatttgagttcatacagcaaaatatgctgtttccatgccttactggttatttaccatttccactcaaaaatcaggctgttgcttagaatcacaagtactacccctgatgcttgtaaagggtgatgttgcctgattagttaaaagcatattattgcattactgtagtagaattctcttttggcttgcatagtagaaaggcttgaatagactcacatgaaactttatgcccagacttaaatagaactgaaaggcttctgtcacaacagacccaaacattcattcattcattgaacaatgttcatt

SEQ ID NO: 35017 - DNA, 553 bp, Homo Sapiens
agcactttcccggtaaagcaaacctctaaagcatgtagcagttgctgtgtacttaactttttgcagaaaagggaaatgcaattggacgtgtagcttcttggagggaggttttggaaacagaatgaatatataaagatgccagcaggagccagctcgggggtagatgaggatggcaggtggcggcgaggtgggagtggtgaggggccatgaggaagagtggtgggaatgaggcggcagcacctccatcccaaggaactttgcacatagtgatgaaacagtctaccagtgatgacatagtctactgtgctatgtcttgtactgaacttgcagttgaacagatggtacagttcctcccttgtagctgatgtcccaacttttgtgttagtctagtgtggctgacgtggggaaatattaaaagtaaagaaatgtgaagagttcttgactccagggaccgctcaaaagccaccctggacaatatccctgtttcttaacattgcaaattctgtcctattcatcctcagtgtctgacaccataattgatgttgttgatcaa

SEQ ID NO: 35018 - DNA, 468 bp, Homo Sapiens
tctcttgaataattagaaatggaatggatgaatcgtatggcatcttcacatttactttgaaagaaactgcccaattgtcttccaaagtagttgatccattacacattcctatcgtcagtgtatgagagttccagatgatcctccattcttgtcaccatgtgactaatcctattcattacaaccattttaactggaataaaagttgtatctcattatagttttgatttgcatttctctgatgatcaacgatattgagcaccttttcatatgcctgcttgccattagtatgccttcttttgagaaatgtctattgaaatcttttgtgaaaggctttatttctttcctgcgcttttgaagttattcactgagggtaacatttaattttggggaggctctgatttctcagcaattgtcatgcatagtctgaaattccaacagaatgagaaaagccagtctacaaataatttc

SEQ ID NO: 35019 - DNA, 432 bp, Homo Sapiens
tttctcccagcccagcccagtcatgagtcatttgacctctagtttcccctcacactctgtctctgaatctcctttcttcctgaatgaaacgggtagcaatacttccttttaggtactcataacatgctcagaaattaaaacgaaaagtaactgcatggtaatataaaatacagtatactgtgttataattttaagtgcgtgtaatcctactgattcattattttaagcattcattcccttgagtgattacaaaatagtttagtacaatgatagttgtatcatcttccttaacgtggcctcatcagttattagtcactgaaaaattaacagtgtattccttgtccttagggtaaatcaaattttatatttagggtatatgctgggattacaggtgtgagccactggtgccccgccaataacactttttaaaat

SEQ ID NO: 35020 - DNA, 404 bp, Homo Sapiens
tctaagcaaaacacaaaaacaaagacactataaaggggagatcgatatttttaagtacataaaattaaaattttttgcaaagcctagagactgtattacacaaagtacaaaaaatagggtggaaatagttatagtacgtatgacaaaagataagtattctcaatgtataaataattcttataaatcaaaagacaaccccagagaaaaacagatgaagaaatgaatatacactttctctactattctttccttccctttccctcctcctttaatttttttgaaacagggtctcactctgttgcccaggatgatctcgaactcctgagctcaagtgatctgcccacccctggcttcccaaagtgctgggattactctttggccgggcatgagccacctgcctggca

SEQ ID NO: 35021 - DNA, 458 bp, Homo Sapiens
ccacatcattttatctttacctctgcatatccaagcaaagcttgtaccttcaaagtatccagccatcgcatagattgttagaaaccatactcatttttcatctatgtccccaacatctcctgtttcagacaagctgccacgattcctgagaggagaagcgctagaaagtagccataaagcaccactgctgtaatattcccctttcccccaaggaatgatggaatccccagcagaatttagttttcccgctttcgaaacaggaactgtctataaaacattctatggaagaaccaatctgggccctcaagctaacaaaaatagctcttttaatttatagaagtacaaaacataggtagataggaagttgggtgaatagtgaggtgtaataatcttagctgtaaattaaatcaaagtaaagtaaatgaagcaataaattacataaagggatcttagcctca

SEQ ID NO: 35022 - DNA, 436 bp, Homo Sapiens
caaaataacatcagcaacttaagacactgaaagcaagaaaacaaaagccatctttcaatcaacgtaatattaataatgtagcaatgttaattcaaaaaatgaacacctttacccaaacactcttcaaagactgcttttccctcctaagatttttcatgaaaactttagttagcaaataatctcacgataaaaagccgaagagtgaagagcacagctcctggtctcataccaatggctactatccctagtgctccggcttttctaagacacttatacaagaagatagcacgatccctcaaagaatgctgagcaggccgtaagtgccatttgtctaacttcccatgaacagtcaacgggtacaaccaaacatagacccatacacatcccacatcccctaaaaaagtagtctggattttcagtcagaaaaacagtcggc

SEQ ID NO: 35023 - DNA, 542 bp, Homo Sapiens
tggttttacatttttgaatggcaggaaaaaacatctaaagaatactaattcgcatcatgaaaattacatgaaattcaaattttggtattcataaataaagttttattagaacacagccacacttaattaactatcatctatggctgttactttgctacaggggcagaactgagtagttgagacagagattgtatggctgcaaagcctgaggttttattatctgtctctttataaataaaagtttgccagcccctggtattgattattctgcttcttcaattttacaagataatcctaaataataggcaaaaatggctagcctttttgacaaatttaattgtggtaaactgtgctaataatattttcttcatttgctttttgtcacattctttaatctgattctttaatggtcacttttttgtttgttttccttcaatgtgttgtttaacttaataaatgatacttcatcaatctgtgtagagttttgttaccacattgatcaaatgtaactgtaaatgaaatcatccttattgatgaaaacc

SEQ ID NO: 35024 - DNA, 479 bp, Homo Sapiens
atatagtaagctcaaatcttgaaggttcataatatacagataaaatgtgtccgtgatactgagaaaggatcctgaaagacagactttcaaggatttcctgcatttcagttctgttgtactttattcttacctttattaaacactaataaggttctccttatagggccccacaggcctttttagtcttccaacctattcatacctggtgcacacctagtaatttcttgcatgatagtattgggattttactctgaggctaggtttcaaacctgtaagaacagctttctggaattgtatcatctccagtctttccatgtggtccattgtcccagccacacacacaccagataacaaaaggaaaagcaacctcaaaaggtaacacccctatagtagatgttcttacctcttgtacactctagggaaaatatactaaaaatgagggcatcagtaaaataatatcactttaggttgacctcgag

SEQ ID NO: 35025 - DNA, 534 bp, Homo Sapiens
ccatttgtctaattttggctttggttctctgtgcttttgaggtcttacacaaaaactctttgctgagaacaatatccgggagcatgggcctaatgttttcttctagtagttttcatagtttcagtattagagtttaagcctttaatccattttgatatgatttgatttttgtgtatggtgagagatagcagactagttttcaatcttctgcatatgtttacccaattttcccagaaccactcattgaagactgtcttttccccattgtatgttctttggcacctttgttgaagatgaattggctcaaaatgtgtgaatctatatctgggtccactactttgttccattggtctatgtatctgtttttatgccagtaattatgctgatttggttactatagctttgtagcaaatttaaaagtcaggtattgtgatgcctttggttttgttctttcggctaaggattaatttagctatttgaggtctttcgtggttctaaataaatttaggaatttatctaattctgtgatgaatg

SEQ ID NO: 35026 - DNA, 357 bp, Homo Sapiens
tggaaaatccatccaatactaaaagtagggtgtgaaagtctccagctattattgtattggggtctgtctctctctaataatatttgctttatatatctggatgctccagtgttgggtgtatatacatttaaaattgttatatccttttggtgaattgacccctttatcaccacatagtttcctgttacctcagttgttgtcttgaaatctattctgtctgatataagtatagctattccttctcttttttggtttcctttggcatggaatatctttttctacccctttactttcagtctatgtgtgtctttataggtgaagtatatttccggtaggcaaaagattactgagtattga

SEQ ID NO: 35027 - DNA, 361 bp, Homo Sapiens
aagaaacagctcttatcctgatccaaaatcttgagccacgggactctaaccgaagagaaagaaaatgaatctactgcctcctccgaagctagtccttcagatactagaagacaattatgccctctttatcaaaggccctacttaaaccagttcagtgataatctatcttctatacccgtttttcataaatagaaccatgtgttgtttcttgcataattatagaagtgttcaagagaaacgaagagagtgagtggcaggaccatggtgtgatgcaggaggaagagctcttggctagaatctgctcccaactctccaactaactgtgaatcattgaattgttacttaatgcctctataaaata

SEQ ID NO: 35028 - DNA, 422 bp, Homo Sapiens
ataatataatgccaatatttgctttttcttaaaacagtacaaagataaaaatctaaagtggttgctgtggaggacaggggtcagtggtggaagtgagaccgaaatagactctgaagtaatatctggactttgaaattgtaagtgtctgacatattaccaaactaagtttttaagatagtccctaaaattgaaagaatggtatctgaaatgaatgaatctaaattccttggattgcattctacaggcgccaaccctgagaccaaaatttggaaggtggccctgagcagcagctgaagggaagtgggaggtgagacaggaaagaggcggcggcatggggcgtccgggagccgggtcccatgttgacagctgggccgtgctcactggtggagctggtgcgttccttcaccagcccacgctgccag

SEQ ID NO: 35029 - DNA, 401 bp, Homo Sapiens
ttttaataaggggacatatagttggaattaaaatttagatctttctgtacaaagcttgttaggtgttgtgtcctatatgtatttgtttatgtttgttcattcttaacaaatatctattctctgccagacactgaggatacaatgcaaattaaaaaaactaaactgaaaatacaggctttctgttcttagaccttattctccagtacgagaggacaggaatggatttcaaatgggcctgctgggaaattttgggaaattgacctttactttacataatttgctgtaagcactgtagtaatgtggcaacattattttgaacttggtgagaagacgggcataccggtagattttctaaagcaggtaggaataaagggcatgaatatattaaaattccctgtgag

SEQ ID NO: 35030 - DNA, 373 bp, Homo Sapiens
accagagaaatgctttcttccttggctcgaagatgatgtcatcgaaccttcagggccctcgtaatcccttaaataatataatagtcatcagttgttgagtgctgagatgctttcagcactgcatatgtcaagcccctgaggctcccagaatccctggagacgtatttgtgtgtctacacttcccacctgcactagcggtgaccaaacacacagtccggtgaccacacacacagtccgctgaatctgccggtcaaggtatctatcttcaactgccctcttccagagggagctcccacaaaaaggaccagaattaaaaggaggaggaagaatatcatcggagctgctgagtgtgaaaagaacagctctcttgcag

SEQ ID NO: 35031 - DNA, 486 bp, Homo Sapiens
gttattttttgaattttctataatgaacatgctgagcagttccgcattcaccaagagtaatacatagtttatttccacatcccacatatggaattttccaacaaggcatctttgtaaaatgttagaatcaatattaaatgaagcaatgaatactcagtgaaatgtgtgaaataaaagctgagttttaaaaatcaaaacaatcttgtgttctgcttataatgaacacattttaacagagaaagggtataaagaaaagtaacattctgtaacataagagaaactacccaattaatgcagtttatagtttcttagaacacagtctcctaatattctgatttttctggagcagaaaattaaacattaggaaggacttacttttgaagaaaatattatctgccattgacagctagcaatttatttagagaaataatattttagaagactgtaacaggctaggcacagtggctgtcacatataatcccagtg

SEQ ID NO: 35032 - DNA, 506 bp, Homo Sapiens
gatgaaaagagatgaaataacagaaaataagcctgaaagatcagctgctaaatgtttatcaatgccgaatgtaccttgtggtaattacgaagaaaactatagtaggagtacatgaagaacttgctaaggaaagtgttaaactgccttctttgagggtctttaaaattaggctaaagaatcttctatctgaaataatttagtcctgtctaaagactgattagaaaagttgtaatgacgttagaagggttctttcagtcctaatatctaagcatgagcagggcagagaagtttaaaccaatgtggagtttctgcatgagtatgtgaaatttaagaaactaagttgaaacgggctcagttcagtaaagcaacgtatgtaattttatttcatcctgtttccaaaacatccctattcctaacaaactgctggatatactatttagcagaaatttccggcagttgtaattccactaattcacttttcaatgttgttttctttaaaataaagg

SEQ ID NO: 35033 - DNA, 502 bp, Homo Sapiens
attgtgaatcctgaatactatgcctccttcactgtaaagtggagataatattctaagccatcaaaatataagtataaactgctggcatacacatacatactgagtagtcttgagaagaagggatgcaactagatacccatggcatcaggtttttacctgaaagccttgctttttccttgtgccttaggaatttcctcagaaataaagtcctgattactcatttaaaagacatttgatattgttaactggtctctgatcagcattgcttattggttattggtgagggtaataataggagatttgctatctgtcatttagtgtgtccacaggtacatacagccattatggttaccttgctatagccaaacttcactggttataaaaacagttgatttcaggcagcgaactactactgttgcttataaactttgtgttttgtacattaaatcacttgtttctcccaggaaccaagtgacttgtttactagaaaaacatatagatt

SEQ ID NO: 35034 - DNA, 354 bp, Homo Sapiens
tggacattggggttgttaccactttttcatccattatgaatagtgctgctatggacattcagatacaaggttttgtgtggacattctccacctcctgtcaacacttgctattatctgtgttcttattttagccaccctcatgggtatgaggatggcctagctgtcatctgcatgtacagcctcttgttcaccagttgccttacctccaggcactctccttgcccccatctttcccactgtggctgagagggaacttgctttttttcttttgagacaggtctcactctgtcacccaggctgcagctcagtggcatcatgacagctcactttgaacttcagcctcaggggatcctc

SEQ ID NO: 35035 - DNA, 370 bp, Homo Sapiens
ctaggaatagggcagtatccccatgatgcttattttgaaggggcaaggaaagacagttaaacatttttatatataaaaaatgagtcagatggtgacatctgctataaagaaaaagcaaagtataaaggaacagagattgatggaggggtgtatattttacatagagtagtcagggaaggggaatcaagggagaaagccctcaataaatgttaaggactcaagaaatcatccaggatcatgagtgccgagtagttcgggaagatgtacaatacattattttatatcctgtggctgtcacacaaaagacacttggtgcatatttgctgctgaacagagaaataaaccaccaaatgtatttcatcacacttag

SEQ ID NO: 35036 - DNA, 461 bp, Homo Sapiens
agtcttatgggttcatttgtgttggtccacacagcatgttaggtcagtgtacagtaaccaatgaaatttcgtcaaattccctcactgtactagtatgttcggctgccatcccaaagttctaccgcttgggtggcttcaacaagaaatctggttttcccacagttctggaggctacaagtccaagatcaaggtgtcagcaggcttggtttcccttagaggcctttctcttcgatttgtagatggccatcttctccctgtgtctttaaatggccttccctctggtacttgtctgtgcccaaatttcttcttcttatgaggacaccagtcatactggcttagggcccacactgaggacctcatttttccttaattatctctttcaaaacctatcctccaaatacagtcacattctgaagtgctgggattaagatttcttcatgtgacttttggggggactacaa

SEQ ID NO: 35037 - DNA, 362 bp, Homo Sapiens
gaggcagatgtatagggccttatggatcatcgaatgactggcttttactcatgaatgagatggggagcatttgtaggttctgagaagagtaggacatgtcctcacttggattttaaatggatttctctggcctgcagccttgagagtagactgtatgaggacaaagatagaagtaatgatactgactaggaggctcctgtaataaacagataagagatggtgatttggaccaatgtggcagcaatgaatatagtaaaaagtgcttggattcaggatatgtcttgaaagtagagtcaacaggatttcctggggactaggtatcagttgggacagacagagtagagaagaatgtgtccaaagtt

SEQ ID NO: 35038 - DNA, 376 bp, Homo Sapiens
ataattatgaacaaataactgactactgatattctccttaagttaggatttactctgttaacttcatgtcattattttagcctctttgtcttcatttacttttgtccttaaggctgtagaaacacgtagtaatgattagtcagattatggacctgatgagctgtggttatagcctccatcgccagaaagccttccgttaatttgtaacacagtgctatttacataggaacaggtctattttaacagagctgtattcttctgaaagaacccttttgccctaggtatccataaaagtggcacagtagtgttctttgttttactttggatgcaaatggagaaataaatgtgaatcaaaagtatctatgagaagtatagc

SEQ ID NO: 35039 - DNA, 362 bp, Homo Sapiens
gtccgcagctctgtcttctttctcaagtgctcactctgtcattccattataaagcatcctacatattttcttctcctctctctcctatcggaccctgtgggtcctcacatttggttaaggaatttggagctacactccggattcttgtctgtatacctcccctctctaggctcccatgtgtgtctttttattctcatgggtgatgccctcacccccaactccatataaattccctctcattcttctcactttgccttctacttcagtttgacaaatacccactcacagatttcacaattcccttagtctatattaacaatctttctccattaggcttgcgagatcactcttttaataatggt

SEQ ID NO: 35040 - DNA, 365 bp, Homo Sapiens
ttaaatgggtgtatggcatgatgctcaggttggggagatgaatgaactgtcagccagataatactatctgggtgcatagtaccgaaaagttagtttttcaacccttccttcccctccctttcccccttctattcgtccccagtgtctattcttgccatctttatgtcacttataagtgagaacaggcgatatttggttttctgttcctgtattaatttgcttagaataatggcctccagctgcatccatgttgctgcaaatgacatgatttcctcctttttatggctgcttagtattccatggtgtatctgtactacattttctttatcctatgcatccttgatcggcacctaggttgattcctt

SEQ ID NO: 35041 - DNA, 359 bp, Homo Sapiens
cttacaaactagagttatcacgatggcgtgcatactgtagtggatttactaagaaataagttcaaccgtacactcacagatgagtgagtttcatgagtatgtaaagcatatgtacatgaaatggtttttacggaagacaattacatactgggctatccctgtcattgaaaggaccacagttatgtgtgtgtgtatttctgtgtgggattcccagcatctcaagctcgaaatgactaaagtagcgaggttgagtcccataaatcatgatctgccactgcaaaagtattgcccctttggacctctgtttattcatgccaggaagcgaagagtcgactgacttggtaaccacagctggttca

SEQ ID NO: 35042 - DNA, 446 bp, Homo Sapiens
tgggttcagacgagtcatggcgttagcctcctaaagttctagggataacaggcgtgagccagcattgctgggccaaaatttaccagtcttaaccatttttaagtgtatagtttagtatgttaggtatattaatactattgtgcaaacaatctccagagcttttcatacggcaaaactggaattatacctgttttacaatttccctatcactccctcctttatccccaggcaactacgatcctattttctcttttatgagttggactattctagatagctcaaataagtggtggtccttttgtgactgtcttgttgcactgaggcataatgtcttcaaggttcatccatgtcgtaggatgtcagaggttatttcattttaaaggctgaataatattacactgtagtatgagccacattgtggtttatccattcatctattgatggac

SEQ ID NO: 35043 - DNA, 511 bp, Homo Sapiens
ggtaacaagcccagatcaggaatcagaatccctccctccctctgtacttcaggagtggtgagacttggcttctggtctcccagccacagttattgctcacctgaacttactttctcagcggtcacacttcatgtggaagagagtaggccacaggattgtgccttgtggtctgactccaagtgactctaaccatgaggtttccaccacttcctttgagagcattcctagtccaagtaggcctgagcattaggaaatattgacactgcagcattttcttgttgcttttagttatatcatcattgatcaccttaatggtattttagtttgtgtgtatagtatccctgcttttcataatactgagaagaggatattttgatttgtgttcccaaagtaaagcatgaatggggagggatggccacagagaaaatgagcatttgaaattttgggcattaatacttggaattacggatatgtaggtacacaatttatgtgctccttctcaagtgtcagt

SEQ ID NO: 35044 - DNA, 556 bp, Homo Sapiens
tgatattaggtgactttgcccgctatgacccgcaggctgcgatggccggcatcgccagaagtccaggtcccatctgaagatcctggtgaagcgctccaaccgcagcagagaccatccacggaggctccacgtctacccagacccctttggcacccctctccttgaggaatgacacctctcacccggactcacgcccagggaccagtcaaatataggagctcctggcgaccccactccctcccaccagtctcctctcactctgtatccctacctctcctgccccagtggataccccagagcatcccctgcccacagatggctacaaagggggaacgtcccttaatcccagtcctagtaaggccctggggtgagggatgagcctgtggactcagggcccgtacctcctagtgcctccacgggtgaccgtgctccccaagtctcgggtggagctgggccagcccaacatcctcatctgcatcgtggacaacatcttcccccctgtgatcaatatcacctggctacgcaacggccaaactgtcactgagggagtggccca

SEQ ID NO: 35045 - DNA, 513 bp, Homo Sapiens
tcagagcatccctgtggctgaaggtcaaggatgcgtgggttatatctcgccattcagcagaaagatttgccaatctttaagtagacacgccgttccaaatttgtaataatgtaaatgctttctaccaaattgtgtaatgaatattttgaaatggtgattgatattattaatagatatgtttgacttattagaatatcatttaccaacatttagcaaaatcgagatagaatagcaagggtcattgatgagtaagttccatgcagatatgtaccttcctgtaacatttaccagatggagacttttgggtgtgtgccaaaagtgatgaattaaccgtgaaagaatgtgagacaaatgaagtgtgaaggtagttcaaaggtccttaaagagacagaacagcccactcttgccttcataagatttgctagagaaagaagtaggtgcctagtacagtatttagggaaatctcagtctggctagtccttacaagaaagaaatcctttgaaaggaatacaa

SEQ ID NO: 35046 - DNA, 585 bp, Homo Sapiens
ggtagtggagtcttaaaacctagaaaaaatatgtaagtttatggcaaaagataatatcccgtttaaaacagtttagaaatttacaaaaccttacatcagtacatcgtctttaagaaggtgctctatagatgagctggtattaagttccaaggatagtgagtatgcatttatgcatggctttttaaactacagagaaagcagctacataaactcctgcaatttaagttgatgtattggtctttttcctttcaattttataaaagtaatttttgctaagttaatatctctccagcaaaccagataacctcaagtacagcatttctgtagaatatcatggtagatgttacgtaatattttacaaagaagcagtgattttcacatgaataagtgagtatgcagtttgggtatatgtgtgtgtggtgttttaaacatagagacgaccgtttttgttcatcaggaaaatgtttatggaatcctatttcctcataatgattttaaatatcaatttttcagaagagaactccttcccagtttcaggtcagtggcccaagcaatgcggtgtagtgcttgggtgtagaatcagta

SEQ ID NO: 35047 - DNA, 694 bp, Homo Sapiens
gtgttcagaggatccctaaggctgaaggtcaacgcgccccccatatgagatcctctttaaaaccttcaatgttctacatatcacgagtaagtgctggtaattcaagttatcagcaggaatgtggcagggttccttccactgtaggtaatcagtaaacatattgtcattgaaataataatgtaaaagtaggagacaattccgacatcacttatacttaagagtggaatgcatctgaagtgtgtgttgaaatatggagtgatgattctgggggatcttggagattcactgagccggaaacaatataatatatcatggtaagagaatgttaacactcttggcttctctgttctgcctcctccatctaagtccctttcctgttattcactttgtactgtgaaaaaactagactacctcttcagaagcaaaggagcagcataaaatgaacatgaacactgccatggataaattggctggtatgcaccatttcctaggcctagaagatagcgacattggtctaatatgtggcctttttaaaagagttcctgtcgagtaggaatagcttgtagtcacaaaacattacagttggtgactgaagaacaaggatttaaatcagctctagctggctccaaaggttatgtcctttccttagaacaaacagagtttgcttctttgagaatttctagcttcttctcta

SEQ ID NO: 35048 - DNA, 635 bp, Homo Sapiens
tgggtggcgttctagaggatcccgaggctgaggtcaacgtccagtataagttaataaattaataatacatccatatttaaagtccttcataaaataatgcttcatcatgaaaaatagcacatgttgctcttctcacctgcgagtcagctttccccaggccctttctgatgtgtcctcagcatcagtgtcttcagcatggctgctggtgagtcccagcgggcccaggtctaccccccctgggcgatttgagatgctcccttcatgggtccgtgtccgggggtcacgggcagctctgccccagcccacgggcccccattcacgcgcatcaggacagctgggctcagtgatgcgttcattcctcttggtggtattggttcctggtttattcaactgaatgacctcatcaccctccttccaacacacacagctgtgaggttcgaacccccaggaatcatgatgcaactcatgtcacatttcctttcctttgttttaaattatgaactctgtagggcctttgtaaacatccaaaactagcactggttgaggtcagacattcatggttgttcatagtaaagttagagagtgttccaatataggagaagcttgccagagctgaatatagtcagcttgtcttg

SEQ ID NO: 35049 - DNA, 400 bp, Homo Sapiens
ccctgatatatcggctacagagtaagttaacattctattatgaagcaaggaataaatccatccctgtatcaattaaaggaagagaatatcaatgtgaaagggggcattagaaaccacgcttcaaaaggattcccacagtgacagaacttctcaatgaaacaccacaccccaagtaacgggggcggggtggtgcaccatagaatctgcccctaggaggcacagccacctccacaccgagggtttccagtttcccattcacataaaagaaacaagtaagagattctgggaggcgctgggctaggaaggcatctactcactgtctccaccaacaattccctcagtaaagcagccatagcccaataatgcttctatttattttacccagaagcagatctattag

SEQ ID NO: 35050 - DNA, 430 bp, Homo Sapiens
tctctgaggctgaggtcaatggacactgaagtaagcaagaggctctgagcttgttttactgtgccagcagtagatctcagtttagaaagtaattggtctagtctgtgtttaccatatgaggcatcgtataaattcatcttaagcgtgtggcagtaagctctttttatttttaatgacatgtcattcatgctagtttggtccagtcaaacagtgtagatagacttaagaaaaagttaaatatctctactcctccccaccctctagaaactactaatactaatactttagtgttaatattagtagggcatttcccactattcctgtggggccctggggtctctactgtaggggtcatctcaacatattttacgtcaagcagcaggtaccatttaaacaggtcttggcaatatttttttcttctcagtgaatg

SEQ ID NO: 35051 - DNA, 434 bp, Homo Sapiens
aacaggctgatgctggtctggaaagaaaagttttcaaattgagtactatctaccagattaaagggaaatttctcagtctttctgactttccaaactgtaggtctactatccatcactctgacaaaaccaattatccactgcggtaaaatactcccatcccattcacccaccagcctcccctctctcctctatcaaaataataatcaccatattatttaatgtttcacttcccatggtgaacctctcatccctctttctgtgaggcttagcaattattacacatctttcaagatgtaaaccgtacttcatctcattgatgaaagttttactaactactctgcttcctctagattccctttttctgatgtcctataagctgtaaagtgctacatcaaagcttttaccaaaaatactatttttactattctttcact

SEQ ID NO: 35052 - DNA, 586 bp, Homo Sapiens
atatttctggcaaagcatcatagtcccatagtccccatggcttaggtgaggcaagctcaccactcctggagggaaggagtaggtgtcggacccatggactggcaaagagttgcaaatcccgcacacgtgactggttttatggatggcaagtgaccctactgggtcagctggaaacaatcctaggacttgtgttaaaggagaagctctttctttggtgatgtcccttaaaggtacttgaaactgctgtcatcacgagagaatggtgccaaaaagcagagaggtggtgagagagtcccagtacctgatgacagtttcaaacccccagatccagctctgcttgaagctagccctaccctgggcttatagtgatataagtcaatacacttcaccttttgcttacaccggtttacatggatttctttccctatgcaaatcaaatgagcctgaatgaaggaacaggtcactggttcagccttatagacacccacaggcatcatttataacctgagacaatttcaatccccaaggccgagcaataccaaggctcaatcctcccaaagcacatgcaacaacatcaagtcacacc

SEQ ID NO: 35053 - DNA, 445 bp, Homo Sapiens
caaaaaagaaaatgcaagatttcacatagaaatttagatttctgtcatgtaaaatgaaaacatctgactgcatggggcctgaattcccacaggagctgagtgaatggggcttaggcactctggtttgccctgtgccctctcctgcctctacccaagtggatagattaattgccatttatcgccattctgaaactattctgatccttacacttggcctacctcacacatacttgcaaggttgcttgctggtccttaaaacacccaagtttgggactctgcaagcttcattgtttagaattgtccatttcagactgagccaccacgcccagctctggttcgattttttcatttctgaccctcaggttgtcccagattcaaccatggtagccctatcagactgactcctgaaactctttgatactcccccatccgtttttgaccttca

SEQ ID NO: 35054 - DNA, 559 bp, Homo Sapiens
tgagtatgggaaatctatatgaaaaagaggtaggcaggtttcttcagtgtaaaatatctgggacctttaatatgctaatgagtattatgaatctctaagatgagaatttcatgcgtactcaatttattggactatggaatgctttcgtcatgaacaacctattggcatttctgtaactaatctctgggaaatgctggcagaagggttaagtatggagacagtaatttccaaatgtgaagggaggaaaggtgacttagctgcaacagaggctgtagttaggggagcagtcagagcctaggctgcaaaggggagataaaggaggaaaaactcatgccagagggtcttaacattcctggtaaggagattttatttaatcctgtctgcaacaggcaacaagtgaacatattaaaggctggagtaacaataatcagggaatcgtttcaggaagattaatttgccctgacataaaggatgaatttgaggagggagaaaagttaggcaacaattgtaatagtccaggcgagacatcataagagaggggacctggaggtttctgggg

SEQ ID NO: 35055 - DNA, 574 bp, Homo Sapiens
ctcctgaggctgaggtcaacaaagtcttctcattcaaagctatctagttcctgctggtgtataagaaaaaaacaacaaatgtcctatagtatggaaagcatgcctccttattaaaaagggcagtcacttatataagctgggaaaaatgagacctacaaatattcaacctatatactgaattccaaaagaagttaataaaaaccaaacattgggggattaactacgatagcggatatgaaatgtgtcacaatgcccaaaacagacacactcaaggttaactatgcttcccccctaagagaaacaacagagtggattcagcatcggccaacgggacggtgctgcaggtaaagacagtgcaggaatagattttaagctagtcccaaagtatccaataaataaatgttagaaagtggtggtgaagctcaaaggaaagtacatatgaaaacccaatataaattaaaactgtgacgcaaatgtgtatcgctgggattcctgacagaaaattacccacatcactgtcaaatgaactatttatcagacggagcagacaggcacataggggaatggccttcca

SEQ ID NO: 35056 - DNA, 523 bp, Homo Sapiens
gatcactcaccttctaacaaaccatttaattaactctgtaactgcttatagtattagccttttcagtctccttctgctggctcctccataaaaacttaattaacttaattaactcactaaattaaaaacttaatttttttggtctgtttttcccggttagaatatatacactccatggcagtaggattttttgtttactgatctatcctactttcctacttagaataatgactagcatatagtagatacttaataagatctgaaggaaaacaattatttttattctctttatccatagcaacagtaattgatttaacataatatcacagaaatacacatatgcatatcctgcataaaaactcacctctacaatcttctctctgttttcggttgggtcataggaggtctgtgagtaagatttacaatttctggtacagctgatttaagtgaaatctggaaagtattacttggtgtcaattaattttgtctactgggtagcagtttatgaacagtcagtctttta

SEQ ID NO: 35057 - DNA, 524 bp, Homo Sapiens
gataagcattgaggaggcagtatgttaatgagggctctcttgtttgctagagatgagagaaatgtatactaatcattttaatttgtacttaaaatacattttactaatcatattgattttaaatatgacaaattcttctagtagatactaatctttcttgtttatcatattgtcctagagaagcctaggtaaaaatgggttccacctagtctgtttgtataacaccttcccccgtcccctctccatccctgccaattgggctctatgcatattgacaagcaaataagaaaaccttaggtttcttgtatttgaatttccaaaacaataaaaggttttgactcaagatttgcattcaagaagaggcagaaattttgtcttatctttttatcattttgtgaacttgtgtttctctgtatgcttagaaaattttacacacaaggaatgtttgaaaaagtgagaattttagagtgcttgggtggtttttatttggtcagtgctgatgtgttaggtgtttagggaaataa

SEQ ID NO: 35058 - DNA, 420 bp, Homo Sapiens
agtatctgctcgggatgtagttatgggcacagctgcaaacccagaggagagcatctaagatcacccgtgattcctgaatgatgtgaattacctctatatcatcttcaacaggagacgtctagtgagcctcttcttaagcaccttcgtggccaggggactcattacctcctcttgtgtcgagtggcttgatgaggcaagaggaggtagaggatcagggagagcggttccccctgagtccttgcttcagtggcatttcttttctgactacaagaaccaaagagtgagtagaggatgatgccattttgggatgcttactgccagatgtgatgctgccttccctaaggcagtagtttaaagtaaataaaagcttgttgggctctgaagttggactgtgtggattcagatcccagccttaccaca

SEQ ID NO: 35059 - DNA, 521 bp, Homo Sapiens
tgccaagttgactgttcagggaaggatggaagttatgaaacaaggtgtgtgcgtgcacggccttcatattagaagaaaaatccacgcacatggatgtttgtatgtaggatctcttagaggtggctgttactagactggggacgagggacaagcaagaagaggagttactctagttactctatattgtatcctttggtaattttgaatttgtgtcataatttcgtattatgtgcatgtacagcctgatcaaaataatcagcatgtggctaaacagacgccatctctagaagggtttacagtctttacagcgggtcagcatgttgctaaacagacaccatctctagaagggtttacagtctgtacagccgggaacacatggaaatggtgtgggcaccgtaaacatccggaaggcgttttgacctgcagaagtgacgtttagcctcaatagtcagagcattcgttctcagtcatgtcacttaaaatccagcgggggctgtgcgggaggccaaggcgggtggaac

SEQ ID NO: 35060 - DNA, 555 bp, Homo Sapiens
ttgaggcttgcgagtagtggccctgagacttcgtgtcatagatttacaggggccaccttcttccttggggggtggctgaacgctgggatgaaagcctagagctgccgggaccatcaggtcacaatgtgatggaggtggaggaggaggatgggccataaaccaagatagaaaaatacaaagcccagagctgaggaaatctcatacaggcatctccggctacccaaatctatttgatgtataaattgtgtatactgagctgtgatgatactcagatagctacaggcactacgttatctcatgttacttggttcctgagttttggatagcaagtggcaagagttcagaaagcaagggattcatctgaaaaattgattccagttaattcagaccccaacggcagacagggaaaacttgggtggtttcagtagcaaaggatacctgcaattatcgatgatactgcatgagcccctagatccagccatacctgaagctagttaaccataacctttccaatagcatatatcaataaactccctattctggctgaaattaata

SEQ ID NO: 35061 - DNA, 534 bp, Homo Sapiens
ttatgtgctgccttctgctcagctgatgatggacaaggctttgaatgatgtttactttgttggctgaaaagactgtgttgggaaggaatgctggggcttggctcagtgaggggttagaggcaaaacagtgcagagtaaacgatccttcccagagaaacatctctggtttcctgagagtcaggatccaaaataaggaatttctttcggtaaaagaccaaatcaaggcctggtgaatataaactaagggagcactcaaaggaatagcctccatatttctgctacagggctgcgggcacagaacagtttaagataccctccctttccccaaggggtttaaataagactggctgggaaggcaaggccaataaacatgaaacaaagaggggacatttcaaatatcagagctttgcatgttaactttcctgtgaatgctgtggcaattcagaaaaagagcacatctttgaagggatgtaattttcccaaagagaagggggaaaccctcacatgtattaactgtcttctgggttgcagcat

SEQ ID NO: 35062 - DNA, 628 bp, Homo Sapiens
aaatgacatagtgataaactatactgtttgatggacatctaagtagctttctctgagagagtatcgcagatgtccgtaatattagttacagtcattgcgttcagctaaaaatctctagataagacaaaatgaaaccaagacgtaggccagcttacaggtgaattatcgcaatttctcaatcattagagtaggactaaataatgtactgttaagttaaagaaaagagcaactggttgtgctcctattgagaaagccacaataatgtcatccacatagcattctcggtggaccccagtggctaaaatgttggagtttcttctccttcgccttcttctctctcaggtaactcagctacagagggagaaggaagaaaatacacacaattttaaggcgtactcatcattacaggtccttggaaggtttggaaattgtaaaatctataggtagttaaatgattctcaagtttttaagttattaaaatatatacatcaataaatagtgcaagcagaaatatatcgctttaacattcacgtcaagaaatccccacccagaattagaaaatcagagaattattataaacgctttaattagtgatattctagacactaaaagttgggtttgatgtggg

SEQ ID NO: 35063 - DNA, 357 bp, Homo Sapiens
ctgggcgcaccgagtgccaagtgaagtacacaagtttcagatgaaggagccaccaagcacccagtagatgaatgaaaatggacctacacccaaggcaaatcatgaaatttcaggatactgggagaaaaaagattatacaagcctccaaagtcaggggaaacaagttagttacaaaaacatcagtcactaccagaagagttttcaacttcttaatagcatcaatgaaccaaaagatgatgaggtaataccttcaggtttttaagggaaaattatttccaatccagaatctatactcaggcaatccaatataaagatagaagacatattgaaagaagctgagagagagctacaggccaa

SEQ ID NO: 35064 - DNA, 473 bp, Homo Sapiens
cgccaatacggataggaaaacaggccagagaggcttggttcatccgcttcccacagattgagtgaaaaaattccctgtggttatttatatagcttgggctggaatttgcctggcaacacctatgctcccttctcctccagagcaatattttgggaattctcattctattatccccccaaactgctcatatatgttgactgaaaggtagatcaaagccataagcatccaaaccacaacagtcgttcatcgggatgacgcagatgcttattaaagattgtgctgagggttttttctccaaatttcctcagaccctcgccatcctaacaggctcttacttgtaaagctttcagtggtggcccttgacatttcctcagttgctcggtctgcctacagtctttagaaagatgtattcattgcctcacaccataagctaaatgaacatttattcagtgcttggtgtaggtgccaagcat

SEQ ID NO: 35065 - DNA, 440 bp, Homo Sapiens
atacaccagatggatagatgctcatgaatcaggtcccgcccccaggccaatcgtatgagtcttgggatggcctgccgggtaaggagcaccaccctgtgtggctgacccctcggcactagcatcagtgccatcgtgaccagcttttctggagtgctgactgtgtgcccaccgccacctcgagagtccccatgatatctcagttcctcctctctgcaaccctgcgaggtggctgctgctatcacccccgcttcacagaggaggaaaccgaagctcagggctgttgtcccccagggttcgacagcctgcgtgtgctccctgccttccagctttccttgtgggagcccctccacctgtttctccccatctaaccaagcaggttacaccccagggcttctgggaaatggacctcaggtttgcagctgatcttggtccaaatatgt

SEQ ID NO: 35066 - DNA, 393 bp, Homo Sapiens
tgagctggtaccgttacgtgatacaccagtaggacactgttgggtgaatcttagacaaatggaaagatgggtgtttaatattaaccacatctcttcagttggagagggaggagttaatgcattagcagagggagcatttgaaaatgggaaagggatctaattaaatcaagaatctgtcatatcaaaagagtgaaaagaacacatctataaatctgtttctagaagattaaatggtttgtttggccataaacagaattctaggagaggtgtcagaagagtacttagtggcagcaaccctatgtgtctgtcagagatcttaccaggtggttttctcttcttttgggtactgtttaagcattcaaatttcccactgctcttggcacataactctct

SEQ ID NO: 35067 - DNA, 460 bp, Homo Sapiens
gacaccaccattcaaaacacaaaaagctacagagggtccgggcaacggaaaagcatcaaaaccaagcggtggtatgtcaaccgggttttatgatggcatttcttggatgaagacaaccccagaaaaagagagggtcatattcctttacctcaaaggggggggaatctggtgtcggggacctacattattcaccaccacatacaaacctggagaaagcaaagtcttcaccagcagatgccaaaggggttccttggtctttacagactagctcggtgcttcacaagagtgggggctgggtgtcccacttggggaacctggttaaaccaagaacccacgagggagccatcgggtgtcaataccctttcctacaacctggcttttttacaagggtcaggggagtctggggcgcagaccaggccgggagatggttcccgggttcaaaaattcaggcaatttctgt

SEQ ID NO: 35068 - DNA, 366 bp, Homo Sapiens
tgatacaccagtaagcgagcagctggcgcgacagtaccaaagctttctctgcattgttggacaggtagagctttgggaaagaaaggtgctttttagttcaagataagtagggtgtgatgcctccaagtattaaagctcagtattgcgtacatgtggtcagacaggtacctcgatactcatgcaaacccaaacggtcatcattatatggttaaattacagcctgttgtctcatggttgatcactaggcagtaaaggcaagcattccctcccaccgttggtgctgtatattccatttcagtggtcatagctgctacgtgcaatgggtcagataatgaataataaaactaccaaatgtatttttactag

SEQ ID NO: 35069 - DNA, 703 bp, Homo Sapiens
ggtaccgtaacgtgatacaccaggcttagcatgtctgcctaaaaggaatttgttttcagattcattttcccttaaaatcaaatactgaaccctctaattagaaataagctttgttctctgactgtgtgtgtttcacaatgatctattcactgttttattcaggacacagacaacatatatggtgcttgcctccctcacccccacgtgcctgccttgccaggggctggaatatatggacatagtaacatgctgtcatattcttgaagaaatttccgtctataaataagccactattacttagaagaagaagaatagaagggccccaggacagagtacctagctaggtggagaaattgaagaaggcatcacagaaaaggtgtcatttgtcctgtagggtggcaatgggctctccaggaagaggaaaaagagagtactagagctaggaatgcttgatgctcatgttccaagtgttttacataaattaactcatccgatcttcatggcaaccctatgagatagtaagtattatgatcacacgcattttaaaacaggaaaattttagccaggaaaaggggactaacgtgcctgaggtcaaaggtcacacgatgtggacgacatggcatgttactgaagggtggaagccagtggtggagggggctgtgagacggcgggccagtctatgtgcacggcacggtgacatctg

SEQ ID NO: 35070 - DNA, 419 bp, Homo Sapiens
actgagcctggccgtcgtgataccaccagtaccaggtagaaatgccttccgctctgtgagaggctgaagctgctgaagttcgttgtttggtctggcctatttaatgtgtgttcactgaatggacactacagcaacaatgaacaaataacctgttttcttcgtctgtggggagttagaaaaacccttcctggtttaacactgcctttcaattagagtctgtgtaggggaaacgcagtagttcatcatacgtgcttactaggttttttataattagaatcacattttggtgcttcttatcagaaaagatattcatgggtttgaggataggctaatgtgaaatcaaaaggtggtttgggcttctttgtttttgcctcacaaaaatgcctaatggaacttttaggcttttgtgtttgtacata

SEQ ID NO: 35071 - DNA, 459 bp, Homo Sapiens
gagcggtccgtaacgtgatacaccagtagctcaaagttacaaggataaggttagatcaactatatgctagttttctaatatatgagtacaaaatagagcaatctgataaaacctgaaaataacatgacaaaccctgaaaattaagaaatgaataacgatattttaaaaaattattcaactctagctcttgttaataaaaatacaaatcaagattgtaagctcaataatcaattaattttttatttcaaaacttaaagagctaagtctgaaaaatatatgcatcaacacttagcataatcactaaggtttgaccaatatgagtctgaaacaatgcacaaaaaacagcgatcacaagtaaataaggaaatgtccacatcagcatattctctcttatagcacttgccactttataacttagtattaattatttatacgtgccttatgttttcatccccctca

SEQ ID NO: 35072 - DNA, 535 bp, Homo Sapiens
tgatacaccagttctcaggcatgtagtcatggctttgtcctgtgtgctgatgattttgtgtagaagtgccactctatgcgcttgaaaacatgtagaaatcatttgaatcctaggaagatgatatctttctcagagaggatgatgttggcttctgcccacagcctgggactcgtcacagtaccagataagtttatagcattttcagtacctgagaggatttgaagctgggccggaatgcacatttggcctagttttcttgccatttacccttggtccttagatgcagcccaacccacagcacaaggagttgacaaacactcccccagaaatcagtacacacttcatgggcctctggacttgacctgtcaccctagctttgcactaggtccaaagcactgctcagccttcgggagcttcttcagtggtcagcaactccccctgccacccagggaaaagtaggttaatcctttccagatgttggcccagtgattcttcactatcttgttagctcactggctctttaatgctttaaaga

SEQ ID NO: 35073 - DNA, 504 bp, Homo Sapiens
gccggtaccgttacgtgatacaccagtcaaacgggctgagaaaatacaatagcattagacatgatactagcggagaaaggtgtagttggtgtcatgatggaacccagtgtgtactttcatccctaataatactgctcccgatggaaccataacaaaggcccaaggacttactgctttatccaatgagctagctagaaattctggaataaatgaccccttcacgatttgaatggaaaaatagttccgcaaatggaaaggacttacgtcctcaatctcctgccatcagaataggtttgctcattcttgtaggatgctgtatcataccctgtatctgaggattaatacaaaagcttattttaacagctctcacccaccaaaatcttcctcaatcctccctcgcattattcagttaagcttctaatttcagaggaccaagaggaacaaaatcaagacacgctaaaacaagtctgaagagaaataattatataaatctgaagtctctaa

SEQ ID NO: 35074 - DNA, 549 bp, Homo Sapiens
gagggcgggtctggcatgcaagggacagaagacacaaagcatccttttcttgggctttgtctgaatttgttcttctcacgttttttcctgtttacaaaagagggttatgttcctagttagtcacactctctcatgtcttagaggcatgagcgctcctcctaagctgaagtgaaattgtgaattctgggatgcttaggtgactttgaggaggaagtcttcagtggttactcctctggtattctcagcgtgtggtgggtgtgaatgttctccctctctgggctgagggaatctaaaataacaagtcctagaatcttagtctccagtttagatgagacccacaagatcccctagttcactgtcaggcactcgacttccctgcgatgtccctgtcaggtgcttgtgtggcctcctgctaatgctggaccacagctccatctgtaggctccgtggctcagtgggaaacccttccttctgtagagctgggcaacttccatgagacttccacagggttttctaagcggttattctgtcttcccttataagatcctt

SEQ ID NO: 35075 - DNA, 529 bp, Homo Sapiens
acagattgctttggagaggtaagatggcaatgagggaatgaatggattcagctccactctatgtgtgggaagtcagccagcatatctggttgaatttgttcagcctttaagcttgggctttttctctttcttgccacatcccttagaggcacaaaagatgagactgtagcctattggaaaccaaacctgagaagattcatcttacagagatgtgttccgcatgctacaggatgactgaagggacaggcaaatttagacctcaacttatcccatctttactgcccattagtctttctgagaggaaaaagacccacaaaaccatggagagtccattcaagctcttagcttcacacagagaaaagctcctctcgtgccaatgagctgtcttgaaggcatgtgtcgttgttcataagaaagtacaggttagagaacagatggcttagcccagctcatgactactattgtaaaatcatccttgcaccatgttcatttgcttaaagctggttgcctttcctctggtgaatgtact

SEQ ID NO: 35076 - DNA, 430 bp, Homo Sapiens
tttaaaaaatttgatgaaaagtatatttcttaaagatcaccatgaattactggcaatcatagcgatccaatatacttgtttctcatccacctatagaaaaagggtgggcagtggccaactaagaaaagaaattaccctggatactaaccgacttttaaagaacttggctacaaaaggtagagataaccaaggtatccaatcaaaaggagctagctaggtgggtcacaataaatatgctctgggcaacattacataatgcagaaaatgatattattaatagaaaggctacttggcagcatggaaatgctgacaaaatatgttcggtagcaaaagacaaaataccaaagtgaatattcaccatgattacataatttttaaaaagggaactaaaatactattctgtggtagtattcatgaaaagaaaacaatt

SEQ ID NO: 35077 - DNA, 420 bp, Homo Sapiens
cttttgtctgttaagcaggaataacaactgtaagctcatttgttcaacaatatttacttagtacctaccacactccacaaactgcactatgtggggatacaggctaatagataaggtcccttctctcatagggtatatatttcagaggacagagactataaacaagtgaacaaataaacaagatgatcacagactatagtaactgttataaaggaaataaaggatgaccataagagaaaaactaacctggggcaaagcagtagggtggctggcaattttagggtaagggggtcagggaaaggtttctgaaaaaagaacctttaagcagagacctaacgaatgagaagccaggagctcaagcacttgagcgcagaattttcaagggccaaagaaaagtaaagagtcttctaacttcatagg

SEQ ID NO: 35078 - DNA, 521 bp, Homo Sapiens
agatggggccttttcagttattatgaacttcttttaaaggaattaatttttccgtacttaagcacaaaggtctaaatcattaacgcctgaaattcaaaaattagactcactctacatcagtatgattttacccttttactgggtgtatgtgctggaaatttgtggattacatgtaatgttaactgtctggagaaagagtaggaacttgatttctctttgacatttgcaggaaaagaatatatatgattttgagactccaaattaacttaacaaaatcaatctagtaggtggtaagataacctaaaataacatagactcaaggtaaaaagcctaatgtagataaatgtcacattgcttggaggaattacttaaaaattccagtttaatcatcctatgctttttgataggagttcatgtacaacatattttaatagatgttcacaaaatttctgtattatttatatcttaattccactattggcactaattgtaggatattggggaaaaatattccttagttc

SEQ ID NO: 35079 - DNA, 386 bp, Homo Sapiens
taccacagtgctggctccaagcgagaggttttgtagccaacttggcatgggtccgtgaattttgattggcaaatttgaagcaaagttcagccaagctctacatctattttgcagtgtgcctttatgcacatccccgagaagccaactcttccgatagatctttcagttttatgattgttggtacctgaagatattagctctttaaggaggcaaatgcttctggcaggctggcctgcacttggaataggagaaatgccttctggtttcttctaaaattaatgtaataagatgcattaatcagaattctatcaagtctacaacacttggcccaggcttaagaagcaatactttgaaactgccgttggctaagcttccctattctttgt

SEQ ID NO: 35080 - DNA, 527 bp, Homo Sapiens
gatgaaataaaattatctgtataatgaaaacaatatgggaaatatcagcgcttgacattttcctctctggtgggaaacatccagatgactgcccagatctagtgattgtgccctggaggtgatcaggacgtgtgtgtcttagtgataagtctcaggtcttagtagtcaactgtccaaattcaggtcactcttggctactttctacaagtagctttctggctactcttccaggagaacatgccttcagttaggtgatctgacagaggagcctagatagctatagcctacacattcgggcctaaacgtcggttctagacattcaagagcatggattccctccgactcacttgtgtaaaaggctcatgcctctgctgctgctgaggtgcactttgaatttggagctatttgacgacatccccaaatccctactccaaaatgcaaaatagcattaatatactgtaaaagattacttatgtgtaaattacgagttatgaaaatgcttctcttcatttgagtctttcaaggag

SEQ ID NO: 35081 - DNA, 355 bp, Homo Sapiens
ccagatctgctgttgttcctgggaaactggcgtatcagtcagaataggccaggttatgctgcagtgacaaaaatcccctacatctcaatggcttgatggaacacagaaaaacgtattctcctcttcacattgtcaacacagcctgggcactgctcccaggctgctgacctccttgtggtgtctggccagcctgagccagttagagttcacgagttgtccacctccatgtgaggtcaccatggggcatgcacagactcccatgtccctggtgctcacaccccacacgatcacacttagctgaggggtgctggagaggagagtcttgctgtgcccgggaagcggagaaaaaacaggt

SEQ ID NO: 35082 - DNA, 670 bp, Homo Sapiens
cgttattaatatattgcgtattggcttcatttatcactatcttgttatttaaatttttttctttgcttgaaagcaaaccccagttattatgctgtttcccccaagtatttcagtatgtatttctaaaaagtggatattttctcaccaaaccttacaacctgttactatacataacaaaactaacaataatttgataattctttatataattccaagtccataatcaaatttcctaaattgtcaaaccatgaaaaggtgtttttatattagatttgttttaatcagggtctaaacagggtccatgtggcatttgaatgccttttaaccctctcaatctagagcactctccccttttttgttctgtgctattgatttgttgttgacactggtgtaattgccctgtagcatgtcctaccttctagatttgtctgtttgcttacttgtgacattgtctttttaaagagactaagccagtttatcttgtagaatgtctgcttgttttcttctggtgtcatttgtttttctgtacctgtttcctaaacactgaaagtaatatgaatggcttgctatattttagctcttcaacaaaactacttctcaggtgatgtgaattcctattgcttctcatcagaggggttgaagttcggtgtgcttctactatagtgacgta

SEQ ID NO: 35083 - DNA, 582 bp, Homo Sapiens
tgatgcagaatgggaagatgaaaggaagtggggtgagagtagccacactagttactcttcagaaatagccacactacctaagcagaacaggttggattaaggtctgcacttgagccaaaagcgagaattcattgcctttgttggctcatgtcacttctttaattaatgtcactttctctggtttaatatcagagcaagtgacaagagtggttctggatgaattgtgttttccgaggactgtatggcaaactctcctgcagtctgacagagggacgtggcagttttacttggcagttacaatgcaccagctttagttttagtagtttaatttgtggaagttatatgttttgaatacgttgaagtattcacaacggtcttcatggaatctgttccatagataaagtttacacagtgaaaaagcaaaagcaacggctataaggggattaggaaaagcttctcttggccacagctggttttacaggcattcctgtaaattttagagcatttagaagatatgatcaataaaattggatgttgtgtgtgtaagtatgtttaccctccaattaaagtaacgttttttaa

SEQ ID NO: 35084 - DNA, 455 bp, Homo Sapiens
gtaaaaaatcttacagttgcttgctatatgcaaataaattttgttattctttgcagtgtcttctaaagagaaactcttgctaagaactatgattttaactttcagatataaagtgatagctctgcattctattctttcaacccaagatcaagctgcagcattcacacttccccctccaggagtcaggaaggtaaaatttagtacagcaaatttatatgtgatccacctgagagtattttatgatggccgtataactttttatcatcaaagacagttgttaacattaagtgccttatagcgcattgccaactccaagtgttctgcaccctgccatcatcagaagtgaacccaatgttacaattcaagcatttgaatatttacattatgtgctatttaagggagaagaattcattgagggagtgctagttgaaaaacataatatggatgttgcctgt

SEQ ID NO: 35085 - DNA, 522 bp, Homo Sapiens
atgtacaggctgatgcaatactctaaagcagaaatgtccaacaagaacatagaaaatcaatagttctgacgagaaccaaggctggataccagactctgtggctcataagagtgaacagtaaaatggacataaagttaaaaaacagcaagatactatttaaaaacagttgagaataggatagtaataactgttagaataatgacagctaaaaagttagacagccacagtactatgagctttatttgtattaatctcccatagcaattccatgtagtaattattatataatcaagagaagagggaactgaaacttagaatgcctactaatatgcccaagaacacactttaagtaaatgatgaggccacaatctcaacctagatttatctgatatttgagcctacattattcttttttatgttgtagatgtaaaaatagtattagaacatttaggtttaatatacacttctgtatattaagtataatgtacaattttgtatataggaatatatgggcatcagcct

SEQ ID NO: 35086 - DNA, 519 bp, Homo Sapiens
tactggccgggatacaattagagaacactgctctagaacaaaacaaattcaagttatttttgagatgaagaggggacgaatttgaaggagcagaaagtctcagatgaggcaggtccagagggaataagaaggtgcagctgaagggagttaatctttgcgaggagaagtgcttccctcttacagaagagagaaagaaaagagttgataagacgctaaaaggttttgaggtgaaagagaggcatatttaagggagtcacctaagttggactttgagacacagctttaaatcaaatagatctgtgtccaaatcctggttcagcagtcacactcacattccaagttgtataacttctccaagccttagtgcctttatcttgaaattcaggataaccgaacagcacttaccctgtaggtagtcgtgaagattgagtgatgagctagtactgcttcctgttagtgagcagagagagcgagcctgggaaacagaaagacaaagaacagagtgaccttgactgtagc

SEQ ID NO: 35087 - DNA, 496 bp, Homo Sapiens
tctataaggggaaacagccatggccaggttggggtaagatgtaatgttgcacgaggggttatccggtttactatcggaaagagtttctgaaaacagaagaaaacccacagccagcaggagatgtgaataccactcacaggacagtgacccacagggggaccttgaactgtgtgagagggtgccgccttcacttccgggcgacaggggtgtcgaggaaaatgtcacgtgaggtcccttctggctggcaaaaagtccttgggcattggctggtaggcatgcaagagggtagactctgtgaggaagggattgggcaacatctagcaaaccggtcttcactgacctgtgacccagcaaccccctccccagaacctacctgaaggcacgggcaaaggcaggagaagctgcgtgtgcagggctgcttgtgacagtactgttgggacaactgcaaatgcccatggtaggagactggttgattcggagatctgtggaatattat

SEQ ID NO: 35088 - DNA, 359 bp, Homo Sapiens
tcccatacatcgtcgctgcttatattgcaagcatgcataatcaactccgtgcagattgtggaatgagccacatttcctccaggctcagaccttgcctgtattgttccttctgcgtgcaccagtctttaattcttagttttatactcttttgcctgaggcattttctcaaagaccccttccctgcacgtctcactcttttcccagatcaggtcatgtcccatatttaaatgattaatagaggaatgactttaaggtgtatctccatcactgacctgtaagcccctctcctgttcaccactggatcccagcaccaaggcacttattatttcttgggtgcgaacactgctcacatctcatat

SEQ ID NO: 35089 - DNA, 456 bp, Homo Sapiens
gaacaggctgatgcagtgaaatcagtctgctttctaatggtagtagatgtttcagctctattctgaagcagtgaaattcagtctgctttcaaagtcagtgaatgcatttgaattatcccttatttcatttcagtagtaactaccttgagactccccaagtactccaattagtttttaatttcagcagtaaatgtgtgttgaaaagaccaaagtttgcattattttccttctgatgtatttaccatccatgcctgttgacataaaaagatttttccagacttgggtagttttcagaaccaaacaaaacccttgtgctataatgtgacttagagacttttgactgaaatgcttgatatagttaatacacataatttttttcaaaatgaaaccacaaagagctataaagagaatttcatagctaatttactgcttacctgtatttggggaagccattta

SEQ ID NO: 35090 - DNA, 444 bp, Homo Sapiens
ctgaaacccagcaggacagacattaagccttaaagctaaatctcccttttactccatgtcaagggagagcccccatgactgttctcccaggttagagtctgctgcctgtggcttttcccaggctgaggatgccagcagctggtggatctacctttcttgggtctggtctggagagtagtggtccccttcccacagctgcactaggcagtgccccagtggggcctctatgtgtgggatccaaccccacatttcccctcagcactcccctagtacagtctctctgcaggggctccatctctgctgcaggcttcgcctgagcacctgggctttctgatacatcctgtgacatctaggtggaagctgttaagcctccttcactcttgcattgtgtgcacctgcaggtttaacaccacgtggaagctgccaagtcttacagattgtgcc

SEQ ID NO: 35091 - DNA, 478 bp, Homo Sapiens
tctcaggtaagcaatctaatcttggcagtatttttgaggtcttggagaatgatcccaggggctgtccaccctgtggtgtccttgtgcttcattctaagctggttcccagatgcactgggtagctctggcttctgttgactccaaggccccaaatactgatttgtaactataagacttctaccttgcaaaagttgtgagtgaaggttttagcaggcactagacatacagtggtcactccgtacacggccctgtgcttctgacagctggcgtgcatatccaaacagactccagagtttggccatgcagaaaccagtccttatatttatcagaacaagctttatgggaatgaattccaggcttgtaaaatttggcagcacagatggccactcactctctctgcatagaatatttagccagttctgaaggtaattatctgccttggttttgtaactaaagactaccagcaaaggaatcaggg

SEQ ID NO: 35092 - DNA, 414 bp, Homo Sapiens
ttgcgcatccttgttgattaagatggcctacgtttgaaagatccggccctctgtctgggctctcaatctgtgcatacctctgttttcctgtgcaactgagaacttctcttctggtgcttctgattctgtcttcctcatgtgccccagagagaaattgtttgctagaggtgagtgtgtgacgctagtagtcgctcactctcagggcgccagtattgcctgggctgtgtgatctgggggatgaaaagcagaagatgcttccatttgggatagtcctgtgactatcagtagcagaaggagctattggttgtcttgagaagaggccacattagcctcaggccaaattatctcagtttcgtggttgaagaaattgaagcacagagaggctaagtcatttgcccagcatcagcctgtaaa

SEQ ID NO: 35093 - DNA, 517 bp, Homo Sapiens
tcagtcccgagcttgctttattacattcatgctacagacttaggaatatacaaaaatcaacaattccataagacgttttattcaccaactcttacaatcagttcagtctccttgaacagggaggaaactaaacagaaggccagtgtgctttatttcttgcttgacgtggcagttgactcagccacttctttgtgagtctacctatgttgtctcaagaaagtccacccccagggctctgattcaggagaagaggaagagctactgatgagtggcttctaggatcccgcagagcttcaaacatctgcttttgtagaaatcaatgcatccatatgcattagttcgcttacaggaacagtcctggctgtgaggttatcagtaccctctttatgaacttttagcctctcagcatgaaaggttgtcacagtccccagcttgatgttagtctgttagtagtcctgtttgaagaagccactgtctcttacagcacagccccccactgctgatgtaagcgattgtg

SEQ ID NO: 35094 - DNA, 605 bp, Homo Sapiens
aacgcgtgggggtggtgatgtgacttcagagctgctgtcgtcaaggcagaggctgaaggtagccccagctgcctgtttctagaccagagctccacagtggcaccaagcaaagccttcccctgctgcaggtccctgggccctgcaggattaggatgagtcctctccctggtccctgggcaggtggcaggaggatgtacagagaggaaggcgctgtggggcctgggttgcctagcacttggtgtgtcttccccagtgggcagcatggagcagggaggagcccagggaggtggggaagtgctggcctgtgtttgaaaaaggagcacgcagaggtctgagcacccactgcctgtgggcacctacattcatttcacaaatgaggaaaatgaagtaacttgccccagagagcacatttagtgagtgtaggggctaggatttgaacacagatctgattccaaagcaggcctctttgctgtccctttccttgctgcgactgatacagaggaggggagagagagctgtgtggcaaactgatttcctaaggctgtggaggtgccatcccagtggcattccaagcatagcctgtcaggggtacgagctcaatcgta

SEQ ID NO: 35095 - DNA, 481 bp, Homo Sapiens
agcaggctgatgcttcacaaatccaaaatggagctctttatctccacccttctgtactgttccgctgtctgtatcccatctcaagaaacactcccaccatctcagtggcttaaaaagaaacctaagacctgtacttgattctttccttttcctcattcctgcattgaattcctaagtaagtctggttccttctttgtctaaaacagaggtaaaacaaactttctatgaagggccagttagtcaatattttcagcattgtgggccacatggtttttgttgaaactgtcaagtctgccattgtgtcaagacaacagccataggcgacatgtaaatgaattgtcatgttgagatctggcctgaggctgcttggatttggccatagtttgcagacctctggcttaaaatatttcacatctgtccaattccctccatctctactgctaacctgcaagttcaagccatattgcttgaccagactact

SEQ ID NO: 35096 - DNA, 417 bp, Homo Sapiens
tgcagatgcatgaggacctgtgtgaagcttcgctaagatccttggacagagacaaccaaagaatgtcttcaaatatgagcccagaatagagaggcggacactgcagattgcaggatctgatttgcagtcttgctgcctctcacatggtgcctttgtttggcttgcttcagcatgagcagcagtaggcgcttatttgtttaatgatgcttagtgccttttttttccaggcacaccactgagaatggcaggctcagtgatgagatgtaattccattttgtgccatgtgctgtcctgggcgctttctgtgaactgtttgattttgtcttcacagccaccctgcaaggtggataccgttgcccccactttaaagatgggagaaggaaagcccgggcagggatgctcattactcaaagtcat

SEQ ID NO: 35097 - DNA, 634 bp, Homo Sapiens
agaggatcccctgaaccaggctgatgctggtgtgagcatgtttgctttacaacacatggactcttaagctcatgatagataatttcctaggtgagctagtatactgtttcttgaaattagtggccttgatcagcccttctctctccaagcctgtccaataaagataagtttacagccttctttttgaatagacacatgtcctctgctgaactgaattatctaaatcagtcctatttagtctcctccccttacaagaaagatccttatttcagactgaaagactaggtgatttgggccatattttaggttttatcatacttacccttcatgtcatttgttaaggtcaagttcagcatttgactgtggacataatttttagtaggtgttccttgggaagaggcttattgggaagagaagtttattccaatagtctcataaaatcagtgaatgctttgagttaatttatcagcaacctgtgctgaataagcaaggtgccatgtgttaaattagaaaaggcaaacgtgctgctagtgaaaactgtgtcttctaagttggctttaaaataaattgtctaccagattaatgttccatcaaaaattaccattctcatttatagatgcagctttatccacat

SEQ ID NO: 35098 - DNA, 648 bp, Homo Sapiens
ctgatgcataaatatacatacacacaacctgccacagtatgctaatgcatcaaaggcctttctactctgaatttaaaacacagtttttttaagttgcaaaagatagtcaaataatctgggcactgccaggagctaggattgatgcttacgaaggctccacatgctgcagtgacggttccaaatgccccattcccaccgttcacagttaggtaaaacattcaacgtgtaaagactctcagagagatgctgattcagtcccatggagcttctcaacagacaaaactttccactgttgttgtcaaccttgggagtaatgttcaggatgaggtggggggtcctggaatcatacaagaacatgccctaatcccaaccctggatttcaaaacaaggccgttcttgttcctgcttctgtgccccaaaatatgtaacacctaaaatggaggactcgacagcctcaacccaatgacatgactgcagtttgggcagccaacagcagaagggtcatgaccagcttcattgggtggaagtccagtagtcttctgcaattcccaaaggactgcaggcacctctgtccacagagcctctgggaccatggtcgcggaatgtagtgccatacaaagcactgatggtgtgattgctgtatccaag

SEQ ID NO: 35099 - DNA, 670 bp, Homo Sapiens
tagcaggctgatgataaagattgagacgtgctccctgagcagaataggttcagattacagcatatatttatattatcttccggggccaacaaacatatccaggctacaaaagagggtgctattctaaatacaaaacgttattttataaattttgatccaatatgcagaaatgatattggacttccaactttattattctatcaaagatgctattcttaacactatctcacaattttgtcaaaaatatttagggaagattgatgaaaactgcggcccagtgtcatatataagtaagcatattattctctaacaatgcagaattttattttcagatacagaatatctctaaacaccataaagtcaagttcttgaaaggatgagggacatccctccttcatattatctggatgaagtgagtatacctgagacaaaatggttcccaagtcgataggtgactacagttcactgatggcttagaaatatagtattttaataatgacaccaatatcaataaacaaagatatgtcctagaacgaaaaataatattttctagggaatttggggaaaattagtctcatactgcccagagaatcatcagacatattacaggccctaaaatatgattctcagtaaatatttgttaaataatcaaaagtttcactctaatgtt

SEQ ID NO: 35100 - DNA, 679 bp, Homo Sapiens
ctaaggatcccctgaacaggctgagcgtctgcgctcaggaaaactagggtgcaccgtggctgtctgttccattccctgccagcttaagcatccacccccatcagatccacccctggctgcagtcttcgcttcttctgtcgccttctttgccaacctcagcctctttcctcccctgtagggcccttagcaaaggcgcaaggagggtagaggcctgctgattgggcattagaatgtgctaatcccccatctatgacatcacactgggtggctatggagatgtcagtactacaaatttccagtatcctagctctctccagcgctggggttattagaggacagaaggccttagaaatgggagggcctcctgggttagtgccactgaatacagctgtgcaggtcgcacactggacaacttcagggcaacatccatgtagactaggtcacaaatagtgctccccagagttgtagttaacaacctacacagcgccatgtggcagcctaggaggcccagagttcatacagagaaggagaggatggcctgcagaccttggaatcacttggtctgccttctagtctaagcaggaccctgtagagtggaagcagattcttgtctaacattcaagcagctgtcccattgcaagttcccttcttccctcctctctggcatcagcctggggta

SEQ ID NO: 35101 - DNA, 583 bp, Homo Sapiens
cacccgcaaaagcacgcaacaacgggcccgggcactgagggctcacggggagcgtggcatcagcgtgaaatctacaaagttcccatggcacgtgagtggacgcttcctccacacgggaatgtccggctgccccaaggaaggctgcaataatgttgagatctttgaataggagcaagggatcaaggccgatggcctctctgagggcctcagtttccatccatgtgggcaagctcccctttgggaatctgggttatggttcccgagatggggacaagaggcatccgctgacggctatatttacaaaaatccatcaagtcgacacgcttgtgagagtcaaagcagtacagtaactcactggaaaagtgaaaaattctcaccttcacacccacagagataatgggggcggcgtgggggcaagccaaacgcatgcgtgtgctctgtgcactcaccgccgccctctccgcggctgtctggctcccgatttgcatagtgagaggcagaccaccaggcttgaatcaggaggggcagcgccttgtcccagtgagttggggtctgagacagtgagtagcacgggtgtgacagg

SEQ ID NO: 35102 - DNA, 606 bp, Homo Sapiens
ttatgtacaggctgatgctattctattaaagtaacgtcacgccaaaggcacataatactataaagtttatttgcaatgtggagcagaaacatctatttcttttttatatcaaagcttattagaatgctctatcatctatggagtgtacagaatcatttccagatactcttgaaccaaaaaagaatctgagcctctcctaacaagtagttacaacaatgtagaaagattacatgggaatgttaaattggtaacacattttacctcaactctgtttccaaatatattttcagtaagttcaatgggcaggctaaaaggtaaaatctgtccctagaaggtatattatttttacaacaggatgagataatttaaaatgtattataataaatccaactcatgcattttaagcatctactcaattttcagtaatatgctagaaattttcagtaatatgctggaaactgctatgcagtttaaggataaatgttttactttattaattagctataggaaataatatacttacgcagttttcgtattttttaaaaatagtctaattccatttggttcaataagcattgatttactgtccaggtgctagtataggtt

SEQ ID NO: 35103 - DNA, 718 bp, Homo Sapiens
gcaggctgatgccaaagtgaagtcccaggactcatggctgtctctgctccttccctctcaccccacaccccacactcagccagtcccgtggctcaaccaatacagccactgctcaacggcctcaatgccagcctcaggtcacgccacactgtctttcttgtggacaccacaggaatccaccccacacacacacttactcttctctccctccaccctcaccgtcgtgtggtccattctccccacatcccccagactcatgccttaaaaatgtggatcaggtcatcccccggctcataacccccacagagcttccatcacatttacgatgaaattcgccctcctcacccctgctcaccgtgggacctcactccctcctccatttcctccttagcgcttctccaatgcccagtgagtcatttccttgttagtgtcttatcccggccggcatctaagccccatgagggttctgctgctttggcgctgtgtcaccagcccccagcacagtactgaccatggaacgactccacagctctctgggctcacattggatgatgacctctttcagcttcatctctatagtctcctttaaccctcagacacccctgtgatgtggttacttttactggcccagggcccaaatgagaaactgagtccggggcgggttaccaagctgtgatgaatatctggtaaatgttacttttagcattcgcgggtctac

SEQ ID NO: 35104 - DNA, 440 bp, Homo Sapiens
gtgcttcctcttcagggtgcaatccaacggttacccttgggttttaacaggtacctgtagggagttgatgtgcaccttcttggggctcacttagtgctggtttatgtttttctagtggcactggtcacatcatgtaaaaattagcagtcagtgaatctggtggcctccatagctataaactctatctagtagctatacctgttacctcagtgtctgacacatggtctggtacatagtagcactcaatggtgtgaacacaacgcaaatgtaaacgcacgggtgacatcatctctaaacagagtggaaaccttggctagcctcaggtgcacaatctttcccttacctcacctcccgttgcaaggtgtatctggtaggagtaaattaaggataatctcggaggtcatccccaggtaatcagcatcagccggtacgagggggat

SEQ ID NO: 35105 - DNA, 660 bp, Homo Sapiens
aggctgtatgctgaggaagacatttcctggatttttgtacgtgcccatggtgaggtccaaagtgacccaaataccacctaaatccctggatgctaaactccttgagggcagagacagagttatgaacctctgggtctccccataggtccaacccagcactaggtcttcagatggcgtctctaagaatgtcagttggtcaatttgttattcaatgggcacatgacaagttgcaggagtgcacaggtgctttcagggtatcatcatctcaaacagaaacagcattgtatcaaagagcctgtaggagtccagaagaaatacaggactttcttcttccttttgcaaaagctggcagtttaaagccacagggcattagatcaagaatgccatgaggctgaccagtgaggggcttgactttgagggctctgggctggttgggctggccatgcttacacttggaaagcagtaggacccattccctggttttgagcattcaaagtagccttggcttactctctgctctgagttctcacttcagtcttcctattctgaggttcaaagaactgcaaatagtcctcagacaaagcctgtggggtgtctccccagattccaggaactctccagatcagatagaccaggattatgaaactcagcctgatcaag

SEQ ID NO: 35106 - DNA, 592 bp, Homo Sapiens
aggcggtaccttacaggctgatgcactatcaatacaatagaagaggataaaaaccacagtaaagcctttctaattttagtttctctgtgacgtgattgagatttttaagatatttatccttcttaaggatgcatatgtgaagatttaggagcatataataagctaagcagttgttaattcctaggtgacctcaaacataggctttatattattccaggtgcttcatgtaccaccattatttttcttctgtaattataccttcctctttggatagccactctgttcccctgctttatttttagatctctgtggatgccatataagttgctttccgtcattggtttcaagatcagcattaattataggatccattgccttggcaatgacagtgtcaagacaaaaaggtaattgtggttttcgcagtgaggtgatagtcaaaccgtgaatcaggagaacttttgaaagtcttagtcttagaacttttgaaggtcttagtacagtattctcttttagcaccaaatctggagcaactctactcttggcttggagatatcgctattttccttgatttgtactttggtttcttcctttc

SEQ ID NO: 35107 - DNA, 467 bp, Homo Sapiens
cccaaccaccatttctgatttggtctggcttgaactttccatttccggtagtgaaagggtgaacaatttaaagggtaaacaatttgggtttcccctcgaaatgagttataataagaattttctaaaacagaaaaacaaatctggccttaaagtctcactggactggactggctgtcagtttttatggctccagcgtccccaaaaacagcacgtctgcttccagactggctcaggcacagctgcaggctctgcttgtgtgggcagagtgcttctcccatcaaagagcataggcacggtgcgtggcaaacggctacttggtatttggcacagggatttaacaggctagggttctaagtgggtttccacaattgtatcacttggctgcctctgtaacctccctggtttagtgctggtcctgtgtcctaggccaaaatttgagaaaagagggaaagattgatgtatttctt

SEQ ID NO: 35108 - DNA, 712 bp, Homo Sapiens
gcctgtatgatgtggggtattagtttgcatttcactgctaagccatgctacctgtgtgcctgtcacaaagaggaagctccagatagttgctaaatgaaaggacaaactggggtagagttcctgcaacagcagtttgactactccactgatcctaccaagcagcctaactgtggctcagtttctcctctctggggaataggagtaactattgcttacccaacgaccctggaaaaacttacaagaaaaaacattaatttgtgtaaaaagacttaagccctttgaaagacatacttttttattttccacgtgtatctttaaacaatagttctagtggtcttagttttattaacacggtgtccacatcagaatcgtgaatcccatttccagttctgctgtccactatgggccataaggaagaaagaagcaacagaggaaagaaagctctatctcgcccgggcaatgggtggacttaaagatcagtgcatattccttggattggtttgtaaattgttcatgtatgtgtaatgtctggacaatgagaatccatagctttcatcagcttctcaaagtggactgcaaagaggacctactctagagaaacaaatgtgctcctgaaaaaactgtaaacaaactgtgaaatgttcaaatttcttttttacacgaccctcacatgtaaacccagaacccttccgtacaactgtgggtcacagat

SEQ ID NO: 35109 - DNA, 693 bp, Homo Sapiens
agacccaggctgatgctactctacatggcccgtgcaaacgtatggaaaactcctagcatttcagtagattttccagttaatgaagtcttacattttaagcatcaaaactttgtgtaaatgttggtgcttttcagtggaaaattaagatttttaataatattttatatggtgttctgccctcataaaaactgaataaacaagaatttggccttctaccgaggactcacgccctctgtaataagtaccagatgctgtgcttggttgtcccatctttgggaaaatgagatattcaaggctgtcagtcccagtgtgagatgggctcagatgccttcgcctgtagagtctttgggtgtgcttttaatggtctctctgcctcttccttaggtgtcaggctgctctacctgtttctagacgctcttcctttcccccttccaaacctcttttcttccttgctgctttcctatcttctgtggctaggagatcaggtaatcaagcctgtgtttactgtaatgagtaagtgggttgccagcgaggtctctgtggatgctcctgtgagtcaagtgcatgagctttagtgcatggactttggggtcttggttcccacagcttatatgtctagggggctgctttcttgctctttacacacattctgtgtcatgagtgtgccgggtaggtggcctcctgcccgatgga

SEQ ID NO: 35110 - DNA, 579 bp, Homo Sapiens
gagacagtgaaaaccctctcctgtctctctcgcctgggcgatagaggagggacatgttgagatggcaagtcacacagggtgcagcctgactgctgagtccctttagagagcagagatgtcctagagaaacacttgccttgcattcaatttgatgttagctggaataaaactggggttcagccattgagatttcagggctgttggtcgtcatgacgtaactctgcctacgctgctagtccactaaggtggggatccactgtagtcatctgccatggtttagttacctacctcctagtgctggacacttgggttacttccagctctccaccgccacaaacaaagctaccacatgtcctcataaggacctgagcaagtttctgtggagtccatgtccaggagtttgcaggaacatagaatataggcatagttcatgtctctaagtacagccagattgcacactagagtggctgcagtcctttatgctcctactcacagttcatgaggttaccatatctgaaaccacagtatattttagcagcttaaagcaggactcaagtagatggttgactggaatcaaga

SEQ ID NO: 35111 - DNA, 512 bp, Homo Sapiens
tgccctgttcccaagctaatatcctacattatatgatacatgcagaaaaaaactttcttcccctttaccccgagtggcctttttagctactttttatcctttacccatacttggagtagtttatattatatacaagtgctttttacaaattagtgaaataaggctctttattataagtgaaaaatgttagccttagttctaggtcattcagttagtttcccctcctttcctagagactcaattaacattgtagactttaacagtttacaaaatgcatgataaacatttaaccaagcatttgcagtccagatggtcttcattcctttctcaccatagctgtgaggtagaaagggctggtaaacgagctgcatctcctcacttgtgattgaatacttgttctagcagaccatctgccactctaggacaattaactgggatattacttagatatagcaatagtagtggtcttgctgttgcttctatgataaatactcactgaattctagatattt

SEQ ID NO: 35112 - DNA, 358 bp, Homo Sapiens
tgtaacaggctgatgctggcgggcataatgaacagggagggagagaggcagcccaggaaagtggtagtatcggtttcccataagtggcaacaaattaacacaaacttagtggctcaaaacacagatatgggatattaaattgctagaggtctgaagggcaaaatgggtttcgctgggctaaaatgaaggtcttagcagggttgtattccttctgaaagctcaagaggcgaatccatttcctgcctcttccagcatctagaggccaccggcttccttggttcacagcctcctcctccatcagagccagcagtgtagcttctctcattctctctctgattcttctacttcccactcacct

SEQ ID NO: 35113 - DNA, 663 bp, Homo Sapiens
accaggctgatgctgactttgtcaggttctgcaggaccatggctgacatctgcatgtgccgcctcggtggcacctgggcttcctcacagcatggcagtcaggctccaaggtgcagctgcccgagagctccaggaggaagctgcgtggcctcttatgatgtggtagcagggtgtcaccttctactgtggtagtcagcctgccccagttgtaagaggtgggagaggccccacatctgagtgtccacaccataatggggaaagggtacgcaccaacttctgagagagtcatctgccacagggtggcacaaggtcatggcatttcacatggttgtcacccaaagaaagccctcagccgtggagccttgccctctccagaagcgtcataggagatgccctgttacgtctgcagacaacccgtgtgggttcacagcctccaacaacaggtcagttgtatgttccctctgaggagcaggagcaggggcccaaggcacgctcccagtgtggcaccgaacacctgctgctggagatgcctgcaccgcacgtaggagggacacagtggtgagcaggcgctggtcctcattgcggctgcctgctggtgacgggatgtccgatcagggaggaggagatctcacatacagatgtcaatctggcatccaagaaaatc

SEQ ID NO: 35114 - DNA, 484 bp, Homo Sapiens
tgttagaaagaacctgctgcaggtgctctaaatactccccactgaaggaaggagcaccatttaagaggctggggaaggaggggtgacgaggcctggctttgcaacgggacagccctgggataagatgctgcctcacagcctgagacccgggacaggtgcgcaggcttctctgagccccagctccctcctccgcagcgtgggataacagtacttgtgtccacaacacatgtgaacacaccagcacggtgtctggcaagtggaaggcgtgcaatgatgtcactttagaggcagcttgtaaagaatgacagcttctgatgggtttctgtgacaacctgttctctagccgggtgtcaggaactttcagcaactatcaacagctctatgaactgctcggcaaggaaggttataaatacccaccctcccccagtacaggaggggcagtaatgcccacactctgaaagctaagtttgccagaaacactaag

SEQ ID NO: 35115 - DNA, 389 bp, Homo Sapiens
ggcggtaccgatagcgatattgattcaagtaatagatgctaaaatatggttagggttacctcaccagagacattatatcttaaaagaggaggtcatgaatcaatacagaatctctaattagtttaattatgtggaaaaagtatttttaaagctgggcaaacctcttagaaactttttcttctattggtccattttagacaatggtgttccttccccacccactctgctagagcttacaatatgcaggatcactgggggtagcaaatgcctttccttttatgtgcaagaactactttacatcatagggctcctcagttttgggacatagcaaatggctaatactagaaaccatctgacaagtagttctaagtaagtttctattttcttca

SEQ ID NO: 35116 - DNA, 473 bp, Homo Sapiens
ccaggctgatgacaagggggggatgctttgaagaacatgtacatgctcttcaacagagacataagaaagggacacgttccctttctcctctgaactttgtactcagtgtttgacatctagaattctggaagccatgttaagaacacagggaaagtgattctaaggaccaagcctacccactaaggatggcaaagcctaaacaacatggggtgtaccttaaagatggcagggtacaaaggtgctgcccagaggtgtcctaccctaggtgtgctatgtaaggtgataaactgcccttacgcttaggccaggagagtaagggggtcttttctagaggctaaaactgatccaaaaacaaatccttatactcattcatactcccggaaacgacttccatgggaatttaggagaaaaatcctactaatattgctagctatggtgtactcatacgtcaaagagaagcaacagtgttgttc

SEQ ID NO: 35117 - DNA, 472 bp, Homo Sapiens
ttacaggctgatgccaggcttttcatgatatgaaaattaattctgatccacttatgagaagttggagggcaatgagataattttttcttgttcattctgtccactttctcacctatgaatgctgtagttgtataataggaaaatggtttaaattatgggtaattgaaaagagttgttgtcattttgaacagggaatataagatttcatttcctctgatttctttaatgcctctaattttatatctggaagacttgttggtcattcctgatttgaaaggtagaaatgtcatttacctagggatgttctgtaataagctccttctttttctcaaggcaacttatgtgttcttgaaagcagcaattttgagtatgcttccagaggaggatgtagtagcaacgaatgagaatgtggtaactttattcaggtatgtgagacactattcctataacaaaggctctgagggtataaagg

SEQ ID NO: 35118 - DNA, 510 bp, Homo Sapiens
tccttaacaggctgatgcttgaggcacgacttgtggagcttgaggttgactcactgactgtgcagctcgtggcctcactggcaggttgatgtctgtgaaacgtgaatactcgcactgtctgttgaggaggggctgtctgctgtattccctgctgctaagaataaaatacaatgattcagttttatttcaaatcaataacagcatgtttctaaggaagcatgtttacctaaagccttcagtgtctgtaaataatgatgattttagtaatcaagacatgcacaaacccaaattcatcaatttccattatatatttgtcttccctctgatgttctttgtgatggtgccaccaggaaaaattaaccaatcttttaatactcaagttaccattggctcttcacccaattatctccctcaccccaacaataggtctttacaaagacatttacataacatatccagacagttcctttccccatcccatccctgccattcccttttccctatctcttg

SEQ ID NO: 35119 - DNA, 565 bp, Homo Sapiens
cccttctatttcctgcatagcaataagcctgttaatacattaaatgtttttgctttctctttaaaatgccaattatttacatctgtttcaaaaataaatttggaatgggacattgtgctgtttcaccttcaatgctgttaaaaattttaggaaaaaaaatgtcagaaggcctatctacaattttaactactacttaagcaaattactcatctttagtggttaccaatgatcagtgatgatatgctgaaaaaaaccgtttaaatattttgataaagacacagcttttcttttccatatcagacagaaaacataattagcatatttcagatatatgaaaaacacaaataagtaggctacaaataaaaagaatcatttcattgacataatttctatcaaagcatgaataaaatttcacctattaattgaaaaatggaattgaattagacagtttaaaagacgtaagcagaaaccagacatctacatcatgaactctgaagtagtatgtgctgctatgtccagttggcacaacacttaactgtgttcttcagtatagtcacttgtgcct

SEQ ID NO: 35120 - DNA, 582 bp, Homo Sapiens
tgtacaggctgatgcagacaccagtgaaagcaccatcacaggagactcgccacttgcctgcccatcccgagtcactgctggggtgatctcttctctaggtctctgggcagggttccgattcaatgaatcgtggagcttggtttcagccccacctcccttcagacaggaggggtgtggaaaatcccatttccccctctctctctttaaaaaatacacaccacatagccaaagaatttaatttctctgtccaaggggagcaactggtagatgatacagcgagaaccagtttgggtctccccattccgtgtttcccaagacaacctgtggtcttttcttgttgctcataggtgagccaaagagatgcactattgacaggcttgtaggaatgaaagaaaataaacagaaaatgcctgctcgcaaggtaggtttttgagcactcagggagaagccagaagtgtacaggcatcctaagttagacctctcaactgggcaccacaggacactcagagtctcaaggggcagagaggtcctgctttctgatcctttcctttaaagccattctgcaccgccgcccacctcccc

SEQ ID NO: 35121 - DNA, 501 bp, Homo Sapiens
ccccctgtaacaggctgatgcatattgaatctcagtctttatatttaaactggagtcttacaacttctttatcctcattattctgaaacacttggtgtgggtctcttttagttattctgctaggttcttagtaagggtctttttgatctgcaaaattatatcatttgattttgggaaatgatcttatattagttcctcaataatttccccttttccccctcctccattttttctgttttctcaattagtccccctgttttctgttccatgtctcaccttctacctggtgcctccttccagagcttgtttcttattggtacttccttctaaagcaacttgctcttcagccttttctgctctgcttatatttccttttcttctgctaagaatctgttaatgaatctatgcctgattttagctgaaaggctgagaagcaatctgttaatgaatctcagacagttttcttttcacctcaagatcattttattctacttattatat

SEQ ID NO: 35122 - DNA, 578 bp, Homo Sapiens
cccttaacaggctgatgcttttttaaaaagggtatacagtaaaaataagtcttcattttctatccctagatgcaacctctgttacattgcttagatctcattcttgggataatctgtgaatatataagcatatatttcacatatgttcaacaaatagtcttttgatgaatttaattcatgaatcactcttattacaaacccattgtgacagtttttcacgggggcgattagatgagagcttctcattctgttcataaaactgtgttgagtaagcattacctaggcaacaacaacaaaaaacccataatttagccagctcaggaaacatacaacacaataacaaaccttttcatattgaatcttttagactttgtttatagctctggatcagaaaatcagcaatgattatagaatgtcacccaactcctacaaagaaaggagaattctttaatgaggtaaccaaaaagattttctttccacagaagagataattctattcttagactttattttagcaacagaagctacctggtgaaataggaacctttcaggtttggttttgttttgttttcccgaga

SEQ ID NO: 35123 - DNA, 611 bp, Homo Sapiens
cttagaggaccctttaaacaggctgatgcacctcctccatgcattcatttgcagtgccagcagggagggagatttgtggggtgagactgagaggctaagggaggagagatgggaggagagagcaggccaaggccacactgtagcacagttcacaccaatgaacagcccatccagccctgccccacgttggtctcatgcccacactggagactcatcctgtgcccccacacacccacacagaagtctcatcctgccttccccacaccctccgcccctgcctgcaggcagcaaggtcaaagccaccagggatgcagccactgttcttctatgtcttggaacaatagaacccctaagtgtggaaagcagcagaaccagagagctactgggctggcccaccctgggcccagttggagcctaggtttgggctccagtccaggctcagcatcacctctgtccagtcacagagagcgtccataccagtgtccctgcaagctctcttagcaaggcctgctccattttcattggcataccttctgctctgggacttctcaagtcatactgaagacagagaagccaaccctagcatgtccaggatcggtttaacccatttt

SEQ ID NO: 35124 - DNA, 417 bp, Homo Sapiens
agccataatgagcagacatgtacgcagaaagtgtacgtaatagctgatgtggctcagaaatctagggtgtacaggaaaggtgtcatctccttgatggcttacggctgaaatgaggattccaaggggaataagaaattacagactcttgcctagccaggcctcacagtgtgttgctcaggatgcagggacactcaggaaccttgctgcccctttgcaggctggtgtgccaccattatgacagctcagaagctcttatttctacttattaggcccttcctgacactcactctgccacttgtgactttttctgcattgtgtcctctgctactgccttctcactcctgtaccctctactaacagacattctctatcttccattcaaagcctctgatgatatctgattggttaatagtcact

SEQ ID NO: 35125 - DNA, 449 bp, Homo Sapiens
agacgatgcatattgcggtgggagacggcagtggtctgccaaggatggagacatcaggatgtgttttgaagacagagtccttaggacttactgataatctacatgtgggaagtctggagaaaatgggatcaaggatgattcctagccaaaatggcagcaggtgacatatatcgagcactttgcacagattctctcatcactccttcattaccaatatccttaccatcttctttatcatcatatgaggcaaatactattattaaccctattctacacagagaaaatcaagaagccaaggtttgggaaggtcaaataacctctctatggttatataagttggtaattggaaccaagatttgaattcaaggagtctggagtcccaagtttgtcctgtgaactgcactcctataccaaacctggattatacacatatgcatagattgaagggt

SEQ ID NO: 35126 - DNA, 654 bp, Homo Sapiens
aacaggctgtgcacacacttggaagtcactatttaaaaaacatctattatttaacattcaggatagaggtccaagtatagaactttagatccttactgcctgcttggttccctggattttttctcctagttttatttggggtacttactttgttatttcattttggttatgccataaataacacccaattttagcattcctgggatgatttaggcaagcttcagaaaagagtccagaagaaaatggaattggaagcataaagccactaaaattttttcattgttctctgatcatttcttagctttggattttttgatcatttaacgtatcaatgagtagaaaggatttttcttgactaccacatagcttataaagtgaccgagcattctttccttagagattctacagtgtttaacatccactggtactcagtatgtttatgaatgaatatgtattaatggtagggcttttatagggtcttattttactgaaaattgaagataatcattcacatttggattacaagtgttggtgttatgttataaacatttaatgccgtagcccaaatattaacaagcatggtcatattttggtattgccacggtaggtattctgggaagtgtgagtagttgttttttcctaccctctgtgctg

SEQ ID NO: 35127 - DNA, 511 bp, Homo Sapiens
gtagtttaacggctgatgctggcaggcgctggatgtcccccacagtcccctgaggctgactgttgtactcaggccctctcccagagtcctccatcatctccccattttaccctaccccgagccccagtcgccaagaaggaggtgttgttcttccagggtcttcctttcaatgtctgtatccacagtctcatgctatagaagcgctgagccctccagcgtggttggaggatcaagggatgaaatgggacaggaggagaggggtcctccaggctaggtgacccctgccctgttggcctgtctcccaagtggcagacttccctgtggaccacatcaggaaacccacggagacagggtgatttagcatctcctggaaaatgagtgggacactcctggccccctggctctccccaacagccctagatattgtgctcagaaggagcccactgcattgaactggttccactgtcgagccctctaagacctggttttgctcctaaacctcccagtgtac

SEQ ID NO: 35128 - DNA, 551 bp, Homo Sapiens
cgagaagccggctggataagacgcgcagtgtaaacacagacggcgcagcttccagcactgcaggggctgaggtcccggcctgccagagcaaccagaatgtgagggaaagcccgcctgagaaagagaccacagagggaaaaccacgaaatatgcggacggactacccgcaaatctacagctgaatctaaactgaagcaccactgaagagcctgcgctcggcacaaagggaccgctggaaggctgcgggggctccccagctgcccaggaccaggacagcatctgaggctcaagctcaaccaactagaggtggggaggagaatgtcaaggcttccagtggcgcccagaagagattctaaatccttgagaattaaggatccacaaccagggctaagggcaaataaaaaatcattagaaagcctggcaccaagccacctcaggatcaaggaggactgccaggtactgaactgcctgtgagaagaaaactccccattctccagaggaggcagaacccagagccaatacaatgtaacgtccaaagaatccagaatgag

SEQ ID NO: 35129 - DNA, 525 bp, Homo Sapiens
atggaaatgcgggagcggtgtcgggtgaccgcagcctccaagggagtgccttcggcaggtcacgtgcaacacgagaggagttttctgacgccgccaggcaaatgttattggataaacaaggtacatataagctgctgacctttttaatcccaactgcctcatgacatgggttagagctcacattcttatgataaactgtcctggtggctgcatagcgctgctggggttgggatgaagcactggggaacgtggagtccggaagcaaggaaccagggcacaccacacctttgggagccgatccagctgccaggaggacagagataggctggggtagtgaggggttctgctgtctggggatgccgagtgggacataaggctttggtgagctcaggtagagggaatccttataggtattgtggatggtgggggactgccatgcaaagcggtccttttgagggagaggagggcgtgggggagagagaacctgggacttgtcagaaggaaggttgggatgcacacttctgt

SEQ ID NO: 35130 - DNA, 461 bp, Homo Sapiens
atatctttccccaaggtaaagaaaatataatctactgcttgttcatgcagaaatacagacatacgtatcataggctcattgcccaattctacattctagctaaattgctctaaaaacatatgccaatctaagagttactcaaaggcacatttcgccaacttgaaatgcaattctgacccatgctccttgtaattttattttgccactggacgccaaggatgaatctccgagtaaaaaaattacttaattcacattgtgggatgaaaattcaaatgtcaaactgaaacgccagccagccacctgggtaaaagtgtatacatttcatattgactacccaaattttcagacccgtcaagaggcaaatcagaagcacacagaaaaacagcttcaacctaataaacgtgcttgattggttaagaggaggcctgccaggcattttcccttgcaataaatcttacttc

SEQ ID NO: 35131 - DNA, 569 bp, Homo Sapiens
tctagaggataacgttagcaggctgatgccgtctacttgggtcatcatgtcatgggctggcaggaccccttcctgaggacgcctgtggcactggccacagtaggtaagcctggatcccccgaggtggttctccactctcccatcgaaagccaggtcagtgacctgtgggggagtttgggtgagagataagcagttaacccttgatgccctcgataaaccagcgcggaccagccacctgtgagcctccccataaaagacacattctaaaaagtttgcaagaccgaatccaaaaaactctattcccgcctcccgttaaaaggacatagcccttccgaagtctcctgtggctcacagttctgctgaggacttgatctcatgttaaaattgaaaaccaggatttagtccctgcgtatcaacaccaacccctaaaccctacttcggatgattctggaactgattaaccagttggggctttgttcattattttctctatggctcctctgctgtgtgatcttttcactgctcactatactgtcatccagagagcgtcaggaaacctcagcagtgaa

SEQ ID NO: 35132 - DNA, 595 bp, Homo Sapiens
tcagtcaaaattctagtttacagaaaattctgtggtttctttttgactatttgctgaaatgccaacattattattttaaaaaatatgcctgataggtgatggcactagtgttacctggatagtttttgaatgaatggagtatgtaaggaaagtttcacatcttttcatatcaactctaatttatcttcatgctctgctctcttacttcggatttttctagcgattgccagtgtgcatgctcaagagttattttaaagtagacgcaagtgtttctcatgccacagacattttgttaaaaacctaacttgaaatatacaagtgagttcaccaaactcataaaaatgtccttaaaatgataaaatggagaacttgggggtcccaacaaagaggaattaaggcctggatcatgattacctctgttttccatgtgactttgaaagcagcagggctggagccaagttggccctgctccctcctagggacagcagggttgatgtccacctccatttccatttgcttctgtccagccggcaggcttggcggcccctcctggctctggagctttaatactttcttattctatccgatcagcgtg

SEQ ID NO: 35133 - DNA, 660 bp, Homo Sapiens
tgctgttgctgtgtctggggttgaccctcgtctgtgcccaggaggaagaaaacaatgatgctgtgacaagcaacttcgatctgtcaaaggtagagttatggaacgcattgacttctggctctggggagtggtttcagggattctgaagccatgtggatcctattgtagggcaggagttccttaacatatcagacaaaagcattggtttctgaccttgggttaagagcaattgtaccatatgaaaagatgacaatgcttggggatctccatcctccctaaaggggcagtggaaagagccctaggtgtggtgccaactgatctgagttctatcttcacttcaccattatgagccctggcccacaggccagagttcaaggaaagaagtgtccatgtggtatccccactcctcttttcttacccaatgaccttatttattgcagatttcaggagagtggtattcggttctcttggcctctgactgcagggaaaagatagaagaagatggaagcatgagggttttagtcaaacacattgattacctggggaattcttctctgacttttagattgcatgaaatataagtatggcctaatatagtgggggaaggaaaacagaagctgggtatgtctgaacacacaacattcatgatccagggtgatg

SEQ ID NO: 35134 - DNA, 637 bp, Homo Sapiens
cctcaagcaccaggctccaccactctcatacctgcgtgcccacgttcacaggctccactgcaccactcaccttcctagtcacacacaaacacaggagctcacacatgaactcatgaacttactgacaaggtctgtccaggcaccgtctctcccacacaccacaaattcatttgttagatccacatttataactttcacaggctttctaatgacccctgatccacatacgtcttctaagatatacacatgtgaattcacacatgaactcatatgtatgtgaatgaactgatatatcaaacatgcatagactcacatgatgttttcacacacattttcgtacacacgtgttcattttcatgctcctgtgcatgtagtcacacaacaaataactaaatgcacacactcctactcccagtgcaattctctgtccacttcttggcccccgctctgcatgatgacttcagcagatgcctaagtcctggtcatcagcggcctcgggactgggactagggagggggttccgggtggaggcttgcagcttgctccaggaaggagcagagctggggaggtggagcctctgcctgggctctgggaagtgaggtccgagcagcccagagtgagggggcatcactcctcc

SEQ ID NO: 35135 - DNA, 505 bp, Homo Sapiens
acaccgctcccatgagactctttatggttgctctttttaatttcctgtcaggttaatcacatatcttcatttcattagggttggtttctgaagacttatcttcttttatttagagtgtttctgtgtttcatttttcttgactcaatgtgttgatttctgtgaattagataagataacctcctctaccagtcttgttaaactggccttcggtaggaaatgtttctctccaaataacccagtgaaagatctagatgcctctttgttcttctataacccacttgtactggcctccagaggtgaggatgaactaagtcataattttgccttgagacaggtactggtccctcataatgcagctggaagggttagtgttatatgtgtgttccagttgcttctttcctttgaagaaactgagagacaaagtttacatcatactgattttgcaccacaccaagtagagaatttgtggtagatgtctgtaatctctttgagactactcaatctg

SEQ ID NO: 35136 - DNA, 391 bp, Homo Sapiens
atgcttctaactctttcttttttaacttttgacccacttggtacttgaacttgtacccttaaatgtccattctcctatctaatcttcatatctctgggccccagaattcatccatttacatacgtcaccatctacagtgttctctccagtgttggcatagagatttgtgttagcgaatatatatactttgttaaactcttctcgagtagctgctgtgttgtgcttgtgttttccttggcctggacaaatccctctctacagcactcacatgtcatgaggacataaattctggagatgagtggtttgcagatgcagggattgtagaccctgcctgtactccctgttttacatacatggttgtgtcctttaacttatgaggcctcctacattc

SEQ ID NO: 35137 - DNA, 366 bp, Homo Sapiens
ggctatacaggctacctccatccctgaatgttgtactaggaacgtctaaacacacagaagaggagcacaaaaccaataattatcacacattcaaaataaaactaatccataaagaccagtaccacactcaacaaagacagcaatgcctgaaaacactgggctgtatcaccaaataaaacaaagaacaatacgcataattaaaacagtagaaggtgaaggatcctttttaaaaattagatatcatattctgattattgcaataaaaaacttaggtagaaaagcttaactgaagaagaatcaaaactgaagaagaacccagacagttatgaaaatggcaaaggcaaccaaggagagtaatactatatg

SEQ ID NO: 35138 - DNA, 506 bp, Homo Sapiens
cattggtgaaggatctgcccccccaacacagctccacctcctactgttccagacagaagcctgctgcagaggtttctgaaatgccctcaaggcctttttaattttgtattggctattagcactgaactcccctccatgcacatttctgaagactttttgaactttcccactgataatcagcctttctttccggccacttggccaggcttcaaattttccaaacttttaagctctccttctcatttaaatacaaagtttcaccttgaggtcatttcttttgtcacatataggaccacaggctgttcgacacagaacaggacacctcttaagctttgctgcctaaaatctcattccaccaaatacactctaaattatcaccctgatgttcaaaatgtcacaggtctccaggttaggggcatcgtgcagcaacattctttgctaaggaaaaaacaaaagtgaccttgactcctgttcccagcaagctcctcattttcatgtgatacctc

SEQ ID NO: 35139 - DNA, 522 bp, Homo Sapiens
atactgagcagacactattcatcaggcaattttagccattctgtttttaatgagggaaatagtaacatctccattatatagaagggactgaagctcaaaaaggtttagatatttcccaggtcacacagctaataagaagtagagagaggaggattgggagggcaggcctctctgacctcaaatccatccacagtcttcttttcagtacactagcattgccctgccagggctgagacaagatatgccaaaggaagcaatacagtcacctatgaacagaggccctatctcagaggagctcctctgctccagacaacccagtgttactctgtctgtctagaaacaaaagaacccctttttgccgccatcaagggatataaaagcattccactttctcaaaatttgttgaaatggagttggtgacatctggtattaattatataagcaaatctaaatggtagacacattgggtatcggtttttaaaaatctttctcacagatacatacataccataccacccaccg

SEQ ID NO: 35140 - DNA, 368 bp, Homo Sapiens
caaaattatgtggaaacaacaaagagtgtctctaagatctctggtcactagaaaggtactccacatgggggaaccacaaaaccaagaaactacagaatacctaagggtgttggtgaggaaatgcccaggcagtttccacataatttttcccgttgggagtggctttgaggctagttgtcacgccctgaccagcagaaatctgaacttggtccagcatcaaggttgacctagcactcttttaaatctcattttagcttttacatagaacaataaccaagggattttatatttaacttttggctgttggtttgcatttccttatatatccagtgaatcccactccctgggaggtggattcatctctaaat

SEQ ID NO: 35141 - DNA, 420 bp, Homo Sapiens
gaaagaaaacaatagaactatgacttgcaaacttgaagtagaagttactttcaactcagaattttatacccagaacaaattactgatcaaatgcgaaggaagaataaagatttttttcagtcatgtaagatgtcaggaagtttttgttttccatgtattcctttctcagaaagctactaaaaaatgtactccaaggaaataagtaaaccaagaaagaaaatacaggaaacagtaaacaggggaaccagtacaaaagagggcaaagaagtttaaggatgatgaaaagagaagtccctggataacaactatgaaataggcctagaaagtaaccagtcctaattgcattaagaggttccagggttagcttgtctcaggaaatgaagcaaacaacaacaaaaaatactaactggggatcctcta

SEQ ID NO: 35142 - DNA, 482 bp, Homo Sapiens
gaacttgggcattgaacactatgtggttttgtgtaagcagaatttagattgtgatattttctgtcgcttcataattctaattttagactttcaaagtaggataattcactccagaaagtctgaaatctgtgattttccatacactgccaggtacattgatgtcagtggtttgactcaaactgaatatcctttataaaaaatatggtggatcattttatatatctacctgtagaattgtgaccatgggttttctgtttctatatttatacaaatgtacgagattctttttatttgcatttgaaactttcttgggaaacacataatacagtgatatttatggcattttcctgcactggtagtaaatgtgaagagtgagggataagtttagagcacaagcctcttactggtcttttgctttacttaaaaatctttatttttcacttttctaattacttgtctgacttgccccgggtttccctttg

SEQ ID NO: 35143 - DNA, 363 bp, Homo Sapiens
ccagcaaattccaagtttatatccaagctctctatgactgctctgatgccatatcccaccactcctctcctcactgcctcaatcctctggccacactggcctccactccttgctgtatcctgaaaacctcaagcacattcacaccttggagcctctgaattagcttctgccttttccttgaacacactttttccagatattcacatggctcactcccttcctgcaggtctctgattaacattcccttagtagagaggcctctctgactgtaccatataaaacaacaattaacttggatactctttctccttcagccaagttatctccatagcatatactaccacttatcatatgttacattta

SEQ ID NO: 35144 - DNA, 435 bp, Homo Sapiens
taaaaaggcttggttgtagataagcagatctcagagtatggtttgaggattcctaaggggtcccccgggattcttccaagggagtccacaaagtcaagtgttttttataaaagcgcccaacacattatttgactttttaactttcattagctcatgaattcacaatgaaaatttccagaaagctgtataacgtgatatcatcactctgatttattcatttgtatacttttacacttgtatattctattgttataatgtttctgtttaaaatcctaaaatagtaaatatcgatagttaccacacatgtaaataaaagctctttggggtccttaacaattttttaaaagttacagagggatccctgaaacccaaaagtgatagtaagtggaattaaatgtcatagaagtcatttaagatacggactgtaaaaagtga

SEQ ID NO: 35145 - DNA, 353 bp, Homo Sapiens
tataagcgcttttaattgaaccaatttacaagacattaaccaatcgaaactgacacctaccataagggtatactagattccttgaattaccaagggaccatactacaggattaccaagacagacagtggcttctgggctggatacaggctttctggacttacctgcttataatgatcgggcctcaggtgatcaatttggcacaaatttatgtgccagtacaagagatctatgtaaaaagttatttatccatcgccacctgtgattaatcatttaattcagtgaaacaaatattatttgttatattcaaggccatgtggtaaatgggatacaaaggttatagatgggcaaaatc

SEQ ID NO: 35146 - DNA, 507 bp, Homo Sapiens
ccattttttaatggggttcttttttgcttactaagttccttatataatctggttattaaacctttgtcagatgcacagtttgcagatgttttctcccattctgtaagctgtttactctgttgacagttccattttctgtgcaggagttctttattgtaattaaggcttatttggcaatttttggttttgttgcagttgcttttggagtcttcatcatgaagtctttgccagggctgatgctcaaaatggtatttcctaggttttcttctagtattttcatagttttaggttttacatttaagtctttaatccactttgagttgatttttatatatggcgaaagataggggttcagtgtcattcttctgcctatggctatccagttatcccagcaccatttattgaatagggagttctttccccattgcttgttattgtcaatttggtcaaagatcagatggttttaggtatgtggctttatttctgagttctctaatctgctccatt

SEQ ID NO: 35147 - DNA, 499 bp, Homo Sapiens
tcgtgaagaaaacaagaaactgaattttcttcaagtattttaaaagaaataaagtttaattatttctattacttacacactgcaggctaaccaaaggtaattgagtagacttctttggcttgcttaagagaatgttaatttgtgttgatgtttgcactgtatcaaacaactactactaaagttttttaaaaatacttatccagtgaatttattccagttaaatgttacttcattcagtattcaataaatacttaactgtggacattaacagccagccaatgtgctaagcacacaatatatacatcagtgaataaaaagcataaacctaaggtaccaactaaacatcaacatcacaaatccgtgtcattctgtggggcactggacactttgtaagtctgaccttttaatctaaaaacaatctacttggcaaggtaggtactttatatcccaacttcacaggtaactaaagaaagttaagaggcttaagtgtatttcctaa

SEQ ID NO: 35148 - DNA, 424 bp, Homo Sapiens
ctttggctgttggccccaaatattcctgcttcatcatctctccactccagaaacttttaacatgcttacaaagggtgtccgtttctcatcgaagtatttgccccccagccccacctgcaagaaggtggaagtagggcctctgcctgggagggtaactctcaaatgtaaggcaagaacctgtctctccaccaatatctccaggactgaaggactgtgaaagtctgcatattgatcaagcttctccctcccttatccgaagggacttacttccttcaagacacttttcctcttcccaactagctccatgcccccatccagtcatcttccaactcatctctccccacctgcatgccacacaagaggaacgtgaccacagcacctggaagttccttaaaattgaatggtgtgtcaggccgtgtgtagt

SEQ ID NO: 35149 - DNA, 595 bp, Homo Sapiens
tatgggactaaagagcatgtctcaccaaaaactataacctcttgtcttctctacctcttttgactctcctttgactttcagcccacaccactttagccagtcttccatgtagccttagcctgggccttactatcaccgggatttgctctgccactaaaatctttaattcacactttctgttcttttgcccctgcctcctattcatctagctcccagttggtcctattatttgtcatcttaattctgtatgttaggatctgattccaaaccttttttctccctgtcttttcgccatttcctgccttttctctcttatccaacataggcacaccatgatgcatcattttaacgactttgttgccattattgtgagcttttgccttgtttttccttccatccatccagccttggatcaatgttcctgccttctctttcagactttttgatgtaggcatttaatgctatgaactttccttttagcactgcttttgttgcatgtcagagattttgataagttgtttaatttaagagggttgatatttcctggacttatcaattcctctagacttcagttatgtgctcaggtgtctagtag

SEQ ID NO: 35150 - DNA, 371 bp, Homo Sapiens
agcaaaggacctacacccgcccatggcccccagcgacagccttggaaggctcctctcttccagtcaagcctctgaacagaatagtctctaccagcagttcccaaatgtgtgttacaagaacaccctggtccgtgaaaaagggtgcacaggttagcaacaaaagtagaaaatgaaggcacaattgcagcaggctcttcttagaattaaacttattccacttacaggaccatccttcattctgatgagccattacaacatttttgtattaaaacataatttattctagaaaataatgattggataattagagagtgatttggttttcattattctcatctgatcaaattaaagcgggtgactcaacatcaaga

SEQ ID NO: 35151 - DNA, 451 bp, Homo Sapiens
gctgagctagaggacccggcttaggaggtatacactgcgacccacttttgcttatgagaatccctagcttctcaaagtaacaagaaagaaagaaaaaagtaataatcccacctagattcacaactaagaagcgtaccctgatctcacactatcaaaacggaaataagtcgcaccttgtatatttcattctctcttatgtaaccaatttctctctgccccccgccctcgtcatcagtgtctaagcgccttgtaccaacacccagatcattttgtctttgtttctcccaggacctagcacaccatcttgtgaaagagtaggcaccagattggagcttcttcattgactgacccacagttcctagttcagttctctactctgatggaagattctcatggctgatgaagcttataagttaaaggccttcagaatgaatttcttgaccattatgac

SEQ ID NO: 35152 - DNA, 459 bp, Homo Sapiens
atgaggtatcacacagaccacaaaaatcgagccttctggctgccaatccagagcgcctgctcttgctgctcctcagtggaggcagagctagcccggcccctgtcatgagaccacttacctgtctctttggttggagtcgccctcctccaggtcagccctggcatcatcaggaatggacgctgagctgtggagcttacatttccatcactacctctaatttttgatagggggtagaggcaattaaaatgcaatgtttaggcagaggacagaagttatgtcggggaatccagagctctttcttactacatttttgtaagtgtgaatgtgagaagaatgggctacaggattcaagacagagtaaacttgaagagatctaacaagctcgttaagagcccatctaaaaaactaattaggtgagacgttatatgcaaatggaccagctatcttaacagagcctat

SEQ ID NO: 35153 - DNA, 490 bp, Homo Sapiens
tgacacaggctgcatgcttatcataatcatcttctttaccacttttgacatcactggttgctgactgattattgtctactatcctttctgcaaggaacaggagtatagaagaaaaaaaatcaacactattgtctccacatttcttactagagtccaaaagactgaacaataaacaaagggatctaaagaaacacctaatgccaacatactgacaatcagagtatcgcctgcttgacatcagtagcagttgcgcaaaatgaatagtgcaaaaccttaggcttaatggagcttacagactagggggactggccgtctccatacaaaattcccagctttaagtggcaattgttaaacttacacttgataagtgtactgtattctggaagcctctgtcacagtattagccattgttcgctaatctcactgtgtgtttactctgctgtcccatccttcaaggcattagagactctacctcagttgggttaagagt

SEQ ID NO: 35154 - DNA, 532 bp, Homo Sapiens
aatctggagtcagtccacctactcacaaaacctgttaccaactcagggagtggcatggccatctcccagtcactgagctcaaatctcagatttagggttgattccttccactccatcccaagacctgctccttcctgtctccaacattctaccttcccagtccagcctctgctgcccacagattggaccacatcaatctcctgtgcaaaaatcctatgatctgtccattcctaggcagatttccaccccaccccatcttcatccatcaacaaagcaacccagtcaccaaatcatttactgtttttcaactgtgcccaacatttctgctttgctccagctactcgcccttggaaacagcctctccacaaatttttgcgtctctaaatcctatagcattcaaagctatgtacaaaagccccttctttcataaagttgtctgagacttactcacaattaagctttctttgacttgcgtctcactgaattctgtacctctattagagcatcggttccagttttccttgtaaagctc

SEQ ID NO: 35155 - DNA, 601 bp, Homo Sapiens
taggaggtatcagaaggcagccacttttgaccttatactaggatccttaaaaggtaatttttgcaaaaatataccaaagcagcgtcagtgtccccaggccctttcctaggcctttgactttcagatgtactgtttggagctcctgtgtcctcagcctggctggttttctgttcctcggaagtggggctgcccgttgctggggcttcatatgacttgagcaggtcccccgcatctcttgtaagatttgcagttttacttcacaagaccagcgaaaatgtcagtgtgcaggatggctgcacgtggtgggcggggagggcgttgatgaggagccgatttcataagtggccactttgttcatgaattttgtgttgtgatgacatttgcttcctcacgctgaggccgggccaccactgccaccctaccctgtagctgataaagctgcaggtactgtagtaatttatttgtgtttcttttataacaataaggaaatgtttgcttcaattttttaaaaagacgtgcaaacgaaagagaattatgtgtatgtgatcctcctaagcgggtaccgagccgaatcgtatctgcttcttttcccgggaggaag

SEQ ID NO: 35156 - DNA, 555 bp, Homo Sapiens
tcaccttcatggtgtaccataaatgataggtaagatacgggcacttatttaaaagaacgacatttggacataagtatcagatatttggcttacgacacagtaatgggtatcttaagcctagaagttgtgttttagattgaagaatcatacatgattctctttggctgtatttatccataaattgtcctgtccttggttaggacatttagacacttgtgaagtggtcattagtaaattgagtgtgaaacatggcatttaggagaataaattgtgaagcaacctccctgaaaacttatcagtaggataggacattcatgttagcgagtggacctagggtgttgggcagagtcagggagaccaggtgacttttagcacagtgcttttctaccttgtttcggtctagatggaacagggttatcagtgtccagaaaaaaagtctttggcttccggttaatctgtccgccccagccatagaagagagtggggtacttatttatgcaatatcaccctaggccttttctagtgtttgtatatcatctctctgacagtttcttc

SEQ ID NO: 35157 - DNA, 427 bp, Homo Sapiens
gcagccagtgctgtggtcaatcacaaggcctagggttagggtacaggttagggtaacgagccaggttatggtcaacatgagacttaggattcagggtttgatgttggagttagggttagtgctagggtttaggctagtggttagtgttagggttaggcttagggttagggttggaattaggggttcagggtacgggtccatatgcagtgcatggtaagggttagctgtcagggcccacatgaggcattgtaaattaggtttagggctcgggatagggttagggtagtaagtaaggagtaatggtaaaggttaaggtttgggttgaagttagggttagggttagagttaacggtaaaggttatggtagtaggagtaagtataactggttaggggtaaggtataggagtagagatagggttaggattag

SEQ ID NO: 35158 - DNA, 545 bp, Homo Sapiens
agtgatctagaggatcccggcttaggaggtatacagtttgtgattatctctcccatactgtagactgtctgtttactctgttgatagtttcttttgctgtgcagaagctctttatttcattaggtcccactcggcaatttttgttttagttgcgattgtttatgaggacttaatcataaattcttacccaagactgatgtccagaatggtgtttcctaggttttcctctatgattcttatagtttaaggtctcacatgtaaatatgtaatccatcttgagttaatttttatatatggtgaaagatagcgatccagttttagtcttctgtatatggctagccagctatcccagaaccatttattgaatagggagttctttcccccttgcttatttttgttggctttgttgaagatctgatggctgtaggtgtgcgactttaattctaggttctctcttctgtcccattagtccttgtatctcttttagtaccagtaccttggcattttggttaccctagccctatagtatagttggaatcaggtaa

SEQ ID NO: 35159 - DNA, 461 bp, Homo Sapiens
tgaaaagaaaaggctgtcatgttagatccaccctcctcctcaggggaacccctgggctgctctctgggtagagatgggaacccaggcctcgggccagtgagtggaaggaaactttgggatgattgacttggggctgggctagaggtgaagaatctcccagtaggcaaagttcggccttacgttttttggtttcaagcaaaccacatcattacccacagaggccattggtgagatatttgtaagtctcctgacagtggctggagttcgttgcttggtagtagtttctctgtctcagccctggagatgggagtgaccacctgctctctctggacagaggctgtccacgttcatgcaattccttggacaccggtggcgcagcgggaggcgtaactgggagtgggagaccctgaactgtgccggttcttgcagagtatcactgtgacttcaggcgagtcccccac

SEQ ID NO: 35160 - DNA, 387 bp, Homo Sapiens
ggtcgatgcatgtggctaacctttggggtgagtggggcagcctcgtgggaggaagctgcccaggtagcagtaggctggggtgcgtgagtggccccgaggcagtgcccccgtgcccacagcatggaccctgtgctgccagttctccgcagagggccagtgtggtctgaagctgcccagcagtggagagaacaggcctggtctggactggaaacctgccatctggcctctcgaacctggggactccgggtgtcctcgaagaagtggcctgagcagcagcagaggaccccagtgctgacttgcctgagccgggctgccgacgacgactgagcacctgatacgtccccggcactcgcagccccgcggccggagtcgctgtgtggaccatga

SEQ ID NO: 35161 - DNA, 506 bp, Homo Sapiens
tgctgggattacaggcatgagccactgaacccagccagtttcagaatttctaatcccggggagaaacatttactaggtagattatagcatttatatatagctcttttggtctttagaacttgccgtactcagtccaaggtacgggtaacttaaattagttctttacttccccacttcctttaggtgggtcatgtccagtgaagtcaggtaaattggctagtgtgtgatgccatttgggattctcccacatgttgattgtttgtgtgtatgtatgttgggagtgaggatgtgtgaaacattactatggttcggggagtcagagctgtacaggagcggtttacaaaatgtcacttcctcatcacccctacagtgcccttctcactctcttttttccaccgtcttcccattcacactctagtttctagttaatccttgcggtatttcttcacaaatgagcagatacagtacatgtatatattctttggtctcccttttggtttgtctgt

SEQ ID NO: 35162 - DNA, 679 bp, Homo Sapiens
tatacatccattcatgagaggttaacacctgacgttaatttcagaaagcttctatatacctatcagggtcattggagaattggcctaagtctccctttatttgcctaaggtactgtaatgagaagggaacttgaggggcccctgaataagggggatccttagattgttcccctggaagttacttctctaactttggtgaatcatttgctattggcctgcctgatatgactactaaaagagctgggttgattttgtgacacctgcaaaggtctagtaaggccatgcccttgtgcaaaagaaaatgagttgatttttctttaaattattagagtcaaaggagtccttgtgcttcagaatgtactccagaggggtgcaagctgaagatgatctgttacccatctagagagagaagtgacaaaaaggcatctcttttttcaccttccttttggtgtgacccagggtggagaggaaaacagtggggacgtccctcctgctgttttccctctgcggtttctgggtcctggcaccttgtttaatgtgccacccatggttgcaggtgtgacccccagccatggaaccagaggaactaagtgattgggattagtcacactgattcatgcaactcaagtcctctgactgtgatttcctttgattcctagactgtgtgatcctcctaagc

SEQ ID NO: 35163 - DNA, 452 bp, Homo Sapiens
ttgcacaggctgatgcacactgaacagtgcggacaggtagatatactgaaattgcctttttctactctcttccttgatattattcaaaggaatatgcctgtagattatttttctttgttaaagcttcaccgaatttaagacccaaagcattggctaaaaggaatgtaataaagaagaattaaccaatattttcataacatattcaattccattagccacttctggaagctctattacttacatttaaaaagtgaccaatttatcactgtgtaagaaagggcaatattactaaaaatctacagtctaaatgtaatttcagaggaggaaaagtccagacacctaaaaatataattactgtctctcacttcctcaaacttcagataagaaatgtaatttttctagctgaccttcaaaaacaagaaagaaagaaatgatcatttctgggtcttggg

SEQ ID NO: 35164 - DNA, 411 bp, Homo Sapiens
tggtttcttaaaatggtacgtggggaagaaggtagtagtaaccagatgcaaaatgagtgcaaacaatgtttagaaggaacagaaaagtaggcagaagagagcaagatggggaaagtcagctcactagggatactgaacttaaaggcagctggagctagttatcagtcataaaggaagcttggggtgggaagggatttattagcaagctccatcatcttcatctgtagctccacatctccttcgccccatcatttgtgacacaaataagggactttcctcaagcttatgtaatgttatgcaacacagtttcaagcactccaatcctggagatttgctcaaattaaaccctttctatttaaaaactctggagcagcgagtgaaagcaactcactactctgcaggacaagactc

SEQ ID NO: 35165 - DNA, 480 bp, Homo Sapiens
cggccaggaggttacacttttcctttaccaatggtcagatatttaaatatttcacacatactttattcttacttaaaacctcattctatggcctggcacagtggctcttagctaattttctatgtcattttaaatgagaagcattcagacagtatcttcttaccactaaatctaatgttctataataagtaaatgattaaatgaaccctaatttttttaaagttctcctttgacccctcatctccctccagctacctgctatttccctgctcaccacttcagggtaaattatcttgaaaaagttgttgtctatatctgtctcaatttcttcacttctcattttcttcaatctactcaaaacaaagtttccaagccctccactccattaaatcaacttatcaaggtctactacttccacatttacctgacctcttagcaggattcaacaaagctgacaatcttcttaaaacattctcttct

SEQ ID NO: 35166 - DNA, 527 bp, Homo Sapiens
ccctgaaacggctgatgctaggtcaggagaagacagacgcagtcactacatggatcctgagggcgagaaactctggatgccacaaaggtggcgtgttcaaccttcctacaagcacacagaggtgaagcctggagaacaggcagggacaggcccagctggccatgtgctcagccacgcctacctcgcaaggtcattctgaggatgaaggcatcatggatccaaatgccaccttgacgctgaatgtactacacaataaaagaaccactgtaaatcacactattgactcttgctgggttgatgttctttcctttacagtaaagtgaactcgtggacaaacatcgtgtccacagaccaccataaatgtagttggttgttttaaataaaactgaaatcagacttccaaaaagaaacatctaaaaacttctcctctcccatcccaccagagccatggcccacaacacagcccgacgccccgtcacacgctctcacaggacaactgcccacaccagttaacccggtgtcacggt

SEQ ID NO: 35167 - DNA, 538 bp, Homo Sapiens
tctgaacaggaaagttagttctctaacagagagatccctctccttaaattctttcttggtgttgccagctgttcctgcatgtcttatcttttctctcacctcatttcagagtccctgctctccttaaatgccctgagtaaataccacttctactccttggaatgaatcttccagagcatggtctttatcacgtgcatccggtgctcacatcctcttctatttaacagacctatgttacttgctgtttacttaaatcaattaggggcaattctgctcttttggtttcaaacaattggggtcattcacctgttctcccttccttgtttacctggcctttccctacatccacaacctaggactagtgctggataataggatgttgtaaacccatcagttctgtcttctagagacctgaagaaggtgggaggactgggactgtaggtgagggtcttggctgagtccaggagctttctatacttgttgaaaaccccatcgaggggttgttatcctgagtggaaagagggaatcctctgccccc

SEQ ID NO: 35168 - DNA, 557 bp, Homo Sapiens
acggcttaggaggaatacacagagatataaagtgggacactagaatcttcgataatttctctttatctataaagcaagaaactttatttacttagtcagtagctgccaggtatgagatgaggtcaggggtttatgtttgatggtggtactgatgcacacaggctggaatcttagtctgtagagggagcatcctgtctacacaccacttacccattctgcatggattcagcaatcctcttcacatgtggtacccagttatttttaacaagaaagtgataaacttttatcaatctaagaatgttaaaaaggggaaaaggttaagggtttatttccatgacctatttcatatcagcaggtttctcaagttagttgaaataggacaatccaaaaagagaagggagagaactctcacataaatcatcaccaccaaaggtgaattaagaggacttactgttaaggaagcaatccctttgtgatagaattttaaagattcagcaatgcaagagagtgctgaactataattttcctcttgacaaccagtgagacactgttctgca

SEQ ID NO: 35169 - DNA, 566 bp, Homo Sapiens
attagctaagttcatatattttatttgatgataccaaattttatcctgagctactcagtctaaatatattccctttgtctgtctcaagacatcagatcgaaccttaagatgattaaggaatattcttttcccttaatatttagaaaacagtagtgggcccacagtgacttactaagtgtacatgaaacaaaaatagtcaaggagggagcaccatatttagcaatacaaattatgcctttttatgactgaaaaaataatctccctcaacaatgggcctaatactggaagacatgagcagaaaaaccttactaccctgggtcccagcccttagcaaggctgctctaaacacagggaaaaaggatgcattcaagagttatgacaaccctagcacattcaatatgagtaaatcaaagatgttaggtcaactgacactctggaacacacaatgctttcatcaaccaaattacagagatgtaaagagctgatgcaatcaagttagctgaaagccttgttgccttttcaggttccagaactcatccttcaaggtcccctttgcttccttcttt

SEQ ID NO: 35170 - DNA, 519 bp, Homo Sapiens
tatttctgtgaataccgggggataagagtgaagaccacttaagaaacgcttataactgttcccagtgtaagacaatgcacatccaaactagggtggccactgtgaaaaggaagggggagtcctgtgaagatatactcacaggacgtttggaaatggcaggagcaaggcagggatgggaacaacagacaaagacactactgtctccagcatagatgcctgggggaattctaaaaggaaaaccaggtaggagtaaaaggtaaggtgcagttctccagcgccaggactggagtgttctgaaggctgggctcttttcaatgcccttctctattttcatgctattgatcgtccccattctggatctctttcttcctctctggcctgacaaaatctgttctcaccctctttaggagaaggtttgatagactagttcagagggatcagtaatgggagaaagtatagcatggacagcagccgtggaagaggcaccccgggttgataggttttccaagcatgctgtcg

SEQ ID NO: 35171 - DNA, 493 bp, Homo Sapiens
atctagaggatcccggctggaggtatcacaggagagaaatggtggaggctgagtaattcttgtatgtatcaaatagtcagtaacaggtcaaagtaagtgaaggagatccgtccctaggtcagtctggttgaaccagatattcctgaaggacagggttctctctttttctgctcttaaataataaacactaagttatcagtaactcaccacaacctgattctcaaagggggcaggcatatcagaatccctgcaccaggtttaaacattcccccaaactgaattattttaagagatgaatttatcgatttgcatccaattatacacatttttcctcatcctatctcttcctatgtgacactgtctgctataatgtttcttcttttattcttttcatctttactatacagatttctggtgtataataattgtgctggtgaactgcaagctttacatctatttttaaattattctagtcattttctttacaatttta

SEQ ID NO: 35172 - DNA, 403 bp, Homo Sapiens
tttctcggtaatggctccgggccaagatttgtggcctcaggcaacctatcagattcttttcctcaaacagccttttcatgaagtcttccctcgtgtcacaaatggtcaagggctccttattcgggagccttatgggggccatattctcgggccgggcatttcaggccttaactaaagataagcgttggtcggacctctccacatcgttgggtccctctccagtggtgtcgggctgttggccacaaaaatgagtgccagcctcgccttataccacagccctttggctcttgtttatcctcctcaagactgggcctatcaggactcggagagtgcagctcccggccctctggacatactcccccagcaatcttcccagtcccggtgggcttcagctccccttgag

SEQ ID NO: 35173 - DNA, 643 bp, Homo Sapiens
cgccgccaggagagggccagctcaagttgactgtgttcaggtagctgctgcaggtagatctgtgattacttgttgattttagtgggtggttctctgtccttctggacgaatactctttttctttacttttcctgcagtgagctggagttggtaggtttggggtggctcacatcacagtgcttgctttgtcgcatattcacctttcccatggaaatcttccaagtgtgggagggaagtttgtatttcacgcactgtgccttcaccttgatcagcaaggtgaacctgagttcctgggtttcagtgtctgaggttggatagcacagagctaaggaagcgtttcctgagtgtgccagcaattctcgctgggctgtgcatgctctgtttcctggaggctgcacatgctgctcatcgacattcgtggtcaggttctttccctgcagcaaaaacccttgttcagacctcatttaactcacaatttctcacctctgctctaggggtaccccagatggtggctgtgtctccccacttctgcttccccatcaggaaatagagccccaccatgggtgtctacaccatagatgaagctggtcaaataaacacgaaatctgactggttttgtgtgggcttccccggtcccgctcct

SEQ ID NO: 35174 - DNA, 490 bp, Homo Sapiens
tccacgactgcgcgtcatatgtaaagaatcaggcacaccatcaattcagtcacatccattgttcctcactcggcgacaaggtgtgacgcgcatgagtcgcaatgtgcttcatccaaaggtaagggcagaggctccccggacattgagatgacttttttgcctcgagcttatggccagttgatattactcacgctcgacgccatgctctgcggttcgtgaggccagagtaaggaaaccagcgttgcccacgcactccacccgcacaagcatctcccgccaatgggaaatgctcaaactgcttccaaatcgtgccccaggccttactgccgccggactcctccaacagttggaagaggccggccatcgcacgacaaaacgtacggttgagcgagaccccaacgaactgtcgagcctgtttccattgcactgcaacgataaaggcacgcctttatggttggtactggcaacctggacgcgccatcgtgcgctt

SEQ ID NO: 35175 - DNA, 410 bp, Homo Sapiens
accgaagactccgaatggaagctattcttttcactagttgtgatggttcagaatggctgctaggaggaatcagaatatgactgagctgctgcttgttgttctgcaagggaagataatgtcctacaatggagatgcctggatgcatttttagctacgaggtagctatccttattaggctcaaagcagaatgcatttaaataggtcttggttgttttctatgacaagctgttatctctgtgatcttcagtaagataagtaaattttctaagtcaccctctttaaatcttattttgtggtatgatgatcatacattcagggtacctagcatataatgttcaaaatagtagatggttattgtttcattgatcaaaaagattaggtatataatctattcttccacagcccccttc

SEQ ID NO: 35176 - DNA, 555 bp, Homo Sapiens
tagcggtaccgaacgctccgaagtgggcaggacaggccaggctgtaggcgtcccgacaggctgagcttccctgttagtcccaacatgatattttaaaattctgcctgtagtaagtagtctctgtagtctcagctcagtggaccccaaggcttgctttctttttgctttcagtttacttgaaaacaagatcaaacctatcacaccaaaagtttgttcctcctcctttagtcccccgtccccaatccattttatagacactgaaacggccttctgcaggctccacgcatcatcgtgtgtcatcaacactactacccaatgcttttcatgaaagtgaagtagttttcttttccttctagcttacttcttaacttccattactcaaagcagctatctttccctgtttgtcccaatccagtctcatttaccttcttgtttaaagacaccttccacattcatagcttttagggatggttcaggctaaaatcatacctgttcccttcccccttagactttcagaaatcactaactgcttgagcgtgaccttcgaattggtct

SEQ ID NO: 35177 - DNA, 480 bp, Homo Sapiens
acgcgacgagctccgaatggagtccttctcctattaaaagggagtgaaaagaactggttcaagatgaggcccaggatgattctacaagggaatacacttattactttgcatttcaattgctattctaacctattatatatgaaactttttgctagcaaagtaaaaaaagtctgcagtatttactttcatggctaggccaatgagtatgaggttaatgattcattaaagcagcaataaacttgaaaactagcctcagttgaaccctttagggtttatacaaatgctactccaaaagtcgggccccattccattaacacgtgctatggttagtaagtatggattagggtatgttaacattaatttgcgctatggttagtaagtatggattatagcgtatgtttaataaagtattcttattttaggtcctcttaaatgatgctagttagcaaaggcagcatactggcaaaatactactcctgg

SEQ ID NO: 35178 - DNA, 410 bp, Homo Sapiens
ggctcgcccatctctctgaacctcgcctctcccctgtctagtggggccccagtgcacttgtaaagtggagagacctgacgaccccccacccccaagcgctccactcacgctgttgtgattcctaaaccatcgtgcccggaactcagtgaagctcccagaacgtattacattgtattaaaatggcttgtttatctccacgttgcatcaatgccctcggggccaggatcctccgttgccagacttcccgggaacacttggaatgcctcctccacctcgtactagcagtggcctttggcctcagtctccccagttgacaaaggggggtaatctgcacctccaggatcactttgtgaattacttaaggagcgggcttgaggccagcactcccctgcactgctacatctccatcc

SEQ ID NO: 35179 - DNA, 502 bp, Homo Sapiens
ggacgttagttctgacaagatgccattctaatatattagaaatgcaaggttagttacatccattattgttgatacttcccgctcaaagtatatcttatcttgagactttagctaatggtagcagcacacctatacaatttaccaataaataaggcaacacaccaaatctagtattatgtcctttatttcctctgtcaaattagtgcctctaatcttcctaatcttttctttcaatccttctctttgtagctagactcactgtttacaaacacaaatcaaattgcaccagacccacttgctcccactcccggtttagaactctgcagctgcacttggaatcaaattaaaagtctttactgcagcttgtgaggcctgggatccaggtttatcctaacccttcaacttcatcacatactcactgcaacctctgtctcccaggttcaagtgattcttctgtctcagcctcccaagtagatgggattacaggcatgtgccactatgt

SEQ ID NO: 35180 - DNA, 390 bp, Homo Sapiens
ctgtaaggtaaagggggatgatgtgtgaaagtgctttggaaagcacagagcactgtataaaaggtactcaaggtggtaatagtactaccaactctccctagctgtccccttccccactttgtgctcctccatcaaagggaaaacccaacccctttgattcctgatctcatgagcacaaataacttcctcagttctcagggtctgtacctcaatatgcctataatccattccaggactaacggtgcttcctcttcctgtcctttcagctgtgctgcttttggcattcacctatgaggagcgggttggagtgggacatgggaatggcctttcctgagtaactccttcccatttgctcctcagagcatagagcctctggaccccattcggaag

SEQ ID NO: 35181 - DNA, 555 bp, Homo Sapiens
tcgaggattcgattaaatgctgtatctgagattctcctgatagtgtttccacgtcggtcctgtttaccacaccttggcagagaggactgggggcttccataagctgagaccgaagggccattgaaagctgagtggcccaggggacttggactaaaggactggttctgtccttacctagctgctggggcttcaggctaaatgttgagcccaggggtcaagtgttgaagatgctggaaaaataccttattttgtaaagagtcagatcatgagtatttttagcattgcagaccatagaggccctatccagcaacagctctacctgctgtcagtgcagaagagcagacagtgaagagtgcctgtggctgcgtttgctctgcagcctgtcactttctggccctgggttagcagctctctccttagtttactcagctattaaatggggaggtcaagagctgctcacccatctcacagtactgtgttttggtttaggtttaggtataggtttaaaggtttacgtaatagtattatagtattttttttacggagtttcactct

SEQ ID NO: 35182 - DNA, 734 bp, Homo Sapiens
gtttccagaggatcccctgtggagggagattccatgcttgtatgcatacactactgtagcttgtttttttcattttagaccttctctattgatttcctacgctgcaagatgaagcttcatctcttatataaccctcctctcacacgcacaattctttatactaagctctcaataccattttctaattttcttaatattcattgtttatattttcatggctaaatattgcttacagctgagcatatgcagtgattttatttctttgccagttcaaatttttcttttctctggagtcaacaattattttattggtttacatttcttagtaccagtcacaaattcaggcccccagtttctgataggactacagaactctgcagtcaacacctcactcatcctgaatcccagtaattttctgtgttggattctgagtcctggattacacattgtcttctctcttggcatgcctcctcattttgatggagcacatcctctagcagctttttgagaaagggtttacagggaggaaattctttgagagcttacgtgtctgaaaatgtctttatttgagcctcctacccaactgataggctagctatagaatgctagaatgggaatagtttcctttggaatgttctttgagaagttcttttttgagagctcagtctttatttccttcttcctccttcccctttttccttcttcgtcccgtcgcgttggttttcttctcccgg

SEQ ID NO: 35183 - DNA, 513 bp, Homo Sapiens
cgatggtgcaggaggttaaggtgtagatctgaagagtccctgtgggattattagaaaatagatgctcccagagcaaaaacactgtcagccaatgttcagccagctcagcacttagattatctttggtgtgcaagataacagacttgaaattgcttttgaaatctctccaagactgtccatcccactcagtcttttatgtcaccgtctagtgagttaagttgtgaaaaactccaattttccttaaatatagttatacaaggctaaaatgcaaggcattttccatgatcacacttcaccttgccacttatgatacatgttgggcagtaaccctttcctgatgcgatctaccaaacagaaccaaaactttatggggaaaatacccatcttagaagacttaaaaaggaaagaccttaagaattaacacattgccttatgggggaaacaagttgaactttacaaagaaaaaaatgttaaccgggcacctctgttgcacaatgaatagagttaatgttt

SEQ ID NO: 35184 - DNA, 624 bp, Homo Sapiens
tttcgtgtttcaaatgttgcaggcgaaatcttggccgccctggcatatggcctggctccgcagatgatggtcgtgctgcgttaatctctctgaagcctctcctcgacatattttagagtgctttgctagcacctggaatcagtgtcagacgggccctccctcccctgaagatcacagttggctgtggtgcattttgcccgttaaccaagcaagggttacttgaggagcttggccagggagcgctgccgggacccagagggcagagggcagagggcagggccggagctgtcaggaaggcccttgaggaggctggacccggttcccatggaagcagaggacggggagaagctggcccgctttgtcccgctgtctggtgattcagctcagctcctctgtccttgacttggctgctgtcttttcattgtcacttggcaaacttttctgtgaaaggccagataataaatatgttagactttgcgggccagatggtctctgctgcagccacaccactatgctgttgtagcgtgaacaccaccagagacgttgtataaatggatgagcgtggcttgtcccaataaaactttattttcagaaacaagccactgggctggttcaggctaaaaa

SEQ ID NO: 35185 - DNA, 602 bp, Homo Sapiens
ttaacttgtaactagatgttgatgaaatcggtgattgagattttgtcccagcagacaggtgtgtgatggcaacagtgaaataaatacaaaaccttctcccaacccagaaatcctctccacgaaggtagagacggaaaacgcttatattaagcattaaaccagaatgtgatgcacatcacaggacaatccactaagaaattgcaaggtaagaaaaaagcctcactccttcatatggcctagcagatgtagcccattacacacgttttcaagataaacaacaacaagtcctcaaatacgaatttgacagcaccatttgtcacacatagttcatcctaacaggtgatgctctattaccttactggctttacctagaggaaaagcaaacatcatatctttatgacagaggataatgaggggagctgccttggggctgctggatgatacatcgggacaggacagtgcgagcttccagcaaggcagctctagttggagccctgatttctttccaaggtgaggagagggtgatgatagtatccttgggaaggggagtgacaagtgctgagggactgtatttataggctggggatttctgggtgctgtgg

SEQ ID NO: 35186 - DNA, 505 bp, Homo Sapiens
atacaaatatgaactattttagggatatagagaagaaaaatgtcaacataaggcaaaaaataagaagtcttaggtaaatttgtaaccttctgatcacaataagtgctttgggtcttctagctaaatatttttcagaactaaagggagataagtaaaagtttttcatctttaagatgtattaaagctttataatttaatacccaaatatagtccaaagaaatgtgtccttatcttaaggatgattgtcatcattgcatatgttatttaaatttagcacagttcttgaattatgaaaagtactgatttcatatatggaaagttatagtgtgaaagctaattcagtgcttgagactaatgaaatcagtaagcctgagatcataaatgataacagtcttcatttgaagtgtgtaactagtctttatttcttttggcagcttctgggctggctggctgagaaaatacctactcttcgttccacccccactcccgtaccaggggtaacgag

SEQ ID NO: 35187 - DNA, 452 bp, Homo Sapiens
tttagtacattttttaatgttttatatgaacattttacatttgtgtgattgccttagatattaaattttcctagtgctgataaaaacagcaacattcataacttattttatatattgttccaaagaaaagaatttgttttaatggtttcaaaatatttgcacctgaatttgtttatgtgccttaagttctctagtgctatttcaactttttggtcaatctatttgaagcttaccttagataaggttcatatatgtctcctatagagtaaataaacttccccttcttacattgtgtaataagcaccaacgtgtggtagcttggcagaatgagaatgtcaagggagatcgtcggatgtccggagtgtcattatattttttgtttctattttttgatacctaggtgcttttacaatattcagaccaatatctatcttacattgattaaacccgtt

SEQ ID NO: 35188 - DNA, 393 bp, Homo Sapiens
tggatatatatttatcacagaggtcaagccgaagctctaattttataaatcctggaaaagctggccagaaaagtacagagacttgcccaaagtcaaagctaaagatgcttccagaggccaggagagaagaaaatgttttagtagcactccataactggaccctcaaatctactcactccaagcatcccttcaagttcctgaccccaaagtaagaatctcagtaagaaaaaaatagagatggtttccaaataggaggtaggacaccatgagtggcatcgagcaataactgcaacagtctggctaaagatagctgccacttatgacatctgagcatgaaactagctaattttaaaatggccatttaatacatgcatgtaagaaatcttgtatccc

SEQ ID NO: 35189 - DNA, 458 bp, Homo Sapiens
gggagtggatgaggatcactgtggcactgggcctgcttatgctctcttcctccttcccattcgctggaacatggatgggcctgggacccagctctgactttgcaagtgaggacaatgctccaggcccaagtggaagtttctcaactactgacatttggggcaggacggttctttgttgtggggggcagtcccgtgcattgtaaaacattcagcagcatccatgtcctccactcactagataccagtatcacagcccaagtcatgacacccaaagtatctccagacgttgccaaacataccctggtgggaaaattcaccctagcagagaaccgctggcctagaggaaggcagagaaacgaggattcctgagttcctgcacggagcagagcagcccggggaccaacctggaatactcagttcagactactgaggaagacaaaataaacttttatgctttt

SEQ ID NO: 35190 - DNA, 376 bp, Homo Sapiens
attgaaaagctgatattggaaaggaggaggggccaaggaaaacaactccaaggtacgatatatgaagggctgcagatgactgtccagtgccgctggcacgcctggctggaaatcaacagagctgtgcacagccctgtgctaaagctggaggaaggagatatccagaacgttctgttcctttagtcagtggtcccacactattctacaaggacaagctcaagaggcttaagtacacagaacatgagacacgataggagaaacacggaaaactgaagactcgttgcataactccaaaccttccgtgtgctgacacggcaggcagagccactgaggacaacatagctctgcctcctcacagaagcatggcaacatcaga

SEQ ID NO: 35191 - DNA, 577 bp, Homo Sapiens
ccctggtacgggagtgggatagataagccacgtggctcaataaattattgaacccatagtgtcccctccaagtatttttcttttttaatcacaataccataatgcctttaggtgtgaaactgggtatagcctaagaataggaactggatgagatatttcatgaggacacttgatccttgcttgctgtgatattgctaagggtgtggcatcatgatttggacaaaatgagaatggcaggaattggggagataaaatatcaggctcataggccttcatggagttaaagcagtattgtgtgtgcttagctccagaattctcagaatttttacaataattcaacaggacgttggattgaataagcactttaatactgaaacactggatttgaaaactggatgttatgtgttctactcataagcctattactcattggctgtgacctgggatacatcactgcttttgctttcagagaatgagggtcattgggctaggtatatacagctcttaatatattagggttgccgtctagcaccgtatttttaaaacaagaatcctaagcttctaatatccacctgtt

SEQ ID NO: 35192 - DNA, 615 bp, Homo Sapiens
gtacgggagtggaaaatagaagtcactattcaaagaaggagccctgtcttactagtatcatgtcaactttatgtctcaatagaatacaccatatagagcaagatttgcagaactgctagctcctcggtacaactaggtaacgttttaaaccaacgtcagcctattcaatacatttataatttaagacaactcattccttccagctaagtggttagcctaatgttcttttaaaaagagtatggtgatatgtataagattaattaaaccttttcctgctgtttcctgtcatctacatttccagctaatgaggtttctactaaaattatagtaaaatgtcacaaagtagtgcttatgaagaaagcagtagccttatagtcagagagatttcatgaggaggttgtactctgtcctgtctcattagcttgacatcttaccagtatctccactcctgaagagtgtttcagtgacacaaatctggtccctgctagatccagaggcccagatgaagtaggcatgatcttacttatagcatacaatttctagggtttcccctgtatacctcctttgtgcaacatctctcatttcacatgtgatcaacatagtccacgtatcttc

SEQ ID NO: 35193 - DNA, 434 bp, Homo Sapiens
catagaggttccctggtacgggagtggagatcccaggacggtacagtgggtctgtaggagaaatgcttcatgcggctagaaaacgagatcacgttcctttcagaaaaatgtcactcataatgaaagaaatgcactggagaacccaacacccaacttttccctctcatatcattaaaaggtgaaatctcttattgccggcaagagtgtatggtgatgacactctcaggccctgctggtgttggaaaaaccatttgtggcaatgccacttcctaagaaaaacgtatcaatcatttgcaatgttcaccattgataaaaaaagagatatgcaatcagtgaaatgcataacattgataatctgcctacattaatgtgcttttgtttactgtatgtaatacacgcttattagaaaaatttcaaaaaatactaaaatgtac

SEQ ID NO: 35194 - DNA, 489 bp, Homo Sapiens
atgatccccctggtacgggagtggatgctctacaaagtaaatttttaaagaggttttcaagaagttacaatgtaatatttcctccttaacatttattaaaagtcaaacattgatacaaagaatgtttttctttaaaacaaatcaagaatattatccattctgtttaatgtcttcacaataagtatcctgatttcttagtaagaaaataagtttctcttttgttagattttaggggtgcaactcattgtgagcccctaaacttgtcttctaggtatttggagcttaattttatgtttatttactactgttatctttaggtttgtaaacttatttcccacttccctatgttaaggcattttctttgtgtgtttgagacttactgtttaacttttatttccatatgaatgccaaaaatagcattagattcattgaaatttgtttgactctgtatttgtacatgctttcattgtctctcttcctgctactctc

SEQ ID NO: 35195 - DNA, 350 bp, Homo Sapiens
tgccttcactgaccatgtgaaattacacacaaggatggtccaacaactttagctgaaacagtctcgtacatcacggttcatttttaaccttttttcttaaattttagagatggcatctcattatttttccccaagctggactcgaactcctgggctcaaggaatctcctacctcagcctccccagtagctggcattacaggggtacaccaccatgcctggcttagtatgtgatgtttttatgtgtatttaaaaaagactccttaacttcttctaagtgacctgtgtgtaggtgtgcctgtgtatgaactctgtccaaagtaatcaaagaacactcattacaaacaaactg

SEQ ID NO: 35196 - DNA, 412 bp, Homo Sapiens
ggtgaggctgacttcagtgcaggcacttgatccctgtgcagatggtgctgactcctagaaggctggttgatagatgccttacttgatttatatattccttagaaagaaagccaaatcttggtggggatgctctgcatctatgtcataaaggatatggctgagtctcctcttttgtgtgtctctgcagttgggtaggatgtgtggctcatagatgatcggtatagttcttcctcctcaattgtttagagtagtttcagtaggaacggtactagctcttctttgtacgtcttatagaatttgagtgtgaatccgcctggtcctgggctttttgtctttgtttttgtattttggttggtaggctatttattacggattctaattcagagctgattattggtccacttaaggattc

SEQ ID NO: 35197 - DNA, 488 bp, Homo Sapiens
tacgatgtggttaggaaagtataccgtcataaaatgccatttgcatagatactcacaggtagtggggcagtgaaccctggtaaaagaatttggcgggcagggaaaaccccaggtccaaaggccctggggtgagcttggcatgtttgaagagtttcaagtgaagcgggagtgtccagtctgtctggagcagaatgaacaaaagggagaatgacacaatttggggagcgggcacagagaagacattgttcagagccttgtcggccactgtaaggactccagcttttaatttgggagacgttggagggtttcaggcagaggaaagacagggtctgacttctgttttaaagtggtccctctggctgctgtccttaaatatcaattgcagagaggtaagggtcggaggaaagaatcctgtggggagacttacggtattcaggggaaggatgacatcagtagtagtgtgacagccatagacatcatgagaaggg

SEQ ID NO: 35198 - DNA, 381 bp, Homo Sapiens
tggaacacactggatctaattagaggctactgtctaaggtacggcatgttcatttctattatcctaactccaaactatttcaatcctgcagacacttgagcttctgatgtctgtactagtcaagaaaaccctgttttttcacaaaggaggaaacatggaatgtaagcaaccttctcaaggtcacgtagctaataacaggcaaaacgtaagcaagagccactgtctggagggtttcctctgcatttaaaagcttctgctaaagatatgcccaaagtattcatccactagtcctttttccagtgctcgacaggtcaggcatatccgttcctttctttctggagatctttcacctctcccatctcttgttctggccgcttcttg

SEQ ID NO: 35199 - DNA, 405 bp, Homo Sapiens
cagcagtagtgatactttaatgtctttaataaggagaaggtaacaaggaaactcacatttactatagtaaaactaatagactacatactttacattaattttaattctgacaaaagcctctgaagtaggcattattccattttacagatgaggaaactgagctttatcatgcttaaaagtatgtattgctgtcttggggaaaaaggcaggatatgactactaaataatgaggttaactgcctaggaggctcatacactataaattcaccttgaaaattatttatgggcctcaaatttatgttcctgggaaagaggagcaaaagattaaatcatttttattagttcagtgacaattctaaaaatgaaacccagaaatgtactcactcctaaccactcccgtaccag

SEQ ID NO: 35200 - DNA, 658 bp, Homo Sapiens
acatggcaggggaggcacctccggttcaagtgcattggctgaacttcacgatttcctctctccactattacaaaaatgtcactgagatggacacgaaatcaggctcttgtcatagcttcaaaaaccaagaggaaaagggtcaagcagttgtaggaatctagggggataccgccatccacagactacagtttagataaagctgcattgacaaggtaaagtctctgtcccaaacagaggagcacaagtccctggagccagatgggaagggcctcactccctccatttccacccttgccagctctgcaccaaccagaaaacctggaggccaccccttcgctggacagggcttgttagcctctgtcccagggagaacctcttcttctgtatccaggcagaacggtaccctgagggccagcacagcaggaagaaagacaaggacatgtgtactgccctgcattccaggctggaggagtcctcttaaataagagcccagaagtgtcctggggcagcagctggaggctgatatatttcagaggctgaaattaggggaaaggagaactgtactgtgctttagattctttaaaacataacttcccttcttcatagccaagagacaggaacggagggcagagaagactccatttgggggaaccaaatg

SEQ ID NO: 35201 - DNA, 620 bp, Homo Sapiens
ttttggtactgcttctatccactgccttttctttgtctaacttttcctctctgaggcctttaggggaagccagtttcttcctcagattctctgagtctccccgcacaaagcccctcagccctttcagctgccctcctaagagttgggggatcatgacttggcctcacagaattccatgccatcctctctggtctgggcagcctctccagggcaatgggagtgcagcccaccgggtctgcagagccccagctgaggcctgagcttccaggcaccgcaaactctcctgggctgcagggccagagtcagccccagtgcacccccaggtccagaacaccagccgtatccaagtctctttccccctaggaacttaaggaatttttcttaagggttgtttcagtttcatacctttgaaaagaacttgcttctcctttgacaccttcgctgggactggggccagaccgtggagcagataatagttttgccacgtgtagtctcccatctccccatttattcaaggacatttattgagcacctacttgccaagccttgtgcttaggagctgggaataatggtatcacttcgtcctaaggaagttctgggttggcataagcggacactac

SEQ ID NO: 35202 - DNA, 676 bp, Homo Sapiens
gggcgttaataaatgtgagtttggtgaactgtgtaccaacttgtaagcagttagactgcaccctgggaagtcagttcacacatgaggagggcctcatctctggcttccctggagcctgagtcaaccaagcttctgatggccaagatcttttcctttgtgtgtggagttgggagaacaatctagtatttttagacctttgtactagacagttttttatggcattcgcttttctttgtcttcgtattcagaaattttgtttgcctaaatttaggctaaccatgaattgactgcatttgaaaggcttattgcacatcaataaggaaaatattgttatcagatgtacttacaatgaggaggaaatgtttccgaacctgccctgaattatatagtctaggtttcgtttactcccatcccctagaattctcccttaaatggacacagagaacctggaagttattgaaagtaaaaggaagaaccagacttgtaaaaatttgttctcagattttgttttcaatgagaccttgggaaagaagtcccttaaaaacaatcagatgctatcttgtcctttctttcaagatgccccatggtcttgaaatgatggggctaacaacgtaaaacttcgcttatgtcttgataggttccacatgtggcgggtgagtggaagctctttgggact

SEQ ID NO: 35203 - DNA, 605 bp, Homo Sapiens
gcaggtagccaggcagtggaagggaggagcaagaaaggatctcagaggtcagcagcaaagggaagcaggcagcagaagaaagcactatatgatcatgtatgctcagctaacagcaccacacttgcgtctgctgggtcatctagttggcgttatttgagaactaataaagatccctttttcaggttctctctactttctcaggaaataaacagcagcaaagcccagagcttataaagcacaagactggttattttgatgggggtcaggaaagacagggatattgggcatgtaccctctagggcagaccaggtagaaaacccagaaagttgcttgaaggtactgagttccaggttaggagtgcagagaagagagaaacaggaagcagaaagtggggagtggcttagcacaaacacaacacaatgtttacatacttcacaatgatgccaatgctgcaaatggcaacactgagtcaacagcattaggcaccaggacacttagctcctggccttcagggagcagtgggaagaaaacctgcagtgtggtgacaggcagtctccctcttaagcactctggggaaccatggccatgcactgcgctgggacctt

SEQ ID NO: 35204 - DNA, 418 bp, Homo Sapiens
tatctgggtctcccctgactcagtgtcaccacaaaccaggtatcctgcttccgggctgtgtataataccccatcagagctgcggcaggtagaggcatgaaccagctcagggatggtgaatggcagtttctaggagacggaaaatttacaggaaggagtaagagcagcaacacacagtgctcactgtgccaggtgagcccatttccatagcaaccaattaacaggtattactatcatttccacttttcaggtaaggaaactggggcttggagaggccatgtaacttggctaatgtcacacagctactaaatggcagagcctggccttgaacccaggcagtcaggctccagagccagcacactgaatcattttgctacacagcctcttgaggaaatgcagaaattcccactcccgtacca

SEQ ID NO: 35205 - DNA, 350 bp, Homo Sapiens
tgactggtagggacctccgaagctagggtcagacctcttgagagcaggtgtggttttgcccacaggaatgcagagacgtacactggcttccccgggctgcggttggtttgtggtcactgggtaagcaggaggcgaccctcctgtgtgcagcaggcccaggctgtgagcaggcagtggcgtggtcctgccgagtgaattcggtgccagtgtgggcaggtggcctttgggcactggtttccacattgaggactgtgggaagcttgggaaattttcaggaggtcaggctgtgggtgtaggtcgcctggggactaattgtcttggacagagcgtgtcctgatgtgcttaacacc

SEQ ID NO: 35206 - DNA, 434 bp, Homo Sapiens
taatggtgtatttgtatacagttgatctcatagtcaggaagtggagatggatgtaagggaatgagaggaatcaagggttctgaatgagcaactgggaaaatgggattgtcatgaactgatggggaaggctaagggagaagtaggtctggtgggggatgatagagaactcagttaggaacatagctaattatgagatatgtatataaatatccaagcgaaggtactcatcaggaggtggatatacgaggtaagggctcagggaaaagctgtggccagaaaaaatacatttagaagtcaccaatataatcagtgttataaaaaagtatgagtctggctacggttgctaactaccagtgagtgaagacaggaaaagagaggtgtccctgtcacagactagcattcggatttcaaagggagtgtggaaaaactttgca

SEQ ID NO: 35207 - DNA, 519 bp, Homo Sapiens
cctggtacgggagtggaaacaggtcagtaaaatcagagattgagaacatcagtgaaggaattgtaaaggaaagtggcccataaaacacccacacatgcagtaatgttaggataccacttgtgtattctcttatctcagcccgagtagaatggtcttcttttacaaagcagtggcttagttttgtgagtcaagaagaatctggaggaagctggcttggaaaatcggacgtaagatggagagagttggttaggaaaaatttgtagtgatgaaacagtagagaatgacacagggctcaaacaatgacagtctcatgaagtagatgagataactagggaaatgactgtgattccaagatctgtcataccattatggtatgttgtcttacccatatacctgtgatcgtagctcattgtaagtgatgtttatggtgtagcattctaattgatgcttgttttgaagccttgcagagtctcaaacttccttccaaatcattttcacaagattggattgttgggcttt

SEQ ID NO: 35208 - DNA, 605 bp, Homo Sapiens
gcagtaagctcataaagaatacagataatggaatacacaaatattactacgactttatgggtggcataccttgattcttgatccacgtggctgtgttcagatctggttagcacacattgacatcaggggctgagccaccagtgagagtcaaacccagcagccctgtcagtctaccttctctcttgacttgatccagcctcataacttcactttccgcaggagaaacacacctcttgaggtcctctgtcacaaataggcagtgtttctggagaaagccaggaggcagattttagtgctgttcagcatctgtggtctctactttctggatctggtgcattatggagaccatgaaatgacatgaaatagctcagtgctgccagtggcggtgacagggacactagaggtgaaggagggcccttggggcaattccagcaggtgggtggtggctgaaggtccttgtcttctttctgcagagactggccacctgcttcattctttcaagaagcggccaatccctacttcagtactttgcccactcgtcatgtcaggagcatgaaactcacgagggcttcatttacttttattctgtgacaccttcaattttt

SEQ ID NO: 35209 - DNA, 422 bp, Homo Sapiens
gctccagccttggccagcccagaaaggggctcccacattttagtggtgggctgaagggctcctcaagtgccgccaaagtggtagccctggcagaggaggttccgagagcaagcggtgctctgaggactgccagcacgctgtcacctctcaatagtatgaggctcccggtggcggcggtatctgcaaaagccaagactttcttgagttatacaggaaggaaacaacagtgctgggatttgaacccaggaatgtctcgatctagaatctgtgctctaaaccagtaggcgtcactgcctgagactgatggcagaattgacatgtgctccacagccttgtaggtccaccaacaaactcccagcccacccacaggctcatcaacatcaccttggatcaaagatttccatgaatattgtaaagacata

SEQ ID NO: 35210 - DNA, 414 bp, Homo Sapiens
aggtaagtactcaacagatctagaacaagactggatacagaacttttctccagtctgagaaaaaaatgaactggggtagccacctcacagtaggtttggtttcttagaagccaaatgtgatgaacctagtgaaccatttcaatgatgttttggtgatggcctgcaaaacaattaatcattgaagtatataagtaaactgctaaaatcataatctagtatgcatatattgtaaacttttagaaaaaaatgaaatttacagtttgaagattttcagctttcttgctcccatccaaaacttctttcccaatagcggttttatgaaatttttgtgtcaatacagagagctagcaccttattttttagagtggcattgacccaagtccacccaaatataaaataatactcccgtaccag

SEQ ID NO: 35211 - DNA, 352 bp, Homo Sapiens
tacgggagtggccaggcttggacattttttcttaaaggcagattgtgagtattttaggtcctgcaagctgccaacaggaggatcacttcataaccactcactaccagtgaggccgaaagccgctgtaacgacacagacgagcgccgaaagccgccgtaatgacacagatgggcgctgtgttccagtgaaactttaccactcactaccagtgaggccgaaagccgccgtaacgacacagatgggcgctgtgttccagtgaaactttaccactcactaccactgaggccgaaagccgccgtaacgacacagacgggtgctgtgttccagtgaaactttaccactcccgtaccag

SEQ ID NO: 35212 - DNA, 445 bp, Homo Sapiens
gtggtacgggagtggatgtgctggccagtttctaagatgttatgatatatagatcattgaccattttagttgaggtttacttgtatcttctgagtaagggactccaaaaagttctaagtgcttgtagcctaaccaacttggcctgtctttatgacaggtaggggaaagggatcatctttcagagtcaggtcctgccttgggaatgagaagagcagaataaggtttgggaagcaggggcctggttttcagacctacactcagcctgttagaggttcctgtagtagaaagtggggcttcctaggaagctcagttaaagaagggttgcaggcagaagagatgatttacattgtttaatgggtttaaaacacttccctttttcactgctttttgtctgttttgctctttgaggtcaagcctttcattcccactcccgtaccaggggtac

SEQ ID NO: 35213 - DNA, 422 bp, Homo Sapiens
atcattagaaaaaataatgcagaaatttaaatgacctccatctgttttctaccccatatgcatttggctatcagccatctttaatgtttttagctctctattctctatatatagaacagaagtagtttttgttccaaaagctatttatatatctgaaagtaggcttgaaagcatttatgttttccatttaacaaacaagttttttttcaggcatgttgactcaccttttttctgagtcagttacaaactaatatttaattctgactagaatttaattttcacgttctcagaaacaacacctttatttgcaagattttatcgtacacttaacctatatctcctttgacaatagaaagaccaaagagtggatgtgatttttttgtgtatatgtgtttgttcaggcagaagatgatgaaacaccc

SEQ ID NO: 35214 - DNA, 688 bp, Homo Sapiens
tacggggtggagagtagttgttgtgaggatttttataaatagagaggatcagacaaacattctcatcctgaaagctgcctgtgagtgactatattacccgttcatccgacaaatacatatcaagtgcctactatatcagcagggcactaggttctggggatatcagtgaacaaaacagacgaagatccccgccttcgtggagcttgcattccagggggaacgaaggacagtaaatgtaataaacgtgtccaaagggagtggcacgtcactgtgtacttggcaccaccctggtgctgggaatggaaactcaagtgtctgtctgctcagggtacatcacatctccacgcctgcccacagtgtcctcactggagtcaacagcacttgaataatggagaaagaccctaatacttggaatattgcctattgctgaattcagtgtccaacacatggcaagcacacagtaaacttgtactgaatgtactgaacagtaatcgaatgaatgcgtcaatctgtgactcaatcactcacatcgttcacttgaaggggcgaaaaatgagggtctagaaggaaaagtgtaccagcaacacggcgtctgcagcatgaggactactgtgatcaggcactccttgtcacgtaagaccacagacacccaataccacacccctgcctgctgtgcacgtgaccccct

SEQ ID NO: 35215 - DNA, 453 bp, Homo Sapiens
ccccgggagtggcacagagttaaaaatggtgacaacttagaccagctgctcatctagctgggtgtagagctcactttaaatggaaatggcaattttacaggtcaagtgtgttgtgtatgaatttctttgcggtcctactgcctcccagacaccagcgtgggctcctttctgagccacatgtttagcagcatgcctgggaccctgggagaaggcggcaaacgggctattccatggaggacagatccttgttaaggggctgttccgagtgcacctctgggaactctttcatttggttactaaattcctttctgcttttcatgtagagaataaagctcattagctgtgtcttttaagaaagccaagtgcttcacatgagatacttattaaaatattctcaaatccattctaattctgttcttgtgaagaatcagtttcattccactcccgtaccag

SEQ ID NO: 35216 - DNA, 473 bp, Homo Sapiens
caaaaagaaagaaaacaaagagtatttatataagtagctgagaaggtggttgatttgcacagtggtttgatttgtttggtggtggatggctgtgttactcttatgctactaaaatcattaccatgtcggctttgccggcgcacataatctgtagacgattttcaaattatgaatccattcaaactgtgtctgttgtaaatgccatataaacagaggtaccttttaagtaatgatttaaagtcttgctattttcatgtgtatctatatattacaattttaaaacctaaagaccagtttttattgcttctgaagctaaacaactcccctatctcctatacgaagctcctttcacagttgctgtctgagcaggcccacatttgagaagcggctctacacaaaagccatgaggactgtctctccatcctttatgctttctgaaagcgtttactgagcacttgccactcccgtaccag

SEQ ID NO: 35217 - DNA, 516 bp, Homo Sapiens
tacacaagtcaccaacaaactccataatacccaatccgggggccttttcctacccttagcctgtattacttatctctaatatttgatcatttcttttcaataaattaatctctttctctgtctgtttccctccctctctttttcttggacttctttttctacatgtttgagaacttagtttctccttattttttcatcctcaaatggtgaccctccacaatattctgtcctctgctcttttcttttttgtgtatatttttgctgtactgttccattcagtatcatacattcacatatccccttttagtaggggtcaagtctcttgagtttgtctactagttccagctcgtgattagctacccccataggatggtcctgttgcatgttgaaatcaaacccagttttgtggttttttctctttcctcaaaccagtttgttgtccatttcctgtttaaattttactaccaattttaaagatggtgaagctggagttttctttccccactcccgtaccag

SEQ ID NO: 35218 - DNA, 477 bp, Homo Sapiens
aagcaaggcaaacaagttaaagtctacacttacggagagtcacgtataagaactgaaagaaacctaagagagtatttggtctaacccttccgtttgacagatggggaaactaaggcctacagtgatcaatggcttatgtaaggttttagaccctttgtaggggaatttactgaacatttatttattgaatgcttactatataccaaacattctaaggtactagagatgtggaggtacataacacacagtccctgttctcaagaaactgacaatcgagtcagggaatcagacccatacactcctgccaacagtgagttctagatgtgatgagtgctaaaggagaagtaactatatagggctatgggaggatgtgggagacactcactaattacccggggagaaaaaggctgcatatgaagaatgagagaggaataaactgagaggttatctcaggcagagggagaagtatgcatgagc

SEQ ID NO: 35219 - DNA, 438 bp, Homo Sapiens
ttgctccagcctgagcaacaagagtgaaactctgtctcggaaaaagagaattcaggacagaaatctggtgtgggttcctgctgcagttgtgtaaataggtttatgtcctactaggcctgaaagtaggatgggatatgttgtgagaagtaggacggaacaagttgattggcagggctgcctttccagagcaggtagagagctggcacttggtcagcaggcctccagtgacagggctcagataccagtacccacgatagaggtcttgattctcccatgtgataggtaccatttccttagcaaagttccttctgacttttttctggaaaggggctggggtaggatagtggggagtagggatgtcctggctagtatagccattataagtttttcattagtctcctggattcagatccacttgtgactgccactcccgtacca

SEQ ID NO: 35220 - DNA, 358 bp, Homo Sapiens
agagttcccctggtacgggagtgggtggtactctcacaggtagccagtgtcagcaggtcaagcagacatatgcctggaagtaaccacctctcagcattctaaatggaatcaagtttgtaaggcagataatgacacttagctgatgaactacttctatcagaaagggcacttgggcagccctatagaaacagtccaaacattaattgcagtcagtctcttagtctatctgctcccagggggctatgaggagcagaggctcctgaattcatgggccatactcacaggctttcttggccatcatcattcacattttctgtaaatggtgcccccatgccaaccctgaccactcccgtaccag

SEQ ID NO: 35221 - DNA, 557 bp, Homo Sapiens
gttcccctggtacgggagtggaatcgaaatcaatatatttgtccacatcagcatccaattacagtagttgttaattcaatccaaaaagttatgctgaattgtggcatggaatttgagaagatagtatcgttcagcagcacaacacagcagtaaaaatgagaacaggaggattcattgcttttgagagctaaagggaccatgaggaggatatcttgctgattgcctgaagataatcctcagttacattcctgcatattacctgctttaaataaatgcaaatgacaaccaccttttcaggaggggcataataatgtaatccagaaactagaatgtttccccttctcttccccatcttgcccaaaccactagattgaaatggctccattttcctaatgtgtatttcgttctcattaatagtacatcagctgcttgtgtatttaggcaaagtcagtaagatcgtagtttttttagtagtagttgttccatatacagtaattattttctccagaaacaagccacattagtttgtcattggattccccccactcccgtaccag

SEQ ID NO: 35222 - DNA, 471 bp, Homo Sapiens
gtctagagttaccctggtcgggagtgggagcttgaggtgtgagagttgtatgtgcagagacagagactgaaatgataaagcaatgtgcttaatgactaatggtgatattcggcaaaccagaatcaggaatgaaagaaccatttaatgcagcttctgaaatgatttcaaaagaaatcttttgaatactttcctatgttcctgtaataacagttgccttccatttattaacaggagccttggtcctacatgtgtcttttctcctgagtaagcatttttactttagttagttttaaaatgcctaggcatgaacaccacaaatgaaagatcaaagagtaactagatgctgtctaatttaaaaaactgtactcagcaagtgcaaatccttttttaatagctaaactgaacatctgggtttttttctctacttcttttcagcctatgagttaagtgagttaaatatcctcaaacaaa

SEQ ID NO: 35223 - DNA, 375 bp, Homo Sapiens
ctctagagtgtcccctggtacgggagtggcaggttggacgaggggaggctctgggggcaggagggaggttgcagagtccagagcttggaagatggaagataagggcacccagtgtagggcaggagaagaaaggcaactggaaactctgggacaaactataaaaccccacggaaaagacaggtgtaaggtgactaccttgatccgagggtgatctgagtggctggtacctttgtgctcacagcaggactgtcgtaaagtaggtacatccatgacttctacttgacagacgaagagactgaggccgagaaattgaaccagctcacccacgctgcccttgaacggtggtcgtgagaggggaacccactcccgtaccag

SEQ ID NO: 35224 - DNA, 596 bp, Homo Sapiens
atcccctggtacgggagtggactagtgctctaatggagatatgctatgcagagaaatagtcatatcatccctcaagtaccccatgaggctgtgattcattcaatcttttccatctcctccagtatgctactgacctctgaagacaggaactgtgctctagttagctccagcttccactgcctagtgaatgcagaacacaccataaacatgcaatatatgtttgttaatgcattaaaaagacaaaaactactagtgctttataattgggtcttacagctccaaacaaaaggtatttgttaactgtataacccaataatttgctacaatgtgcctgtcaacactggaggatctctggagcagatgtacttttgaacattccccctggtggcaggatattccagcccaagtctctttgatgacttatcaaagagaaagatgttaacaggtgacctatgctgaaacttgggctccaccctaaggaaataacagcaggacacagcccacagcggtgacttagaaggttccctggctgacgttcagcacagctcttcttgtacccaagtacaatactctgtctcaggagatcatttagtcta

SEQ ID NO: 35225 - DNA, 505 bp, Homo Sapiens
gaggttccccctgtacgagagtggcagctcagcttctaaagcacacagcagctgttgcctggctcgcatcttagaagcttctaagcctgttctctactttgcttcttttgtaccatagccatcttttggagttcttgattttggttcccctcctcatgatgtcacagtactcccaatgaccaacagtctccaatggccattaatatctgaaactcttaactggcaacaagtatgactgctaaactctgcagagctaggaaaccaaatatacttaactctgagactctaggcttcatggtttcctaggtttaaactacaaccaaaaaagtgtgtttgaactaaggactcgaccaactgaataattatattgaaaatatagattcccacctaagaagcaaagaaatagtttttttctaacaaaaatcagtttgttgtctatgtcaactgtcagattgttagaggtatgcttattatccgtatagaaaactactaatctcccatccag

SEQ ID NO: 35226 - DNA, 388 bp, Homo Sapiens
ggtacgggagtggggtgttaaatctcccactattattgtgtggttatctgagtctcttgtaggtctctaagaacttgttttataaatctgggtgctccagtgttaggtgcatttatacttaggataattaagcctttgagttgaattgaactctttaccattatgtaatgctcttctttgtcctttttgatctttgttggtttaaagtctgtttggtctgaaataagaataccaacccctgctctcttttgttttccatttgcttatcagatctttctccattctttcactttgagcctatgggtgtcatagtatatgagatgtgtttcttgaagacagcatacagttgggtcttggttctttatgtggcttgccactcccgtaccag

SEQ ID NO: 35227 - DNA, 569 bp, Homo Sapiens
tggtacgggagcgggtggtatggggagacaaaaagctcctgatgtggccagcacgtagaacaaaagaggggatagttcacagagaggagttaagtagcattcagatgatgcagactttatctataaagaataaagaaccactaaagggttttaagctgaaaggcagagttcaatttacattttagagattaccctctagtagccatgtgaagaactgatttcagggcagtggtctgagaataagatggtggggaccaagagctatgtagcgtggatgaaaaagtgaaggaagttttaagaatcacggtggaaaccatcataatgccaggatgaaggtcaataaaaacttttacacttgatcatgacaaaagaatgctattcactatagtttacactccttaatgacagactcaagtagacgaccttactgacatcttagcctgacagttcctaaatacaaataaatttcagtgtactgtatgtagactaacacagtaaagttatcactaagaactgctgcatattccaaagctcaaaatctgaaatccttcttgccactcccgtaccag

SEQ ID NO: 35228 - DNA, 467 bp, Homo Sapiens
gtcaggtgttggtgtcttcttgatcgagtctattcgtcctattttactccgctctccatctcttagtcttttcctaccggcatccttttcttgacttatgaaacatcttcatctctgatttccaagaatattaatactcactttttagaaacattgttttctggtatctagctttccttgttggtttcctctttcctcccttccttactttacttgtctctttctcactccctctcttcccttcccttttctttgtcttttggtattttctctcatattgacatttccttcttaaaagtccttggctaatagttcatattaaatacttaggcactgaaagagctacttggaactgtcttgccagcttgttaccctgctgtttccttgttgggtgatctcgactcaggtgaccttctcactatgggatttcactggtatgttgatcttcaccatgagaccaacgtaaa

SEQ ID NO: 35229 - DNA, 462 bp, Homo Sapiens
tggtggctggactggggtctgtgtgttgggagatggaggcggcgtgggccgtttgaatttgtcaggactgttgcttctccgtggtgaaggcctctgcagaggggacaggaacagcaagtcagtctaggtacaggtggatctcattctacctaacacagcctgacttggcactggggctaatcaaacactaaccaacaaagacaagaaaccagggatttctttcttcatccctactggtttctgaactagtaataaaatttaaataaggcagtgtttacacttccacctatgaaaaagctacataaaattactgcacaacttgtgtagaacaaactgctggactagggtccttcaacgagagctgtaaaatatccccttaaatctttctttccgtgtgtgtcaccaattccctctattgcttatctccaataagttgtacacatcctgaaagatacagctcaa

SEQ ID NO: 35230 - DNA, 404 bp, Homo Sapiens
taccctttgacggtgtctcgtaaactattaatatgatatcgaagtatgaagttcaagtttcttctttcagtttcagctgatagcaaataattaattataccagaatgaaaaggcagaactgctccaaatgcacaaaacttagctagcactaaaagaaatactgaattttccccaatagtatataatattttattggaacaaaaatatttagatgagtttcacagctatatattatcatataggtaccttctgcgaaggataagatggataaaactgacatttaacacatattttactatacatctaattaatctaagtaattctggggaaacgacccatatataaaagcatccatttctatataattccatatataacccagaccaacatagaatcaagataca

SEQ ID NO: 35231 - DNA, 368 bp, Homo Sapiens
atgggaaggcagacacagtaagttctaagtctaggccaggtatattttcaaagtccttcacactttccttaagctagcaaaagatatggagaggttcaaaaacactatcagggcaccacaaagtttgatttttatggcctaatattttagtaattcacaataaaaacacataagccaatagtatcttgtaaatttacaggaatcctaagcagcaaagaactacccacaaaaaacaagtttgctcatctttcctgagaggttgcactttcaacaatacttctgtattaaggaacaatgcaacagcactcttattttaaaattaaatagtttttcagcactttaagaaaagaaaaataaacacctcgaag

SEQ ID NO: 35232 - DNA, 387 bp, Homo Sapiens
aaggatgggtgtcaaggatggggagatcccatattcccatgatagggccagttcctctcagtcatctctccagctaaccctcagaccatcctacaagcagaagctaacatgagagcctttactgagaacttctggggcaccacaggccccaggtttgcgaggagagcaggtcaaagttcagggcagctgggggcagctattgtaacttcagggtcaagagagctttactccagtggttataatcaacttaaaggtcttccctcctctcagtgaaaatgaaccccggatcctcttatcatttggccttcccccttgcacaaagtttatctcctccacagtctcacatccaatcctgagaccttgacaccacagttcaaagatgaacat

SEQ ID NO: 35233 - DNA, 579 bp, Homo Sapiens
aaggtgttctggaggtggtgcaagtgtaaagtacactctggggtgggattctgtactcagatcgacaaaagagcacctatagatgactggggtgaggttaagaggtaagctcttttgagatattactgcagagttgagaacagagccgaaaatgatcatctaggaagtgaaaaataaagcaagtgaaaggtgtggagaatcatgcaaggaaaaataaaagactgataaattgggcacctggagttagaatgcagggccacagagaagcacaagggtgccaggccttctttatcaaataaaacccagggctgaacttagtgcagcaatcccgatcagactccacaatgcaaggcccctaaggagagctgattctatcaccctgtagctcagcggtgtgtttgattgctctcaggtttggcacctctatgtcttctcttaccagttagttggttgaaactgtaatgatataaaaaccttaacaggatgatcctcaccaggtctcaggaaaatgcaggtggaatgtcaaatcactcacagggaatactagcagttaatgagagctatgtttagaatcttgta

SEQ ID NO: 35234 - DNA, 498 bp, Homo Sapiens
tgaagtgaaagttctttctagaagtgaaagatgtgattgaacagatgagaggtttgattaaaatgtcccagatggtaaagtgaatatattttgatggttcaatattaagctctttggtgacaaaaatatagtcaagatgaattgcctagccttcaagagatttgattcaaatatgacatgtagtttctaaggtacctactatttcttttaccactagcctagccttcatgagatttgattccaatatgacatgcgctttttaaggtacttgctatttcttctaccaataaggtagtgcaattaatgtctgtatttttattttagacttcacagacacttgaactataaaagtcattgatttaaattttgaaacatgatttcttgatccaacaatacattgtttaatcttttcctctagttctatggctaagtatttatttatatttaattcagcaactcacttcttaggtggtgaatacacaaactgaaccaacatgg

SEQ ID NO: 35235 - DNA, 580 bp, Homo Sapiens
ctaaaaaatgctttttctcttttccgggtaagaaacatcagcaggtatagtctaaggtaggagctagggaataacagatataacagcacttgcttggctacatgtaagagaaagatgccatttacacagctctaattagacagctcttagaaagactgcaagcaacctgtgaaactgctccaggtttcccaggctaagtgctatctacctttctatttaaaagaaattaagctataaaaatttgtctattcactgctactcaaaaaaaggaagtgcttttatgtatttttttaaaaagtaccacgaaataaaatgattaaacttcatcacagttgcaaacgattaacttgaaaatagaaaaactgaaaatgctgcagaaaccatgttatcagcctaaatcaatgatttatgctctgaagagtgtgagaaaaatgaactcaacaaataattggacaggatttattgtttttaaatgagttttttaagggatgggatatacattctaacaaatttcctttagtaccttaaatagaaattccagagcaaggtaaacaaacatgaggtgccacaaactatcact

SEQ ID NO: 35236 - DNA, 589 bp, Homo Sapiens
gtgtcaagaaaaaaaacagaaatcctgtaaataaagatgagtatctatcaattataccatgataaagctgggtgggagggagattattactgtaaaacttgtctgaaggggaaaaaattaaccaaagcattatcaataaacgactaaaaagctgaaacgtaaggatcactttgggaaatgaagcaaaatcaaacaccaggaaacaaggcatgaaaagaaaaggattaagggaacagatgagttgatgacaaaaaagttacaaagaccaggaggaaaaagaaatatgagaattaccgattgtaataaagaaaaagaaaaagactgacaagcatagggaaaaaaatgacgtttttatggctgcttgatgatagttcagtccattgtcaacctaactagaatcaatcagaaagccgatcctcagaagcaaatgagtgaagaggcctctgggtaaaggctgagagtactggttgatgggcatcactgttaccactgttctcacctaacttgagaagattgtgatactagctccccaaatgctcctgttaatggcatgtccctactcttagcaggctcacattctgtgcaaaac

SEQ ID NO: 35237 - DNA, 572 bp, Homo Sapiens
agactcaccatttgctcagttatttagaacgtctgctgaaggccgagggctcatctgcagcctctttcctagaaagccatctgatacctgtcagcgcctgttaacttgagcaggtccattgggaaacatgtctctatttcttgtcagttacactaatgaccattccctggagagcagagagctcttcctactagaactctgcctctcagcttcagagtcattgcctgggagctgtgtggggcaaaagtgaaagccctaagccagggccgggccaaccgcatttgaatctagtgttctcccttagttagccaggtgaccttttcagagcagacagtgagttaccagtgaggcccaactgaaagaagtgtgaatgagttctctgcagagctttgtgcagatgtcacaggggatgtgatatcatcatcagtaacagcagcagtgatggcccctggaaacagcacccagatggtggactcagacccctggggagtgacccacagttccatgatgggagggaccctattttgttcagcactgtgtgcccagctagctcctagcatagggttatgacg

SEQ ID NO: 35238 - DNA, 426 bp, Homo Sapiens
cagtgctgatgactcatgataggaacaatttggataatttaaatgaatcaatgaaaatattcataggaagtttataaacaaatactgataggggctattgtattatttccagaacagatagtaggcatgccagtcaacctttgcaatttagtcaacattccctttatccttaacagaatccacatctacaagcattctcatttactcaataaatatatggatatgggctatgtgccaagcactgagcaaggcactgaggaatgtacaaagatgagaaaaatagtccctgcattcaaagcattaaaatattcctcttcatcttcatctttccttcctctctctcctaacccctttactgaccgaatgacatcttaaattccttctggaagtagatgtgttattaagtcataataaaaaagtgacctg

SEQ ID NO: 35239 - DNA, 543 bp, Homo Sapiens
ttagattagatcagtgaatttttaaacttatgctctagaagccctatgattctgggtagaaatgaagctccaatgattgagtgtggggtgggcagtggggactctgggcccttcaaaccaagcagctctgctattcgcttgttaaaatttagagttttataaactgtttcacttaaagaaaggttctactgcttaacctgcctacctgttggcatcactgtcttaagtgacctagagtcagtggcttatttcccacaaggattcagtgggcaactgtggcaatagttcttggctaacctggtcactatggaagttctttccgtggaaaaagattctccatccttcaatttgagataagatttactaattgagacctcatttgtatctgattttaatctttgcatcattttagttttaataaactaactttccaacttaccagattttcgggttgacaaagaccattatttagagaaacacaggcaaaggaaagtctaaaagctttggctggaatttcaactgcttctggtccagaatatgaat

SEQ ID NO: 35240 - DNA, 398 bp, Homo Sapiens
ttaaaaatcaattgtccccagcacccacctacacagttctggaaaatatgggtaaacattctgccttacaaagaaaacaaggaacaaggagggtgaaggaaattcatcaccatggtcctgcacttcacattattcacaccaaccatttttccagtcaccgagttcaaatgaccctgtcccttggggctgcaaaactatttgtaccaacacttgccattaaggaagcttcacatgctttaataaacgggattactcagtaccaagagatgctaaatggcttcaagagactggaggttaggggaactgaaaatggcatggaaggaagatgccagaataatcaatttctgacacaggagaaggaatggctggatgccagtctgctgcccagaacaccgtcg

SEQ ID NO: 35241 - DNA, 634 bp, Homo Sapiens
cgctctcgaggatccccttcgacggtgttctggccacggcgagacagcagtgatctcacggtctgtcacatctcatagtctttacctcccgtatggatcctctctggaggggttctgccccgtgcctttggcatgcagtgtcccttctaaaccccctttcttcaagaaccatctttctgttaagatccgctgacccctctggacctagctcctgcattgactcatccgctttctctaaaggatttccattaagacttctaccacactgccccttcatgcttagtttccaaagcggttgaaaagatcaatatatttttctgaggcaaaataagaaattctgagcacgatttcatttatcttccagcttctcactgtttttttcagcctcactgctgtgggcgtccttaaatgtgctttgttccaactgggaaacctgcctcttttcaccactgaagtatggttgagacaaagcactgcctagatatgttcactctattttgtttttacatatgatttacacagttgttgcattcctgtgtcactaacgagtttttaagcttttgtaatgctttagtgttggctcacacaatcattaggtttgacgaaggcaggccagggacgacattacctgtct

SEQ ID NO: 35242 - DNA, 498 bp, Homo Sapiens
tttatagctttctaaaaataactgctggtaagctcgtaagttcattagttaatcccaatgggactcaataacgcatattacagatctcctgattgttatatattagattttctcaagaattcccttacctgttattatcaacatagctatattgacagggtcttcattacttcctaattgcccatactcctttttcttgttaaagatcaatttttaaaatcaagccttgtcattttggaaatatcatagacatattatcctgttaatattaatgtgtttcatatctttctagtttcctgcctcctttatcatagtaatttacaaagtttattcattacctttttctttaaaaatgtattattttgtggggggcagggtgagagggtaggggcacatgtttgggttttttctccctggaacaaagatataaaagatgatctttcatattcaaaggtgaacaattgatattccctattctaagccagaacaccgtcgaag

SEQ ID NO: 35243 - DNA, 561 bp, Homo Sapiens
agacggtgttctgagaacgtaagggaaaaaaaatctacttctttcactacttccattcagtttaccagagttccctggttctccctcaccatggccgcccattccatcagatgccaaactaaagtcaccattctgattgggacatcccagctgttacaggaaactgacagtgtacatttcttatctagcatgagaattaccatgctagaggaggaacttaaagggtaaaactcccaaaacaagatcaagttctaataacttttaagcatagttaacaaaacaaacacttaaaaaaaggcccacaaaataacaaaggactattgattacaaataagattcagaacacttcaatgtatacaatgacaggtgaagtttcctttcagtagaagttagaaaagaagcacttgattttcaaggattaaactaaggactagaatgctggcctttgaatgtagctgactcatgtataatcataatgctcgagttaggtctccagaccaaaacagagctccacctcttatatttccagatgattgtgcgatgaacataaacaatgttacc

SEQ ID NO: 35244 - DNA, 551 bp, Homo Sapiens
atccccttcgagggtctgatgtagtgagcatcttttctgaagcccttccacaggtggcacctctagatgaccacacagtcaccttcctcataaccacctgtgagaagcacaatcaccccacctaatggatggggaatccggggcacagagtgtcactagggaacagcaagtgacatttattgagctttctctgtacagcactgtccgtgcacgtgcactaattcagttcgctgtgtgtgggttcagtgcctgctttacagaggggacattttggcccacacaggttgggtgacttgcgtaaactcacacagctggaagagcacgctaccacttctcagcagctggccccagacaacatgctcagacacgaggctggggacaactcttttaaaggcttatatgttaacaagtaaaaagcactgatcccaggagaggtgccacctggctgcagatctgcggcaggctgctctttccttctttctagaagttcagtgtacaatccaaatgcgtttgtattaggcttatcaaaagaggaaactttagacacagtt

SEQ ID NO: 35245 - DNA, 622 bp, Homo Sapiens
aaggatccccttcgacggtgtctgtgcctggcagtgcctatggacgttgcaagtgagatggtgtgaaaatatgtcagcaagtggtagactaggaaactgcgggctctcgttctcctagagagctcaatgttaaagctataggagacaaaacttcgggagattctagaaactagttaggatgctgcaatgcagctagtgcagagccagggagggactgcactgggaagggtagtcaaggttggagcattttgcttgttcttgcccttccccctgccaggcatagcaatgcttacttgggagggacctccaattcccagctcctcccatgggatgggtttctgctgggtccgactcaagagtgctgagtggtggggtctgtctgccctcagagcagcacctctgcgtttccacagctgcaaggggacggggttatgggcagtggaatagttgtgtctgggtatcctggaggggattggtgccaggacccccggtaaataccaaaagccaaggatgctcaggttccttatgtaaaatggctagtatacctatgcaaatgctcctgtataactttaaatcatctctagattatttgtaatgcctaatacagtggtaatgctacata

SEQ ID NO: 35246 - DNA, 538 bp, Homo Sapiens
tcgacggtgtctgcctttgttctctgttttggttaatggcatcaccaaccatccactcacccaacctaaatacttcaaagtatctgtgtgtcttccctctttgtgtctaatcaggtgctaaaacctgttggctcttctccagagtaccccttaaatgtggtttttctctccctctcatattttgactttagatccaaatggtctctggatctagcctcctacctgacactctgctactcatcttatatcctagatttgtaacctaaccatcattagtatcaagttgatcttgtttttctctttaaaaacttcttgtgactccttgctgcctaaaaaattaagcttaaagacattacattcaagacatttacagactggctggaacccagtctcatttcctgccagtctactagctataaatctgacctctgtagtcaaattacgcatttccattcttccataaccttgcttgaactgttcccttgtttggaatactgttttcctttccttcttcttcacacacagaacaccgtcgaag

SEQ ID NO: 35247 - DNA, 498 bp, Homo Sapiens
ttcgaggtgtctggggggtgtcattgtgcagatacgttaggtattcattatggaaagaactgaagcgttctcaggcaaggaaagaagggagataggagtcccgtgaatagaaaggatcgcgtttgaagcaagagggagtgctaaatagtagagaagatgcaggcaatgcataatagaatagacagatgtagtataattaataaatattggcctaagtactgaagagttattccagatgggccgggatggcctagttccgaacctgtgtgggctgttcagtagatgacatctggtaagtgtgggtctgggccgtggttggggtcactgagaattagattttagtctgtagtttggtctgtgacattttagacgtgcaccaatgagtatgagaacctctgaagcagaccttgagaaagggtctggcctgtggggattcccttaggctatggagcttcgatttcagaaaattcgaagtattaacacttacccgaggttggg

SEQ ID NO: 35248 - DNA, 610 bp, Homo Sapiens
tgaggatcccttcgacggtgtctgttatagataaaaagaagcttagttccttgagtcccaaaggaggccagagcaagtcttagtctaggctcaaatatcctaaagcaatgattctcaaactttaacctgcatcagaatctcctggagggcttgttaaaacacaggctgctggactctgtctccataatttctaattcagtaggtctgggatgaggccccatgaatttgcatttccaccaagttcccagctcatgtcataggtcccaggatcatacttccagaatcactggcttaagctctagaatgctatttcagctaccaaatatgaacacttacaatataccacactctatgctgagtgtactgagatgggtgagactcagttcatgcccttgaggagctcatagtctaggtggggaaacaaacatacacacacatgactatatttatttgtcgagaacagataagtaaacacagcatcggtgtactttctctggacctcagtttccctcctcatatcccaggcctctactagtgccattcattctactcactgtttcagcaggagagctgttcccagaaaacccgtcgaaggggaccgagctcgaat

SEQ ID NO: 35249 - DNA, 438 bp, Homo Sapiens
acctttgcctcaacagatcagaaactgcattttcgtcagtcatgaacgcttaagtataagggcatttcggtgcttatgtccgctgaaaaactagctgacggacaaagttggctgtgtgtctggtgctgcagatgcttggtatctgaagatcttaagtctccttcacttagctaagaaaaagctgactggatgcttgccgcatcaatttgctcttttaactgcgcttctctcttctaacttaccttagttctttggggtactaaaggctaaaatctactgtacttatagctaggatttctctttcccacatctttctgataacctaatatcctcaagtggagagtctgggggcatgggaaagaaaggagggcgctttagaccttagaccactatggtagaagcagaggaagtcaggtgtaaggcccctaaaacttttgg

SEQ ID NO: 35250 - DNA, 574 bp, Homo Sapiens
ctgagatccctttcgacggtgttctggtgtgtatagcacacttacatgcgcttctcaattcagactagctacatttcaaggactcaagggctggtggctactgtaccggacgagacagctctaggactctagatctcaaacctacacacccatctgcaacacagggagacacataatccaactagcaggctcaatacatcctgaggtaaatgaagcacatttcatgtacacacactcaccccagaggcctggcaataaagttcttttacctatccattttcagatatctgaccccccaaattttggtggtagaaatatcagagggtgggtacatgaggagctacatgttttacctgggagataacatagggaacaggcatgataggaaagaagatacagtagtctatcctctttcatctgtaacttttatcccttttagctgggctcacctctgacttcaatttgagatagaagtctcactctattgcccaggctgaagcgccgtgaaatgactcatagctcaagagcaggctctacctcttggaccaaagcaatgttactggctctgcctcct

SEQ ID NO: 35251 - DNA, 392 bp, Homo Sapiens
atccccttcgacggtgtactgtactgtcttcacaattttcgtaaatctgaaactactctaaaattaaaagttcacttaaaaacaacaatgaaaaaaatgtcagagaaacactaacattatcaagtagatcacaagcttcaaattatttaccaagatttccaaatgagtttaaactctccaagggaaaatatctctgagacaacatctttttatcaggtcccctaggacaaataccaaagatattatctatgattaaaataaatagtaattttcctccacattcatcattaatcaatcatttaggtcattgcactgaaagtcaatagcaagaatttcaaaaaatctcaagcatctacaactgctcttccctggccacactattaaatgataac

SEQ ID NO: 35252 - DNA, 416 bp, Homo Sapiens
catctagacgatcgctttcgacggtgttctgacaaagaccacaattttacctgcaattctggggttcatgaactcccccagagccatccctgatccctcagtaaagaatcctggctctgaaggaatcaggtcgagaccccttgacatctgctaaggtatttaatcttcattacaaccccgtgaggacagttgcaccaactccattgtccagactgtgaaccgggcttctacaggttacaaaacttgccagggtttccactgctgctgagtggcagacaggattcacatccaggtcggcgttgtttcaaaagagacagacacacattggagattgaccggtgtatggcgtggcatacctgcatgtggaccctgagagatggttccacagtggagacagagggaccgggtgtatgggg

SEQ ID NO: 35253 - DNA, 510 bp, Homo Sapiens
gcttttcgacggtgtctgatatgttactttacttgttaggaccgaagcttaaataatatgagttgcaggtaaacccccctgtgacctaatttaatagaatgttttcccttggtatcacagaatcacaaagttaagaaatctcaagaggttacttgtttaagcccttacttgtcttaaccactgtataaatgataataatggcaataataatagcccctggagagcatgtctttttctctatgttgcctcactttatttctgagaaaatagttgttacatatcatttcttccaagtaactcaaagtgcaaatataaatgtgacaaatcggggaaacattccaaattaactcattttaatcatagagtcttacagaaggaagtaaccaagatgtcactttctccagctttcctttctgagcaatccttcctaaaatactcttgaaagatgttttggcatctgtgtgacatttctagctattagatagctctagctagacagcttctccaaac

SEQ ID NO: 35254 - DNA, 353 bp, Homo Sapiens
ttcgacggtgttcttgagcatggatgttaatctcccactctgtctgcactaagccaggtagtggatgtgtggcaaaattcgtattcatgttcaggctgcaccctctgtatcctaaggagatagctgctggatgtgaacccatcgtatgtccatctgtttgctttttgttgtctagggtcactaaagaatgcaaagtttcattaactctcagagagagtttgttaagaaggtagcctcttgggtgtgagtatagaagttgtggcacacagtgcatgggcaaacttcttccaggaagaatgttaggcctgggatgagccagagaaaaggcttaggaactgccaagctctggctgc

SEQ ID NO: 35255 - DNA, 436 bp, Homo Sapiens
ctacgcatgatgtatctcttccccaatatttcattggaagccagcagcttccccatgaccgtcttcatcttatgactgtaagttggaatgagtatcatatacccgtcagaatcgcctagtgcagtaaaaaaccacaatgaaatgctcttccctattgcacgttcattatacagtatgaaaaatcgcataccccaaggacacagtcccagtagggcataactctactcccgctgtaatctactattcctgggataccggtgtgctcctcatctgtgtctccagtgtagggatgggagacatgaacagacagattccaaaccccatgccccctgtagtctctgaggggaagcgaccagccgtctgaattgacgccttctctcattgtctccagggctggactccctctgagataccctgctttctgcccagcacaaca

SEQ ID NO: 35256 - DNA, 505 bp, Homo Sapiens
atggtgggcttctcccacggctccccaccgcacctgtgctcactttggtacttattatttcagtacatgttttatacgtgtagctctagttattcattttaattgctttatggtatttccttatgaatatatagtaaatacctaaactcttaaagatggatatgttggttatattcagtttttcaccctaacattttccatttcgttcggtacacatttccttgtaaacttgtataagaatttttctaggaaatacatctaaaagccattttcaacatggctctgtccattttcaacattaagggttgtcgcccagttgcagttcagcaaatggtatatagtttaaaccctcatgaaccagccgtgtatgagaatggctgttgcactatattttcctctatagttggccttacaagattctacttcagtaattcacagcatgcacaaagtcatctcattgtctacatatgtgtcttccaccattctactgcgatttgcgcttcat

SEQ ID NO: 35257 - DNA, 519 bp, Homo Sapiens
cagagacgctctctccctaggaaagcacgcatactacaattctggactcaatttcactgacacttctgacctcacacccaaggatacgaaacgaatgggtctactgcctatttgaaaatatagacacacacatacatatctacaaaatcatgtgatcctacactgaaggattgtttcaacaatgcaaagtacttatgaggcttattaatagccttatattttcagttaacaacatattactagtggcaatgagagaagtcccaccacaaataaaacagcatgtttattctcaagtacaatgcattgaactgacacagactatcactccagttacacaatggctgttcagagttctcagttaatggaatattcacagtttaagaccaaacacaatgcacaaagaacagaaaaatagacaaagttgccgtattagggatagcaacattagcttcctggcaacagagactctggggagggctacacataaaattattttctattaagggtcagtaagtaaac

SEQ ID NO: 35258 - DNA, 364 bp, Homo Sapiens
acgagcttttcgaggtgtctgcatgcgtcaatgatatcattctctctagtttctaaaaagagttgaactttctatgctataaaagttatccaaaccctcattgagataatattcagcaaagggaaaaccacagggaaaaaagtgatctcagcgttaggggttccaacttcctaaagaaattgcttttagaagcagatcactttgagtacaagttctagctacacctctgtagcaaacagactaatggcctcaaagataatccagaatccaatacccagaatctgtgactgggtttggttacacggtgaagaattttggtagcagacagaattaaggtggctaatcagatgaccttaaaataggg

SEQ ID NO: 35259 - DNA, 377 bp, Homo Sapiens
aaaaaaatacatccacacgggggacagttcatgggagctaggctatacaataatgctcccaaatatgtaaatcgaaagaaaaaagcgaaacaacattcactgtgaaagacactgtacgtgatccaacccagtatccattctctccttcttactatcaaaaccccgatggtattcagggcagtcaaagagcctggtttcccagcctttctggcaacgagacacttctagctcaggatgatcagggcaatgtgtagggagggacactcagaaaagttccttgggtcatgggaggaggggaatagtctcagctagctcttagccttctgcctattcacccctttcttcctcccactgcatgaaacagtgacgtgatggca

SEQ ID NO: 35260 - DNA, 373 bp, Homo Sapiens
cggggtaggcagccgtccgggaagagcagaggagtccagcaagcccacaggagaacttggcactcacgctcatgaaaggatgaatgattctaaatgtgactttgaaaaatgcttagtttttctgactatagaagtaaaaaccatatgaaagacacatgtacaaaaccagccaaaactgtttcgaaagaccagtgagggaggacagggaactcgccagccagcacagtcaaaggacaccacgatgctacagggggaggggcgggcggcgctcacgctggaaggcgcggtggagcaacaggtgcatgaagcgtggtgggggagctgggtacacatctaaggagagcatatgaagtcagtgggggcgatgccaatt

SEQ ID NO: 35261 - DNA, 531 bp, Homo Sapiens
ggtagtattaacattcaagtcgaaggagagtggttaaaggcaggtatgcggacacttctataagatctcatagttgctctcttgttgccgagcgaggcgaatgacattgataaatcgccccattataactggtgataaaagcagcaggtacttaaaggactgaccaatagacatctgaaaagacaaatgactgcttgaagatgactgatacacgtcggaaattagcgatacccattgtgaggagaacaggacaaagcacgctggacagagataataccccaatctcctgaatgctcattgatgtgggtcacctgacagccttctcggaacaaagtcttaattactacaaacatatgtgaaaacaccctgaggaccatgatagctcatgcaaatgtaaggtattattatgattcaaccaactgaagtgttgaaaattaaagcaattttatatactttcatttggggcacaagttttggggcatccggttaggacttactatttacactaaatggtctgcatacttactatag

SEQ ID NO: 35262 - DNA, 381 bp, Homo Sapiens
tgggacaagtgtagagaatatggagagaacttctacgaggatggatctagcttggggacgctaagcatggtagcatttgtgcacagacccatgagtttagacacttggagatttgagcgttagggtgagggtgacgatgatggtggtggtggtccttgtggttctgatgaactcggatgaccattttagagggttagcagcaatgcagaaaacgcagccccagcctcatggtacttgcgttctggcagtgggaggtgtacaaacagcatccctcacagtaatccttctacacagatgtcatgcttattctacactcaaggaaccgaagctcagagatgtccacagcttgcccaacccacacagcaggtggtggtgagcctg

SEQ ID NO: 35263 - DNA, 356 bp, Homo Sapiens
tctatgggtgcgaggacccagttgtgaggcttaattatcagagacaaagtggctcaatttctgtgatagaccacagagatgcagtagcaatcggagggtactgacactatagaaatctgtggaggcttattactggcttcctatgaataaaatagatgggtggccaaaaatgacatgacttgattactataatccagaaatcactatctctgatggccaccatttccacttcacagaggtgctggtataaatccataggcagaacccatacctccgccagtttacagatcctgagccccttgcgtgaggagagagtcgaggaactatcgcgatagcatcctgacaactcgacctca

SEQ ID NO: 35264 - DNA, 541 bp, Homo Sapiens
ttttgattctgtataactagccacaagaatcttgactgaaccccgtggtaggactcaacaggcccaggtatccaacgataaacatccctgtaaggcgtctgtctttagctgaagctgtacaattggattcacagacgttaagacagaggctctggaacacagagacctaagggcagatcttatctctatcgtttactgtttgaccttgagatcttatctctaccgtttactatttgaccttgagcagttacaattcctcatctttaaaagagttttaaatgcagtaatacatataaaatatttagagctgtattagcgagtattattgttgatgtaggctgtaaaaaagttacaaaacagtactcagtattcataagatgtttcagttaaagatgtctccaaatttaatataatataatcgaagtgctaggttcatatttcctgacaaataaattctaagcaatactgtatcctttagcaggtagcagaagcagatgatcggctcagatacggaaaccctgggcacacgtcccgcccaaga

SEQ ID NO: 35265 - DNA, 484 bp, Homo Sapiens
ttcgtagtaattgagcgagcccagaagatgtaatgtggaagtgaggtagatacccatttcctacttgggtgctggataagataccaaagaattaatcaaaacgttttatttgctagcatgcaaatcaagaggttccaatcttcgtgttcactttaaggtatgcgattcatagttgtgatccaacagttcctcatgtaccactcaaaaaaggtagctgcagtgatgactttcttaggacacctttgggatttaccgtgaaaaatcagataaaattctgagcagccaccttatatttaggcattgatgatcagggttgtaaggatgtagcgtttgtgacattgagaagtagtaccagaaaaaccatttgaaaagcctaagtgtgcagatcacggatggggcattttaactggtaataccttgattgatggaatttaaacggtttaaacgtggataactgggggtttgggggtctcttcaaggttta

SEQ ID NO: 35266 - DNA, 542 bp, Homo Sapiens
tgtcccaggaaatatagttctacagtctataggcaggctgtgtctctgggtgtccaaaactacaaggtcaaaagcaaaggtaacaaaaagacctacagaaatatacagcaatttttcaatgcctctactctcaaccccaaccaaagagttgtctttgtccctgtggccacagcagccacctgtacaaatcaaaagcagggcagctatccagctttctgtgctcaatttaactagtccacctgtctgaacacagcaggcaggagtactgtcttggtctttaactctttcagcttgagaaagatgttcattttctcccttttgctgcacctgctttctagtgagtaggaagagacctaagaaagaatgatggttatgaagcaattaagaatcctatacaagttatcatttaatcacagtttattactagaataaactactggctacacagtttttctgcctttctcattatgaccaccagcaaatccatagcgggtacctcattaatgtactctgaactatcgtaaaacattaagccaggttca

SEQ ID NO: 35267 - DNA, 542 bp, Homo Sapiens
tgtctgggttttgcagagtggtagacactaagcctgagagtacaatgagggagggaggaaggaagggagggagaggtcagataaaagtctataaaataacacccatcaccactgataacaagtataaaagagtccttttttcttctcgagaaagacaaagggaattttaagtaggattaagtagtagtagctttcagaactcagcagctctcagaagcaataataactacataaatagctaagtggatggtagtaattacctcacttggaatttggccagcaaatcaaaagttagcagtaatatcacatctttttgaaagctttcctgagattctagaggggaaaattatctcagaaaactgtttctactgagtaaatttcaggaagaaatgctcctcactgcttgaagatgttctatctctggaaaactggtaagacagaagtccctccctgctgggaagcactctctcatccaagtaaatacattggcaattttggccccaatggaagcaaataattacgtccgcagaacaccgtcgaag

SEQ ID NO: 35268 - DNA, 457 bp, Homo Sapiens
aggcttaaatgagaagatcacttgagcataggagtttgaggccagcctaggcaacacatcaagactccatgtcagaaaataaaatgcaactccctgtttctccctggaagacgtttgtgccactaatcaagtgtcacaacttttacagcgccctcccaaagaacccagtcctaaacttcttagctctgggaggagaaagcactaggcatacatgagtctccttagatgacagaacaaagacgtggtcttaacaggtatgcaaacatgtttacaaatgatgccccctttgagtagtgtgaaaaaggggcaggaatatgcagctcccattttctctccacaaggggtgtatggcacacactcccagtggctacttgacagcttgagttctaataaacttgcactggggagccaatggggcaaacaaacaatagcccactggcagctgcagccagagctg

SEQ ID NO: 35269 - DNA, 556 bp, Homo Sapiens
tattcgaggtgtctgcatcctagacttttctctgggaattgttaatgaatgtgtcctaatgggtccctgtatagcactgtagcagctttctcaggaccgataggtaggactttggagaccaccctggtccattctcacattcctgaggtgcaggaaggtcttgcccagtttgtgcatgaacttgacaggcaaataaaccatctaatctggtgaaaagcaaaaagcaatatggagagacctttgggggacagcatgttgacttccaactataaaaagattaagtacagttagaatacttttcccatccaaagtaaccttcaaatttattacttactggccagctttacaaatgtattcacacagattaacacgttgtggaacatgctctgttaatatcgggatctgaaaagaaaacaaggagcaagctccaaacaatgttgagggggggaaagcaaagtgaagcagggtaacattgtctctgctcagcaaaaagtggtaggggacattatctacgatacatacagtaacatggaatacaactttgagaccatacact

SEQ ID NO: 35270 - DNA, 485 bp, Homo Sapiens
tgctctggtatagcaacattgtcctaagacattctgtatacaatagggcgcgtgactatggtttgtgagactatgtacaccaaaacaagtctaaaatcttaaatggaaagcaaaagaagaatgtcccagaatattagcaatgccttccatttcttggacatatgctaataatattcttttgcattgttcactaatgaatggtacagcagtcttaagatattatacaaacagatgataactactttctataacagacacttcatttgaacaggcaaggaacttaacacctcatcagtgaatggagataaaagccaacatttttaacccatttcacagtgggaaaattgatcagttaattatccaatgaaatcttagtttcctacattcccaaataagttgcgctccaatttattttaatggggcaaaaatatttctttggatgactcatctgacttatatttgtcttcacccctagaaactccttt

SEQ ID NO: 35271 - DNA, 387 bp, Homo Sapiens
gtgttctgcttgcctctcttctcaaaaggcattacctttcccctgtatgatctcaagcaccctattatacactttttgagttagtagcatgttcaccaaggctaatcctctttagcatgttagccagctatgacggccaccttttcacataacaagatgatttcaccaagttaaaaacttctttgggatctattcgtaaaagtatatataagagtttacatttctaacaatatagacaaatgtagagcctccattataaaacatctagaaatgttggtcaacaaatatacaaaacatacttttaaaagccactgactttataagatagtacaagaaatgttccggagctaaaatcgacacaggtcacaaaccagaacaccggcgaag

SEQ ID NO: 35272 - DNA, 508 bp, Homo Sapiens
tactcgacgggtctggtgggggcttatgcatcactgaattactgtcgcattcttgggccccatataacgttgtatcttgtgtctggttcaaatagaacagagaataagggagtgagtgcctctaatttaatattcttatgtttccatcacgtcaaattcccactaggacaaatgtatacaaatgaatcattataattttttcccttttaccctagctgagccacttgggcctctgctaagaaatgatgataaaagtgatgaaaacaaagcataacattataatgtcatttaaaaaatgaaagatttccaggagatcctttgttgtgctggaagagcacgagctgcatgtttaaatgacttttcgttttcccttttggataatcacagagagtaatgtaaccaaaataatcttggactgctgctgaggtcatcatttagttcctgctgacatgttgtgctggtcagaaagcaggggatctcaaagggagtacagccctggagacatgag

SEQ ID NO: 35273 - DNA, 352 bp, Homo Sapiens
acaaatacatttgaactcgattacaatttaacctgcatattggggctcttttctcaaaggtcatatgttgtgtattaaagaaaacttctatcagggaaccttgtgctacaggcaggccagaatttgtgatgttctcagtgggccttcaagttcattttgttacccttcagatacttgagtatcttcccctgttataaacagtatactagccaaaacaaaatggcatttggcaaagaaaacccaaattcaccgtgcatgggaatccagtgaagaaatgtttaatctagttagtggggtgggcttcggttgtcatggaaactcagctctgtgatcctgtgttgttactaggccg

SEQ ID NO: 35274 - DNA, 419 bp, Homo Sapiens
gggtaatgagcagttagtcgagcaaactgcatatcgtcatttggcagtcagtaatggaaacaaagccatcctcattcagtgaaatatactcctgaccaattgaacgatttacgtccgcaagaaacactggctgctttaaacactttaggtatttcagctttttctgaacggatgggtttaaatctaatggatggtcaaattcatttacagacggatcaattgaatcaggcgcttagccaaatagttcagcccgaagatattttaatttgtagctatgcacttgatggccatccagatcatgaggctgtcgggaaaacagtacaagcttttgccgaagctcggaacttactatgtttgcatgtattgatctgggcatggcattgggcagagccttttgacacgcgaattaactagtccaa

SEQ ID NO: 35275 - DNA, 523 bp, Homo Sapiens
tgatactttagtatgaggctttattctgtgtctatgtttaggaatgtagagattggtgtcttttgagattgctataaagtaaccattttcaaactctgttacttaaatgttaggtttcaattttctggaaaatttacgtgtagatctctccttatcagatgacaccaaataaaaatggtgctactgtgtatggaacttcctttgttttattattttaacctatttatctttctacttaatatttcaaggaattactcccaaacaaggctctattacatttaatatttgatatcagtaatgaacaaccaattgcctaaagattagcacatttgctaatggagaagatagtaaagcagataattagaattagtaaatgacctatgcatataattcagttgtatagttttgaatcctggtattgagtctattagcccaagtgtcctaaggtgccaggttattgtagtgagtttttttcattgcattgctggcctcctctgtctcatttactatagttatataaacc

SEQ ID NO: 35276 - DNA, 604 bp, Homo Sapiens
atgtacaaaagaactgaaggcagccccttgtcaacgtgcccaattgttacttgtcctcaagaggctccctcaaacccaatcaaccaattctccctgccccagaggaataagccctgtggacgcccagacccttggcataggtgcgagcagtgaggagacaactggctccagccagaggggcagccagtcctccagagcaccaaggccacctctcctcactcccccacaacgattacagaaatcagccagtgaaggcagtccatgggaagagagtatactcccggggcgccagccagcaaggtggtaaaggcacagttacaaagccaagtcagattccagacactagagccactgtcccatgtccagaggagtggcaataaaaggactggaggctgtgtgatctctgtggcagaagggtcgtagcctgccacatcctcacacatcacacagacgcaggaaagagcatcccgaaagcagaggcgcaggaataacttagaccttctgggagagttagtagctcgctatgcctggatggagtcccgaccatctaaaatgtctctgggagtgctgacagccgaaacatgcttccatggtggcccaccaa

SEQ ID NO: 35277 - DNA, 436 bp, Homo Sapiens
atgagaacgaggaccatatatttcgtttgatttttaaagagaccgctcaaatgctaaaaagggtcatcctagataacagtcaagatctttgtgacaacccagagtaattgtggacacacttccatgctgtcctgatgtcttcttcacctattaggattgaagaggagtcatggtctgcctaatgttataaggggcaagtctgacaaggataaactcagatgaaggtgctcttatttagaaaaggttaatatgatctataacattaaaatttcgattaaccctctaatgacaatacagctgatttttttggtaatttttaattgagcttaatctctcctttaataatagcaaagaagatcttgaacattcagaatccctagacagtaaaatccttaacacagagagtgtgcaggggacatggcacgcgacatcgcca

SEQ ID NO: 35278 - DNA, 589 bp, Homo Sapiens
tgtgggctctccataggtctgtcacaacatgtcagcttgcttcagagccatcgaggaagaaagtctgcttgcaagaacattataattctttgtaatgtcatcatggaagtggcattccattgttttccatagtctgtggttagaaacaaatcactggtcctgcctgcacccaagggaaggagagtactcaagggcctgatcaccaaggaggcaggatcactggggaccatcctagagtctgtctgctacagtagtcatgaggacagatgaaaaggtccacttaacttggtagttaattggtagtatatagtatactccttgtgtatgtaatttgcccttcatctgttgtattttctgtgcatttttattgtgctctatgagtcttctgcaactcacaggtaatagatgtcacaggcagactaaaaatcaaacttgagaatgttttatatacagctgtaattctcaatgcactgtaactgccccagaatcataccatttcttctcctctaatatcccttctgcatgtttggcaatatctctaaaaactggttttgggacatgatgaacatatttggtaccacaaaggctg

SEQ ID NO: 35279 - DNA, 543 bp, Homo Sapiens
tggtttgactttttccacgttcagttacagtgagcgagtccctcagcgtcagcaggctttctcagtcacgtagattatttgctgctaagtggaaaacaagttggttggtggccttttgatgtgatgccagcctcacttctggagatgtgggttttcttggaacccaaagcagagaaggctgagtggtgaggtctgtgctgttgtggatgctgggtgttcccagctgcacctggcccgctgtgtccttcccccggtggccgcctcccagcagagcaaggggggtttgacgcccacttgatccaccggactcatagttttaattaatcatgccctccagcctgcgtgcaccctaggttctatacaaactgccagctcacacctggaaagtgccgtcccccgtttttaaaggcttttgagctgccctgtgggtggcgtagttgctgtttctaagaaagtagaagtgagttttaaggtcaggttttgaaattttagatgatagaatttgaagtccaaaatagtctgaagtatttcccttttcttaca

SEQ ID NO: 35280 - DNA, 399 bp, Homo Sapiens
tctttaacggtgtgttcctggaggtcaggcttccatcctcccgttctgataatgcttagctccaggatttgttgcattatgggggttctttgatggaaagtttcatttgacaatgtaattttcttggatgcttttaatgacttaaaagctggaagaacaggaaaactagttctcttgagctctttcatgtccagtaattcccagaaattataactttatgctggaaattaaacctgctatttgaaaccttattacagggtgaattaagagtttaggtttcagaggcttttctgtgtgactttccccttagtgggagggggtttggtatgcccattaagttttatcttaaaatttaatgtgaattttacattgtactaagtaacatggcacgcgacatcg

SEQ ID NO: 35281 - DNA, 370 bp, Homo Sapiens
attccctctatgagaaatgatgtaatgtaaaagccatggtctttatcactgagacctggggaagcttataaagatgccccggcagctgcgaaaacacctgtagagaagaatgcacatttccttctttcagcaagcatccactgatttccaactctgtccacttttatagggtgtaataaagtagaaaaagtagttactgcttttaggtaaattaaaatgtctgcttaaagagctattacctatatcagttaactaaggaacagaaaagtagcatgtgtagtgggaatgttagaaggcaaaagatctagccacgattggtgtgactgaactaatcaggactcctaattttcctgactgaaaaaactaggga

SEQ ID NO: 35282 - DNA, 581 bp, Homo Sapiens
cgtgcatgttatgttatctactacttggtttaagtgatatctgtgggatttacatgtaaactgtaaattgatgttttctttttcttacctatacaacagaaaataaagggtttcagaatttttatatcactggatattctggcaatgaaatattaaatggctttaggagaaatgtgttttttacaggggaaaacaggacacattataaacctctccatcactctcatcaggcttctgacaagaaaataatagggctgcgcaggaacacgtctgttcccatcccaagcacggggctctaggtaaagacatagcacagacggttagttagcggaaagtggagaggtgccttttggagagatgtttgtttgaatatttgtatttgctttgcaaggctaagcagcaccctttggctaattttgagggtgtattggcatctgtcacctgaagtgtgtgaatcacccagattctgactcaatagatggaaaaagactaacctgctcacaaaatattcatttcatgggtgaggagttctgtgaattaccattttactctactctctaatgctcgaacctatttcacaa

SEQ ID NO: 35283 - DNA, 465 bp, Homo Sapiens
ggcgatgtcgcgtgcatgtgaagagcattgaggtctcagagaagatcccaaagaatagacagcccctttgtagcacctgggctgacaggcttctttgggagagatgacaacgaatagccatgccgggaacttgctgtgtggcccctctccctttccccacctgtgatgtgcagggccactgaccccaggtgtcctccctgctccagtgatcatggacagcatggggtcatgggcgtacacacaggtgctgataccaggggtcagtatttaacatacttgctttacagatgggaacagggaggctcagggggacactctcaaaattacacagcttttaacaggtggcagaattggggttcagacccagatctgggttcaagtcactcatggtgtgattgcggcagttccttcccgcatctgggccttgccatctctctctccgagtggacatggcacgcgacatcg

SEQ ID NO: 35284 - DNA, 557 bp, Homo Sapiens
aagctgaccatagaggaccccgatgtgcgtgcatgttacatgtcacttctgaaaatcttcactgaccatccccatctaaacagaattctctacttgacatttctgcattttctgctccctcagaatagaagctccagaaccgtatgtatcgccaacacttaaaacaccaccttccagagtatcactcaataaaatatttgttgaatcaatgaatactgttagtctccaatgtttgaaatttaccaaccctacccatcagatcaaagggtatactgacaagagtaaaaatggcgttcagtggtgggtctgtcctttagagaaaaagaaaccaaagttaggtatgtacgaccctccaagagaaatggcagagaaccaacccagccaggaaggaaaaactaaaggaaaaacatttgctgggaagattaaatgagaacacgaaacacccagcacaggcttcacatacaaaaatattcaataaattacatgttgtatagagctgttcaaatcttggtcatctatgattagaaagaatctaacaggaggaaacagttaatttt

SEQ ID NO: 35285 - DNA, 592 bp, Homo Sapiens
ttgcgatgtcgcgtgcatgtgaatttcagaacaccacagatgaagtaaggaagaccagaaaggttccaagagggaaaaagcagccacatataaagtgtgaaaaatggaattgctttgacctttccacagcaacattggaagctaaaagaaatggaagcattgccttcaaaactcagggtgaaataattcttcaacctaaaattctaaacttagccaaactgtaagtgtgcaagtaaaggctgaataccaacagatgtgcaagaaagaggaggaagccaagattatctttctcagagacttcttagaaatgtactttcttagaaagtttaggaggatatacttcaccaggacaagggcatgatcccagaaagaggaaaatgaagccagcaggaaagatccagctcagaatggcacaggtctagagggacagtgagggaagactaagacagcagtcagtatgtgatggcactgcccttccaggaggaccaggggaacaagtgaggggctctgtaagagctcacgagtctgtcagagcgggggagaaacagctctgaaattcagtttcctaaccttttgtagaaatgagaaggaa

SEQ ID NO: 35286 - DNA, 408 bp, Homo Sapiens
tagaggatccctagcgatatcagcgtgcatgtgctgacaggctggaggggggcagagagcgggactctgggacctgtcgctgtcactgccatggtagctggggggggtcggaggcatctgcaccaggtcctctggggagagcaggggaaaccgagtaagcaacgttgcacatcagctccacttggacatcatgagtatcacgctgagcatgagcttgcaccagccctgacattgtgggacatgtgactgccaggcgcttgtgtctcagctatgacatcagaagcccctctgcagggtcagaacgacagttgacatctgggtagccaattcctgggtgctgcctcatctagacaccacagaggcccagctcctttaccagcctcggccttggcatagacatcataggag

SEQ ID NO: 35287 - DNA, 382 bp, Homo Sapiens
cggctagaggacccgacggctcaacggaactttcatgctattcctccctctaaatctataaataggctgaagacttattctcctaaaatctctttcttagaatattcatcaatcggcctctgtcaaataggcatcgggcccaaactttaattcattctctacaatctgtagtaaatagatgggtgggccagagcaatatgaaggcacaagatctaacaggactggcaacatatgatgaaagattggagagccatcaaacaagcatgtacttacatgcttaaaaaaactgaatcaatctttaaattttattttgataatgtaagatgaccaatgatctttaaatgacagtaaacaaagttccgttgaagccgtcgggtaccga

SEQ ID NO: 35288 - DNA, 541 bp, Homo Sapiens
ggcttcaagggaacgttggggagagaaaatgtgtatgtaagaaaaatctgacatcctctcactgggggaggggagatgaaactccactaatactgggctaggcactttaatatctgccattcattcatacagcaaatactcattaatgcccactaagtgctaggcatttcgaagacacaatcctgtttacatgctccttactgtcagatgagacaggtaccagacacattaagaaaaattaccaaacatgtagttatatttattgttattataactatggttacgataaaagctacaatacagtatgtgataagagcagaggggcaagctgggaggttagggacgatctgaagaaagaggaggagggaggaaaaggagtgcattccagatgttatactcattaatccctacaactctgagttaagtacctttcccaaggtcacaggactcgttaaggtgtcagagccaagcttggagatgagatttcgagatcagaggcttgctctgtcgcccaggcgtggcagtgcacgtggaagaagat

SEQ ID NO: 35289 - DNA, 620 bp, Homo Sapiens
tgggcacaccatcccccagagtgctgatattggtgaccttgctgcatggcggatgctaatgggtattgactgaagggacaaggtgccttctccacccatgcttggtcattagcacatggttaggtgggcacgcgtggcctcctcttccacctctcttttggccattttccttgccctctcccccaccccctgacctctggcagcccagagctcccctcagcagtgctcacccaactccctcagggcctgaatttccagggtgagagtcccctctctacaccgtctcagtgggtgcttctgccagggtgggatctcgccagggattatgcttgcatcttaactggaatttactggggatggaagtattaacccaaatggagttaccacagaggggatttcacatgtttctcaaataatgccagagtgagccaaggtttacataaccagtacgaggtgaggggggtgggaagagggcaagcatttccttgcgaggctcctggcagctttatttctgacttgcgagtggttcaagaagcctccatcctcccacgcatggagaagacagcattgctgcagcccgttatgtcccgcgctggctacgcacatgcgggtacgggctg

SEQ ID NO: 35290 - DNA, 567 bp, Homo Sapiens
acgagccgtagggagcacgtgctgttggctgagcaggtggaggatgcaccaacggcctcttcagcaccctcagcagctcggccatctgctccagcgccacgccaggtaagatcttccagcctggagggagtggaagtgccatgtggggtcggggagggctccctgaggcaagaggtcaggacccaggagcctcccaaggatggagggcaggcaagagaaacagagaccggcagcctccaccctggatgctctgcgtctccctgtgccctgccctgtgggtttcccagctgggagccccgagcttgtcttcatggaggtagaggggcccagggtttgagacccaaatgtagtaggttccctgtcccctgctcaagagacagagccaagtctcctccccctgccttggaccacacagaggagcacaaggaggctttgtgcttggtgcgagatccctgcattctagtcgtccttgtcagggtccacccaggagccacattgatgacgttatgtggaatgtacatgtgtgcccattacgcaaaagctgtgtggggtggggccagcagagga

SEQ ID NO: 35291 - DNA, 350 bp, Homo Sapiens
tgctgtaggcagcggttgttggggatcgagtagggtccccagaaaggaggagctgaggctcacaaagaagcgaggcctggtatctgatcagttcgtggagacgtgcgagagcctgcttgtaatctggaacagtttagcagcctcggcctccctgtctctcccagccctggggagtaccggtagcctctggccgtttcattatattgttgttaaggcccttctccttgtcagtttaccaggtttgaccgcccagccctggtctctgcgtggaaacccccgggggcccctctccttccagtaggcaacatcttcagagccaaaccctggcctagcgctggcctacagcacat

SEQ ID NO: 35292 - DNA, 479 bp, Homo Sapiens
atcccgacggctgtaacggaacgttatggcacaaagaagaaagaggggaacttacagaaagtgaccacactgaagcgtcctggtcacccatccctggtttgaccaccagcctttaaagtggcaagcgggtgataacccatttcttatttccccctcagcatttcctcactgttattcatacatgtggtcatttgtactcatctcacaattgttaaaacctctttcctcccttccaggttttactgaactgttactgcgaagtctgagagatgaggtcatttaagattatttcttattggtaaattagatcgttcatatttgtacctaatctgatctttggggtaatattcctagttatgtagactggtctctcagaagagccggatattaaatgcagtactttaaactttacacccaggagaccggatgggtgaggctggttcactcggccaaagttccgttgaagccgtcgggtaccg

SEQ ID NO: 35293 - DNA, 386 bp, Homo Sapiens
gtgcgcgccgaggacccgacggcagaagggacgatggcaacgtacaaagtggaagcatacactaagacgaggttatatgctgggccataaaattagtctcggttacatgtcaggaagactgcaattctacagaagatgttctctgaccacaatgaaattcaattagaaaccaagatatctagaattcccaaatacttggacatccaacactttgataataacacatgaaaattatgtgcatgaacttatgtgatagagctacacgcagggtttagtaggcaaatacacagctttcaacatgcctatgtaggacaagaagggttgggacatcgatctcaaatttctcactttacgaagctcagcaaataaagaacagattcaaaccc

SEQ ID NO: 35294 - DNA, 614 bp, Homo Sapiens
cgacggctcaacggaacttagcagaagtggctccagtttgggtttgggtggttgggcctagggcagggactcagtccaaagcagtggtctcctataaatgtaacagatctattagtacttgaaagaaatgtcaaatttcatttagaagttaacaaaaatgaagatgtagctgttcagaccctttaaattcatccatgttcacagaccctctaaagtctatccatggaccccaggctaagaactgctggcttaggtggagcagccaggagaactgcatccccccggataggggatcgtaaaggcattagaggagggaggcacttgcctggcagaggggcaaactccaaaaaaaggcaaagatatctcccctaagtgtgaaattttaaaaaaatcaatagctaacaaatgaagctggaaaaaccacttgagacaattgggaaaatattaatgctgaaacgtaatagatgttaaggaattattgagttcttttcccttaggagtggtggttaaaataaaacgtcctagaaatgtatgaagatgtatacttgagatgccttggattagctttaaaatggttggaggacgaggaaagtaggagagtagagatgaaataa

SEQ ID NO: 35295 - DNA, 414 bp, Homo Sapiens
cgggctgccagaggacccgacggctcaacggaacttgtaggctaaggtatttctgtaaataatgtgtacagatcaattagcatccctaatgaaatatatacagcaaccctaaatgacataaactgaagtgtgcaaaagcagaggaatgtagattggctgggagaaatttaataaatttactttggaaccatatcaaaacttttaccttctatgagcaacatctaaaatcatgtcaaatagaatgacattagatatattgtcttgaattgggttattctgtatggaaaggctctggaagcataaacttctataaatatacttttaaagtatctaatagagtggctagtgccaacatttacattagggacaattaaaaaataagaaagttccgtcgaagccgtcgggtaccgagct

SEQ ID NO: 35296 - DNA, 385 bp, Homo Sapiens
actgaggtgatctagaggatcccgacggcttcaacggaactttaaaacatcctcggaggaggctattaaggttatgttccattaatataagtccaagggaactgcttgagtccaggttagaaaaatcttgttctggagcagacaatgagatgagagattctaccattactgactacggctcctgtctttcttccatcagagttaaaagcctttcacattacgcttttctttaaataaagtggtaaaggagcatacgttcggaacagaacactgaaaatgtaatttaatgcgtgaactcctttcagcctcactccgtacagaatcggtacagggataattactttggacctctattttcattagctgaaagttccgttgaagccgt

SEQ ID NO: 35297 - DNA, 443 bp, Homo Sapiens
atagctgttctcgaggatcccgagggttcaaggaacttcaaacctatatgaataagaaaaacaatgttcaaagccccaagttagcagaagaaaggaaataataaatattacagcagaaataaatacagactagaaaaagcggtagtaaggactaacaaagctgggcattgcttttggaaaaggtaaacaaaattgacaaacctttagagtaagaaaaaagactcgaagtgaaagaggagacattacaactgatgccacagaaatacaataagattataagagactccggtgagccttcatttccaacaaatggaataatctagaagactaaataaattcatagaaacataaaccttccaaaactgaatcatgaaggaaatataaaataccatcagaccaatagcaaatgagagtgaatccataattattaaaaaccttccccc

SEQ ID NO: 35298 - DNA, 524 bp, Homo Sapiens
cgtcagacgatccccatagatctttgagcatcacccctggtaaaactgtatcattttttataacctagtcttagaagccatgcagcatcatatccatcacttccgttggttaaaagcaaattactaaggccatatgtgttctggggaggggaattagactccaccttttaatggtaggagtgtcaatttgcaacatgtttaaaatcaccacatgtaacttctgataaatagatttataaacagtacatttgtacattagaaaagtttaaacataagaaacctaataaataccctcttttttatattagaatgaaatataaaaacccaaacatttaaatgttccagcaaagctaatcctgagccaacttgagtaggcagtctgtctcataatcttcctgcacctttcttctccctgtgtccattccctccaggtcaggcctcctgtgcacacatacccttctctcccaaactaggtaggacattcacagtagctgtacctccacggtgatgctcaaagatcttgg

SEQ ID NO: 35299 - DNA, 612 bp, Homo Sapiens
atccgaggatcccaaagatctttgagcatcaccccaaacttaatgacttaaaataacaatggttgggctcacagatacgcagttggtgcagagttctgtgggcccccaggcttctcccctcacccacttcctaaggtcgaccagggatttgcctcgtgttcctagtcttttccacacgaagctgcacctatggctgcattttatgtcatgataggaatagaagtcactacggcactcacgctagaggaagcaccatgcactgtagaaatcactacggcactcatgctagaggaaccaccatgcaccgtattctggaataaaacagaaaggaacacacggacattggttcaggacaaaggaagcaacaccaaaggcttggtccagacagccacgtgctgcttccgagctgactgtaaagccagcaggcccagccctcatcctccctcaccccacagagaatggacctcagacctcagacacaagcaggtgtccaaattcccaggagcacacagactgccgggacacccagagcttccgattcaggaggcctgggtagggcctgagaatgtgcttttctagcaagtttccaggtgatgctcaaagatctttggc

SEQ ID NO: 35300 - DNA, 510 bp, Homo Sapiens
ttctcgaggatctccaaagatctttgagctcaccatgatttgaaatgcagataattaagaataaacttattaattgtcacaaatcatttaaatctgtacataaggatgtactaaattaatcaggcatcttaaaatattaatacttttttgcagaatattctccagaagcagttgtacctgcatttggtagtagaaaatcaggcagaatttgtttcccaagactaatcctcattttattctgatacacctacctgaagaaatgccttaatatttattaagatcctaatatatgcctgactctatgttaaaggtctttggcctacttaatttcatgtaatcctcacagccatcctaaaagggcagtattatcatctttatttggcaagtgaaaaattaatgtgcctcaactaaaggctggtgctagaaaatgctgaagccagaattaaactgaaatctaactgaagctaaaacacatgatttttccattatgccaagctgcccacccagagg

SEQ ID NO: 35301 - DNA, 633 bp, Homo Sapiens
ccatggcagcaagctatactgttctcaattttttacaatatttatcacaactctgggagaaaacaaaacaaatcctatcctatttacggatttgtgctacctagtgaggagataccgctctgtttagacaaattaaggcacttcacattcttccaccaattgaaagtttggtatcttacagttctttttttaaataatatatttattgagcactttctatctactagtcactgtgatacagtataagtaaagtgggttgtctcatttaatattcagaataaccacatgaagtatgaactgccattatctttcccctttgtacaaatgaggaaagtgaggctcacagaagttaatgggcccagggtcccacaactagtcagtgcagaggtgggaaacataaccagattggttcggcatgaacttgtgccaaatttcctccaaagttctcaaaaggcaaggcatgtaatttaatcccaatttagcataccaacaactataatactagatatgtaggaaagtgcttaataatcgtattttacggatgattcagtgtctaaattttgaacaaatttgggtaagatacaagtcacacataaatggacagaaaatgtagttcttcattcaatggttagc

SEQ ID NO: 35302 - DNA, 579 bp, Homo Sapiens
ctgtgcattgacagaaaaatctcaggcagcacttaaagcaggacagcaatgaggcaagagcttaatgatagctatcattatcagcatgattatttccatagtcccagatcagtcttaagaggcggcaaacaatcaggtgatatagtttcagggctagataaaggctgtcccctaccctcaaataatacttctactacggttgctggtgctcgaattttcacccccagaaaagaattccttgggctttaggctcagttggtgaaaatgcaaagtcaagatggatggaattttaaacttatttacatcaagatcacccaaattggttagatatcttcaaggcaagtttgctaaggaaaggaaagggaggatgtgagggcataaaaacaatcttagggcaaaaatggctaaatgaggagccagttttccagtgagacagacccaattatgcaaacaagggagtgggctccaggttcaatattaattcgcaaattagtggccagtaccaatttagcaccatcgctcgtctcctcctcaaaatcatctatgatatagcggtgatgctcaaaggggtaccgagct

SEQ ID NO: 35303 - DNA, 429 bp, Homo Sapiens
gattaccgtgtcttatttggttctgtagccctagcatgacgcggtgacggcccataaaaaggctgctacgtgaatgaatcaatctgaaaaactggctcatcttttaatgctatagttaaaatggcccactaaggagaattcccaataaagagattccctagcaggtgaattaggtgaattcatcaatatgaatgtaaatatcatggaaatctgaagccattatgcaaaacaaaacgttattatggtaggttagagtgagttaggaggaccccaacgtaagtgcactactaatgtttgggacaattagtcttgctcaaaaatattaggtatctttgacatctaatactaatattccctgttcatgtaacttgacaaaagtaaagaactcttttgcaattaacccaaatgcattgcttaatctcaaacctt

SEQ ID NO: 35304 - DNA, 413 bp, Homo Sapiens
gatttaattagagtgggctttacacacccccacaagtgtgaagatacgagtcaatctattctgcccaatctgaacccaagcatgggtggcacacgacacaattcggagaggaattcagaactgcctcttggattgaaagacctccttgacctggccctgacactaaagaaaaccccacatgtacccaaccatgagcctggctttcatctcaacaaaatgtcttagttccaacctgtttatcaaatcatctctccagttacctgcaaacatgtgggaaaaaagaaccaacaattttgaatggaaaggacttggaaatgatatagattagtgggtgttccaaggaggtctgtactagccaagtgggcagaattccatcagagatgtgaggaaggggactataggaaagtgtccag

SEQ ID NO: 35305 - DNA, 422 bp, Homo Sapiens
ctactgacatacggtggaccgctggataatcagctgttacaaggatgtatatgtggtagtctggcccagttcaaaagttaaagacaagtacctggggatattggtttttatttctttttaactcttattttaggttcaggagtgcatgtgcagctttgttaaacaggtaaattgtgtgtcacaggggttgcgtgtgtacagatatttggtcacttgggtaataagcacagtatctggtaggcaattttttgattctcaccctcctcccaccatccatcgtcaagtaggccccaaggtctgttgttcctttctttgcatccatgtgtactcagtgttaagctcccacttgtaagcgacaagatgcagtatttcgtttccagttcctgtgtaagtacagttaggataatggctttcagctccag

SEQ ID NO: 35306 - DNA, 553 bp, Homo Sapiens
tcacaggatcttcaaagatctttgagcatcacctcaaaacgaccccatatcatcagcagcttcccattctcccctcccctccagtcccgtggaaaccactcatctgtattctgtctcagtggatttacctatttgggatacttcatgaaatagaagcaaacaacatgttagctttggtgtctggcttctttcacttagtatgtttaaggtccgtccgtattatgcagcacatattagtataccgtttttatgactgaataatactccactgtatgcgtacaccataattggtctatccaatcatctcctgatggaaatctaaatggtttccacctttgggcttttatgaatagagctgttaaattccacctttgggcttttatgaatagagctgctatgaatatgcatatacatgtatttgagtatctgttttcaattctttggggcatacacaacaggtggaactgctgagtcacatgggaaaccttagtttaactttttaaggaattgccatggtggctggtgatgctcaaagatcttgggggtaccgagc

SEQ ID NO: 35307 - DNA, 564 bp, Homo Sapiens
cacctatgtactgggctcaacaatatgtcacactaccctttatggggagggcccatgcaagagagtcacatcatctaaattatgggcccaaaaatatgtcaaaatgctatgagtatggctcaggaaaatgaaagaatcacatgacctagggtttaggcccaactatatgtaacaaacaccccagttcgcagagcacatgcatgagcaaagagtcacatcacctaggtgctgggcccagtgatatgtaataatacttttttggcagttcccaggcagaagaggagtgtcacatcacctaggtgattaatagaaagatatatcataaatacttctgtgggcggggcccttgcaggagagttgcattacctaggtgttagacccagtgatattgtctcaacaaacaatgtgtgcaggtccccagactggagaggagagtcacctcatctaggtacttgaacccagtgatatgccacaatccctttttgggcagagaccacagagtaaagtcacatcacctagattttgggcccagccttactgtcacaatttcccaagaggaggtcc

SEQ ID NO: 35308 - DNA, 558 bp, Homo Sapiens
gccgaggattccaaagatctttgagcatcacctcagtcaatttaaaaagaatgatccagatatacatcatccagcattattaagaagccaacacatctaggctctaggtcagacatgtcttagcagccaatattgtatcagacaaaccaccatttcacatacatccatttgcacatttaaaaatgagagcacagttaacatcatgctggattgttaccacagtcccatatctacctttcagagaatcaaacagtatgacacacataaaattcctttgtaaatcagctctattaagagtgaactaacttacttctaactgggaaaaagagcttgcagtatggacacaagaaaccaggcaggaaagaaagggaggtgggggtaggatcttgcaatgaagaacaaacccagctatgttcagcttgctatgccacttctatgggccacaggaaagtttcacaataagagataaataaacaattcaattttttccactttatagcacaactgaaagcaaaaccaatacagccctggtgatgctcaaagatcttgggggtaccg

SEQ ID NO: 35309 - DNA, 641 bp, Homo Sapiens
ctaattatatgtaggatgtcaccaatgccttcaacaatgcaaaacctgacagaccctttttcctgacctctcatttcctgacatatagcattgggtgtgttaaccatcctttccttgggaacacatttttctcttagcttctgtgatacctttttggttttttagatttgacagacatgtgctctttttcccctgaccatttctaaaatttggatggtttccatttgtttattactctttacttctcatattctccttgagtgatgtccactatccatggcttcaactactacctatatgcaagcaactgttaaaacaactgtgtatagcttttaggtggtgatggcggtatatctctgtaaatttacaaaaatatcattgaatggtaggtttcaaatattttcagcctaggcctttgcctacaaccgagataacatttgtccattacccatgtccattcagatttggcttgaatacttcaaacagcatgctgaataatctcatttttcaacccaacactgctgctttattccccaaggttccatattagaccactttcaccactctatggagagtactctgcatgagcttatcactccaattactatgtgaaggcttccaaatccaaaatgttatcccca

SEQ ID NO: 35310 - DNA, 630 bp, Homo Sapiens
tcgtcacctaattgagttgactgcggtgaacagctgtcataaccagcgttcctccgacatgtgacctctgtgtggacctcaaagcacagggatagcacttgcttcaggaggcacaaaccatccactgcagagagcacctgaaggataaatgacgcagaactctggcccaccgttgcttcatgccaagtggtgtcaaaattctaattacacacaggaaaggagatccagtgagtccagatttggacaacctcatctcagaaagctagaggcgagagctgtctctttttctggtaatcccacagcacagttaaaggccctaggacaaatgttctagtctaatggtaggcaaagcatgcaggctgatgcctgcttggtaactaaagtttcattggaacacagcgatgctcattcattctatggctgctttcatttacaatggcagagttgaatactttgagagactgtgtaacccccaaggctgaaaatatttataatctggccctttatagaaataagtttgcagaccgttgttctattccagggctgggtccagtctgcgccaccctcagctgtccatctagatctgttctgcccaggaccaaggctatttgctatgtgtggcactgagcc

SEQ ID NO: 35311 - DNA, 521 bp, Homo Sapiens
gaaatgaaaatattgtatagcctgagacttagcaattgggcagtagacaaaggaacatagatatcacaatgtggaaagaaagataccagtgtaatgtagtgacgaaccatttgataaaactatcagttgaactatggaagataaggcaagtgtctattgaccctatagctctaaggaaagtagttggaaatacctgggatgttagtgtatctgggtccttctcacttgtagaacggtataacaataaatagctgaagtcacgaagacatagacaggtttacaagcagacataaaaaggaatctggggtctgaagggacaggaaaatcaggctgattctagatcccaaacacacacaaaaaaaggactaaagatggttccaggcaaaagaaagacccgttaagatatctcaggattgcaaagtagcttagattcagggagttacttttctacctattccaccccgactactctttcagatgccctcaaattagctccattacgttgaagagagggtggaagg

SEQ ID NO: 35312 - DNA, 381 bp, Homo Sapiens
agatcccccaaagatctttgagcatcacccccactattattgtgtttctcccactattattgtgtttctatctatggcatttcttaggtctattagtaattgttttataaatttgggagctccagtgttaggtgcatatatgtttaggattgtaatatttttctgttgaacaaggccttttatcataatataatggccctctttgtctcttttaactgttgttgcttccatgtctgttttgtgtgatataaaaaaaccttccccaacccattttgggtttcctttggcacgaaatgcctatttccaccccttgactttaagtttatgtgagtccttatgtgttaggtgagtctcctgaagcaggagatggttgggtgactt

SEQ ID NO: 35313 - DNA, 426 bp, Homo Sapiens
tcacaggattccatcaaccctaaatttattatcgctttatcaccatgctcttttctactcctaccccatgtatggtttagagaccaactgtgtggtaattgctataataaaggagattataggagcctgtcccagaaacaaagatacaatggttcctcctttacccacagtctggttttccatggtttcagttatctgtggccaactacagtctgaaagtacatgagtacagtacaataagttattttgagagagagagcccacgttcacataacgtttattaaagtatatggttataattctattttattataaattatggttatcgatcccttactgtgcctaatttataaattgaactttattataggtatatatgcttgggaaaaaacataataaatttagggttgatggggtaccgagctc

SEQ ID NO: 35314 - DNA, 469 bp, Homo Sapiens
gccatcatcctaaattattatgtgaatattatgtatatatttcaatctacctgttttatatttctataactgcttgtttgactaatgctatgactttcaagattgccatgctaatagatgtagcactatttctataatactcaattgctgagtatccattttctggtgatgaatatgtatgctatttccaatatattgctattatgaacagttctgtaatgtttaagtttatacatattttcttggagactcattcatccatccatccagcaaacactaattttgccactggtacatattaagccatatagcaggcattagaaaaatatatatatataaacttggttcagctcttgagaagtccagacactagtggaggagaaagatgtgcaaacaaattagtgtaatacagcttgctagtgcaatattagatacatgtatgtatgtatatgtacatgtctatctgttc

SEQ ID NO: 35315 - DNA, 433 bp, Homo Sapiens
ctccccctggatgttctactgcagaaatatcagctagaaccatgcagtcagtaggtgtctctctttgcttactttctgcctttttatttcctcggggagatgttgctagctttcaccttcaccaataagcaaacctgctaatatgcttaatagttagtctctaggttagtatgcatcacacttcacaggtgaaagtgtaactgtgacttatttcggtctcatcacttgatccaaataacagatcccaccttcccacttcctacactgaaagacttttaaagaaggtagtagacgtccatgggtgaaatgtgggttaaaggagttagatcaagccctgtttaatgaattacaagtctttaaagcaaaattcacattgagaaccctgtaaagtaatcataggagggcttcgcaaatgaaagaggctgcaaaagac

SEQ ID NO: 35316 - DNA, 455 bp, Homo Sapiens
ggcgcgacgctccatcagcttggggaaagacagccgagaatatgattcatggaattgaaaactgagactctgtggaggactcagggcagtgtggctttaacgaccccatctacttgagtgcaaagcagaatgcagcctgcctgctttgagtgctgagacttgagagcaaaggggagtaaggaggctgctaggggaacccgtggaagtacagcggccgcaggaagtcagaaggaaggggccaggggagagaaggaggcccatgcctaggccaaaactgtgtcactccaatgcaaaaaatcatgtaggcaacacaaacactaaaaagtgaatagtcacctgttatagttctttgttctacatgttgctaaacaagtgtttgggatgatggtgtcttcactaaatttctgactttcaacaatgggttcggtggggttcttgatggaagcgtcgcgcat

SEQ ID NO: 35317 - DNA, 469 bp, Homo Sapiens
gggtcgtctagaggatcccatgcgcgacgcttccatcacagcttctgatcactagactctgtagtactacttttgtatttatcacatgcttaatacttaccgatgcacaaattattttaataagtacattaagctagtactgaaagtaagtgaaatctgattatatcgtctttaggcatcctaacaaaatccactatgcctttatagtcattaaattatcccagctctggaatattattggcttagttaatactattctagctgaaatcaaaacacattatagatggtatcactgatgcaaagaagaaaatctcctaagtcttccatctgaaagtcaatagagagggggtggaaagaaaacacaaaacattaactcaacgacatggtcttaaattttctagcatacatagtttaatcttgaattagtgacactgaagccacggctggggttgatggaagcgtcgcgcat

SEQ ID NO: 35318 - DNA, 403 bp, Homo Sapiens
gacccagcgcgagctccatcaacacatttccttgaaggactcctgctttcctctgggtcttctgggtattctcttcctgatttactcagagatcacagcttttctgtagaggcaacagttcttgactcaagaatatcgatcagtggttgtctctttacagacgggatactctacctcagcattattcttatgtatgtactgcaaaaaactagtgtgataatcagcaacaacaacacaggctccatggcacaatactccacggcagatatgcactctccagtgcacaacacttaattcatacagggcaaatatcaccattctctctatttccatgcaatcaacctgcattttagctcgtgatctgcccatccctccggtatggatggcaagcgtcggcgcatgg

SEQ ID NO: 35319 - DNA, 527 bp, Homo Sapiens
acaattcatacattatctacttcccaaaaaagtgtgaatggttatgtacactttagctataaaattaagagtcctaaaaggtagtgtttattgcagatggcagtgaggggtggaacacaggtctggcatcagacaccttgtaccctgattatgacagtactttcttctgaaggggagctgggtatccatctgtgaggtggatttttaagtaggtggggtatgtgtgttattatctgatgtatataggcttggaggcaggagaggagagttaaagcactgacaagcaaaaacggtggtaaattaccattctcatgtaaaggcagcttcctacttaatcaatgtacacttaggggttggggcaagtcacatgttgggaaaaggcatcaaaagggttaggacgaggacaactgcagcaataaatgctgccaattaaaacatatggtgtgactgggaaagggtatacaaagacttttagaagctgcgggggtgatagcagtatcttatttatggatggaagcgtcgggcat

SEQ ID NO: 35320 - DNA, 479 bp, Homo Sapiens
ccagaggatcccagcgcgacgcttccatcaagcagctgacaggctagtgggagagaaaaatgaatagataattacagtgcagttggtcaagggacagaagtaggcaaggtggacacagaagttctgagcacataaaggaggcatgactgacccacactggaatgatgaaggaaagcttcccaggaccacatgacaaatgtgaaaggtagccctctaaggaaagagaagggaggaaaggttaacaaggcagaggaaatgcaatgcttgaagaaggtttgtgcatttagaaaattccaggtggttgagcacgagtgaagcatgaagtcggcgataggagtgcagtgagaagtgaggtaggagaaggaggtgggagtgactttatggatggcttggtgtgtgtctacagggatggcacagtatcctgcagaatagggattctgcatggtgttggcagagaggtggatggaagcgtcgcgcat

SEQ ID NO: 35321 - DNA, 656 bp, Homo Sapiens
ggatccgtccacacatggtgaactagaaggcaggcaggactgtaactctgtaggctgtgattcagagagttctgcaacgctcaccagctgggtgcctaatgcccaccatggaagtttcccttctgtgtaagcactgttgctagaaaacttgtgtataatgcaaatgtaagttgaggtcatgtgattggtttccaaaagctatgcacaaagctcactgtaagtcattatattaatatgctgaaaaaattcctgctattaatattacctagcagagcaagatctttacagatgggttatgggatgggtttctgagagtggaagtagaagtcagggtatcattggcatgccacaagcctcatcgctgctctctgccctcatgggattttctttttaaaagcttttgggcatcctgtatcaaatttagagaaaaattgaaacagcgagaggtgttaggtgacagaatcacagcttgttaaattttcctaagttaaatggaacaagattaaactcaagaggataatggaaaaatcctgcattgagattaaactatccacttacaggtaaaggacatcagggacctcagtttctgttttagctgacagcatattgattttgagccagttgggtaatgtatagctgttgagaacaaaagtcag

SEQ ID NO: 35322 - DNA, 424 bp, Homo Sapiens
tctagaggatcccgtgatgttatcgcccaacactacatgaaaacttttacatttcatatggccaaatttgttaatattttcttcttactttttggtttcctgtatagtgtagaaggtctctcccacccccaacttttagtctgctagagttttctttaggattaatattattaccttttatagagtatggaattcatagttagaactggagctgaacctttgaaggagggaaaggaaacaaacactgacaaagcaaggtggtagatcttgacaactgatttgatgtggagtgggcacgtcaaaaggtgtcagtatgaggtaaaaaatatattactgagcttgtcaggagtatgtgtagaattttaggggaagtctaagttgtaaaaaaagggcttattaaagtatctgtgttggggataacata

SEQ ID NO: 35323 - DNA, 385 bp, Homo Sapiens
gttcctttatgtacagaaccctgatgctaatataaaacacttttcaagattatacacattatatgtgtctacagcttaaatgttatcgagtcactataattcaaagagatttaagatagcaaagggcattacctgtaagaataagaagaagccaggaaatataaatgggctgctctcttaaactgctcaaacagattcattggtataaaggtaaatgccgttgtacttgtatgttttaattgcattattctgttggaaaaaataagagtcattctaaatgatgctgtatttatcacaatgtatacacatctgcaaaagtcacaagtcccacagcttacaggtgacaaaggaacatcatctgtcacaaagatattgaggattctgt

SEQ ID NO: 35324 - DNA, 439 bp, Homo Sapiens
tgcaagctcggtaccccaccactcctatagatcagtagagcaaagggctttctttctttgcttgactcaaagatgttctcacaacaagtacataaatggtttcttgtacacatccttaaatatctgctgagtgcctattaagatgttctcacaacaagtacataaatggtttcttgtacacatccttaaatatctgctgagtgcctattatgtgctacacatgatgctcattactatggatgcagctctgaaagagacagccaaaatctctttgctttcatataacatttatttcagagtctaatgcattcacacctagaaactaagtttaggagattattcataagaggaaaaactcaggcgactgataatcagaatagaataatctttgcaatgacgttctccaaacagactgatctataggagtggtgggggatcc

SEQ ID NO: 35325 - DNA, 363 bp, Homo Sapiens
atgctactctgcacccatgtgagaacgcagagcagtgataaagcttgggagaggcattgatggccattgtgcccgcttcatgttgggcactgtgtgagcctccctgccctgcacctgccaaatatgggctctgggtccactcctgggtctgaaggctacctctgttaccatctgtgtggcctttggcttacacacttggcgaatcgttctgaatactcaccgtgtgccatggggctgatctagttggagctggggtggggaggagccaggacagtctctctaaagtgacaacctaagctgagtgagagttgggggtgagtaggggggccctgaggtggaaggaagagagtacatttgataaat

SEQ ID NO: 35326 - DNA, 432 bp, Homo Sapiens
ttgtgtcgagaggctctagtatgttgtaactttgttctcattattttcaaagagctccttgatttctgccttaatttcattatttattaaaaagtcatacaggagcatgttgattgatttccatgtaattgcatgattttcagcaattttcttagtcttctatttttactgcactgtgatctcagtatgtatttggtatgatttcagttgttttgcatttgctgaggattgctttatgtccaattatgtggttgattctagagtatgtggcatatgatgatgtgaggaatgcatattctgttgttttggagtgcagagttctgtaaaggtctatcagatccatttgatccaatgttgagttcaggtcctgaatatctttgttcattttttttgcctcaatcatctgtctaatactgatctataggagtggtg

SEQ ID NO: 35327 - DNA, 392 bp, Homo Sapiens
ttcttttcattatctacctagaccacatctaaatggtattgggaagcatgccctccttagggggctgtatgggcttcagaatctgccacctgcttgcgggaggttgaatgccagaggttgttttaatttcaaacattctggcaggattctgtaaactatatgtttggtttgtccatccatttcccttaacatttagaagcatgaaaagaaaaatatttggtagacatctaatgtgtttacttctagtcagtgtctcatgccagtatctgtttttcctatacacagttaccagcttgtctcatttctttgtccttatgcatctgcctctctcaactctgtggcagctatgtggaggccatctgaggcagactggttcaaaggctaccttcatt

SEQ ID NO: 35328 - DNA, 455 bp, Homo Sapiens
gggatataggttaaaggtccaacaaagacatatagaatgaagtgtaggataaaccagacacaaaaattctaggtgtccccttcccagggagtcccacatggggagaggggttgcatttaattcttcagtactgatgtgatatgtggcaatacatgctaagtctggccatctggggaagcccaccaagccttggttaccaggttttattgaggtgtcagctgtgactgaaattagctattcagtctcctatcccccagaggtcggactcgcaggcatattaaaattcatttaatatgcagttaaaacagatgaaaggtgaaatttatagtatataaattaatcttaagaaaaaggttaaaaattttaaatcttacaaggaattttaaaattacctttaatgccaccatttagatataactggtgttaccattttgatgtacatatttctccagttg

SEQ ID NO: 35329 - DNA, 538 bp, Homo Sapiens
aagtagctgggactacaggcacgtgataccacacccggcctgatttaatactttttaattggtatcatagctactttatgacatttttcatattactgttacgcaaattctgaatgaaacttttctaaaaagctgcacaacgggcccttctaaataataatgctaccttaattgttagtgtgcagctcaacagatccgaagtttccccatcaccctatagaaactgagcactattttttacatcccttttcaaaacaatagatgaggtaagaattcgaaaattcatagtttgttttcaatatgaataaaatttgtcccgtttttaagttgtattttcgtaatgaaaatcttagctatatcattctcttttttctctccttgttccaaactttcaggtttgtgtttaatgtctaagaaaggaaatactagaactttcaatttagttaaaaaacagtaacatcttaagtgtgataaaccaaacagaaatgtctctatgttaggcaaagtcacattccccagagattactaaacagcaaca

SEQ ID NO: 35330 - DNA, 496 bp, Homo Sapiens
aaggatgagcgagaaagtggtaggaccaggattcaaacataggtctctctgactccagagtccgtgtgcttcaactctaggctctgagaatggatgtgtgtccagctgttcttcaagccaatttcttccagagtccctgaaaatggttggaaatggctcattgtcatggtggaagagcctgctgatggaggaaataaaccactaccacagccaccatcatcagaaacaacaactctatcaccatagcaattggtggtaggatcctttgaacctgggaggtcaaggctccagtgagtctcagcagaggagtagggggtgggtggcagctagggttagggttacggttagggttaggccagtccagttgctgaggtgaaacggctgggaagcatccttctccccaacagccaaatcataaatcaactctgttgtctgtgccttcaaacatgtcctgaacctgccccatctcaccagctgcactaactccctctctagc

SEQ ID NO: 35331 - DNA, 361 bp, Homo Sapiens
gtggaccaacaatttcagtggccaagaaattttatcatcccaggcacaacatttcttgtatgcttgatgtcaattccatgtacaagtagtccttccctgagctttactttccactttttgagttaccctgcagtacaacacagtaagatattttgagagagagagaaaccacattcatctatcttttattacattatactgttattatttggtctgttttattattagttattgttgttaatctcttactctgcctaatgtataactatcataggtatgtaggtatagggaaaaacgtagtatacacagggtctgatactatccagtttcaggcactcactgtgggtcctgcgaacctatg

SEQ ID NO: 35332 - DNA, 481 bp, Homo Sapiens
caacggtcacacaggcagcatgctggagcgaggacccaaaccccagcaggtctgactcaccatcagatggggaagctgatcgcagcttctggggaggatcggctcatacatccacttaatcagcgaagtcagatctgcccaacttaactgacaatgtcagctacacattgtaatcttgaaggtccatttcaaggctctcccgtctccttgtttctctgtagcctaaaggataatgagaaagccttgcagagcacagaagctcaaggaaaaggacgggaggccagggttagtacccaggagagcagtgagtgacctcagggcttagattccagcctcatatgctcaaggagtagcaggtagaaggaaactgtggaaagaaaactcctctctctgttcattcattcattcacaaatattagtggaaagcctatggtgtgccttctctagctgggccttgccatatgcaagggtaccgagctcg

SEQ ID NO: 35333 - DNA, 404 bp, Homo Sapiens
ggacacgatctggtggcagaaggtttatatccaaaaagatgaaacaaaggaaaggggtagatataaacagcaatctgaagtcagcaagaatcaggcatggaaacaggtgtttgcaagtatccacacagtccccatttcagaaaaagttgtgaaaagcagactactattaatctcacctaattcaggttaagttagaattctcagctgttggctccacagcctatactcgattaaatcatactgcttcctactaatactagctgccactaattgagcaactattatgcggccaaagtctagacacatttgctttttttgttcaggcagggtctcactgtgtcacccaggcggaagtccagtggtgtaatcatagcccactgcaaccttgaactcctgggctcaag

SEQ ID NO: 35334 - DNA, 420 bp, Homo Sapiens
gacatatggcaaggccaggactagtatcttaatgctttccaaggagggtaaacagtggagcaccgaggtcatgattgagagatcggctgtgcctaagtcctgccactcactctggacgtagtaacggtctgagagattgccgtggaatgtggagatatgaacaagagtccttcactcaaagaacaaaggagacatcccgggaagtcacaaaaccaagtctaggttcaggtagagacttttacaacagtgcagatccccagaccttacctttttggatcctggtgagtgagtgtgggtggggcctgggattggtctgggaggctgcccaggtgcttggggtcacggtctcaagacccacctgtgctggtgcagcactctcagaactgaactggacgccccacttggccttgccatatgcaa

SEQ ID NO: 35335 - DNA, 355 bp, Homo Sapiens
atgactgtgtatatttatgtagccatcacaacaacctcacagtgattattcccattttagagattaggaaactgatcctccaagaaatgccttctccaaccattgttaggtagggcgaagcataggaggaaactaaggctcagagcacttacatggcactgccaggatcttaatccaagtcttcccatttaaagttcaaggcccttactgtaccaccaagctgccccctggcagtcaacggaagtaccacctccaatattctcttattttactacataaaactgctgtcagtttctgctgtgggcttcgatgaatgtgctctcttggccttgccatatgcaagggtaccgagctc

SEQ ID NO: 35336 - DNA, 490 bp, Homo Sapiens
ggttcagttttgtgactcagtttctctagctgggcatctgtctagtcctttgatgtggcagtacacccccagcatctcccctagcagacccattggcttcaattcaaaatctggaccacctaagaaggaagaatagcatgggcataccaaagtgcaggagctcctctctctaagcctgtaagtatctgtgactatgccccagggtagtgggaacaatgcctcttctttacctggaggagtatcatcactgatgtaataacacatctccctctgtcttgtagtctaaacccagaaagggcaaagccaagacatttatgtctggttgcaacacttcctttcgctgtctcctttccttctctctcatcctattggcaaggacaagatatgtaggtttttctattaactctatatcatatcttttgtgtcggtgactgaagattagccttaaggacagactgggccttgcccataggcaagggtaccgagctcg

SEQ ID NO: 35337 - DNA, 484 bp, Homo Sapiens
ggaggagacaggagagggtggcgaggagcaggaacaggcagaagactcggggtctcgattttattctatgtgccatgggcaggaaaggagagatgagagtcaatggacaccttaagatcactgaagctgccaggtgggaaatggattgctgagcatggagagcaggtgcagaggaccagttaagaccagttaggaggctgctgctgtaacccagctgggatagctgtgtcctaggcaaagatagcaacaatgaggatagagcgagtggccacgttggataaagttcagaatcacggaacttgctgactggagaagagggcaaaagcagagttagcacaacacatgagttatgaccagcttgagcagctcagcagtgggtggtaccatttacagaacagagatggcctggcccgagcccatggcgccggaggaggcacaagagcgtttggctttgggtttacccacccagacaggtctcgggctc

SEQ ID NO: 35338 - DNA, 427 bp, Homo Sapiens
atatggcagagcaagccagtaatataagtgatagctaacttttcatttattcagcattttctgtgcactattttaatttcaccctcataactctatacggtaggcactgctatatccccattttacagctaaggaaattgaggcacagagagataaagagacttgtccacaatcaggcagctagttaagtagcagagccaggatttgaacccagctctcctggcttccgacgacctcacacttcactgctacactacgctgccttctccaaggggcctcctcactctgatggctgctgccgccacctcccttcctgggcatctgcccctctcagcaggcagagttgttctacacctccaagtgcataacctttcatatctgtcaagtatctacttcaatgaagttatcttggccttgccatatgcaa

SEQ ID NO: 35339 - DNA, 534 bp, Homo Sapiens
tgcatatggcaaggcaagagagcagatttggacatgtagaatttctccacgctcctcctactgtccccatcttaggcctggctactgcgggactgacaggcatggctggctgtccatccgtatccttagtttgattgcatggcagacatgaggaaggaaggtgagaactgagctagaaagttggcatttggtgctctggtttctcaatgcaagaaagtaacactttggcttttatagaataaccttctgaggaaattaacaacccgggcgtttcacccccctgtgaacttgattggagcatggtcacaatttgtaacgaaatgtgcttgcatgcccagtgctaaagatttctctctgtctaccctctaggctgtggaaaggtctgttctaaccattagcttgtatctggagctcagatggtgccggacactccgtaggagctcagatctgttgatagaagccactagagaatgggacaagcaacaggaggtgttttgctgccacttggccttgccatatgcaagggtaccgagc

SEQ ID NO: 35340 - DNA, 547 bp, Homo Sapiens
catatggcacggccaagtgataaagagaaaatcttaattgtaaaggaagggaactagagcaaaaataaattttagtagctctgttgaacattaaaaatacaccataactatgtatatttagcctacagaactgtgactttttgggaaggtctcacagaaaactcttcactgtgcactcatttgttcatttatgcaaaaacatttatttagcatccaccttctgccaagcaagtggttggtggcacttcagagacatcagtgaataaaatcgccaaagcccttgggcagcttaccaactaactacaagtgtacccaaagagcaaactactgcgtgtctttcctgcctcatttatataatttttcagaaacacagagcaccccacataatcatccttattcctcagaacatcagctctaggaacatccctgggcacaggctgccagggtgcagcagcttagctgagagctgtggtcctgacattcaaactaggccaccgggctctggtcccacccaccaccttggccttgccatatgcaagggtaccga

SEQ ID NO: 35341 - DNA, 383 bp, Homo Sapiens
atggcaaggcctgtccatatgcaatagcatatggcaaggccaaggattgaatcttattcccttatcctctgtgtctaggccagtgtctcatttgattattcagaaaacaactgataaactgatgggaactctcacaattattatgaatatcaaacaaacagatttgaatgtgccttgcaaattatgaagtataaaaattaagaggtcttaaagtgtttaatttcttagttatgagcataaagaccattctaaagatttccataatttatcaaatattcaaaggctcttaagtgttccatgcatattttaaacatataggctccagtggaatgaaattctgctcaactgcctattataaagtgtcttggccttgccatatgcaa

SEQ ID NO: 35342 - DNA, 452 bp, Homo Sapiens
catatggcaggcaagtagggaaagggatgagggtcatgttaattttcacttgaatctgttttcattatgatccttcattcccatgagcatctgtgcctggtgcaacaagttctgattatttttggttgaacctttctagagaatcagtccctggttttctgcctcattaagggagtcattctaggtgggtctgattatttcttaaaatgagtttcaaacagttttcctatttcaaaccttaccttattctttgccttcagagatacttgtgcctcaaattcttgagttctggaattctatagtgagagatagatgtagcttgtatttagagaagagtatgtatcaaattgagagaaatcctacaacagacttctggtgatcgttaacggctttcacttcctaaataaagacattcctaactcttggccttgccatatgcaagggtaccgagc

SEQ ID NO: 35343 - DNA, 459 bp, Homo Sapiens
gatctgagcatatggcagccaagctgggttatagcctgctttaagccctgatcaagtcaaattcttagtgtccattttttcatctctaaaatataagtgggtaaaataagaatgtctctaggtccttttctatattaaaattctaaaattcttactatgcataatcaagaagaactagggggataaaaagagatgtaaaatattccagttcagcatacagcacaatagataatccttgctaatctgtacatacagcttaattggaaaattaagaactcagcaatttctataaatggtctagatttacagttatatttatttaggccaagaatgatggtattagggagctaagtattccctcagtgaaaaagttcatagcaaagaggacaaaacagaccactagaaacattgtgtactgtatcttattttagacttggccttgccatatgcaagggtacc

SEQ ID NO: 35344 - DNA, 498 bp, Homo Sapiens
actacttaccacactaccagaaaggaagatgcagaaactcaagttcttgcaggctaggtgtatctggtttttagtgctactgtaacaaattactacgaactaacaggcttacaacaacacacatttcttattttaccattctagaagtcagaagtctcgaatggggtgacagaactgccttctgcaggctctaggggtgaatccatttccttaccttttccagcttccagaggccagctgcatgtgttggcttctatctccaaagctagcagctcagtgtcttcagatctcttctctctctctaaccctgacactcttgcttccctcttgtaaggatccctgcaattacactgcccctgctaggataattcagagtcatctctccatctcaagatccttaattatatctgcaaagtccttctgtcatgtaaggaaagatattcacaggttgcaggtactaggaggggaatatacttggccttgccatatgcaagggta

SEQ ID NO: 35345 - DNA, 386 bp, Homo Sapiens
ggaccctgtctatggcaaggcaagctggattttctctcccttccttcctcatttctccctccacaggttggcagctttgggcaccaagtggtggaatctgggagttgatgactcagtcacctttgaccagctgtccaaattgagatgactgggctctttgggaagttggaaaggcacaccaggatctgagtgtcactgtggtggagagtgaaaatgaccacagtgcagattatctgtttgtcatattggttttgataaattgtacttttcagggaatttgctcatttcatctaagttgtcatatttattgacataaagttattcataatagtcttgttctcttaatgtgtatgggatctataattacttggccttgccatatgcaa

SEQ ID NO: 35346 - DNA, 405 bp, Homo Sapiens
catatggcaggcaaggggtgtgctgatacaagttgtaaaacacctaagaaatgtagctgtaattattttcagattgaaagggttttagatttgaaaacccatagagaaactttctactttggccttttttctttgagtgctgcaagaaataaaatatagcccaacatttattttttatgattcattgaaactctaggggtagaaatggaaagctttctgtaactactagtgtccttaggtcaaggccctcagaaagcgtgtggttttacatttgagaaaccaatcctcttttgttttactgtattttaaaatagcttcttactctgttttgttgtttatacattgtatgtttggcttcttgaggtctctggctcctcagtttttccttggccttgccatatgcaa

SEQ ID NO: 35347 - DNA, 356 bp, Homo Sapiens
tcataggtcgcaggcaggctagtagcaatcagattagaacagagggtgaagactccaggaacatatctccggggaagaaaatgaagctgtgaaatacttgatatacttgacaactgtactagtcagaactgtgttcagcatatatatacacagaaatatctagcttaggtagctccactaacatgaaaagttgccccaaacgactttgtttttcagcatctgtccaccccgcagaatatagttttatccttatgcttgtaacatgactactgcacctctaatcatcacacatgcattctgggaaggaatcatgagaaagggcaaagggtaaaatatacatacctgcgaacctatga

SEQ ID NO: 35348 - DNA, 423 bp, Homo Sapiens
ggcgactcagaggatccctcataggttcgcaggcagaaagaagtttctcagtaggagactagaagccattattaagctgcatttagtgacctcacatttcagcccacggttgttaaggaagaacaaggggagctgcttcttgatctgcaaggggtctctcccacccatccctgctgctttcaccccctccctcattccttatgggatgtccagttgttctttgtgtataaacagaaggcaggggttggggcagcatatgactcttcctcctatgttctggaggagggtcttagggtcagaaggtggcctggaagtgtatatctaagtcagatggtctgtagagaagcagagtgagttcatatgctcctctgggacaaaataagcagaccacacattgcacctgcgaacctatgagggtaccga

SEQ ID NO: 35349 - DNA, 567 bp, Homo Sapiens
gtgcgggcgtctagaggatccctcataggttcgcaggcggacacatttctagttactaggcagtctctaattgaaacaaatggattagtttccagagtccacttgaataggcagttgttgggatctgaaaatacttatctatagaaacagtgtgtaaataagagagtctcagattatcaaatgaaacttatttaaatccatgtaactgaactaataataccagctgcagttttatcctggctgtaaggactaccatgatgggaaaaaataagaggaaaccttaccctcccccatatccatttgtggacccagatacaatccaagatcttttttatattttctcatttatcttcttcttctcttattccattgctgtttagaacatcccaggattttattgtttgtacttatttttccaccttgctgtaataccagttcttctagtctgagtatcgttgatcttgggtcttagggatgaatgtatcagccatttcataatgtatcatggtctctcaatgacagggattgtcttgcctccaactcttgctcctctttcattagatgtgc

SEQ ID NO: 35350 - DNA, 564 bp, Homo Sapiens
ggtcgctcagaggatccctcataggttcgcaggaattcaataactatcatacaaataataagtgagtaatatttttataggtaacttggaaatgaaatgttccattcctgatacaagtttccagctaatttttatccgcacaccagatgataatgtatcaccctttcctttcctcagatcctcaaaagaaaagcatagtcttagcttcaatagatgttcacttatggtaaaattcaagcaccacagtagaatgtttgtcaaccttgaaaagccaaacatcataaatgagaatgggttttcatagctgtaatacaaaccactgtgcaactaactgttttgattcatcacatttgggtacagcttgcttctgggaaagttgagtcataccatatctggcttggcaatttgagcataaacttgcagtgtgcatacagctttttatatgttatcctgagaaacctgaaacagctgcactgctggcaggaaaacagaggaccaccagtaaaatattcaaaacagttgcatcttttaatttatggccatgtttccataaagagtatataa

SEQ ID NO: 35351 - DNA, 369 bp, Homo Sapiens
tcataggttcgcaggagacagcacaagggtgggaagaagaaaatgatcaattcatttggagatgaggtggggcgctagggaacaactgacaaataattcaatagcataagtataagaggtagggcctaaaaggaaattaacggagcctcaaccaggaaatggaaagccaggtctaataaggaacactgggataaataaattacaagactacacataatccccaatgtctcttacactaacattgatgaattctctgaatataacctagaggtgacaatgcttgtactttaggttcgtctgtaagagaggtgaccagtcaatagcttcttactttcacatatttaactctttaatcctgcgaacctatga

SEQ ID NO: 35352 - DNA, 529 bp, Homo Sapiens
gtgctgctgtagatggatatatatggttctgataaactggaggttggcaagactttaatgggaatataaagtaagctccattatacttctgattaatcaaagttttccaatattaccatattgctatatccccaaactccaaataccaaaagcaagttagaatggattatttggaataactcattctacctaattttcttttcctaaaacacttttaacatctaaacattgaagaagtggcaattatatttatttgcagagccaactgtgaagatgctaaggacaaaaggaaaagagtaagtatcaaactccctgagatatctagcataacacatgcctaagcttcataaccagtactgcacttttgctgcaaaatacactgatgaccaaggcatttaatcccacttactagtaagctattatctagtacattctttcccagtcctgtgtcctctaagtaacctaagtaaatcttttaagttctacctttaataactacatcctttcccatctgagtacacggcatcac

SEQ ID NO: 35353 - DNA, 354 bp, Homo Sapiens
agttggcaggcaagctacaagactgaggcaggattatcacagcaccgtccagtgttaaactgcccttaaggtcactattacagttatgatgacgccctaacagtatgttagggataaacagatgcccatctgattccccagtatccagacacctgggctttttcctaactagaagactcggagttcacccactgcctacttcccatgcctaggattctccctgggttccctgttctggtaagatgccaacacgtccactaagtcagattgaatctctcaccacctgaaggccttcctgaaaccatcggtgagccgcttgcttccctggctactacttggccttgcaatatgcaa

SEQ ID NO: 35354 - DNA, 373 bp, Homo Sapiens
gagcagatcaccccattcttcttcaattcctatcatctatacagaagtgcagatattcacatgggaatgaggtaggtagaactgtttagcttatatagggaaacatatctgctaagcagctgagaaatgtatacatttcagtctttccatttgacaaggctcattctcccaagtaaaatactaagaatgcaatgacagcaactgaagccgttccatttcctctcctgactttaatctctccctaagaaaaatatttcttgaaatgctataatgtgtgtgcattgacactcttacttagatatttaaataggcttgtcctatttattctctatgtctggccttggccttgccatatgcaagggtaccgagctcg

SEQ ID NO: 35355 - DNA, 463 bp, Homo Sapiens
ctagaggatccctgacatatggcaaggccaaggaagggaatgatctagctggagagatggaggggctaggcctgtgggctgaggactctgacagaagaaacacagatatcagacttcagattagggtgtcttcactacctggcctgtccaccagtcatgcaaaagtcgcttaggagaggggaggtaagggaaagcttcatgaaagagtgattcctggatcccttcagaactacaaagcagagtctctgagagtgaggcttgggaatctatcttttaaaaaatataagctacacccacaccccaacatttgaacacctacaagaagtcacataagggttacaagaggtgaatgtcatggttagacttgcatgcatttttatttcatctgagaatgtctttatttccctttcattcctcaagtataattttgcctattatagaatgtgtggttgagaattttctt

SEQ ID NO: 35356 - DNA, 390 bp, Homo Sapiens
gcattggctagcaagagagatgaatagtaaacttaaaggagtctgacatacaaaacttaaacctttgcaaagttcactccttcaataactactttttaaatacatacgacatttcacacactgtgcttaggccctgatttttcagagtttgaataaagcacatatgagccctcacctcacagaactgtaatctaccggaaaacacagtaaatagcacaaaaagtgtacggaaagttgcaataaataagtactagaggaaaagacacatatctccaagggaacacgaacttaggagggaccacagatggaacggtcatgaaagtctccaaggcatgacatcaaagctgacgacagaaggaagaactcgcaccttggccttgccatatgcaa

SEQ ID NO: 35357 - DNA, 423 bp, Homo Sapiens
cccgtcagtcgctgaactatgcgtaagaagggttcagaacttcctaaaagcgttgtcacattctttatatttgtagggtttatgttccatataaagtctcatatttagtaaaagttgatagctggttaaaggctttcccacattcatcagactcacagggtttctctccagtacgaattatcttatgtctagtaagggcagaggtgtccttaaaggctttgctgcattttcttatttgttgggtttctttcccgcatgaattatctaatgtctactaaggtttgaggatgaaataaaggctttgccacatttatcacacttgtacagtttccctccaatatgaattttcttatgtgaaaaaagcatagtgggatagcttaaagctttgccacattcctcacatttatagtttctctccagtat

SEQ ID NO: 35358 - DNA, 485 bp, Homo Sapiens
ctcgcgtacgccgtcagacgctgaactatgtgtaactagggttggggagagcgggctggagagagacagcacacaaagacaacagagagaagtcaaataggaaatttcaaaatgagaatcagctgatgtataaaaaagagcaaaataatttttttaccgatagaactgcaagatttagctttccaaaatgattcaattctccagaaaagaaaaattaatttaagcactcatctaagtaactagtataaagtgccaagcaaaaataaacatttattagatatagacaaatgcaaatatattcaatgctttcgtacaaatgtgaatatctgggggccttattatcatcttgttaatatatgccagtgaacaatttgtagacacaagtcttgttttacaaactgggtaatatgttccatgaacgtaagccaggaatttaaaacttagtgtctatctcttcattctaagaaatgtttcagctaactcac

SEQ ID NO: 35359 - DNA, 396 bp, Homo Sapiens
tcgagctcgcacccagacaaggagaggtctatgtccacgctttgggcaacaggataaagaaaaacagctactgcctggaaaagttgtttgtaagatgggaagaggtattctccagagctctgatacaactctatccagcaatagtgtagataggaacctgatggcagagataagagtcctagattcactgtggcacatataagcattcaatttccagagattacttgaagaaaaaaatagctgttattaaacacttaatatggattcagagtaatgggtacattaggtttatcaaatcccatttattcctgacaacatagctacaggtaaacatcattattatcctgatgtaaaggtgcagcagtggtgtcttacttcacatagttcagcgtctga

SEQ ID NO: 35360 - DNA, 466 bp, Homo Sapiens
tcagacgctgaactatgtgggagtaaacaagaaagaattccttcattgtgtggtggggtgaggagtcagcacactggaacaacttgtacatttaatgactccagattaatatttgcagattatatttcagtttggtatcattgaacaactgcttctattatatttcagtttagtatcattgaacaactgcttctatttgctgtttctgagttatttggctttcactgaatttcaagatctatctgggagccatccaagtcacctagactttttgaaccttggttcccttatgaataatacccatctcccagggttggctgagaattaaacaaggtaatgtttgtgaaagtgaccagcacaggaactgccatgcatgaaatacttctgatgccttctcttcattccaattctataaatggcccttggctgttgatttcagtgctttcacatagttcagcgtctgacg

SEQ ID NO: 35361 - DNA, 393 bp, Homo Sapiens
tagaaagcaagcccacctctaaagctatggggaaaaggaggagtttggcttagagcaggcagatgagtgtcatgggcctagcacagccaagaccagggcaggaactaagggctggccatgggcctagcaacagaaggaaaccacagtgatctacttccagttcaccacatatgaccgctcttataacctctggatcaaccttacaggctcctggccaggagcctggcttcagaaggctcctggcccaccttgtctggcaaatgccaatttctcaacccacctgagaacactgagcagcagcccagttccaatggagtgagaacgagaccaatgaagcagttcctccaggtggccatccaacatccctggaggccctatttctgacacaagggc

SEQ ID NO: 35362 - DNA, 406 bp, Homo Sapiens
ctcccgtcagacgctgaactatgcgctgcacatggaccaagtcatggaataatcaagtgaggagtctgaagtaggcaagtgatatcagtttgcctttgagattggttactgtggctgatttcaggaagatggttttacttagagcaagaatggagaccagtcaagagggtaaatgcaatagtccagtagagagctgatgactgaacgaatgtggtacatcagtaggtccttaaggaattatttttacctttaggaaaaggaactatagtttcttaagttcataattgaacaatcacttaagtaattttctcctccaaattctaacaaaataaaatttaattagactcttacaatatttttaaaacattttcatttatcaatatggcacacatagttcagcgtctga

SEQ ID NO: 35363 - DNA, 367 bp, Homo Sapiens
tctcgtacccgtcagacgctgaactatgtgtaacacaataaggacaaagcatacccacagcagatactactaactgatctcagttctcattcccgcctgaggtggacacaaaaaacttttctcatcacagtgctttctatacagtagttaccaatagattaagatgttactgggaatgcaactgaattggcatccctagtacagagtttcatattttatgaagtccttccacatatagtagcaaatgcaatcctcacaaaaattctgcagaggaggtataaagctcatggctaagaattcaagctttggtatttggctgcccggaatttgaatttcatttccgacacagaacggtttttagaaaaat

SEQ ID NO: 35364 - DNA, 385 bp, Homo Sapiens
gggtatggtgcatttacacagtgaggggtgggggaatcagtaacatgtgaggagcccgtcatgccgccaggtgggagtgtcctctctcctgctcacagggagtagttaggaactggagatgagcccaagtttgtgaatcttaacaagggtgttgatgcctcaagaatggacataatcaccaaggaagttggtggcggtgcaaaagtgcacactggggtgccaacatgaaatggggaatgagcggctaggagggagtagctggtgcaagtaaagatatggaacaccctgtggtgtgtgctgtcgcaagatggtgcctctcatatagaagctgaccactagtgatttggccggcgttgacacattgttcaccgtctgacggggatcc

SEQ ID NO: 35365 - DNA, 397 bp, Homo Sapiens
atcgagctcgcgacccgtcagacgctgaactatgtgaacacatttttaaattaattcatttctaaccataattacttttaaataagtgtcttcaaattattctcttttctcagaatcatttctgggctcaggtatttctaatcatactcagttttgtataagcctgaagctttgtgtctttgtagaacattatgagacttctttaaaacactgagactaaagcaaatgaactggttatcaaactgaacacaagtcaattttttaaatgtagaaactgcacccaaaaatgagttcctgagactgaaggtccttattcccatgttggagcattctttttctgagcaatttcccttagtcaagcaaacagaaaactttctccacatagttcagcgtctga

SEQ ID NO: 35366 - DNA, 616 bp, Homo Sapiens
cttcatcatacctaccactgtttttcttttgaaaagtttggcagcctgtttctgactcctatgaaggtgaattcctcagcattcacagtttattagaaaaatactttgcttctctccaaactcgaaattcaagataaccaaacctatatataggccgatctttcaggatgcagttgtcatgttgatgccatgcttttcagtatcgtggccatcatctgttcagtaggggaggtgtacttctgtaatgggaggtggtggttatgtgtgtgtgcaagtgtttatttggtgtcttaagttagcctgtgggaagttctaaatcaggatggtacgtggttgccagcagagagctgctcctcaagtgaaggaggtagaatcaaagccaataggaaagagcctcagatgcttatatatgtaccgtggggattcagagtgaaagcagtcattggactaggggtggggttagggagagcctgtctgacagacacaagaaagggatggatacgccacccagagaaaaaagcattttaggcaagaacaaatatgacaaaggaacaagtctgtggtaggggcaaggaggaagtagtatgatgaggacgggtacgagctcgattcgaat

SEQ ID NO: 35367 - DNA, 589 bp, Homo Sapiens
tttcctttgaagaaaatatcactatttgaaaactactttgttcttatgaatttacttgatattgagctgtgtatgagaaagtatctgttcttagcattgtatccccacatctagaatgtctatggcacacaatagatactcaaatgaatgcctgaatctgtttaactgatttataattagagcaagtcaaacaacaataattaaggttgccattagaataaactggaaatctattctaatggcaactctgttacttaactgtgcaaccttaggcaaaccttttaaacctctctgagcctcaatgttcttatctattagtagaagaaccactattagcactgctttccttataaaaggttaccatgagagttgaatcataaaatgtatatgtgcataaatatctacatagcctttttggaagttaattgcgaagggaatgaatgaatgaataaaggaaacatttccaggccacataacaacaacaaaaatacaagaaatacatatagggattgagagtaaatttaatcagcacaaataaatctcagtgggtaaattatcatatctagattaataaggctgagggtaatat

SEQ ID NO: 35368 - DNA, 591 bp, Homo Sapiens
tactactgtgtatgttctgtctaagtacaagagcccacaagggtttgttagaatcagtgacccaaatggccctgcccaagcagcagtgtgggttacagcaaaaggcaatgggctccctttttgctaagagagtaatatctcattagtaaagcagcattctcactcaaatgatgaatccttccaacacatggaaaggtggtcccataaggcctctgagaagctaagcaacgtcacaagatccacacattaaaatgaagacattcgctttgttctgtggagagtcccacaggccctcagtcactactttttttggtatttttgagacagagtcttgctgtgtcacccaggctggaatagttcttaaattcaaattcaattttgtgtattccaacagtattatctcagcagtttagttttttccagttcacatccatccatctgcctgaggagaccaatgctgtcagctttccttattctcacaggtgtccatctaatcaagaatagttcccaccaggcttctgattggcccaggttaggtcacatgcatatcctcaaatgcatcgccataacaacagggatggaatcctttca

SEQ ID NO: 35369 - DNA, 429 bp, Homo Sapiens
gctatatactaccgggaaaacagtgccagcttcgcagggctgtctccttctcttagctcgttcagagtacgtacgtagtatccgagccgcagtagcgttcagcggatgattggatccctgggaggggtgggggaggatgaggctccacagcacagtggtcaccgcgccttccaaggcgatccccacaactaatcgaccagggctcctggggggacgcagcctaagtcccccacccatcggatcatctggaacttccgtccagagacgagagaccgactgggaatcctctcagtcaaggtccaaaccgaaaagaatcactggcacggacaccagggctaaggccatttctaaaagactggtttctgtgttttgggtgaatccgtgtatttctgtatcacaaaatgactgaggtaggtatgatgaaggacg

SEQ ID NO: 35370 - DNA, 440 bp, Homo Sapiens
aatcatactacagtggtgtggtgtaaggcatctaaaacacgagatgtctagggaactttccattcttgaatttaagaatcctgggctccctttttaattcccctggttgggggaaattaaagtacagggtgctttgagtacaggagataagacacatgtacaaataattgcaacataaaaaagggtagactcagtctccattgtcagaagaggaaattgggaaatataacttagggcagagattccctaaaaccaaacaaggataatactggtccttgatgaggttttcactgtttcagaatgagatgagaataaaaaggactatgaaatgtgtttttatactggcctttatacaatttttatttcctactatttgaagtcgaaatatccttttaaaaataaaaggtggtgaaagtagatggtaggtatgatgaaggacg

SEQ ID NO: 35371 - DNA, 608 bp, Homo Sapiens
ttcttcatcatacctaccgaaggaaacaggtaatgctgaggtcctttacatattatatctcatccttccaattggcaccctactgcatacagatcaggagaaacctacccgcttagtattaagagttactagcaattctctaatgtttggtcattaactagagaatggttggtagtttcctgggatttttcttccctatgtctagactgaaatagcacctgtaataccctctctcttttctgccctcttttctctcttgttttgtgttttccctgccttccattccagctgtgaaacaggcatcttttctcacttagtggattggatggctgagtccttaactttgagccaagctggctggttcctgagcacacacacaaacccgcctttgattgtccaggaggacagctgccctagaggcagattgctaacataccactagaacaatccttcttctctgttcttatgctggctagcacaatctttactgcctctagttccttctgtttcccaccacatctctgatctttgctttaggctaagtgagatgtcccattaaaaatgagagtagggattggattttttcttgtggtaggtatgatgaagga

SEQ ID NO: 35372 - DNA, 483 bp, Homo Sapiens
aaacatcaaaatgagctaggagggcggttctggaggtggtggaagaacagactgatttgctggtttggctgtggccatcagggagtgaccacaaggatgagatcaggccagggaagaggcacagccccccaataaccatcctactccactgaggttggcctctttctggatgcctgttggacaccccctctcagcagcctctgtgcgaagtgctgctgggcactggcctcacaattcctgcttttcaaggcccacatcaggttccgaatgccaagtttataaatgtctggtctcaagagagaaacggacgtggtgacaacataatcacccaagcagttcccttaggttacacctttccttaagggagtcttgggagcttcttcccacccttctcccattcccactcagcagccaaaaccagttgggtaaagtaacctagttctgagaccaccctgccgcatcaggtaggtatgatgaaggacg

SEQ ID NO: 35373 - DNA, 565 bp, Homo Sapiens
tccctgtaatacatgccaaacagaatgtattagagactatgtaatataaatccacattctaagacaactgaccttgataaagtacttactgtaattaaaatagcataccgtttcttaaactcagattctaagaaagtgcctctaaccataaaggtgaatgcaagtgtacctttggaaaatctgggagtggcccaaagtagccaaacacacaaaactaggctgtatttttcaaactggcatattctttgtgtgatgggtgtgaagcaatagatagatggaaccactgaataaaagcaatgcctcctcctggagagttatgaaaatattcccaaagtaaaacaccacttccttcatccatttattcaacaaacttttattgagagacaactatgtgcaaatggttatactgatagccatggatacaaacagatgtacatatacatattcacacacatatttacagtttctgctctcctggagcctacaatctcatgggagaggacaatccaaaaaagcaaaatcacacaaaaaactatgattaggatcaaaggaggtatttgttgca

SEQ ID NO: 35374 - DNA, 504 bp, Homo Sapiens
atacctaccatcatagtcttaagtattgtggtacttcagtttctgtaagagttgtaagattaccaattcatcagtgttttttgttgcttagtttggtggcatgtaaatgacagcaacaaaaaagccagacatgaaggagatttgatttgatttctacaacttttcacggtttctctttagttttatctgaaatacatttgtaagcttagggtgcaatttggattaaaacagttttctttagtgtcaataatggcctttactagagtgaatggatatttttccattctggattatcgtttaatcgaaactttgtttcctgtggaaatttttctggtttaagttatttgatttgggagataaatcatgtaacttaataaactttggcatcctggttaactgaaattgcttcattcaatatttgaagactgaaatctgtattgttgcctgtacctaaattatgggagaaggaaaggaccgtgtacagggtaggtatgatgaaggacg

SEQ ID NO: 35375 - DNA, 405 bp, Homo Sapiens
cataaatagatcataccattaccctgcagcacctttagatgtgacaaaacaattggaatttgctttattttcttgcttctggcagctagaaatatttatatttctgttatgaatggcttgctattggccacctacctgcctttctttatatatttctttagaacttaaggttaaggtccatgggagaaacttgctagagatgaggctagaaaggtaggtgttgccagattgtgagtgttattgccaaattgtttgaatttatcctcctaatagaataagccataaagtgtgttattttagtagagaagttgcagtatcagaaaagttatttttatcaagataactgatgagtatgacgggtgaattgaagaaaagatagactaaaggtaggtatgatgaaggacg

SEQ ID NO: 35376 - DNA, 442 bp, Homo Sapiens
accgacacaaaaacctccgaactacacatctatttgtaagaaacttgcttaatcccagatgagatcaatccacaaatacttataatctagaaaagggaaaatgaactaatatccattcatcaaaatggcttgtatataactcaattactaccttatacctcaaggtagaaggaacctgattcacaagatttctcatgtaaccttacgatatacaattgggtaggatatgggccatctctttgaagacgatgaaaagtgagtgggtgctaccctatgtatcaagaacatgttatgacttttccccttctttaacaaaaatgtctgtaaaccataccaaatgtccatagtttaggtattaagtttaggtttaaatgagatagtgaacaggggtgactttattacaatatgaacaatctggctagggtaggtatgatgaaggacg

SEQ ID NO: 35377 - DNA, 437 bp, Homo Sapiens
tggacccccgccttcatcatacctaccatgaccttatttttctccctctgtttcttccaattgtagcacactttttaattaaatcagtaatatttacatgattatgactatgcaaattctattcactgctaagtcatatggtgttttcgctgtgcctctgcattatatgtccttcattccttctctgaaacagttctgaaatctgagcatttctgcactttttctgggtcatctctttttccctagcctatgttgctttacccagacaaatgcaataagtagccactggctggtctgtttgctttcacatccattattttttagcatgaagctaattttctgactatatttgtttgcctgttttctaacagctgttttcccttcaagtgttgtagcatttatcacatgcctttcaaagatactttccatctgctaaa

SEQ ID NO: 35378 - DNA, 492 bp, Homo Sapiens
gagcccccgtccctcatcatacctacccaatttgttgattgctcttattcgttataattgtctttcagttgactcttcctaatttttttgtgccgagaatcattgatgacaaataaggataatttggtctccatttttctggtacataatacgtctttacttaccatcagttgtgtgtcacttaggaatataaatggccaaaaataactgaaagcctgcctaataagggagtaggctgacaggggctgacttttctcaagttcaggcagtctggagggaaggagtctgtggctgctgtgaggtgctcaaagagggtgtgaggactgggctcctggcttctgtttgttcatccttagcctgtggcttttgtcctcgtgaacacaagatgacctccaggaattatgtctgtttcaggcaggaagaagttgagacggaatgaagacaaaaggcaaaaaaggcagaatgacaggtcagcaagcgctgctcagccag

SEQ ID NO: 35379 - DNA, 401 bp, Homo Sapiens
tgaagaatgaattcatcctcccagctgtgcagcttctcttctaaatgtaagttgccttgctcaacatctgcttcccatacgggcagtcttaggccttggacttcttgatgaaggtataaaacgaggactttcagcggaggtgcctcccatttatggctggaggagtctctggggtggggccgtcctgcacacttcagggtgttggggagtgtccctgggctccacccaccagcggccaggagcagcaacctcagttatgaaaagcagaaatgtctccatacataaccaagtgttccttcagggagggagggcaaagttttctccactagtgaaccactgtgatagacagacgacggacagagagagatgatagatacgataggtaggtatgatgaaggacg

SEQ ID NO: 35380 - DNA, 475 bp, Homo Sapiens
gtcaaactaccttaatgtatcatacttcaaatatcctacacattctttctgaaccactccttccctatggcatataagccctggctctgggggctaatggcgtgggatctgacaccttgtctcaccacttcctgagagaaacatggcttctgctcctaagtccctgtttctttctaagaaactggatttgtcagcctccttccttggcccctccgcttctccggacattgggggtagatttgcatagacctgcccaccacggaaccatggggcagctaggtggcacctaggctgcagccctgatcacctgtagctgcatgttctaatccgttcaactgcttccagccggccatctgcccaagtgggcggaaagcaggggccacgtcagctttacttctggcacaaagtaggtgctcaaacacccatcagataatggtcaagtttagtttctggtgcgtaggtatgatgaaggacg

SEQ ID NO: 35381 - DNA, 544 bp, Homo Sapiens
tacctacccacaggtaatcactatcccacatttgctttaattattcccatcatgttttatgctatgactacaaatgtgtgaatctatattccactgtatgttaataccaacattttttcatttattttaccgctgatgggcaatttaggttatttccagatttttactattacagatgcttctgtgaacatccttactcatttctccttgtgcacatgtgcaaaatttctctggagtacatacctgggagtggaattactagaatgtggtgcatgtacatgttgttgtatttatcagtagttcactcttatttattgctgtgtattccattacatagatataccataatttgtttatctaatcacttatttatagacatttgggttctttctgtttttttgactattagaaataaagcagctataaacatttgtatataagtttttgtataggcatatgctttggtttctcttaggctcaggggctgggaaccccctaggaatggaggaatagctgggtcatatggtaggtatgatgaaggacg

SEQ ID NO: 35382 - DNA, 465 bp, Homo Sapiens
aagaatattgtactccaatttttgtatccacacaagattagaatacaaataacttacccggtccatagtaaaatcagtatgtgaatcatggatttttgtcaaactcatttggttcggggattacaaatttcaaaaccaaagttaacaaagtgagctagaagccaaactaaactagaatctgggtcttttaaactacccagttcaaagctctttagtaaaaggggaaagactaacaccatacgaagagaaaccagagtataagttcagaacacagattcaaaggcacaaatctttcaggaaaacatcagtagaaacaacaagacaccaagacaaaactaagtctgaatcgattaaaacacatgactcatctattcataagctctagacttagaagtcacattaagaaacttcacaatggatctttaaaacacaaaacagactttaaacaatggtaaggaaagctca

SEQ ID NO: 35383 - DNA, 433 bp, Homo Sapiens
tacctacctctaggacccttacacttgctagttctacttcttgaaatttgaaaacttagttgttcattcattctgtcatttattgtgtgcccagaaacttggatgcacctagatgggtcagtgctggaggaaagcagacatggtccttgccttcatgaaatttgcagtccactagggaagacatgaatcaaataatcacatcagtgaatgtcaaaaggcagctgtgacaattgctacagatgtgacgcccatgcattgggttagagaactctcagagatggtgccaggtagaactatgtgaaattgcagatttttcagtcatttttgacctataaaagtaaagacagttcagattacattttatgtttgaccctgaagtcacagaaggttcttgagcagagaagcacatgatgggtaggtatgatgaaggacg

SEQ ID NO: 35384 - DNA, 556 bp, Homo Sapiens
ccttcatcatacctaccccctcatgtctaagcaaccactaatctattatactttttgtctctatggatttgcccaatctggacattgcatataactagattcatataatatgtgactggcttctctcacttagcatattattgtcaaggttcatctgtgttgtacatgtatcaatacttcattcctttttatagctgaatatatatcattatatggatataccacgtattgtttatcggttgatggacatttgggttgttttcacttttttgctattatgaataatgctctgtgaacatctgtgtgcaagtttttgcatggacatgtttatatttctcttgggtatacatacctgtgagtggaactgctggatcatttgacaactctgacctttggtggaatggccaggctgctttccacatttaggctgcaacattttacattcccaccagtagtatgtaagggttccaatttctccacatcatccccaacacttgttattgtaagtccttttgattctagccatcctggtaggtatgatgaaggacggggtacc

SEQ ID NO: 35385 - DNA, 473 bp, Homo Sapiens
aatacctaccctgtccttatggatttgcctgttctggacatttcatataaatagaatcatacagtgtgtggccttttgtgactggcttctttgatttagccttatcttttcaaggtccgttcatattgtagcatgaatccattggtccttttatgacggagtaatagtgtattatttggatatgccacattatgtttatttattagcagttgatggatgttaggtttgtttccatttttggccattgcaaatgatgctgctatgagcatttgtatgttaatttttgtgtgaacttatgttttcatttttgttggatatatagccaaaagtggaacctgagttatatggtaactatgtttgactttttgagaaactaacaaattgttctccacagttgttgcaccatttgacgtttccatcggcagtgtataggttctaatttccccacattcttgcttaacacttcttgtcca

SEQ ID NO: 35386 - DNA, 386 bp, Homo Sapiens
cgtatgggggaagactgactataaacaaaatatatgtaataggtggtggtaagtaccgtggagaagtaacaaatggggcaaagtgagttatacagctccattcttagaaaccttggagtacttttcttagtttatactcgcggtggtttccttttgtctcctttattacatgggactctgacatgtgcccatagctagggtgacagtaggatctacccgatagtatggtggcagtaggatctacccaaaaagcgtcctgctgatacaggaccaaagcatcctgttgttctcgagcctataaaaagagctaatggtgttgcttctcttaactgtggcctcctacactgtgttttggatgattggtgatgtcttggatattctgtttc

SEQ ID NO: 35387 - DNA, 575 bp, Homo Sapiens
gaactcccaaatatagaagtgaacaaccaaatctgagtgacttgattcctaggacgaatctactcctccttaaagacagaggctctgggaagactcttttggtaagccctccagatgtgagcttctgtgacagtcaacgcactcattgtatggtgaacataattatccctcatgagtaatccgctaagcctttctgttgagcctctggagaggaagaaatttgcttcattcactttataaaaatattttaaaaactgacataattcatataatacaaaattcaccatttcaaagtgtattgctcactggattttagtgtattcactatgttgtgcaaccatcgctattatcgaaatcaagaaaagctccatcacctcaaaaagaaactctgttactattagcagttaatcacaattcttccctcttcccagcccttggctaccactgatctaccttctgtctctatggacttgctaattctggagatttcatagaaatgaaatcactcaaaatgtggcctttgtgtctggcttctttgactcatgagaatattttcaaagttccgttgaagccgt

SEQ ID NO: 35388 - DNA, 540 bp, Homo Sapiens
tcaaatcagtaggagttagggttagtaattatagcaacctgtttcttcttttaatccatgtaaatgtcaggtagggtccctagtttgaaaacaatttctacatcaaaatagtgtgatctttgtccaaagaaggcttcatgagagaagttaatctgttaaattgaccacagggatggtgtggagaatcattagaatcatttgggaattccttttgcagttttagatgtacctttttcatcacacattttcatggggaagttgtattttagaaatggcccaaagtcattgtcaagtaataacactgtttagtcaaagaaacagggtggaactagatagtacatgattgttgatcttaagtgccttttaaactagttttacagacagttccaagagaggtgttccaggtactccttaaacaaaggtggcattgttgaactttgtgtggcaacattcatgcctatgtcctgatgtttctgtttacgtttttgaatgttccatgactttttaatcatgtgtcacgaaaagttccgttgaagccgt

SEQ ID NO: 35389 - DNA, 397 bp, Homo Sapiens
cagaggatcccttcgattggcgggcaacttaacaagcacctgtatcaaatcaaacaaaaaaagtgcaagattggaagcttcgaggcttcttgaggcctagtctcagaactggcacaatatcacttcataaggctatctcagattcaagggagtaagaggagagatgctacctattaagaggagaagcagcaaatactatggccattctcttcacaatagttgtcaccaaaacgtaatcgatttgtttatgggtttacattgtcatgtctccacaggacaatgcacatggtatgtttgtcagaacccagttggagttttgtttcccagcatccaaaggaaatccctaactttcattttttcttcccgtaagttgcccgccaatcgaagggtaccgagc

SEQ ID NO: 35390 - DNA, 419 bp, Homo Sapiens
ccttcgattggcggcacttaggaaaataagtaaatctatacacagataaaatttaacagtaaattatacagatcagatttccttcctgaggctaccaaaaataccttttatcagcaattattccttggtccagcttaaaaaaatatatagcaaacaaagctaagactttgtgaaacctcatctaaaatgagacctgggtacagaaactttaatacattatttattagggatttacaagggaaaatcagagacccacaaataggaccaagaatctcaaatgagttccaaatatttcagcaataaagtaacgaattgcgtattaacagcactgtaattactccttttgtttggtttctttgtaattacttttaataaattattctggctccccccatcactcaagtaagttgcccgccaat

SEQ ID NO: 35391 - DNA, 367 bp, Homo Sapiens
tgggcacttagaaccttccaaaagaggtaaaggtaggggagaacaaaggaaaggaggaagtacttgtggaatgctgagaaaggccaaaacacctccaaataaggaagagaaacaggctataacctaatgcttgcttgggcctatataggcatgccagggcaaatatctaggccaaaaggtgggggctaagcacacaaagcatattggcttctttattatggctagcagatatttaagaatattaccacaggtctttgagtaaattttgcttctaagagaggctactatttattctcaattagactggaaggaaagtccctttgaagaggaacctctacttcattttgtaagttgcccgccaatcgaa

SEQ ID NO: 35392 - DNA, 353 bp, Homo Sapiens
aggaactttgtcaacctctgtcttagggcgccttgtcacaggcttcgggtcagacggattcaaccttgcatcagccatttgttagccaggtcactctgttctttgtctgtaatgagattgatcgtggtcccactgagagtgtcagctcccttccgtagagcaggcatgatgattgtactcacctctgacaccattgtgagtgcacattccttcccacgtccttgtcactgtaagagatgcccacctgagcaccaaccccaggttatcttcccctttgtcttccagccccccagaaacagctacgactcaacctacccaatcatttcatcatcacattgcaacacggtctctca

SEQ ID NO: 35393 - DNA, 408 bp, Homo Sapiens
taggcccatttgagtcatccccacaaaccttagaggtgacacttccttgaccagggacagatgagaccagtgagcaaagcgggagggggtgttctgtataaaccaaggccagaggagaggcaatggaaggggaagaaggttctgggaggcaggcccatggttccccccaggtaaccccccgtttcagtctaatggagacagaaacccacacagacgatgatcaggctggaagcccaacccagcctggggttaggggaggctaccctcggaaaatgacaactggactgtgactggaggatggatgggagtccttagaaatggaatggatgcagggatattccagacagcatcaacaaagatcctgggttcagggaaaagcttcctagaagtggcgacacatatgggcaa

SEQ ID NO: 35394 - DNA, 558 bp, Homo Sapiens
gttgagttaaggaagctcttttccagtctgagtttgcaaatagcttttcatatatgagcgttgaatattatcaaatgcttttctgcattcactgagatgactttatgtttttaaaaaaatctgatggcctatattttctatttctaaactactcgtgtattcctggtataaatcaactcagtgtgttactctcgtttttatacatagctggattcgttttcactaatattttgtttgagatttttgcctcagtgatcatgtatgtgattgctctgtaacttttcattcacattttgtccttgtcctgtcctggtatcaaagttatattggctttcatagaatgagggaaatgtttatccttctaaaaatatttagtagagtggtctaagataagagtgtaagtgagtaaactttctcaatcaaatattttgtgatatgtttcaggaatttcattacatgtttggttcaatttttaaagcatttctttttattatttaaaacttttagcattggtgaccatccattgtctggttttattgccagcttaacttggtttta

SEQ ID NO: 35395 - DNA, 435 bp, Homo Sapiens
gggtggcgggagttaggggtgtggcaaacttcaatggttatgcggggatttcacagagcaagctttggtattctagttagtctagcattcattagctaatggtgtcctttggtatttattaaaatcaccacagcatacgaggactttaggttttgcctaagagttagcttatttgcttcttgtactaacagggccattgctgccagggcccttgcacatgggggccagcctttggaaaccccatcagttgttttgagagataggccactggccttgcgcagggccctacagtctgggttaaaactccaactatcattttttctctttctgacacatagagtgtaaagagtttcatcaggtcaggtagcctcagggctggggcaacacaattttttctttaaattcatgaaaagctcattgcacacggcctctcag

SEQ ID NO: 35396 - DNA, 381 bp, Homo Sapiens
gagagacgtgtcgcatgaaatctgattacaaatacagaagaatggctggatttgccccatgagctgcaacttgcaaacccctgttctaaattgtcactgagatgtttgtatctcggcaaagcactcctaaatgacgtttattttttaaaacagatgtttcagtttccacggcaagcatctctaagggttccatgaaagaaaatgcagtctcatttaatttatgttcgctgcatcacattctgcccctattccatcgccatacccagggtccaaatgtatggacatgacaatcagtgcttcaaacctacctgaaaccacctttatacacttgaaaaccatttacttaaagagtaatggcacacattgcaacacggtctctca

SEQ ID NO: 35397 - DNA, 426 bp, Homo Sapiens
ggactgaataatatctatatttactgtgagataattcccagaattagaaaagctgggccacagctataagcatttgtcgtttgtcttttgatagatacgacctaattgcccttcttgaaagttgctgatactcctttcagcagtgtatgatttcttggtttaaaatctacttatttatgagtaaagctttttgaaaacaaaaattcataaacctcctgagaactactttccttctccttcattcattgccctgaagacaggaaggagatgtatctgatcctcaacctcagcatggtgtatctgatcctcaacctcaacatagtgtatctgatcctcagcctcagcatagtgtatctggtcctcagcatagtgtatctgatcctcagcctcagcatagtgtatctggtcctcaacctcagcatagtg

SEQ ID NO: 35398 - DNA, 503 bp, Homo Sapiens
cggcgccaatatctgaatcagatccctatagccagctgtattcatttgcactgtgtgtatttcttgctaagtgtcaagtccctccaaattactgatagtaagatcttctgagagcaaaaatggtattttcttactgttttcttcctttccactgatgtgtgtgcgctcttcttgtgattgacctttaaacccactaacatcagtaggtctttcttcctgaattaagtgctgctagctccagtgggaacagactaagcttacccatgtattctattctgagttggaggcctgctaggtaaacggcatgtccatattctgtagtgtattttttcccaagaaacacagtaattctcactcacctccacggaaccatactgatgcaggcagtaaggggtgagtccaacctttccaggaaacttcacaatttacttagaatcacaaaattgctgggacagagcctatcttctgaactttcaactgatgctctgcccagtagacttgtc

SEQ ID NO: 35399 - DNA, 588 bp, Homo Sapiens
aaaaatcacagaagtctatgtaataacaagtagacaccatttactgaacaattatcaatttgttgacaattttttataatcttgaaaacaatgctagaaagaagatatgattcaaattgataggtgaggttaactagtctagagcgattaagtagccggttcaaggcaagtcactggtacagctcagcttagtctggatggaagtgccatctccttcctttctcaacatttcactgcctggccccccatcatgactgtaggtattcccaatattcctccttggtcatgagaatacccagaagataacagagaagacatgaatacaacaacccaatagggcttctcctaaatcttccaataattacagcctgaaaagtactccgaagaccctcttaagaaaaggaacatatttcacactatgacactatgaaagcccagtgcttccaaatcctattagtagtaggaaaaagaagtcctgacctccttcacacacttacatagtaagtatgaggttctatcttggtcaggctgaaattaccatagcaaactgattattatttggagctcaggtccttcaggcaggtgctg

SEQ ID NO: 35400 - DNA, 519 bp, Homo Sapiens
ggctgtccgaggtccccctcctatcggatcaggaatccagataggaggtctgaatccagataggaggctcctatctgaatccagatgtagatttaatttacatgtaacacattcctttaaaacagagacaacttttaaaaactcaattatccccttaataaggttgtatcttaatctgaactactatgattaaaacatgaaagagcagcacaaaactatacacttttaaatattatccttaaaatggtttaatgcttgtacacagcatgagttagcttagtacttaagactaataaaaacttaagagtatttcaggattattaactttggtttttccaatagggtattctgtctgtttaagaacaactctagatatatattttctggattttatattcctaaaggataggcaaaaactgtctacctaaacttgctgtactcagattttatcaaacaggagatgaatgagtcggctttaacattaaaaataaaataaggctgggccatgatggctcacgc

SEQ ID NO: 35401 - DNA, 520 bp, Homo Sapiens
ccatgagccacggcgcccgccctcttgaacttgttctgggctctagattgacaggaatgatattgctgacagcttgaagtgctgattggcggcttgctgtgtgctcgtttgtggttggctttgcgtggcctgccaccttgcactgtggacaccacacatgggccaggcgtgctctcttcacagacagcctcatcctgtgtccacccaaggacaagcaccagcacgggccaaggccccagccttgtcacagcggtgctgttgcccctggccaggtatgggcacctgggccagtgtctcagggaaactgaggaagttcttagacatacagtttcggagttacattcatgctttttcagttctgaggggtcagttaggagtgacgcatttcataaggacgaacagtggaaagttaaggaatcaagtcgacatgcaaatctgtggtttatggttcgagtgtgtccaaccatgtttatttagatgcatcttgtatctacaagttatccaaaactacagtaggaat

SEQ ID NO: 35402 - DNA, 478 bp, Homo Sapiens
gtaaattcaataggcaacatgtgatgtggcttccaaaaccagatttcagttgtgttttcagaaatgagacacttaggatatgggagactatatagtccttctctgattctatttgtggtttgataagtacattctcagggttgcaatctgatgacctcaatgataagtgctgttttttttccaagagtcatgctctaagaggaacactgacccatggagctggtccagggacggaggggcgaggatgggaaggaaccctgtgtggggtgaggggcaggaaacgggctcactgtcaacaattctagggctgactcctttgcgaaggatcggtcacaatggcaccagagggtaagatgtgggccagcggagagaagaaagaacaagataatctgaccctacacagaactaggctgtagcctcctgaacgccccctcaaagcacaggtggctttaccaggtgctgcctcatagagcactaa

SEQ ID NO: 35403 - DNA, 530 bp, Homo Sapiens
gtcgtaaaactgcggagagtctcctgccacaattctcttgtggtcgtcaaaagcaattacatgtttcagatgatgaaaagcactgtcatgaaaagctggcacagcagccaaggagacagatgtattaaaccacacggcttctcagaactcccacttacgttggagcccagcacagagatgagcatggtgatatccccccgtctaacatcctcccatttggatttaatgcatgaggctcgtttctgatgaggtgccaaattctttcggtggacaaacacaaagttgcagaattcagtgatcatacaagtccatgtcctcaaacgaaaataataatactataaatgcaaagatgctaccataaaaaatacagtaggtggacttttgtgagtcaacataaaaaaatccagcatttctaactggtagcatgaggagtaccagtctgcaggatgttaacgcactgataggctatggacaatatattccacacttacggaagtggggaaactataggtcagacaaagctacaggta

SEQ ID NO: 35404 - DNA, 506 bp, Homo Sapiens
gagtcggaagctgctgactcccaactatagcgatgggcacttggcccctgcttttcctgctcagaatagcctccgccgcgttcagagattacgggtacttgcaatgggacaggtggctgctggctggcccaagcaagagagctgaggtatccaagacatgtccattgggggtggtggtccaggtgaggtgcagcattcctgtgtatgctggcagcacttgaagagcgggtgcagggggtcggggcagtgtaggtcctggggcagcccatttatgcgttatatgccccttctccctcatagcctatatcaaaagtcgcctttgctgtcagatcaacctcaaaactttgaatcggatcagagattctgattggctttaaagaggtggatagaagaatattggaattgcctttatattatgcatgaatgtctataattttatctaaatgactgcgctgtaacacattttgtgtgagacagttgaaactgttagtgtgggggataagatg

SEQ ID NO: 35405 - DNA, 367 bp, Homo Sapiens
ggtgatgtatccccaacacccacacggatggactagtaaaggtaacgataagtaaagtaggaaaagaaaatatagaatgttatatactgcttactgacgtatgtagcagaaatataaagacatacattgcaacgatgaataccaagttcagaagagcagttatctcagagtcagagagtagtcgtgattgggaaggtggttacaaaaagctcttcaacaggaatggtaatgtttcatttattaagcgggtttatgaatatacaagcgtatacaatattaagattggagcatgtcgcacataaaaataattggtgaccatatctccggaattttagagacgcctgcatatgtgtgtggggcgataaat

SEQ ID NO: 35406 - DNA, 406 bp, Homo Sapiens
gccggacctgactgtatcccaaactattaatactggaagcactagccaatccaacgcacaagaagataaaggtacaaacatttcagaagaggtgagaaagtcatcattaactgcagatactatggccatcttcggaaaaaatactaaaatgctgtccaaaaaaaccagtaaattcacttaaggctgccatttacaaagtatgtgaagtcaatcactttttatatgcagataatatgcgacttataatggaaggtcacgtttcaatagcaaacaaaaaagctataagtaacaaagaataacaaaactataaatgtataggctctacataaagaaaactataattccataaaggatctaaaataaaacgagtaaatggaaagacaagatgtgttgggcgataacatca

SEQ ID NO: 35407 - DNA, 589 bp, Homo Sapiens
taacctgtctctaaagaaaaaaagtgatttgaaatagaaaacattttttaaaaagtggaggtgcttaatcattgtggatagttcattttcttttgcttccatctaatatctctgccagtactcaacaaaagttccttttgcaaagcaaatgtgtttaagcagaggacagctaaggaggatgagggggagcttttgcaatatattgttatactttggaagtggtagtgcttagctcaagtaggattttctttttaaagcagcattgtcttagatctctgctcagtggctggtattcccacagctaacctcaaaaagccttttggttggtggaatagctgtgacctgggtagggagggcctaaccccagggctacggctttcaaaaggcagtgtacaggtataggttattgcatttgtgtttgttttagttggttggttggttttagaatacttaatgctttaattggaccatttttcagtgcttgcaccccctgtatgcattaaggatagaactgaggtgtgacaggaatgtaccacaatattttctgttacacttggaacactatattcagtctctagatttcaggtta

SEQ ID NO: 35408 - DNA, 714 bp, Homo Sapiens
ggcctagatatcccaacacctaaaaagtcatctagtccaactccgtttaacagataagaaaactgaggtcacacccttgttctactcagaagacaagagtcaccaaaaacaatgatctctaccagagtgtaggaagtaaatattagaactatgtttatttttaaaactaaaaggaaacaaaattagctttacaaatatttaatgtgtatattttcagtagaatcctaactgggtccttatgacaagatcccatgacacaaacagttcaagggatatcacaagagaggagtagacgttctacaaagaagagcctggacagtgactgtcattccttttttcacttccagcatttgtgatgttctacagtttgtacatgcctggttgagtggattaacagattatataacccagttgataccaaagctacactcactaaataagcaagtagctttaaaaatatgtcttcaaagcaatgggagactgtaaaaaatacaaatcatataagcataagaaaacagtagaacacacacctctaatcttagtaggagtctttaccagctacatcagaaaacaaaagaggagcagtgtgatcacgtgttgggcgagtattatccccaacaccaaagaaaataattttctcattgcaacagaaatatctaagacaactcgtgtggggtacatcatacgccacaccatttcatggaattatgtggg

SEQ ID NO: 35409 - DNA, 489 bp, Homo Sapiens
tcagtcggtaccgtctgttatcgccaacactccattaagctgggccccaatgccgcagacctggctgaccacccggagctcgggcctcatgcggtagtgaactggtgctggggaaaagggtcgctggcaagggaacactgagggtgtcttgcctgggtggtcagggaaggcttcatgagagagaagactgcttcagagacacaagggctactgccccgcctcccccggccgcagggctgacacacaggccttctgcatggacacgtggcccacactgtcactggcctctcccgagggctgacagcaggcagaagccaaagctgccaatggacggtacccacctccaggcccaggccacagaaggaatgcaacaagcagcccagagcgggatacatgcctggggtgggggcatgggggagccaaagcagggaaaaggcttcagggctgtgccaaagggccaggcaggcccaaggtgttggggataaatca

SEQ ID NO: 35410 - DNA, 575 bp, Homo Sapiens
gttcagactttagcaaggaggttttcaagtaaggagagtctcccaaaacagaggttttaatagatgatctatacactttatgtgaaaatgaattaggctgcctccttactatcaaagaaatgcacaccgcaacctagagcttcaattatttaaccagtaataccattcttaaggcagagtcacaaaagagaccttttagtgtcagtgtcacagatctttagagggtcacaaacacatcaagtgggatcataagcaaaagagctccagatttgataatataagcaatgaactctccagacataatggtttctaatgatatttgaactgaactaaaacaaaaacatagaatttttaaaaatttgaaccatatgctaggatttagaaattttaaaaaatcggttcttgaatatgactgaagtagaggtctatatatttaggaacacagaatctggctacctggctacatagttccattcactcttcaactagagaaagaaattcattcagctactccaaccaatatttagtgaacagctattgagtaaatctgtactctaagtgctgactcggtgggg

SEQ ID NO: 35411 - DNA, 429 bp, Homo Sapiens
ggaaatgccaaactaaaaaactggaacgcagggagtggagggcaggactttaaataatgatgctgggctgtatccacttctactacctgttagtgtgtaaatggcagtgtctttatttgtacattggggatgttaatactatctttgtaggtaggtttaatatatggattaaatggaatactatatagaaaatgcctatcaaaattctcaaataggtgccaataaatattaatatctataaatgcaatcattattattattattgtgaataaaaataccatggcttgattttatcagtccttagcaaaacttcatacttgtaagcctgttttatctctgtggatgggcttctgaattcccttccttgagaagtattttaaagcaaggcaaacagtcagctgaagtaaggaatagatgatgaatgaggtt

SEQ ID NO: 35412 - DNA, 373 bp, Homo Sapiens
tcggcggtaccgatgtatcccaacacagccaacacattgacaggagataatggtacaatcctaacggaagggaatccagcaatacccatcaacatttaaaatgcgcagaaccttggatcctacaattccatttctagcaatgcatcctatgcacatattcacgcaaatatgcaagaattacatacaactcagcattgattaatccaaacagttgggaacaacctaaatacttagcaatggggaactggtggagaacagtgtttatcttatgccaacatctgtgtttttaaaaagaagacacataggccgaccctatgaggacaggcagagttgactttctcagagctgctgtggcaagggtgttgggcgataa

SEQ ID NO: 35413 - DNA, 485 bp, Homo Sapiens
taggtttcttattccaaagatacgtctggctagaaaacacataaaccacagatgatacatgggatatagggtacattttatctaatgataggctgacgtggtttcagttgtaatctatgagtgcacataaaatactgctagaaggcaatggccacagagttgtgctcaggacatgtgcaattctgaagttaaaattactgtgaataatttgcctatggtcaataaaagctaataaatgctagttttctttttacaaattaaattcatagaactatggctctcaaacttggatatattgtattatttttccactgtattatttcagagatgtgttcccatagaaaaggagtaactataccaccaattttaaacatctctacttaaattttaattttaatatgtacttcagggtgcattcattcattaagcagatattgatggaatgtctattctgtgccagtcactgtttttcgtgttggggataa

SEQ ID NO: 35414 - DNA, 401 bp, Homo Sapiens
gcatccatttctcatgagtgaaaaactgtttctattataggaaacttaggtcttcagtgtgtttgatggtagcatgctattagattgtgtattctcaagtctgattttccccattactgtgctttctccttttcacttctgctttgtcacttggaatgtttctagaagtagaagtcactgaccctgcctacatcagactgcaattccgggacatccaggcaacagcaagggataattaggaataaatttggctggaagaaagggaaaatgcagcttaggcagcctaaaccaacaggcttatttttctcactcggtaagagagctgaggtcgcctgactcagctcaggttctcagtgagccatcagccaccaggtgccacctttcagtgtcggggataacat

SEQ ID NO: 35415 - DNA, 361 bp, Homo Sapiens
ggcggaccgtaagtatcgccaacacacaaaaatcagtaattttctatatactaacagaaaactacctgaaaaagaaatcaagaaaacaatctcatttacaatagctaccaagaaaagtaattcttaggaataaatttacccagggaagtaaaagacctatacactgaaaactacatgaaagaaactgaagaagacataataaataaaagggaatcctatgttcatggagtagaataattaatattgttaaaatgtccatactacccaaaacagtttacggattcagtgagatcccggtcaaaattccagtgtcatttctcatagaagtaggtaaaaaatcctcattcatatagaaccacac

SEQ ID NO: 35416 - DNA, 465 bp, Homo Sapiens
gtaggggcgcggcatgtcaagtgtgtggacagaagatccgtgaggacagcgttaggacgagagcctgtattaggcgagaactagcttgagatctcccagagtgccagggataagcagatggaggtgtgagtgggaggtgcatagaccgaggagaagaggtagtagagtcaggctggagataggagccaagtcccttgagcctcatgtactaaatcaggggtctgagtactgtactaaatggggagaacctttaaggagatataacaaagaagtttccatgattgctgttgtaaagaagaatcctttggctgtagtgtggatcactgtctttagcaaggaaggaagcagagctcacactggaaggctgctgacatgtccatgggatactcagccatgggcatgagactggagagccatggtcaggttggaatctgccttgctgataggtgtagggggggtccgagc

SEQ ID NO: 35417 - DNA, 673 bp, Homo Sapiens
cttaatgtatcccaacaccccacttttgattccaaaaccaaagatgtcttttcttaatctctaatccagtacttggttctggtttttgaatacatgacagttcttccattttctcaatgcactgaccactaagaagctcattttgctatgatgagccaattcacacagagctcagagcaatagaaaacattgttttcatttaggttcacttaggtgtttatgtcagcttgcatgatatgtttatatgaaaggctgccttttggtgaatgtaattcccttgaaatatcctattgaggatctataactattatttttataatgttatcgccttgaattctgagaaagaaaaattcagattggcagaattctaaccatataggaagttacccatggtaatatattgttatttaatatacattaaatattgatacaataacatattaaatgaaaggtctataggaatctggaacttttttgttccatatctatcttaccacctacctccttccctgaaaattttccatctgtcattcaatattagaaaataatataaaatgttctgaggctgggtcagccaatgcgcaaaaagttaactctccttctttgctctaaccttagcagagagagatctactagttcagtcataatatggtgttgggccgatacggggatc

SEQ ID NO: 35418 - DNA, 366 bp, Homo Sapiens
tggcggtacctgaagtatcgcccaacacttgatatatagtcttgacagtatcctgccatcactgagaagactgactaccttgcccctgagcttggagtacaaccatttaacttgctttgataaacagaaaattactacactttgcatagagatttcagatggcttccataatggggattcttcctctttccatttaccatgagaatatcacctggctagtacactgttcccagaaggagagtgagaaactaatgaagtcagattgcccccacctgatccagaccaaattggccaaactctaactactaccaagattcagaatttggtccatttcaaataaacagagccatccaccaaacccagctt

SEQ ID NO: 35419 - DNA, 394 bp, Homo Sapiens
ccgagacacacacatacacacgagcacgactattttgaaattggtagtcactcagtatctcaatcttcactttaaagactaatttattagggctagaatatatgggtgtagttgtcaaaaattcctgcatatacccactcaggaaatattttcccaaatcttctccatctcaactctgtgaggcattggaagaggtgcttttaggcatagactgatgcactctatatatgatgtctcgccctccagggcagcacacagtttagtgaggtaaatgtctcatgaatattccacaagatccaccttgataatgctctaacgttactcatagagggctgaatgtggaaagatgctttcgtctggtggcaaaggatagtagtgtagggcgggggatcct

SEQ ID NO: 35420 - DNA, 654 bp, Homo Sapiens
gtgctctagacggatccctgatgttatccccaacacccttctctaaggcctaatctagcctgctcctcacctggactctacctctcgctcttccctggcatggtctacataaaataccaagactcgggaaatagaactcgggcgtagctggatgccaggcagagtgagccggtctgtaaccaacacaatgccagctctcatggcggtggggagaatatgcaaattgggggctgaacagcaccccgctcctcaagtccgtgggtgggaaaatcataatgtgtgcgtaactgtgttgggcgataacatactgatgttatcgcccaacacagtaaacaagatttcacctattcatcacaaagcactcagggctgccattataggtcatcaagatcaaagaacttaaacgcaaggacaaatctaaattaaccttaccttgttgtaaagcctcacggaacacaaacaagaccttgtggtactaaaaacattccaaatatctttgaatcactcaaactactcaggagcacattcctcttatcatctacttttcaagcctagaagtcaatgcaacttaataagcttagttctactgtccatatattcgaccatgtcgaatcatctgccacatctcttcctaatacctaagaacgtaaaaac

SEQ ID NO: 35421 - DNA, 416 bp, Homo Sapiens
ccccaaacgtgcccttatccccgcccttaccctactacatctgacttcctcctggcatgtttctgcatggagctgactagggaggggagggattcctcaaagaggaagacaacctgggggtacagtacctccttacctctagaatgggccctgaggttttacttatgcggccctgggtgctggtgtctgggaactctcaccagcctgtataccagtcttgctttagggtgaccttctggccctggagcatgggtagctggcatagaggggtatgggttgcctgccccattctgctgctatagctgaacagtcctttccccttccctcgctgggcagcttgggggtaccctaacccaaaactctgtcctctcctcccgccagtggctgacagtagctgtaggtgttgggcgataaca

SEQ ID NO: 35422 - DNA, 515 bp, Homo Sapiens
tgtatgccaaaccggcactcttagctctgtggcagagcaggtcgtagtcatgccttcaaaatagccttcactcctagaaaaaaaatggagaaaggattatttaaaatctagagaaaaaggtgagcccataagtcactctctctgaattccagaagctcagcaaataatctgagttgaaccaatggtgaacaaataccaagtcctgctgatgttgattggaccaaagtgatggagaatctagttgggagtccggtaatccttgggaggccccagcatcactgcagctcaactgtcattcctgccttgcagctcatttaactgcctctggcagcactatttctggctgggccatctattttgggtggccagggaagtggttattggtttcgtttggtttggatgtggtttacagtgctctagtgtgatgatgaagataacatctggttattccaggattgggggtgtagtgggtgtgtttctgtgtggggcgatagtatgttatccccaacacgcag

SEQ ID NO: 35423 - DNA, 523 bp, Homo Sapiens
gtcgacgaaattggagcaaaaccaagaaagcatttgtcgaaccagtgaaggaaatatctagaatactgatagaagcttagtaagaagaatgacaactggctattggattcaccacacaaaggctattgatgatttcgacaagagcagtttccatggagtggtgggggtgacatacttcacttgtagctggttcatgagacgaactggaagggaagaattagaggtagcaactcttttgaggagttctgctatgaaggggacgaaggaaaagagaacagcagttcacagatgcagagaaaaaagtttaagagattttaccagcatatttgtattgctaatagaataattggtcaggaaaaaaattgacaatccagaaaacagacactaggcgtcaatgtcaagctagagggatgggcttagataggaatagtgtaggtacatacttagtaagaagggaggaaggaaggctataaaagcaccaatgcaactgggttagcagatcaggtggatgagtgtagggcga

SEQ ID NO: 35424 - DNA, 557 bp, Homo Sapiens
accacgcatcactaaaaacaggaaaactgcttcgctctgtctgatcaaataattctaactatatggtggtttaacagcagagcatgacataaagtttatcacctacggtgtgtgtttttacctggggcaagtgattaaatgtgtcctctgataaaaaatatggttaagaacatatactccagaaggtgttttacggaatagattaaaacatgtatattaaagcacttggtgggtgctatataaccattttaatgatgactatccttggtacaagagattcttgggtagttaacaagattagaagtgaaaatgactgaaacagtaatagtaaataatttctcatatatctgacatcttcagttatgcttcaaataatttacaaggtttgtgatttatcccctaaaaaaattatttagcagtaaaaaattagatgtctgaacatttcacatggataccacaaggccaaggatcaataaatctaatgaaatactcacaccaggaaacgcagtttttcacttggtattatttggttgctcatagtcacagttgaaacatac

SEQ ID NO: 35425 - DNA, 513 bp, Homo Sapiens
tgaccgtttgcaggacagctgaatggtatttaaaaacagaagtgtggtcggttttctgaaggagctatgaaaaaatatggattagtcccagtatacgttttttgtacttcaatgtgtaacgacaccaccagaattcggagtagattagaaataatgaataaccccgtagaaacagtgtaagacagggtaaaaaggcagtatagaaatgattgatgcttgagcaggccctgattttgacatgaaagagagatggtggtgctgtggtggaaagtagctgggcaaatgtcatgtagttgagaactactgcaaccaatgaaaacacagcactcctctaaaaacagagtaatttctctttaaactcttaatcgtgtatgtgattgactacttttcaagatttgaaaaatatctcacaagggtaaattcatttaacacaaactgaccttgtgtgtaaccccaaacttctaaggataaatatcacaaaggtacctttttaaaaacctaaaagactatgta

SEQ ID NO: 35426 - DNA, 546 bp, Homo Sapiens
ctcgacggtacatcattaaagtcacccagaaatataatagagccatttcttagatctccaggaatacagaagatgtcacgaccctctgataatatatcctaatatcgtcagattttattagtaggaagaacctaagtgcctttgcctttactaaaattcaaactacccacatctataaaagtgacaacttttaatgctgtatttcaaagatgactgattaaaaaggaccatagtagatcctttgataagtatgcttacttggtagaaactccattaagaagtgaaattgatttactgtatccaaagtggaagtcacaaattcttacaaactactgtttcctgggtttttcctgaactattttcccaccagattgcagctttttaagggctgctgaagcctgcacagatcttttatttttcacctcagggtcggcatgagtacttaggtcttttctttcaaaaagaaaaacagcaacttacatgctctcacagaacctcgtcagcgtgcttggcttctcctgatggcgtctttgtcgaaaccagcgc

SEQ ID NO: 35427 - DNA, 491 bp, Homo Sapiens
gtaccggcacgcatctggctacagatatttatgagcataacgggtgctgagaacgttgtccaccccctctcccttttccctgactccaggcccttggcagtgtggaccacacgcagagcctattatgtctcgaggcttgtccacacatctgtctcatgatgcatgtgggtctttatgtttgattccccacaaacggatgaccattccatccattcttgttccttgggaacaagaacagaggcctcttttccccctagtcctcctgtgctgccacaacaaagcatccagacctggtggctttgaagcagctacgttgtcggggtatataccctggggttcgttgtcgcgcaccaggaaagtttaggacacggacgcacacgaggagtttaggaggggaggtttaataggcagaagagaagagaaagagaaacagctctctccatagagagaggggtctccaatcggaaaagactggctggtggtgaatgcgt

SEQ ID NO: 35428 - DNA, 657 bp, Homo Sapiens
cacttccttgacataatctttctactctactacaatttaactatcgtgatttctttaattgctcagtcctcttcccttttcttttccattataagtttctgctatatcagaagtcatatttcctttttgttcctaaaattgtttcttgtgccttttctccatcaccaacggaaaaactatttattgcaatatattaatacagcaggtattcctgtgaaagcgcaagttagtttgttagggcaattaaaacttctacgacatatgctccggcatagttccgtctctgccactggcagcttaagatctgccttcttgagagtggtttttgccagttccttttcccactcagttgccttttgctttccggaccacctgtttccagtcgtgggtttggtcatttttgggtggaactgtggctctcccctcctcagctcctagtcatggctgtgccgtgatttgggtggaactgtggctctccctcctcagctccagagctcctgtgcactgtcatttttctgctgctgcttgggtggctgctgggttcagtcaccagctttagcttcaccccttcattcatattttaatttttttcttgaacagacttatcagagtttgtcaattaaaattttttttcacagagtcagctagtatctgctt

SEQ ID NO: 35429 - DNA, 354 bp, Homo Sapiens
cacatcgacgacaatcacagtttaaaatagtacggactatagttgtcatagtcttacaatgctctgcattagttattattcaggatgggggaaatcaagatttcagattatttgaagatgaattggtttttacagctctgctgttcactggctcctggtgggacatttgtggctttgacaatgtttcctcaggggaacatggggaattgataggctttttctcagacccttctggccgtgaagcttgatattctttcctcagtgtcgtgacctccttctgggcaagaagtttatttccttagtgttttctggcacatatggatctcagtaaatatttcctgaatgcgtccgtcg

SEQ ID NO: 35430 - DNA, 393 bp, Homo Sapiens
cttaccggtaatagatgtatcttgatatagcattcaattgtcctcactggtctgtgacacaagtcgctctacttgatggatggatgagaagagaaggagagggatgggaagcttgggtcgtacttcagggttatggatcccagccaaagggctttcctagaaagactctcgtggtccgtcaccgcttttgtcaatcttcagtgttacatgttcttcatcttttgtttccatgtaaagtaatgatcggcaggtacttctaatttgcctgcagaatatgtattctacgactctttcatatatgaatatttctaacagaagcaaaatctgtgaatgattcttgtatctatagtactaagcatctttattagctagcactcaagagctaaaccttta

SEQ ID NO: 35431 - DNA, 425 bp, Homo Sapiens
gcccgaagtctggtgtccttacctctgtgcttactgactctgcttatatcttgcttatgaatgcttatattaccagcaggtacatcttatttttttccggtgttatggtactagcatttctaaaacatgttaagtatgataattttatgagtttatatatttagagacctaacaaaatgccagcagatatataaagtgtgcaaaatataagcaggatcacattacaatctaggactacttgtgacctgtacatatgaaccattactcagttgttgatgggtcaaggagcatggaggcacctcataaccagacatgcagacaaaacctcttccacctgctgccaaattccaccccctcttcttgtctctggttgttactttccattctcttttctgtctctttcaaggcttgatgagccttgggga

SEQ ID NO: 35432 - DNA, 498 bp, Homo Sapiens
cacttaccttcccagatggatgcacattgcctgcaggtctttacattcttttcctaagcagttcttagaggctatgggatcctggagaccacaggtgacaaagattagtgagtctcttagcaacttggagaagtcaaaagataatgctaacatgtgacttaggttttatcacctatgaggagctcagaggataatgctttggtcagacatgaatttccatgactttcccaaaggcacatagccagttgcagcaaagctaagcccagaatccatgtctctggaatcccagcccagggtctctaccattgtgggacatcatttctaagataatctttgtttggctgagtttgagaccgagctgaaacttcatggaaaatagcaccagcatctttatctgaaagaccaagggggatctttggcctcatcatcataatatcacccttataaatattacacatttaatagttaatatagagccttcagacccattatctcatt

SEQ ID NO: 35433 - DNA, 421 bp, Homo Sapiens
atgtctaaaatagcaaatgtgtcactcttttctgttattgctgatggggtttgagtcattattagaacacttcctctattcccaaattactaagtaattcacccatgttttcttctaatacacatatgggtttgcgtttatatctcggatctattaggaatttatcctgatatacattgatctcgcataattttaaaatgcaaaacaaaatgagatcctatattctcgtatcaaaatagaaaatattaagtgcgatactatccagtgcaagcaaaagaatgggaaaactggcaacctctccctctgctgatggcaggctacgctgatgaaactctttggaaggcaaagtagaaaaaactagcaaatatatatgcacgtcagaatttctcctacatgtgcttgtaggatacttacatcacat

SEQ ID NO: 35434 - DNA, 389 bp, Homo Sapiens
ctgggagtatagtagtgcgctgagaatagatgtgccatattaaactgtgttcatattcagggaggtcaaggggtcaaaaggattttacaggaaataatgaataggattccataattcttttcaaatgattatccttagctaaaaagatcaataacatggtgacaccagtctgaatttggacagccagtatatgggcagatatcctcgtggaagtatttttctttgcaagggtgagatttttgcagtctcttacgatagtttttgttatcaggcatataagcataaaaaccattaatatacactagagatggattgaagagcttataaaattgttaaggttttcttctttggtcagtgtctaaaatatgagtcagatatttccttggtta

SEQ ID NO: 35435 - DNA, 353 bp, Homo Sapiens
cactactaggctgtctccaccacatctgactggctcattcgatgcctgcgggttatagctttaagttgcgtatgaccccgcataagtcttctcagctccctgggcctgggttacctctttgcggcactctaaaaagcaaagcagttggacaagagtctttgtaaaggcccttcgagctcattctagattaactaagtggggagattgctgttaggcaccaggcagatgagatgcagggtctgttgcctgacgtgctaggacacttcaaagaaaaagcactgtgtgaactgccatggccgcttctgcacctggtgctgaccccacatccggaagcattttggatgctcccagca

SEQ ID NO: 35436 - DNA, 539 bp, Homo Sapiens
acattttcctctatggagacaggagcacaaagagtggggggcaatggagtaaaatccataggtggtattatagttagtgaggggaacggatttgcagatgatgtcacagatagttttgattgttttcagtgaagtaggaattgggttttaacagctgaaagtgaagtatgtttttaagcaggaggtctgaggaccaaagtgagagtacagaattgctgctgagttcagaagatcaagctaattcagtccacagaaagaaagattgctaggtaactaagtatccagcagaggttggggcctgaatttgtagtggctgtaattggttattctctgcagtcctattcaacagtctttcatgtagaactgataaagccaaatggtagggctaatcctagactgaggttttgttaagacagggggacctggggacagagagtcaagagacttgaggtaattgcacgagggtgattggagcaatgggccaaaggatatagactgtaagacaaaaagtcaagccagccccacaagagaatgtaggt

SEQ ID NO: 35437 - DNA, 387 bp, Homo Sapiens
tttcagcaaacactttcctttaaagcttgactgtgtgggcactcaaccgcagttgaaagacgcatgcgtctttcaactgcggtcccatgatagcccattgttttacaattctgattagaaatccttcagaaatatttctgtatcaagcttgtaatgagcctaacatttcagtcccctccaaatgatatatcaaaacaacttaatgtaccagcaagagaggcattcataaggtcaccttatatcacatgctacagaccttttccatcacaaattatcagcttatataagatgtgctgagtagtgattggcaagttaaaaacaaagttccttagttaaatgtatcaattttctcatggcacagagtccataacctacagcctgtgatag

SEQ ID NO: 35438 - DNA, 424 bp, Homo Sapiens
ctcatggaactcccctgaataaaacctcctgatggattcctgtcatactctaattgagatctgaaagtgctagtggtccctgcccgctggaacacttgctggacaccagcctcttgactgtccctcaaatacaccaagcacctacaagctccagggccttctcacgaatgctccgtgtgacccggatgctccttctgactggagtgctccctcctagggtgctccctctgaccaggataatctcttcacactcattcttggcattttctctttcacatctttcaggtcttttctcaaaacccatcatcttacagggggtcttccctgactgcctgatctaaaataacagcccagtcacactttcatcccagtaccctgcttttctttatccctgcagagccagataacattaacttatgtatct

SEQ ID NO: 35439 - DNA, 375 bp, Homo Sapiens
ccaagcgattctcctgcctcagctctgccatcccctggtgtccaagctcaccctgcagctagatctcctcatgggcttagaatggcttggcaggaacagcctggatcattgcatcctcattcacatctggcagaagagtaaaagctaccagcaaaccattttttgtgtgtcattaatctgaatcctgtcacctgcccattctcttatcaatcacgactaaggaaaggatttacactatttgcttggcttaatcaggggcacccatagacctggcatacaatgcatgttggggagacaatcacaattttcattataattagaattgcttaaggagttcaagatcagcctgggttgtcagaaagagactccgtctcc

SEQ ID NO: 35440 - DNA, 470 bp, Homo Sapiens
taactttacagaaatacattgtaattggactttttgctttttttcatttctctaaaaatgtttctatatggtaccaatcgttcttctactgtttgctttattttcagtgtccatatcatagaagagtccatgttgtaaaagaagtcaaaagcagccttgaataattggaacccttctgccagattgtcttacatcatcttgttctttggcattgcttctaagttttcttcctcatcatcttgcactgatttggaagcactcgtctccatcaacaagtcatctgttaattcctatggtgtggggtttattagctcctgaatttctcttgaaacccttcacaccccacttttttttgccacatccacaatctctttcatgatttccttgattgactcttttgtaaatcctatgatgttttgcacaacatctgcacaggtttctccagccagaatttattgttttgggcttgt

SEQ ID NO: 35441 - DNA, 404 bp, Homo Sapiens
agagctggagtagaagggactcctggttgtgggggtacagcgtagatgccagtgtggagacaggaaggatgataacgtgtggtcccactaagagcagccatatcccttgaatgtactccatgtgttagttactatttacagagttattcaggctcctaacatcagatttttctagatcaaagtagaaataagaggaacgtcaagaagataatcaacacgtagcatgcagaatcattattttaaaaggactaagacagttgtgtggtgtgattgttgtaccaccttctctttggctgttagaaagaactgagtagcgttacacatgaaaatgtgaaatctgattttcttatttctaaacttttaaaagctccatatctactgatacaaaccgcagttgaaagacg

SEQ ID NO: 35442 - DNA, 364 bp, Homo Sapiens
aggggagagctgatctcccctatgggctgaagttcccctggaagtgctggggtgacaggtctcccctggcccagggcttcggggcccatcctccagaggcaaaggagacagtaagcctgccatctcgggtcctttcatggtcaccaaaaatgttgtggggaactgaggaccagagagactgatatggagaaaaggaggattgtttattttaaggtacgcaccggctcagtggattcacatccaaaaaactaaacattgaacaaagacagaacgtggtttttataagcagatttacagaagcaaaacaaaagcagttaatcatacagtgacaggtcacataatctatagcataacataagttgtg

SEQ ID NO: 35443 - DNA, 478 bp, Homo Sapiens
acagtcctttccacaccttcagcagctcgtcgtgcgttaaaaccacctgcatcaaaacagcaacggttgggaccaaatgaatcccacaccttcgagtgccagaaaggaagccacagaaacgtgactgcctgaatgagaccaaagtcccacttacggtaaaggcaactggggggcaaaatctggccctccccttcaaacaatccttctaacccagaacctgccgcgcctgtggctatgcggctactccaggtaactgctacttcacgcacacagtaaaaccgactgagatctacaaggtatcaggcaccatactccattttggaaattcaaaattgcgaaccttgacggtttcccaagctggacagtggccacaaggttaatctgttggtgataattcatccagcattatactgagggcttctgcactctcctgtaatatatctcaaatactaaaagaagaaagtgaactcaggcattc

SEQ ID NO: 35444 - DNA, 366 bp, Homo Sapiens
tagactccgggggaggggaggcaggagagaaggagggacttctgaatgggaaacagcccaagacgagcgcctgcagttgtggttggccagttctccagcaccttcttatcaaaggaaaactctgttctacctttattttcatttcctcaggtagctctgattttgatagaatttattctattttaaagtcacataggtcttcatttagaggaaggtgtatttggagtctaataatctgtacacacacacttttctgaaccacttgagagtaagttgcagacatcataccctcttatttgtaaatacttccgtgtgtatttcctatgaataagacattctcttataaaaccgcagttgaaagacgca

SEQ ID NO: 35445 - DNA, 561 bp, Homo Sapiens
aagatcatgagttcgtatgcagggtacatatgtatatatagttgttacgtgggtatatagcatgcatgaaaatgaggtttagggtacaaatgatcccatcacccaggtagtgagcatagtaccaataggtagtttttcagcccctacccccctacctatctttcccttctaatagtccgcagtgtctatagttcccatcttgatgtccatgtgttcccaatgcttagctgccacttttaagtgagaacatgtggtatttggttttctgttccttggtcaatttgcttaggataatggcctccagcttcatccatgttgctgcaaaatacttgacttgggttttttatgaatacacagtattccatgatgtatatgtggtaccacattttctttatccaatccaccatggttgggtaccttaggtagattcgatgtctttgctactttgaatagtgctgcgatgaacatatgaatgcatgtgtctttctggtaaaacaatttgttttgctttgtgtatatacccagtaatgggattgctgcattgaaatggtcgccaatccg

SEQ ID NO: 35446 - DNA, 546 bp, Homo Sapiens
atgggcgacatttcaagtccttggactgttttagcctattgttactgtcacataggatgatctacatcacccttgggaaacaagggattactgtggcaaggaacttgtgcggcaagtcacagagaatcaactagtcccagcgtaccatctgacatgcagcttgacatatggaggtggcacttacatcagctgcctcctctatcagactgtgaagtctgtgacggcatccccacgccacaggatccagagcttccagcagaacagaagccccatatacatgagttgttgcaagtagaaattaaataaacatttttacagttaagcaacaagggatgggtgtagctcagagaagcacagttaaaatcacctaattgtgtgtgtgtctaaacagctggatatgatctcacatgtcgtatataaattcaggaagggccgggctttagtcaataaaatttcatctctggacactgaaatgtgaatttcatgtcattttcatgtgtccccaaaatagccttctttttccatcttcaaccagttaaaaatgta

SEQ ID NO: 35447 - DNA, 358 bp, Homo Sapiens
aaaaaatattagcactatgtgtaatagtatcccagtctgtcatttctctttaacttagattatggtatctttagtggtgcgtattattttatttttttatgtagtcaatactaatattattttcctttcttgtcatgcttccccacacctagaatttttatggcataactttgagaatacaatgagaatttattgttaggggtgatacaaggattctagttatatttttcataactagaatttattgttaggagtaatacaagaattctacttatatttttcataaaatgccttggtagttgttcctaaatggaataaattcaccttttccccactctttgaaatggtcgccaatccg

SEQ ID NO: 35448 - DNA, 361 bp, Homo Sapiens
ataggcgaccatttcaatacaaaggagagaaaaaggaaatagggactctgaaactaacttccaggacatatttctcagactcaaaatagacttgaccttaggattgtcatgagaaaagccagaacaaatgaagtcatcatatataaacttcactctcaggaacacgactgggggaaacacagaactaggttaagggacactgattagccaataactgctcccctccttcagctgagttttcctacaggtcatactttaaggctattaaagtcactattatctcaaaaatgttccatgcaacctcacaggggctccaacctcctactaaccctaattaaaagttgaaatggtcgccaatccg

SEQ ID NO: 35449 - DNA, 418 bp, Homo Sapiens
atggcgacatttcaagatgagtttgaaggggacagacatgtaagccatagcaatcacattttcataaacactgtctttccatatagcaaggaagcatagcaaagtaagaacttaaaggcttattttccttgctgctgaatttaatatcatgtgttataattcagagacatgtaaggtacaatttaaaaacagccaataagttttttagagacccactgagtacctagcactgtggtaggtcttatgcgggattcaaaagcttaaaataaaaacaaaccatttaagcatcagacttggactctgttcattaaaatgcaaagagagctgagtttaagagcttggtaacttgggttttaagaggaataaagcactgcagatattatcatgcaaatttgaacttgaaatggtcgccaatccg

SEQ ID NO: 35450 - DNA, 677 bp, Homo Sapiens
ccccggatagcgacatttcaatgttagagaacaaaaggaggtaatagtgcatctagatcttctctgtaacataataatgaagtcataattaaggagtattagctctttaatacaataaaacatttataatgtatgtaagaactacaagcctaaatctactcgggtgccttctcaataaaatataccgaattccacagtttctacttcttttcttagaaaaaccctttcatctactcctgactgtccggcttcaggtattttccaagctccattaattacttgcactttttcccttctcttgctttacaaatttggcgtctagagctgccaaagccatatcctaatttcttcagagattctggatttggtgaaaacattgcaatctagctccatggttttattattcaaactttcttggcaaggatcttatggatggatacgtccgattaatctctgaaacatgaagccctctttcaaagtagttttgcatctttggttcaaaccaccagttattttgacaaatttccttagtcttctctctgtttgatggtaacaaccctctggcatattctttaggaaggagtggttaggacagtagtccctgagttctcgtaggattaaaacttttttttcgataactttgatacttgaaagacagatgggctggatttaaattc

SEQ ID NO: 35451 - DNA, 426 bp, Homo Sapiens
aattggcgacatttcaagaaacaatgacaccaacagcacaccaccagtgcttgctgagtctccactgccatccacgtgccacagtctgcatctgcagctgccacagcagggatgctcccaaagtgcggcctctgagcagttcctccacaccctaggcagcagggtctccacatctgaatactgagatgcaagttctcctggcaaacaacttgcttttcatttcctttttcactgtcataaaaagggtatatggatttttttaaataacatgtgtaattaggatatgttattcacaaatttcattttaggattgtaaaggtggcaaatacacatgaaatagccagatggattcctggaatagtggaagcttaatgaaaagataatttattctgtaatttattttttgttgaaatggtcgccaatccg

SEQ ID NO: 35452 - DNA, 435 bp, Homo Sapiens
cagatgtgttagtctggatgccatgaagatgacgggccgccttaaaacagaagtacatcaggctacctctctaacctctctcatgtgaaatgtcccttaagcccatcttgtttatccacgactagcatatgactctgggtcttaacactgctgtgaaggctgcctatttatctgtcttccgggtttgaatgcagtccaggaagttgcatctaggggatttactgtgaccttggtacatagaaaagcataattcctttctccatatttgaaaatctgctaagaggtagttcttaccttctctgactctggtattggtccgcttcctcacctgccaggtaaaggcctgtcccttctgtcccaggccttttaagctgtgtgtaattgtgggcttgactactcaggatcagccagggagctagacttttgggggaaaat

SEQ ID NO: 35453 - DNA, 366 bp, Homo Sapiens
actagcctatcgctgcaggggcgccacgccggagttctacggagcatatagaagtaacatggactgccaattccggggattagggtatgtaagtgtgctgtgtggtcagcagtgtgcaagggcatgctgaatcttagagcgaaagcgtatgatcactgcgcccgcatcgataaagggatggccatggctagggtttctagatagttgggtggttgttgaaatggtcgccaatccgcggattggcgcccatttcaagggaaacaagcagggtacagcagcaataggataaggaggcagaggcgcatatatttacacaggtggtttgggaaggcctctctgagtaggtgacttttaaatggaaatcta

SEQ ID NO: 35454 - DNA, 467 bp, Homo Sapiens
tcccggatgggacatttcaaggcatccatgaagttgaaactatattcataataatgatttttattactttttacactttcattctctcaggagtgtatgtggagtgttctggaagctacatgatgtaggatgatgacatagctctggtagctaatggaatgtttgcttatgtgttcttgtatataataatttctcagtagtaatttctagtgtgataaatgtcagtaaagatagcccacataagcaaaatctctttggggtcttctataattttaaaaagagtaaagggatcttgcaaccataaagccttcagtctcattctgaagaaatgcagttactcattctttgctactttgaaactagacaaaattgctgccacattctgaatactgctgcattagaccagtggctgtcagtaaagacgtccccttagcttataaccaatacgcaataaaaagccaggacaa

SEQ ID NO: 35455 - DNA, 417 bp, Homo Sapiens
atctagaggatctccagtgtcagacttgacagctgtcccttcatcatgctagagtcagcatctctgtctccaagtaagatgcctgctctcagataaggtacaatctgctgtgggatttcaaactatataactgggtcagaaataagagtaaatgattcctctggggcctaaagaatcccatcataagtagtgcaaggacaaagaaaaatttaaaatatgaagcataattctctctattgaaaaaaacagatttccctcctctccattttcttagaaagcttgtaatactaagtactttctcctcctttaaaacatatataaatcctttacaaagctaaataggccttttgtcagtcttatgacctaggaatgccttaagggcttgcacatcatctccttgaaatggtcgccaatccg

SEQ ID NO: 35456 - DNA, 457 bp, Homo Sapiens
tgggacaattcaagcgatagcagatttctcatcagaagcacagaggccagcaggaagtgtcctgacgtctttcacgtgctgaaagagcagaacgtccgcatgaatcctggtgtacagtgagatatcctgcagagctacccgtaaggaatcttctccaaacagaaaggaaatgataatagaggaaggcttggaacttcacaaaggaaagaagaacgtcggaataggtaaaaccggggacaaaacataatagccctcttcttggaaagaatcatattcttatatcacattggatggttgaagcagaatttctagcaccatctgatacgggtgctcaggggaaacagaagacgtccctgagactatcatagtcaaagtggggaggataaaatggccttcgcggaagcaaggtttccacccgcatgtgaagtggttaaaagttgaaatggtcgccaatccg

SEQ ID NO: 35457 - DNA, 548 bp, Homo Sapiens
aggagtcatttcaaacaatgatgctttctcctgtctgatccatttcaaactgctataacagaatacgcaaaaatggctaattcataaagaaaggaaatgtcattctggaggctatgaagtcccatatgaaggtgccagcatctggtgagggtttactctgtgttatcccatagcagaaagcaagagcgtgagagaaaggaatggggaagggggcagaacttgttatttaataagaaaatcactcccatgacaactaacccattcctggcataatggcattaatccattcatgagacagagccctcataacctaatcacatcttaaaggtcccatctctcaacaccgctgcattaaggactaagtttccaacacatgaactttgggtgacccattcaaaccccggcactcctcaatacctttcccactggatgcatctgcaaggattttcatcacctcaggctgtggcaccagacggtggagcctcaaattctcaatcgggacaatacagacaaccatcatgccacagaggggcaagtatggcattgtg

SEQ ID NO: 35458 - DNA, 597 bp, Homo Sapiens
attaaacgttaattacaagtatgtcatgatccctcacgtgacttttccaccaaagctcacttatagaatacatgatctataattacatctacgctgggactctgcaaaagaacacaagcaccagaacaaagagaaatgaatcactgataacaaaatgacactctaaaattaagaccacaaggttgtggggcatctgaaaaaggaaaagagcagcttaacattcacttcacaaagaatgcagaggatgctgactctgaatatcgccaaacagatggacctacaccaacagcaccacgctactaagcctcccaaaccaagcagccactccgcagatcataggaggaggagactcaactcatatataaatcaaaattcatgaagcataagtgaaacattaaagccaataacttcaaatcctaaaaatgctatttccaccccacagttggtaacgcccaaaacatgcacaataagcataagactgaacaatagaaacctggaaaaccgttcagtacacttaaatgccatcacagtgattcatgataaactctcatcaaggctacttatagccatacataaataccctaactatacttatac

SEQ ID NO: 35459 - DNA, 471 bp, Homo Sapiens
atggcgacattcaagtgctaatgccatatgaaggtagtggttactgaattaaacagtgcagatctaggggctggttcaattcaggtttaattctcttggcaagaagtgccaaaatacgtggtgctcacttcttcctattgcatcatcttatgaggcacatacatgtctggctgtcccacttttagtgttcctaataggtttaaagtgttgttaccctcactcattcattgtagttcacccatcagcctttgacttacttggtctagcagcctttgctgatcattgcctggatccactagaaggaaagaaagcctttcattataactggtggagaataatttatttctattttatttaagcttttctctactaattagtatctaaaagggatggcagtcaggaccacagcatcaaagaaagaaaggctgcagagaaaaccatgtttgaaatggtcgccaatccggggtaccg

SEQ ID NO: 35460 - DNA, 412 bp, Homo Sapiens
ctacggggctctctgcgtcgccctgcggctgcgtgcttggcctggcgtcgttttcacctgtgcccagctgctcttccgtcctggcctcagtagctccccccgccttggtctcccgcggtgttgggcttacagccctgcgccactgcgccgcgcctgcgcctcagtttctgctccttgcaactgggcgcctgttctgcgagctagcgcaagtcttgttgtcttgtgtcccctgccccacagctgtgcgagatactagctaagatcactgaacggttatcaaactcaatctgatggtgaacgacgatacagagatcaagcccgtccgcatatttaccgtggggacactgaggcccaggaaacttggagcttcttcaagtaatagctcggcctgtactgccccatatggtagccg

SEQ ID NO: 35461 - DNA, 501 bp, Homo Sapiens
tatgcaaacaatggtgccagtttctgtatctatgtgacaaaaatatatagagttgtggtatcacttttacctgtttagagcactctatggaaaggcaggaaattactgtgaaggtattggtattccagaagtaagttcctggagtgtttgccttctaaggtgtgaggacgtggtttgtcacacccagttaactaacagatagacggtgtagtgagctgtccggaagacttagcaggttagcctagggaggaaggagaaaggggttctgggcacatggagggagggggagggaaaagagtttgtttgaatctgtcctagattggggtagctttttcggagggaggccttgtcgtgtggacctgctgcgtataaagacaggagaattggacctgaggtgtggtgctagctaaagcgccacacagatctgggaatttaagaggagttcatttcctcaatcattaggaagaacttgaaatggtcgccaatccggggtaccgagct

SEQ ID NO: 35462 - DNA, 402 bp, Homo Sapiens
gtttcctgagttattaaagattatgtagcagacattgccaaaggagaaggtgtacttgccctgcatgtggaccatttattttatccatgtagcttattagtggctcaagcagcctcttcactgtgcaaatatagtgcagtgtacaatacaaacagccttgggcctctggtctgggccttgttgccttgtaaccttggacgagtcaatcaacaaatcttagcatttctgtcttcatttctccaactctgtggagcctgcagcaactatttaagatccttagcagattcagcccccttgcagactgtcggtcatacctgtttgtcctagttaccatcgggtgctaggactgaaatcttcaaagaaagtgatctgtgtgaaagtaattagagatatataacatgc

SEQ ID NO: 35463 - DNA, 613 bp, Homo Sapiens
ggatcatttcaagagtgtagacttgccccaaacatctcctcggttcatcccggcaacaaggagtccgtggcctaagctggaatccttaccttctgggtagagtccccactgcagcagcaccaggcttggggatgccaacagaagacccgctcttccaggtctcctccctttcattcacctcggcctggctcctccagatgaaactccgcccattacgtctaaaacggagcatctccgtggaaggcccagtgagaaacccctcagacctgctgccctccactcactcctactgccgcaagcctgaaatgcatcaagctgattatcacctgtaagaatttccaggcttttgagcccatagcaagcccagggaactcagagaggagattctgtgacagctgcttgacattagaactacttgcaactccttccaaagatgtttgcactcttcaccataatgcaaagtgggatttagtgggatttggctttaagatggagaggaaggttcctggaaacctgtagctgcctgagtcaactaaacatctccaaggagttggtaaaccctgtaagcagacattgtggggtacctgtctagcttctaacctatccaagaact

SEQ ID NO: 35464 - DNA, 585 bp, Homo Sapiens
ggcgaccattcaaaatatattatgaaacaaaacaggatcccactgaaagcctaatatgatgtctcaagcatttcactctaagagaagacaatatagatcgccttgtcttctgtggtccttttaagaagtacattctctcatatccagagacacatatacactgacttaaatatagaggaaaaaaaatcagggttatataaaatcattaaaaatcattaactattttcaaaacagagccccaagaaagtaaaattttctctgggtataactcctggtgaaaatgcaaggccgagaaactggcaagcatgtaatcaaagaccccacccaaacacatttgaaaccctgcatatgttttgctgtgatgggttcacggcatctatattaaacattatggtaggtgctgatcttccttggctgtagtgtgaagagataaacagtgtcaaagctcaaagaagccaagggcaatacatgaccagtataagccatgactgctttccaacagaaaatatttgattcgtgcttttcaagttgaaaacatctgagcaagtttaagataagatctaaagctcaactatgggttagtct

SEQ ID NO: 35465 - DNA, 479 bp, Homo Sapiens
gactttcaaggaacagatgggtactgtgctgaacgatcacactaatacctaatacatcgctttatcatccagacaggaggtacagggtacaatcatagctcaccgcagactcaaacctctgagctaaggcacttctcccgaccaagtctcccaatcagccaggaccacaggtatgcaccagcacacctgattaattttctaattttttgtagagacagagtctcgatatgtagctggggctggtctatgaattcctgggctcaagcaatcctcccgactcagactcccaaagtgcggggattacaggccacggtgcccggcctgattattctatttgaacagataagatttttacctttgcctttactatgttggcacaatgtgtttggatttttacacctaaccagtacatcacccatcatgcataataggtatacgatctatggtagtcgaaaaaacttgaaatggtcgcccatccg

SEQ ID NO: 35466 - DNA, 624 bp, Homo Sapiens
tgtagaatgaacgcacaagcgcactcctgaggtaacacttcccaaagaagctactagtccttggagatgcaggcagcagcaggcctggacacatgcaggcctgctgtccacatgccctggagaagaggtcctgggatttgttcatccaatcttactgagggatggatactgacagtaggaaaagtatcaattttgcaaataaaaaggaaagtttttcatctgcatgttcttgcagctgccatgaatggtctccttagcagctgaaatagtatgctcagtttccacttcctacaagaatttcagagactattaaagatatggccacaacttataaaaacgctaaatagaagagagctccatctataaacacaatatcctttacttaaaaattctaaaagttggagaataggagcctggcttttaccatgaatacaaattacagaagacacattccttcactcagcaagccttggttaaatacctaccatgtgcaagatggcaagggacaaggatgaacctaaaaatgaataatgcctcctaactgaccggcccattctacatttgcctcctatttatttatgacagagtcttgctctgtcaacaggctggagtgcagtggcacgc

SEQ ID NO: 35467 - DNA, 612 bp, Homo Sapiens
gacattcaataactctcacactcactttcatttattatatgccacatactctttcagactgagatactggaagccatacaaattatgtaatacgtaattcaaaagtgagcacgtacacaagaatttagaattacctcaaaattttatcactgtcagaaaatactgtaaaatacttcctcagaaaacaaaagacatcaaaataacatcctggagaccagactgatcctcctaacaccaacaggttccaaagagaaaacagagaaagaaaagagaaggaaaattttagtgagtggtaaatttcaattccttattaaagacataaatatgtttggttgccagtaatctttaaggtctctgcagactgtgtgctttgcagttgttaaacgggcttggttctcttttctacaagaacagagaaaataaccacgggaggacagaaaataaccaagtggagaacctagccatgaaatgcagtccaatcttcacatttatcatcctggccagtacaggcctgtgtatgcactggccaaacttagatgggaagacaaccatgatcctggccacagaagtgtatctagccaaaagatgtctggttcttgaaatggtcgcaat

SEQ ID NO: 35468 - DNA, 385 bp, Homo Sapiens
attggcgacatttcaacttttaaccacttcacctatcttctatttatcaaaatctatgagtaagcattatgtgttacaataaataagactcagcaaagctctgagtgaagtcccaaagagtgaggtgcaattctgaagtgcatatgatttgtgacagttatatgtgaacttcagagaataattttacaaacgttctggtggactaaagctgtaactaccaagaggtacaggctgtgccttaatcatctttgaatttcctctaattctgtgatggggtcttacaacaggaattaaaatatttgtagaaatggtcgccaatccgttggcgaccatttcaccttccttaataatgactggatcaagcaaattaagaaaaccaagccac

SEQ ID NO: 35469 - DNA, 496 bp, Homo Sapiens
gtatataagctttatttcagagtagctaaataaggacaataatttttagaataaaagaaaggaagtagtactagtctatattttaaaatttctcgagcaattttaatattaactttaaaaccagataacaagtttaataacaaagggataaagcagtcacacagaaaataatggttataaacaagaaaaacataacaaaataataacttattttatgttatcctcttctgctgctcagtaataaatgtcataggtagaatactggagcaaatatgtaatacagattataacaaaaatatctgtgggttttagggaacaaaaatcccatagaaactgttacatggaggagggttaagagaataagaacaggccatgtgatgagataacctcaagataggaaggcacgagcactgatgatagtggagtacaaggacgtcaaacagaaatgctgcttcttggattggggtaccactcaatgcagtaaattacacctgtt

SEQ ID NO: 35470 - DNA, 364 bp, Homo Sapiens
ttgatgtcattgctcaggtatgccttcttcacagaggctcacattctcacctccgccctgaatacaaacaggcccaaagctccactcaaagtcctctgatcttttccccacacatcctctctcagaatctacattaaagggctttgcttgcgtttgttgcccaatagctgactgccaaaccaacatctctgtgttaagtctctatttgtgggttctactttcgccgaaagcctgcctgctagacaccaccaggtggacggcccatcactaccccaaatgcatgctcttgctctggtcgtgaatgcgggtcctcctctacatgtcaaacgtggaggtgtgcgagttgtgggcttggccgtggtcg

SEQ ID NO: 35471 - DNA, 352 bp, Homo Sapiens
cagttagaagaaaatactgttgaaatagaggctttaaaatgttgactgcttcccttggctttcaaggatcttgaatcacctgggtccctcttgctcacccaactttattatctaattcttttcaataagagaacttttgtttcagtaagaacccgaatgtcatggctaaataactgaggctcatgcatgcctttgtctgtgctctgttgatgttaatgaccttgccaagattaccttctcctccctctttacatacctaaatcccaaccacttttaaaaagccaagccatcttactttactaaagtctaataaaattatcccaatcctttccaagcagtaagagatattcca

SEQ ID NO: 35472 - DNA, 359 bp, Homo Sapiens
cgaatcgggacatgtcatgagaatgctaacagcagcaggctgagacaccatccccaacaaatcccctcccttgtttgcttactccagaatctggaatgcggacaggccctttaaggctcatcacagggtgagtacattgacactgtatattcatcaaaaacaggtaaacaacccccctgctccaaatcctaatcaagacctcctttatactctgtgggtgacttagcacatttagttttcagtatgtggtaagtatttttgggcaaagaacctccaaggtgaacaagctagcaggattctggcaaggggaatttgctccgattaaatatttgctgttccaaagtccaccccatttttgg

SEQ ID NO: 35473 - DNA, 528 bp, Homo Sapiens
agacacatttacatggtggcagatgagtgaaagcgaagcaagggggaagtactacactttaaaaccatcagatctcctgagaactctaacatgagactgtactagggccatgttgctaaactgtcagaaaccactcccatgatccaaccacctctcaccaggtcccacctccaacactggggattacatttaaacatgagatttgggtggggacacaaagccaaaccatttcatcaaccagtaagtgtatactagacacttacatgtccgtggcacaagttgtacttctgagattttctcatattgatcaggacagatactcatattggctcaaagtcatgttttccatttagcttcttttgacttaagatattctaattcaggtatgctagcagcggaaataccttataaaacggagctttcaaatgaaaccctcattgattatcagaaatgtccatgagcaaaaataattctcctgtagattccaaatcacttcctgaccttaacaaaattcagtggagtggacgg

SEQ ID NO: 35474 - DNA, 412 bp, Homo Sapiens
cattttagaaaaaaacaaagaactggtatctcagcttccactcttgccctacaatctactgccacacagcagccagactggacctctgcatcagagtcgagttatagccccccaccccacaaactatccagtggctttcccatcacacctggaataaatcttgtgtcacctgccctgactccactgtagcagcactggcctcctggcctctcacactccagcatcttccccctcaaggcctggcacctgctactcctctgtccaggtgctcttctctacccagctgctgggttccctcaggtctctactcagagagatgttccctgaaccaacacgatctaaacactgctctcatcactccccttcatcttagccagctctacttttcttcaaagctttatgttacttccta

SEQ ID NO: 35475 - DNA, 469 bp, Homo Sapiens
cgattgtaaataggtaggtgatgaaacaacatggcaaatgtatgatgctaagccaatatacaaaaagatccctgtgagacggagcagggacccctctttggggtgtgccagtgggattcccacaagcacagaaatagaggagaatcctgagtttccttcaccgaaaactccaggcacccagctcgccccgagaaggaaaccagcaagctgataagcaagaaggtcataacagtttcaaacaatagccagggaagttagagtcacctagagacatccttaacacgtgcccctgagctacttttcagaaacccagacccccaccaaatggattcacacagacgtcagataagggggaacaccagggactaaactctgacctccattctttgctctcagtttcttcctgaggggcctggccagaccttaatgttcctttctgcggaccccaagtttttagacaaagctttgc

SEQ ID NO: 35476 - DNA, 670 bp, Homo Sapiens
tccagtcggtaccgatgtgaataggtggtgatattgataaatagatataatgacgatggacaggcagacatagatacattgattaggtagatgatagatggatagatagaagatagatggtggatgggtgggtagataggcagatagacagttagaaagatagatgatagatagataggaaggaatttattaggggaattggctcataccattgtggaggccaagatgtaccacagaaggccgtccgcaagctggaggcccaggaaagccagtatcgtggctcagtccaagtctgcaggcctcaggactgggaagctgttgatgtaactcttagtttaaggccaaaggtttgagagcctggggaactgctggagaactgggagttctaagtccaagggcaggagaggaaggcatcccacctccaggagaaagagggaattcaccttttctctgcctttttgttgtctggcaatggaatggtgtcatccatattgagggaggatctttaccactcagcccaccaactcacatgcccatctcctccagaaacaccctcaacagacacacccagaagcgatgcgttaccagccatcccttaatccagccaaagtgacagctgccgtcagacaccacacaggctccaaagaatcgtggttgcatggtgatggtc

SEQ ID NO: 35477 - DNA, 558 bp, Homo Sapiens
gcctgcattgtgaataggtaggtgatggtatatagaatgataggtttgtaggattatgatacgcatcagtttggcaggttacattcaggtatccaaggaacattcatatggttaaccacccaagtcacagcctttggagtttttctctcgtgtctcctattgctcctgattgataaccattccctggtatcattctgtcactcatatttacataacttactctcgattgccatatggtcaccttttaaaacatggtttctctttcaacgtgcgtctgcatagcatctccgttttctacaacctcttgcgttccctttctccactcttctacataggctatcacggtagctttataaagtgcaaatcttacttcactaaccaaaacttgttcgtagctctactgtcatctacttgagtccagattctttagtttgcagagttattccatgatctgaactctgctttatttcctaaattcttgttttcttcaaactcatgctttttcaagcatagcattcattattacatatggtatccaacctacctatttcacaatcg

SEQ ID NO: 35478 - DNA, 527 bp, Homo Sapiens
atgtgattaggtggttagtgatacagctctgtgcaattcttgggtacattatacatcaggaataaatgtggatgccttagtggcgtagggtatagagttgtgtggtagtgatggcagaaggttgttaatatccttgtgggaaaagacttttgggtcctcctgttctcattttccccacaatggcgattgtgaaataggtaggtccatgtgtaaggatgaaggatgagtctttttcttgggttgtagacaaaatttggtttaccaatttgtgccgacagtctctgtttcttggagttcttgatgctttgtgtgcctgtagttcagtggtcccatctctctctggtttctaattccaggcttgctctccctttgtctgatcctgcatcttaaaccattaaactacattctgcagttgggatgtccttccagtttcttttctgtttcattacatgctacatacatgcatacatacatgaaaatatatacatcaatgtgcatatctattatacctacctatttcacaatcg

SEQ ID NO: 35479 - DNA, 571 bp, Homo Sapiens
tggtaccgatgtgaataggtaggtatttgaaataacagaaggacgctcataaaagcaaaaatactccatggtttggttatccaatttctcaatctgtgttgggtcagggggaaagtttaaggattaaaagatgaaagttttgacagttcaagtgcaaaagtaaatttatagatgaagaaacagaggcataagagtgtttaaataacgtgcccaagtcacacaactagtaaggggcagagctgggattcaaacccagaccaggtgctccagagcctccctgagccaccaggctgtgctgcctcctgcatgagacacaggcaacaaaagacaccaaggaaaggcagaggagagtcacgtgtgcgtgactctgaagagtgacaggctggatgctaagggaggcagcatgccaacccgagtccaacaagagtagaatgttgacaggaattctttcattcactcattcattcgctcagtgttcactgcatgcctattccagacgcctgcctgctcaaacagctcaaggtgttgagggaggcagacacctaactcacacctacctatttcacaatcg

SEQ ID NO: 35480 - DNA, 380 bp, Homo Sapiens
tggctggccgatgtgaataggtggtaagcaggaagtagcatttgggcgtttggtttatggtgatctcccattccctttacctgattgtctgattaggactttggtaacagaacattctgtcaccattaacttttgcttgacattggattatttctaaatacagtttggctgtcttctgatcggacattttcagaggaaatgaagttaggttaaacaaatactacgtgaaaggctacatttgattttgacagccaagaatgtttcctgggtatggagttttatgaagaatctcctatttgctctggttaatttgatattgcattgcccatagttacagagtacagtccccatctgtacatcacctacctatttcacaatcg

SEQ ID NO: 35481 - DNA, 587 bp, Homo Sapiens
ccggtaccgattgtgaataggtaggtggtaattaatagtctatctccctatatggcctattacacaagaaataaaatataatgcatatgaaatgcacattacttgttctgacccaaaataaatcattagcaaccttactaaacatatgactggatacacaggaagtgaatatatctcatcagggtctttttgctgtgtataatactaagacattcaagtggtcaataaatgatttcagaagtataaagacaccctaccagatagctgccaacaactcttaccaaaagaaacagaatccctcagtacactatcaggtttccttaatacttccaacatgttgtgagttagtgtttcaataaatgaaacagaacagtgttacaaggtagcaaatagctacttagagatttcaaggcttagtcttgggcctcacttctctgtaatcaatagaattgatcaaattaatgcaaaactgggacagtatgatctaagcatctgcactaactgatcaaaaacagatcgtcaggagtcacagcaatggcagctgtttccacaggctgaaagatcataccacctacctatttcacaat

SEQ ID NO: 35482 - DNA, 671 bp, Homo Sapiens
ttctttgttgtccttgtcagagggtggttggaaccatttaattgatcaatgtagaacacatggtataatgagaatttaaatgttaaattgagaaaaacagttacaggaataaatatgggtccggaacaaaaatttaaataagtaaatcttgacaaagtaaaaataattttacaacaatttaaaaaacagtccatagaggacaacagagagggagaagaaatgtaagcaaggttgaatgtctaatcatgtggacacaaacatactgagtctctcataactgtcttaccttttttctttcactcatagagaaatattacaaaacaaggatttcctcttgttcaatatagttctcttgaagaacagcaatttctttagttctctagttactttttctttttaaatttgagtaacattgatttttttgttattaaacctatttattactaaacaatgccagttttctttctgtctcttcatccattcatcttttcatctctcttttcgccttactacaatgcccaacacttatctccataaatattcatgaagagagacagccaggtgttcacagttaacactgaaagggaaatgcatgcactttctgctatgtcaaactactatgtactgctgattgctaagtaaaataaaatactttaaaaataaaaacatgg

SEQ ID NO: 35483 - DNA, 355 bp, Homo Sapiens
actgcgctagtgtatgtactttttaaaagatactattgtttgcctatcaaacaggcaaaaagtatgacagtaccaagtgtggggagaacatggcaaaacagcactttgacacggtggtttcaggcatggaaatggctacagttgctgtcttcaaatttgggagtatctaacaaaatggagaaatatgtcacataccctgtgtctctgcagttctgtttctgggtaaattcttacctgtatgtacaaggagacatgtatcattccctaccacgtcgtcgtcgttagcagaagctcgtaagccatgtaaatgcctgtcagtcaagaaatagatgggtaaaatgcagtctctttacat

SEQ ID NO: 35484 - DNA, 352 bp, Homo Sapiens
acgctcagaggatccccaatgcggtgagcatctgggacttagagcatggtagtataaaatgaactccgtactggtagttttgaagagcaacatgttcctactgagtcttattaaaacagtaagagattcctggaggtcagctcatctaactgaaaacctctgaataaatcttgtgtatcaccaccaacaaatattaatctcttttcactgtcagaaaaagttactacttcagggagtagcctacttctgaaagactgaatattaaactgtcttccttaacttacactaaaccaactttttacactggcaaaaacaactctagggcggccaggcgcgatggctcaccgcattc

SEQ ID NO: 35485 - DNA, 445 bp, Homo Sapiens
cctggattatcccgttattgtgacgtacaggaagtgagcatccctctctcaagccaggctgctggccaggcaacacagccgttcctctattcccacttgcctcttctcccgccagtggtcacaggaagaggtgtgggtcactggacctcatcactggctggagccaccatcccagtgctgggacccccactgaagggctgacttcagggtctggacttggtccccagaggagtggctaaaggaactagggatgttcagcctaggacaagggctgtcacaaggaaacagcactggggggtgggacaaacttcagctcaaccagaagtgcagtatgtggctaagggctgtccaaagacagaaaggacatccatccaacgaggcctacaagctgaggctggagaagccatggtgacagtgccatggtgaagtcatggttgggtgggta

SEQ ID NO: 35486 - DNA, 434 bp, Homo Sapiens
atccagggacagttttacacgctcaggacgcgggtagagaccacggcagttatatattcagtccatgtgctaggattagcatcaaaaagaaaggaccgagataatcttgcctgtagctaactcctcctaacacctcttacagtttactttttaattcttatactccatttaagaaacttactcctttctcctagatccttaccactttcttaccttctcgtgtgtctaatgccctcggaacagtgcccggcacatcggagtctgattattatagggtccatgacttgtgtaggctggtggcgcagtctcagcattttgtcatgactttgaccagctggagactttggtgccaaggaggaaggcttctcaaccatttaccggcagaagtgacccccggggcaatgcaagtcttctgagctgacagagcagagtga

SEQ ID NO: 35487 - DNA, 490 bp, Homo Sapiens
gaagtccgtctctagaatcggctatccgttagatagcagaactctttagaatgtatatggcctttctaatatttttacaaaaatattttacatcatgtaactcgaattttttttaaaaagtctgttttcttttaggacaaactggcacaataaaaataacactaatataattccattgtatatgcatatgcattgaacccagagtgggtatactaaagatagttcatgcgactaacttatgggaagtttggctattttttcatgtatgtttatacatctatttagtcatctactgtgaccttagtagcacagaagcattttgttagctgtatcattgattctaaaaatcaaattcttggcatagtcggctatgagagcttttcgttacttggtcttttggctaagacaattatttcttgcactttctatttgtaaagatgttataacacaatgcacccacttaatgcagctattctttagagaacaacga

SEQ ID NO: 35488 - DNA, 401 bp, Homo Sapiens
ggtaactggcatcactttatctcagtggctagacctaagatctgtcctaagtcctgtcttttcactcccatatctaatcaggtgacaataactggattctgcttccagcatgattgtatctttctcttcagtcccaacagtcccatctgggagttcagcacctcctgcttggaatgccttcacaatggttactctctgccttctcaaaaactgcatacccttcatgtggccacagctctgagatcacttctgctcaaatcctttatggttgcgtcaccccttaacagcataatgtccagatttctacataaggactctgaataagctggccccaaacatttcctaccttacttttctactttcccttcccaaacctcatgaccatctacatgcaactacta

SEQ ID NO: 35489 - DNA, 356 bp, Homo Sapiens
ttggtagcaagattctctgtgtacggattcatgcatgttataaatccagtatcttaattactatttgccttgggtactccatatgcctgattttaattccatgctgattaactgtcagagaaggaaaggacgggctgaggtgagagtttccaagcctggctgaccaggaagacagcaggcagactcttggagactggacctcatcgattatacagagaaaaatcccctgtaagttacaaaagaaaatagcacaaagaaaacactctggtcggcatctaccattaaagccgtctcctttccacgaaaacgtttcccaccgaaacaggacagacccaggcgtgccccctttaggcacc

SEQ ID NO: 35490 - DNA, 480 bp, Homo Sapiens
gtgatattcatagctctgccactgcccagatcaacatgctttcttaatcttatttaaacggtaaagcatttaagcatggaacgcgtgcatgaacgacttgtcaacttgttccaataaatggaaatttttccaaaatctctaacacctctaacacaaagactgtcttaaacaatatttaataaagtctaatcccagtacaacaaaataatttggccagtcccctggagttcgttataatgcgatttaacctgtacactcaacattcaattacaccataaggcttatcctaattgaggattatgctgacttctgcagtcctttcccatctatccatctaccacgccaaatcagctgccatagccaccaaagcaaagcaccaggaagcagattatccatgactgtgtgatacccaggccaagatacccttattcatcattatataggtaatacgataagttatatatccagttatctagtcac

SEQ ID NO: 35491 - DNA, 497 bp, Homo Sapiens
ttcggcatacttggagcacgagtcttgctacatggatacctccacttacatcctactcttcttcactaagacttctactggtcagaagtttatcagttggggtcctcctattcctctgaactcaatttccttttgaagtctcttctctaaagcatgctgacggctttgagagtaactaaatatgcccagctattggcttccttggccactgtaaacctaatcatgacataatcctttgttcttgtgccttagggtctacctgaacagatcagtacacaattacggctaaatttcacgagaaaggtgtaagcattatccaaaagccaacattgcttcaagtttaacccttaaagaatttgaaaaataccacagtcacaattcgaaacacatgtaaagcattccatctaaagcaatatatctccaataactactacaatgtgtggatataacagcatataacaaaaactggcttccccgctataagatcttctgaactt

SEQ ID NO: 35492 - DNA, 359 bp, Homo Sapiens
tttcaacagtgaacgcgccagtctatgagaggcggctgggtggtgaagaacacctgcggttcgtttgacacagcggttcctaaacggtttggtctcaggacccgtttacacgtctaaaaaataacttgaggaccccccaaagctttagcttatatctatagatatttgtggcatgaggaattggggccagaactttcaaacaacatattcacttaataacaaacccattaacttttaatacaaataacactttaatgcataaacttctcaaaaacaaagtgagaagataggctcatggttaacatatttttgccacatttctttggtctaaataaaggacaagctggggtctcatatca

SEQ ID NO: 35493 - DNA, 609 bp, Homo Sapiens
cccaagcacatatattgattttgaaggaattatctttctaatttagaatatggaaaaagaatggttgatacagagtatatgtccttttttaatctctgaaaataaaaagtttgaccattttttggacagaaaatagacttattatggcaaattcaacatgggccccaaaatgctgtaacagtacactgcacactcatttcttcttgtcggtggctgtgctctctggcacaacttcaaagcctcccatcatctgtggagaaaacttttttttcttagtgaatagcatgaatacacttcctttttctctttttctaaccttctggcttatgtggaactggtgccaaattcctcatcatgaaggcatctgatttatattttgacaacagtgatagcttcaaatgaacagttgtaaataatatgtcttcttctttttagttatggattgcatattaattttaaccaaactacataattatctcatcgttccgaagaaataatatatacaaaggaggatttttttacagtatgagacactaggaccgtttgttgcaattattatcactattattatcatcttcctctgtcctggtatcctttattttctgaatt

SEQ ID NO: 35494 - DNA, 502 bp, Homo Sapiens
gcagaaaaagatggtgatcaccattccacaagacaaacaattaaagagaaaatagtcaacaaactgcattagaatgatctcatcatcatctcagcaagatgaaaatgagtcagtcaaattaaaagctatatatcctaacactccttatacagtttctacatctacaatttagccacaaaatgggaccacagccataaagctgcctcaaagtgggaaatcccagacaatttcctattccatacaaagcataagccagaaaaatacctgcctcacatttctaccctatcccaagctccaactacaggaaacccataactattacagagacccaaaaatcacagagatcatgtaaacatataaagatatatgatctccaaaatactatcttaactgtgcaactttcataatcatattcctaaagggacagaacacatatttcactcatttccaattctttaaaatagcaaacaataaatcctattaattctttcttaaattcctc

SEQ ID NO: 35495 - DNA, 613 bp, Homo Sapiens
ttcggcagtatgtagatcaggggaagttctggatagccagtaaaatctcttatgtgccctcagaattcaacctggctggagagacagactcataaacaaataatcaaaaggcacaacagataactcagtgtgaaactgtggctgatcccttgagctagatcctctaggatctcttgcctggtcaaagtataagaatgctgttttagcaaaagacagggttggcattgccagtacctgcattccactttaaacactgaccttatgtcagccagcagaccttggcaactgccttgtctgaggatcctaaggtgaaataaaggtattagtccggtaaacatggattgaccacatgcaggataatgggataggcatatgagggagagaccacaatgaacatatatggtcactgtgttccatgagccgatggcctagtgaatgattccagctatgattaactctgttacaggaataggagaaagattaatttaggctctgtcactcaggcctgattttatggagaaagtagcatctgagctgagccttgaaggacatataggttgggacaggtagaactggagagggaggacagtctaggtggaggaaacaacatagc

SEQ ID NO: 35496 - DNA, 630 bp, Homo Sapiens
gcagtatatagaactgtgctgtacaggtcggtcatgtgggcttgtgttgtaggtggccaatgcatctagttgatggtgacgggttctcgggattaaaccacatctgaactaaaaatttccattttattgctttcaagtctgaagaaatggaacttacagtatacgcttctgggaagttgtgactagaataaagctttgctgattttcccacctaatataacacaattaagcaacacatgcttttcaccagtgctagtggtgataacatgtttgtatcatacaagatcacagaaataaaaatttctgtgatttagtgagaataaaaaatctcattaagtggctggacagaaaacacagcctgagctcatataaacatcacaaggggatctgatgtggatttgccacaatacagaagagtctgcaaagcaatatttaaaaacaaatcacacttagcacagagtccagcgccaccaacagcaaaaagcaaatacgtgacacattagagtcaatgtctgcacatgttaaaaagcccactcaaaacaaggaacaatgcgcttggtgagtggcagccctaagatgcacgcgaggatctgtccatcccggggatgaaggcaccgccaaagagagtca

SEQ ID NO: 35497 - DNA, 657 bp, Homo Sapiens
agcaaaagtgtataaatgaagagtgaccattatactgtgatatgatataggcgcctctacagggagacgatgaactgttgttctacacattatataagttagtaattctacatacaccgtgcaatattgtatttaaaaagcgaactgtatactttcaaagatgatgaactgtatggatacgtgaatgtatctcaaaattaacaatgtgcgagtatagagaacacagagcggagattctattatctgcctctggcacatacttcagactgtctgtgaagcctacaccagtccgaggtctgtgacctagatcgactccgtcttgaataggagctgggtaaaatgagactgaaacctactgggctgtattcccagacagttaaggaattctaactcaaaggatgaagatagggaggacaagatacaggtcataaagaccttgctgataaagcaggttacagtaaagaagctggctaaaacccaccaaaaacaagacagaaatgagagtgatctctggtcatcgtcactgctatactcccaccagttgcatgacagtttacaaatgtcatggcaacgtcaggaagttacctataggtctaaaaggggaggcatgaataatccacccttgttagcatatatcagaatagccataaatgggcc

SEQ ID NO: 35498 - DNA, 640 bp, Homo Sapiens
atgcaagctgtcagctctcccgtgactcggctttccttacccaagtctggcaaccactggagaaggaggtagattgtccttttccttttggtgttcaggatcagatttcagaggtaagggatttggtttggactaaaatggcccaaaacaggaagacaccagatcaggagcaggctctggatggagacaaagagcagccagccctgcgctgctcttttcacccccattttgtaaaggaggcaacaggaagacacagccctgccttacgaggaagctggaagaggagagaaggaagcaggacagaaggaaggggctcagagccgtcccaacacaacccatctcagtctccagccatgaggaccttggggcggccagcctccctctgacctgggtgtaagaaggagggcagaagggagtgtccccatcacaggaatcctcagctccttcagttgccctggctgctatggtcaccaccaccgaggctcagcaaatgaactggcagctgggtggatttctcagccaccgccctttgtcctgggctccctcactgtcatgctcccactgaccctggaggcgcatccttggtcttacagctgggcaggtctcacctttgcttccggcctgtatgcctgtgcttcca

SEQ ID NO: 35499 - DNA, 540 bp, Homo Sapiens
tcgggagtatgtagatctgcaaatcattcttgtcagttaactctgttgaatttagtatgtctgaagttttaacaactcaaacagaatacaaaggcttctaagcaacaattgaacataaacaagttagctgcttaataggaactcagtacagtttctttgattcagtttagctaacattttaaaccaatctggattataatgccatactcatagagaattctgcaatggtagtttcttaatgtagtagtatccaatttaatgaccactaagtgctgctcatataaactggaaaaatttatatccccttctgaaattagtgttcctagtacaaacatagccttacttaataaaacactagctaagtacagcaaggaagctcaaaccactggtaagcaatattcaatcaatttatcagtcatctgaaccagagcaactctattttgaatagaggctgggtaaaataaggctgagacctactgggctgcattcgcaggttaggcattctaaatcacaagatgagataggaggtcacataagata

SEQ ID NO: 35500 - DNA, 504 bp, Homo Sapiens
tacgttcattatttaacacagtcatctagtatacacaaagtataccaatgaaaaacgcacacatagttcagaggatataatcagatagtaaatatggacatatctatgtatttctcttcccttacctttctatctgccccttagcaatccattacgtactgatgtatactgctcataggtggtttaacatagccatttccaagatgcttcttttctcatgaaattactttactatctagttaattcactagctctatattatacattgtcacctcataacatctagaacgcttagtgttgtgaagtacggactgataaacagaggcactttactaaaaaatcacttcctagaactgtggctacaatatgaaactatcttctagatataaacatacttgcaaagaaccttccttttgcctttcttcttccttcttcagctcactgactaagtaacagaaatgcatatagctctacgagatgggttaacaacagtcactccccaga

SEQ ID NO: 35501 - DNA, 490 bp, Homo Sapiens
agatctaggagccatgaagagaggtagggctgaaaatagggctctaacggcccctggacagttgtgagtgtgcacaatgagggtcagatgcagagaaaattaggagactacagagagcagaacccaggctggggatctgggagtcagcagttgggcatgggcctggtagaaagggaagccaaggaggaggagaggtggcagtctcagacaccaaggaggggagagtgactagaaagaaaaccttcttgcagagacataggggatggggaagaactgcagactgaactggggcaaaggactgtaggacttaaccagagagatttgagggagagatgaggctgagagccaggggatcctgccatgtcccagcataaaaacagtacctgacacagataggtgcttgggaagctgttgtcggatgaatgagtggacagatgcatggatagacggatggatggaagggtgatagattgatggacaaacagataaa

SEQ ID NO: 35502 - DNA, 544 bp, Homo Sapiens
gtagtaagaatggtcaagaatgtctgcaatcgtacaaatacttttcttcatcagcagtaggtgtcacttgcatctttctttcccttcgtatctcaaatggtgacagccacaaatgacagagctctggggtcagtcaaggcaaacagcttgctggagtgttggaaaggaccctgttgagaggagcccaaatggccgccttagagggcgtgggaagaactgcaaaagttgattcagctagtaatgctgtcaagacagctctgtgtctgatggagtcaggggcatgctatggtaaacagagtcagctgttgagaggatgccttgaagggtgcccagcccctggtttggtgcttacatccgatggtggtgggagcacctgttctcttgttatacagttgagacctgatggtgcaagggtcagggctggctgcagcaataatttactagatgagcaaggatgcaataatctccttggagaaggacatttgcatatgacatgtggacatgcctctcccatctttcatggtgggtggggctaccaactctg

SEQ ID NO: 35503 - DNA, 492 bp, Homo Sapiens
gttcggcagtatatcgctctgtctatactgagaaagaataggagagtagttgtcctcagtagaagcttagaaagcttctaaagaaggagaggctggatagaattccccaagatgacatactacaaaatagaaccaggctgggatggaagggctcctgactccgtccttcagtgctctatgctaaacaaaaccttccttttcgcctttccacatgaagcccacatctgagaccacaaaagcgtccctctcaaaaaggtgtggaattgttgtgaaagctgtgcctagaggacaagggctgcgcctgactgtacactgcaggattctaatctcttgtgactacacagtaggcgagcaggactgatgtaccgttgtcccgagtctaacaacggcttccctctcccaagactgaaagcatccaaataggtcacactggcttcaataatagtgaccatattattaaaattccaggcagaatccaaagtgccagattca

SEQ ID NO: 35504 - DNA, 520 bp, Homo Sapiens
tgtagtatatatctatgtaaccaccaatagcaccattatataacacttctgggactttatcttcctgccattgtacatattatttgttacattgcagagaaagagagaatcactttgattatgcattaatcttcatcagacgcatctctttgtgcattttatattacctcatcaactgaaatgtttagtgtgtaatcacactggaatatacaaatttcccattgtatgttctatgaaaaacccattgaaaagctcattaaacacaaatcaaattttctgattattcagctttcacacaaagacaccaagttgtctgtattccgcaacatctcaaacatacttgggttaaatatattgtgcgtctcctcaggtatattacactaacatttagcctttgcaaatgtttaaggaaagaggagtgtgccaaggggtagggccagtcaatctactgggaatctaatagtttaactctagtggaaatattaaagggaaaatttaagtaggaccacacaaacccaga

SEQ ID NO: 35505 - DNA, 550 bp, Homo Sapiens
agactcagggtccatacttatctaccctggagatggacagaacagacacaggcccatgaaaaagtttgacctttgacatccaccaacttctagagagatcaccatgaagatgaaaagttagccaccaacttggggactgcagttttgctcacctttatccaacattcattaccaggttaagcacagtttctaccaagaaatgatagaaaggaggttatcaggcaagctccgctggagagcagcaggtgcccctagaaatgccacctgtagagagcgtgtcacacaccaatgacacagggagacggaaccactgctggcatcggcaaaaatctctgtctctggccaccagcgctgcagggactgatgtgctctaggtccctgcgagaggagttctcccacctgccatgcctagggaagggtggggttcaagaaggctctagcaacatccacacaacatgcaccacctaaaagaaaacgttggtccaattggaacatgcaccagcaatccataaaggaggctgtggacaagctcagaatggaccaagattca

SEQ ID NO: 35506 - DNA, 572 bp, Homo Sapiens
gtattaatgagaccaaagttttagaaacatttgagtggaatgcactcatttaaattccctctccgtctaacaatgttaaagtagaaagtccaagttgctatttcctgaatggggagtgtccatgtgagtaggctcagcaagccctatccaaatgcacctgcctggaccttctcgaggaaaggcaaccgggctctccctcatgagacactgcggttttgtgtcatcaaacacacccactgagaagtgggttgcctatgaccacaccagagatgggaaattccttaaaccaccaaggccctaggtaattatatcagatggattactttaatgcgggtttgatagagagcacaatctcaattatgtattacaaatccaagcagagctcaattaatgcccctggttagtagcttcctagtgatgaccatccaggtcattcatctttcccgctttcctcaaaggcccagtgagacgtctgtcaaccccagtataccacacggtgacaccggcttccagcaagctactctcccacccgaggcgcaggatctgagccatcaccagccttgctgggaatg

SEQ ID NO: 35507 - DNA, 452 bp, Homo Sapiens
tgtctacaggaccctattttgcatcttcccttgtggtggaggtgggagagtcttactcagtgtgagacggctgttggggtccgagcctcaacttcaaggttccccaaaggcaggagggaggcctgcgtgtgccctggccctgcagcaccggcactgacttgggaggcggggagcctgcgcacgtagtgtggggggcccagtctctacacagctgtccagctgtccttgccgatcgctttaggaggttcactcatctttgtaacccttcctgtcttggacagcagtagtgcctttgaccagtgtgtttgtgaggacgaagtggctctgtgcacacagctggcccctgagaaatgccagctgccagttctgtgtgcatccagtcgttgcacacggactggactattttctaagtggtgctttttaagaaaccaagacacccctgggtaccgagc

SEQ ID NO: 35508 - DNA, 388 bp, Homo Sapiens
aacactccaggagcttcactgcagctctttcgaggcctccccaggctagaacagcagtcaccctccacggggatgtagtcctgggagtggagggggtcagatcagggtcatggctgggggctgaggcaagagtcatggccacacgctccctcccaaccacataaataacttgggactctcggactagataaggttgggagtagttacactaacaagcggattctttacgttatatattactctagtatgcctccttgctaaaataagttttaaaatggataagtaaggtaaaaaattagaaagggaataatgctctgtgtagaccaggctggtctttgaactccggacctcaggtgatcaaaccacttcagcctttccaaagtgccgg

SEQ ID NO: 35509 - DNA, 508 bp, Homo Sapiens
gatccgtagtgtggttatgtgaaaagtttgaaagtgttactcccacaggtcaggtgtctagattagaggcatgtggaaaacagaacaaggtcctgaaataatcacaacaggcagctgagagaaaggggttctgagcctgatgctgccttgaaccagctgtaggactctgcaaaatcaatcatctcacttgtcacagaacacttcttttcccttccgtaaaatggttaggttttgatctctggcttctgccagatttggattctcacctgctttttcatcttcctggatggtgctacgtaacccccttccactttatttttcccttcaatgagttatcacaaagcactcatttttagaagaaaaacaaaaactcactagtttacagaaacatgaagccctctagtatcttttgatttcctctggtttcagttatctgtggaattgtaagcataagaaccccttagaggagcctacttagccacccaaacaggactttctctgtagcaac

SEQ ID NO: 35510 - DNA, 547 bp, Homo Sapiens
aacaagctcatgaccagtatggggactcaaattctcaaattctgagcatgcaccagaagtcaccaggtgggcttgtaaatacacacattgctagggcccaccttgagcttctgattcagaatgtgcatttctaacaagttctggggtgatgctgacactgctggaccagggaccagatactagagaactagcattctaagcataactggagtacaagatgggataccatacagctgttcaagaacacacccaccccctatgtcctgaccatgattggatctgcaagacacattaggtgaaaaaagcaaggtgcaaggaagagtgttactggcctggatgaagagaaacacactgttatcccaagaacttagggaggctaaggtgggaaggatcaccttgagctccggagttaagaggccagtgtgggcaccatagtgagaccccatctcattcatcggtaaataaataaccgattcatcaataatgtacatcatttaaagaattgtcgcagcctaggcacagagcaaattcgttcaaaaaagaatat

SEQ ID NO: 35511 - DNA, 360 bp, Homo Sapiens
cgatcccttggtagcttggttagacaaaagaccagaaggagctgctcgaccacaagccttttccattaggaatttgtaactccccatctccatgaaaggcaagacaccgatgatcctacagtgctggcccatagccagagataactagaatagtgttgtactgagaaggccaaactagtcaaggactagcaagacccatggcttggataaaaagaagattcccccaaatctggttcatttatttgctagttccctctgccttcctcatatgctgctgaaagatggggagggcatgcacacactcctgtagcacctaggtttgtcacacatctctatagaggacatcaaaacccaactgtg

SEQ ID NO: 35512 - DNA, 489 bp, Homo Sapiens
ttaattcgttcctactatctctctaaataatttaggatataaaattgactgaataaaaaccagataagccaaggttttcacccttcgatttttataccaggcaagatggagaagtatctggaaaagggactgtcccaggattactagcagaaagaagcaaatactcttatccccatagcccttatcgtcaagctgaaaaataaagaacaaagcaacaagtaaacacacctatgaaagcaacttgtttgagctgtctcaacttctctgcagctgttctggctgtatctgtattctagtacttctttgaactctagagaaaagtttgttcatcaaaacctcatgaagtttaaaggtagtctattgccttttgtcctttttcaaaaatcttatttctttatttaaattgacaggtaaaaattgtatttttatgatgtacaacatgatgttttgatatatgaatacattgtggaatggccaaaccaagcaacc

SEQ ID NO: 35513 - DNA, 465 bp, Homo Sapiens
cttggtgttgttggttatggggaaggttctcaaggagaactctgaactgaaacccaaaggatgagaagaagccagcatgccgagatcttgggaaaaaggttccagccagagggaagagtcactgctaagggctgctcaggccctagacaagaagacacaggtggctggagatggtaggaacaacgagggaagtgaatggaaatgggtcaaagaggttcgctgtgagtctctgcaaatactagtagggaacaggaagccactggaagatttgtccaaatggaacatacaatcagattcgtttccaaaatctcattctggctattatatggaaagcgagtgtttcacatgtgtgtccaaaggtcccagctcagtttgtctacccagcagcatgttcccaattcacaggcataaaaagattgaaacctcttctagaccaatgctgagtagtaaatcactggcccttct

SEQ ID NO: 35514 - DNA, 413 bp, Homo Sapiens
cttagtaaatgcttgtggcttaccattatacatagcctatgttgcaagacagtgtaccttaaacaaagaccaggaatactgtcatttcctggacccaggaacaattggccaggcgcagttgcacgcgctcgtagtcccagatattctggaggctaaggcagaagaatcatttgagccctggagttcagggctatagtgcgctatgttgatctggtgttcatgctaagttccgcatcaatatggtgacttctagggagtgggggaccaccaggttgcctaaggaggggtgaacctgcctacgttggaaatagagctggtcaaaactcctgtgctcatcagtagtagaatagcacctgtgaatagccaccgccctccagcatgggcaaccaagcaacccctgggtaccgagctcg

SEQ ID NO: 35515 - DNA, 604 bp, Homo Sapiens
gttgctctttgttttggcatccttgtgtgtgaatacatgataagaaatatgaggatgttaccttctcaccaatttttaaaaatagtcagttcagtacttgcttttatagtggaatggcccttagcaatatccttcttttaaatggatttcttattgttccaaagatgtggcatttccaaaagaaaattcttccatttatgcatagaaccttgaactctagtctttaaaaatctaggctttagtttcagctcttttttagctgtgtggtcctggacaggcccttttacatctagacttggagatttaaagaaaatcataaagaattaaatgagatgatttctaagactcatttcattttaaaactctgatctttcagagacgcacaaatccattccctcttgctgtggaggagaaaatacatgaaaaatctgaatccatatgcatttgtcagggtactccagagaacataaaagcaataggatgtatgtgtatatatagagagattgtaataaggaactggctcacccagtctggaatccataatctgcatcatcagtgtcatgtctgtagctgggagctggagacccaagaaatcctggtgcag

SEQ ID NO: 35516 - DNA, 435 bp, Homo Sapiens
gacccttggtgttggttgtggatcccacatggctacttatgatgagaaaatgcaggagaatcaccctattcctattgatggggtcaccacctggagctggtccaccaggctctttgttcgcactcccacactgtgcaaatgctgcccattctccaaaaagcacgtgcccagcccccaatcccctctatatctcagctgaagcatcacctccattaatgaagcctagtcctttcctgcctcgtgtgttgctttgttgctgctcacacctttagacaagacttgctgccactgactcccaccagtccctgttccctggaagaaatcaaggaagcccaccttgatctcatttgagctcctaattttacagaaatagggacaaaggttcaaagggagcctcacaggtcgcatggtgaaccaagcaacccctgggtaccg

SEQ ID NO: 35517 - DNA, 509 bp, Homo Sapiens
gcttggttgttggtgagtgttgaatgagaggatcaggttaaaatcaaaatccctacctggctaaatgtggctctgctgcttggggtaggagattgggccacaagtccagctgagtgccaggaggaggaaggggtaaaaagggagtggaaaacccctccaaggacccactgaccctgctgacagacttcttattcaagtgtgaagaaatctgtcagaatctgagggaaccaaagacaagaaaaaagtacaatgtttggacataaatttccttaattcttgtaaatgtattaggattctaataatcttctataaggaggatattaaatatccttaaataatttgctgtacttgggacagtggtttttcttcttcagtttagagctagaatctcagttacctatagttgcctggagtcaattggtagaatgggtctgaagccattgaaaattgagcgtggatatgaatacagtttaatgtttacatgtgatttctgccacagggtaccgagc

SEQ ID NO: 35518 - DNA, 438 bp, Homo Sapiens
gcgctcgtattcacaaattacaataaattaagaagcttgtagctattgaaaagttaaattaacagctttacgataccacaagctagtacaaaaacataggaaattgtgcattcaggtccaaaattatgatttctgtatcatgcaaaacattgaacgaagaaaattacacaactacaaagaactgaggttttgaagtgcccataacgtgcattaaaatttaagttcattaaaccttcccagctcaatgttacttttacaaagcacagtgtactgtcatgtaaatcaaaaggctaaccagttcacaagaagcaaacactttacgttagaggtgaactgcatggcagaaattccttgatgggagccagtaacttaaaaacagttaatatacccatgcgtcccaacagacttgacacctcagattggcactagcatactaac

SEQ ID NO: 35519 - DNA, 563 bp, Homo Sapiens
atccttagttgctggtactttaagtgtaggcattatgtttcagtgtatgggaggaaaaacaagttgagtttcagtctcattttaaaggaaaatttttaataattctggtataaagtgcattctttcttcatattttaatcattgttagcctgcaggcatgggttttcttgaaaatagatttatgattgaggggtgtgaatagctttgctgtattatttagtaccactgatcttaagagaaaattagttccatctttagcctcagtaaactgagcatttatagcacactgttactttgaggtacatcggagtaatctggccacttctgcagtttgcttgttatgacctaataactataatatcgtagttgcttgctactattctgtgggttgctgctatccacacaaataaaaatgctgaaattggcagaaatatgggataagcatttaaaattgccctcatgcctctaattgttggctgggtttttagttttttgttttctttctgatcactaaaagtgcatttgggtccttggatcaggatggtgaaccaagcaacccctgg

SEQ ID NO: 35520 - DNA, 540 bp, Homo Sapiens
ggatctcaggggaactccgtttctcatagataaggcaggattagcaccgcacactggcctggcgattaacaagagcgcgtgctaagtctagctctagtggccttaggtagagtcacttaaccttggggctgcttcttcagaggttacaggtgataacctttgctctctctactctacagagctggagctgaggggagcagcagatcagataatgggttgcaagggttctgtaatgtgtatggtataataaaaatgcaagtaacagtaaaatcaccattatcgtcatcatcatcctgactctttactgaaaccacacttctgtttcacctcctagggaacaaaaaacaagcttttcttcctcactgatgaacggaaaaatgaaattgtttataatagcctttgcttattagacttagaaattagtccctccccttgggcactgaaggactacatggaaaatctatgagggaatggtatttcagaaaccagccacagggagttaaattagccagacaattttatttacactgtttgggttta

SEQ ID NO: 35521 - DNA, 403 bp, Homo Sapiens
tcctatggagtgttgtgaacaccaccctcagtgtttgattcagaggcagaggtagggcctcagcacttgcatttctagcaagtttctagatgatagtgatgctacaattccgtcactactctgaaaaccactgaaagcccctggagcttactggaacgtgcgcgtgaacagtgtgaatgagttaccccctcacactatagcaagactatggtggaattcactgagaggcaaactgcaaaatctcagggagagattctgtacccaaatgttgacttccattacctgagtgaatgtattttgaactgtcactttcaaaatgttttatctgaacagcagcacagcagcaaaagactctgaacaaggtcaaggatgagcggcacagtgcataacaaacactccaaca

SEQ ID NO: 35522 - DNA, 484 bp, Homo Sapiens
gtattttatactaagcaataattaccggtgagctaattactttatagactttaaaaatgcagttatttttcatgatgcactgtccaaagagtaaaacaagcctcaaaagaaaggaaagaaggaagggagggacaaaaccctgagtattttatttccaatttgtatgctgtgatagaatattgaaacttacccaactatcaatacattcaagagaatcagtacgaaatagcacattttcattatgagtaatatttaaatatatagtgggtttaagtatattaattatacccaaaagcataaaattggtatttcctaagaattgatcaaggatatctaaatacaagtcatgattagtatattttaaaccagtgtggttctttatgacgttctgttgtttttcaacctaattgtcagtgagataaatatagcatcatagaaaaagatgcattaaccaatatattcagtgacaacaagcactccaaca

SEQ ID NO: 35523 - DNA, 376 bp, Homo Sapiens
ctgccccagcgagagctgttgtggtcacccctccagtgaagcaggctgtttcattgtctgggatcccacagatctccctcactgcctcagctactttcccacctggtgtccccgactgggtgctgttatccttcatagatgtagccttatgatgccaactatgaaacggtcaaatgtggacagggactgacggttgtagagactgaagtctaggagcatattctcatttatagtagaacccttactggttacttgaggggactggggcggcggggacgcgcgaaaactaaaaatccaaaaacgggcgtcacagaccggagagccccgtgttttacttccggctctgttttctgtaatagcaacaagcactccaaca

SEQ ID NO: 35524 - DNA, 427 bp, Homo Sapiens
ggctgtaggacatgtcatatacattatttctcatctgataatagcattccaagctaagagatatgcttgttttacagctgaggaaccaggttcagcaggctgaggaacttgatctaggtcacaccgctaataactagtaaaaccagtgttccagagccctgctgttttgcagcctcccttatatcccacttccttccactgattaagtctgctagagggctaacagaggtcactgataggctttatcattgaataaacaatttctagagcatgcattttagggaaagcatgtggcataatttatcagaactataaagttctgttgagattgtgactgaggagctgtttttaaatctttgggaaaaaaactggctaaacagtacaaatactttttatgagttactggtctgagtgattctcaaaccaa

SEQ ID NO: 35525 - DNA, 369 bp, Homo Sapiens
tatccatacaaacccctgtctcatgacagcttgcccccactctggcactgtttaagccttccttcttccaccttaattcagtctttcacattcctcctccttcattccagaagcacataatcccatcctttctgaaatcaagctcttccattcatgcccattggcttccttccctgtatgttaaagctgatgcttgagaagagatagctagtgttcaatttgagctcaaaggcatctgcaagtaattgaggagatattgaatacttttgtttatacaaaatacaggaaggtgtccttctgaggatcaaatattcttctaaaactgtaactacattctctgactgatctaaaatggacagtgcacatcca

SEQ ID NO: 35526 - DNA, 401 bp, Homo Sapiens
ggtcacagggacacggcaggagggctggctctctctcttcccacagtgcctcactggtggtgagcctgggatggatgtttggattcttctggagagtctcagctccaaatactctaacccttcaaatcagccgttttcaaacttctatatgcatgagaatcacttgagacactgattcaaaatgctgatttccaggtgttcctcattcataagcacaaagagtggcctacacatccccaggggatgcggctgtgggtggtcaccacactcaacatgccaccacaaaccatccaagagttagaaattccagtgtgctggcatcccagctggctctcccagattgcacttggtacccggaagcaacacagattcccgtgagatcaaacattggaaccctgtgg

SEQ ID NO: 35527 - DNA, 357 bp, Homo Sapiens
aatgcaacagagtgaatccctgtctccaaaaataacagctaattttatcaaagagaaacacttcaggtacttataggaggtcatcgaatgtgaccagtgaaggtgttttttctgtaactttccctactgcttgccaagccattggcagggcagggcaggagcatttagttgcttctctctcatgacagcctcaggaagagacagggctgcacccacttccagatgggaagttaagctcggggaagcgggggatgacccaaggtatacccacctcagggctcaccgaagtcaagatacatcccaggtcaggggcctgaggaactggctccaccactgacttgctgtgagctctgcctg

SEQ ID NO: 35528 - DNA, 403 bp, Homo Sapiens
acagtgctggacgttctgcaggaagctgttagctggagacggttgaccgctgtcctcactgggttagaggcctgctcagagatcgagccatgaggacctgagcttgcctgtcctttcaagagtgcagcaaactccttcagcagagcctgtgcagaagaaaatgtaggcacccttttccgaaagccagcactttgggatattccacaagtcttcacaataacaagctaaaattttccagaagctcggctgcccccaagtccaactgctgctcagtccccatggttgctggacctcacagggtcaagagacacaagagcaaaagcaggggcaggaggcgttgcttgctggcgttgctctctgcttctcctcactgccattgctcaccgggcacctgagtctctgc

SEQ ID NO: 35529 - DNA, 396 bp, Homo Sapiens
cgaaacagctgtgagatgcacaaagtattctgtactcttcagagccattctttagtaggagaaaataaggtccatattttaagcttgatgatagcaagccatttattagcaacccagtttaaccccacacttttctccttttggggttaaattgggtagtattcattagaagtacttcaagaaaccatgaactcattcgctagcagtgtttatatcctgtatactgagaatttgaggtgacttttatagccattcttaatcctcagtatctgtcattgtggaacctgaaccctgtgtgtctaatgttatccaagagaaatattgtgtgagccactagtgtactttcaaatcgtggtaaaatgtatatcccataaaagcatcttaagcacatttttg

SEQ ID NO: 35530 - DNA, 402 bp, Homo Sapiens
agggtaatgtgaagtagtgtccatggacagtaacggagaggtatctgctgctgccatttatattataaatttgaatttggaggcagagaaaggaggcagaaagtttggtaaggacgttattgcaacctgaataagccacttagggcctagatcagtgtttgggaatgtgggagaagacagccatagtcaagaagcgtgaagtagttaatgttgagttatttttaggtggtttttctgttctttttactccagacactgactttcgtaataagataaataatctggtgagtcgcatgctcatggtgtgctgaggcatttagccaagcagcttatgcatgtattatctcatttaattctgtcactatgaggtagagattatctttaaccattggtcccaaatga

SEQ ID NO: 35531 - DNA, 402 bp, Homo Sapiens
tacataatgctagagaatatcggagttatcacggaagaacatttaatttaaacagttatctttaacttatagagctgacatttaagagaaaatgttcaggttgttaggtgctcaaagtcacccccactcttcaaaatgtcaaatagaactttaaacagctgaagaccaagataaaaatagaacacagcatttgtttttaagagctgaattctaacccttctgtctcaaagtaaataactgtagaatatccattgctcttattacttcataatcaatgcatctttctttaataaatttctcctccttatgtttggagggcggtcataggaaactggtcttggggtgaaaggagaagtgaactattccaacctaatttctcacaaagtgaaccagagtcccagt

SEQ ID NO: 35532 - DNA, 378 bp, Homo Sapiens
tcttacccccctggatgctatttaggaagcatctgcttcagtatatagggtgtcccagaggcactgactcccagaacctgctactggatgagtcctatggatgcatccccatggtgccaggagaaaagagaactcacggtcttccagcttcattcttcaccagatacccaagtcccatacccatcttcccaccccccaaataaagtatcttatgagatatcaactggagatacacgagaggagcaaagattaggcagggaaacacaatgacaggctatagaaaggtaggggagagaatcggtagagagtaaggtgtttaaatgcagaggcaagatcgtcgccttctccacttcaagtccactaggactcataatagtt

SEQ ID NO: 35533 - DNA, 370 bp, Homo Sapiens
gtctgatacgctgtcattacgccctcagaaaaggacatatcctaacatatatcagactacaatgggaatgatggtcccgcttctgaagaaatttcagtacaagcatcgtagagcatatcatactatttataccgataataaaggtacatatgtagtcattaataccacaagaggtagtcagaagactctagaattgtgctaatatggtaaacacatgcggcttagtacatagaaattaacagattagataaaatttaaaattcagttaatcaagtgtataccagacacgtctcaagcactcagtagtcatgaggcctgtggctaccgtattaatagagacacagaaaatttacatcatcatagaacatac

SEQ ID NO: 35534 - DNA, 537 bp, Homo Sapiens
tatgttggagtgcttgtagagtgtaggcactgctctattgctttacgtaggttattacacgtaatccttacaataagccaatttactattatctccatttcacagaagaagaaattgaggtgcagagaggctaagccattggctaactagcagatggcgatacttggaaatgaaccaagtctgaatccagggttcccgtgtgtaatctctgcattgagcggcaattagtgaatgaatgaataaacagaatgaagttaaactcagggaggaagaaatcggagctacacgagggaggcaggcagcgttatttcagaaccctcccagggccactgatgatcaagtagaaagagaactggtatcccaagaaaaccatatctactacagcaggccagatgaccctggagacaagctgaacaaagtccagtgacaatctcccaaatgccagtcccggccaaaccccacttcttcaatgcctccggccaatcctcaagagtttcagactcagtgttcacatctgtagacagtatgcgcccagga

SEQ ID NO: 35535 - DNA, 635 bp, Homo Sapiens
cttttttaattatatatgctaaaagtcacgtggcaaacaatatctaactaaattcccactagctcccttacggataacatctctgatggtgtgcgtcgctatagtaacggttgcttaaagttgtgttttgggaacttagagttagctcttgtccattttaagccagtagagaccatgagcccttcaagtaggcctgagcgaatgcccgacttctgagggccaaaaacacctttctcggatcacgctaacaatgtctttttcttaaacatatgtcccacgaagaaccatgtagctcaatcgtgtacaggcaaagtccccatgccctcacctttcccaccagcagtcatctttcccacgccttagaccacccacttcttattcctccctaggccctactcttctgggaggcaagtttgagatttgttctgcagtctccttgctcagcagtcttgtgaatcaatttttcctcttttgtgaaatccactgtcacagtgactggctgctgctcatgggcacagagcatctggctgggtgtcaccatcgcaccccgcacagcctgcagagaaacctggggtacttttccatcaccaagttccgcccttcgactcccacagatcactgcatcatcccttctc

SEQ ID NO: 35536 - DNA, 387 bp, Homo Sapiens
gcaggaagagaaagaaacatcgatccccgagtagcggcgagcgaaaagggaacagcccaagtacaaacgaagaaaagaacttagtcgaatcagctggagaagctgacccaaaggaggtaaaaggcccgtagacgaaaagggaaaagaatcagtacaaagagtaccacgagacacgagaaaccttgtgggaacacagggggaccaccccctaaggctaaatactacttggtgaccgatagcgaacaagtaccgtgagggaaaggtgaaaagaaccccgagaggggagtgaaaaagaatctgaaacctagtgtttacaagcagcgaaaatggcacaagccatgaatcgtgtactttttgtagaacgggccagcgagttatgacaaaagg

SEQ ID NO: 35537 - DNA, 440 bp, Homo Sapiens
ataatctattgtaaagataactaccccaaattgatatgataagatctcctaaataccacaatcttatattcaattgtctatggggtatgttcatttaaatggaagaggtccaacaatgacatcagcgtctctccacccaaacttattcttctagtatttcttcgcttggcgcatggcgaatcacctaggtcagaaaccttgagctcatcctaaatgctaacttctacttacacttccaacaacccactggtctctacaagtaatagagcccacctccttcatctctcacactgaccccttacccttcatcctcacctctgctgacttggtacgagccctcatctcttttacagggatcagacacaagaatcccaaatgatctggccttaggtcttcttctccaatccattctttcaacaggcttgcactgtgatctacca

SEQ ID NO: 35538 - DNA, 514 bp, Homo Sapiens
gtctgatcctcatgctaatgcatgctgaacagaacacagggcagcaaaaattgaccccagagaaggaaggaagagggaacgggaaaggagagtttggttatcattgctcttggagaaacaagatgcatgatgttttattaataggcacaattcctttatgtaagtaacctgataaaaggtagtaggttgatttcatgctctgctgaagagaagtgggatggctttctaccctgaagccactagggctcttttaggcactgcatggagcatatttgcttttttcctttatataaattgcaaatagcatcttagtcatataaaagagttggtccagctccctgcaaaaatgctctgttatgtccagtgtgcatttcatatatttcacatgctccaggggctgtcagctcatgcagtcatatccaacattgacattgactatagcagtcacagtgacagcagttttgttctttcatgccatatggtactccaaaatgcactacttaaaccaagatga

SEQ ID NO: 35539 - DNA, 395 bp, Homo Sapiens
atttaattgaggctgggtggcactgacaggtggagtatgaaggcacatctgctagctcacataggaaacagaatctcccaggaaaagacataggacctctgactctaactgaggttctggattattatgagagattttcaaaaatggtctaatggtgttggcttgctccatatcatagattttaagagacagtagagcttctgcgatgagattcccccataaaataattatggatctgcactggcaagctggtcttggctccaaagaccaagagttggtttgtggtgctgattctgaacccttgcgatgcaactgtctggtagtaaaatggctttgtatggtaagaaagctttaatcctcgaggcctagacaactttactgcagggcattctcta

SEQ ID NO: 35540 - DNA, 511 bp, Homo Sapiens
tgcacttggcagtcttaggctttagatacgatactgcataaacatgaataggtagtgtgcatcagcaagtacagaagctcgtcaaaaggatgacaacagcttttctaggtatattttttcattttactgaggaaactatttaaacagttttttatttagccagagattgggctttccagtcaagtgagaggagaaaccatggaaatttgatgtatattgatttgagaatcattattggttaatgtattccaaactttttaaggggggaaatggtttggaaaatcaaattgaaatgaaatctgtttgcatagggagttagaaggtttcagccttaggcgagtacggtaggaactgagagtaaaaatacctctctctaggtcatatgatctccaattattaggattcattttgacagaggaaaagacactgccctaattttaaaaaagctgaagtgacttgtgtgaccattttctttaagatgtgattaagtacagaaggcaatcatggttat

SEQ ID NO: 35541 - DNA, 453 bp, Homo Sapiens
atcatctgggatatctgagagtttcctcatccagtgaagttcctccgtacagcgttagaggcctttcctcttgcttgcccttcttggcatctgcatgtggattatttacttgctcatttgttcctggtgtctttgcattacctactctttctccagccaggaataataaacaccttattgacagattgacttctgattctctgcgtcctccttgtcaggttggtatcctgccatcccagaaggcactgtgtagatgtttgctaaatagatggttgaatagaagaggacttaatttttgctaaccgaccagattgatttaatttgttggtgttccaatccagccactttgaatatcaaggctttcttgcttaatatccttttaggcaacattataactgttcatgtttctatataaggatttctaaatgggagggtttctcatccgaaaatagt

SEQ ID NO: 35542 - DNA, 550 bp, Homo Sapiens
tagacgtgtcattagtctagtatactagagtagattgcaggcacctaattgccacaattggaataggttccttgtagataatgaaaacgttgcagttctaggcaaaaggtactttagtagtgcttagtcagagcctaatgctttcataccatattgtttatgaatgattgatcacttacaatagatctcttatggcttatgtcctgacatccaaaattttcctactgtgtgaacttagttgaaaatctcaatttaaatagtggcagattcaggaggggaagacatagaaaactcattgaaaacatcgaaaaagcgtatgttatggcagagtaaggtcctgccttgtcacagaatttggcagcagtacatcttcacactgtacagccagttttcacactttggatcctacgagatagctgccttcatatgttgctgatgtctgcattcctcccaccctcctacagagtcacccctctctgcttcttttaattgcttgtatacctagagtagtcagctgtccttgtctgcctaggactttcagagaaaagtc

SEQ ID NO: 35543 - DNA, 473 bp, Homo Sapiens
gccattataaaacatactgtagacggagtgcccaaacgagagaaatttatttcttatagttttggcatggtagatttcatcctgaggtctctatctctatggttatgtagttggctgtcaatctccctgcatgctcacacgaccgctttttgtacatacagtaagaaaatacacactgtcatatcatttttatgtaagggaactgatttcatcatgaggaccctgccactctcatgacctgatctaatcgtaattaactccaaagaccctatctccaatgtcagcacattgaggtattagcacttcagcgatgactttagggaggacacggatatttagtccaaaacactgttttaactgaaaagagttagcattatggacgtatatgtatgcaaaatcagctatttaggtagtggtggtctctcactttatttgccattgacttgttagggacacctttagctttctcattc

SEQ ID NO: 35544 - DNA, 459 bp, Homo Sapiens
atatatgaataaaagctgtaaacagttaatcaatgtttaaaaaaacatagttacatacatatgaatttgtacgtgtatatcatacaccaaatgagactttcaatccagtcttaacacacctaaacatatataaatacagaaaggaaactggcttgaaataactattacattatgatctaaattaaaaccattcccatggtaaatgctcctgcataaatctttataaataattagccttgataacatatgaaatatttaaacatatccttgaaaccacagaggatagagctagaaccaaaaaggcagatttttcaaaggaagaaattagttcaatattgctatggttctgaacgtgtcttccaaaaaagcaagtttaagaaacttactcccaatgcaacagggtttgaaaggtgaggcctaatgggaggtgtaaaggtcatgcaggctccacctttatgc

SEQ ID NO: 35545 - DNA, 361 bp, Homo Sapiens
tatacctatgctttggggaggctgaggaatcacctggagataatttcaaaaacgcagattccctagaccccatactcatggaggcagattcaggaggcctgggtgggcagcagacactggagtactgactctgagtaggtaggcctaggaccagcttcaagaaaaaatgattttgaaaccatccctacagggctgacaagaattgcaagccagattctggacagaaatacagttgtaattaaggactaattgggctgcactctggcccatttccttgtagctaaaagtcacctagcactagatattgactatttgcaatcccattgttcctagaggtagatttctggcaacagggtcatat

SEQ ID NO: 35546 - DNA, 407 bp, Homo Sapiens
gagtctctgggcacatgtgtcctgtgggctgggttgggcatgcttatcctagaagtatctagtttgttatatgaaatagctaggaatgaagcatccatttcaaatagcctgctaactttagccttgctcaaggcatttagtccttttgtaatctcttttttgtcttatctgatttaatttgaacaagccttactttacacttttcatatttttgttgcattttgttcaagaacattatattgcattattattgtatattgtaatttcttaaaggtaaaggcagcctctaactgcaaataaaacatctcaaataagacgtttcaaaaaataagaccaaataaggcagcatgttaggatctggcatcatatgtccctaatagtgtctagatttgttaatattggtaatt

SEQ ID NO: 35547 - DNA, 411 bp, Homo Sapiens
caatacactcaactgcgacaaagaagattttctattttatggtctcgaagatctgtatacgagatgctgggaccgaacgtcacactgcaaaagagttgacagcctggacatttcgtatatgtggctggccagagatgtataaagaatacagtggggctgactggagataacagcacttcccagatgaggggtgctgcagtgtagaccaaggggccacgaccactttagaggtggtactggcctctgacgaaggagaaggtctctaagaattaaagaactcctatgacttaaggtcagcagagataggctatcttgaaagaaatgatctagctcccttccctgagggagataagaaccctccaggaaccctccccttcaaaaattagaaccaagattgagggtaccgagctc

SEQ ID NO: 35548 - DNA, 646 bp, Homo Sapiens
cacggatcctaatcgaagtcatctgatgtgtccgttacaacaccaaacacttatctgtaacattcttctaccctccatggtgagcctgcattccctgttactaaacgtcacaagctctttaagtgcaggaatcatcttatccctaccatctaggtttaaatgttgtttaaagcacaagaaatattgaactgaacaagtagtgtatgacagtggattctagtcagcccccaaacgcaaacagccaagctagcaatggtgcagatttaccattccagaggccagagggagtgccactgctcaaacagaaacagagggatcctgcacccactccttgcttcccaggttgaacaccctgatgaaaaagagtttctttggatttctgactgggaacacaagcttgattaccagtgtccctgctgagagcctagacgctaatatacaaaccagtcttatgattggaaccttaaaaggcatctgcaaaccacagagttaattttccgggtacgcctcatcgctcaagtcaaccatttccttttggtatttaaagtaaccacacagaaagaatcacatttgagcagattttgtgctccagctgcctgcagtctgcagcaaaagaaaacaaacataaagttattcccagattggt

SEQ ID NO: 35549 - DNA, 439 bp, Homo Sapiens
tcttgagttgattgtttgtgtccatgtgagagatcaggagccagtttcattctcctacgtgtggcttgcaaatcttcccagcaccatttgttgaatagggtgtgtcctttccccactttatatttatgtttgctttgtcaaagatcagttggcttcatttctgggttctctattctgttccattggtctatgttcctatttttatgccagtaccacgctgttttggtgactatggtcttcatactatagtttgaaatcaggtaatgtgatgcctctagatatgttcttttagcttagtcttgctttgggtatggaggctcttatttggctgcatacgaattttataattgtctttttctaattctgtgaagaacgatggtatttatatgggaattgcattgaatttgtagatcgattatggcagcatggtcattttcac

SEQ ID NO: 35550 - DNA, 673 bp, Homo Sapiens
tctattgcttgctttctactagaggtgttatattaacaaactgatttaaaatgaaagcctgagttgatggacccatttattttctgtgaatctactctgtcatactagggactaaacctcagtccatctgaggttgagcatcacttagtcctactcctactgatgtcaatttgttcttcaatgtaataacatagcatacgatattacctggatcttcagtttgtttttttcattcttcattcttctgatgacaactgtttcctttggcaatgagggagttcaggacacactaccccaaaatatggcatcttggcatattgcgtatggctcataagcctaacatatttactctctaaccttacagaaaaagtctgtcaacccctgacctagactattatgactctaaccataacagcccccacatatacattgcatgaagcggaaggaatttgagacagcatgtgcaagaagttctctctgaccttcctctgaccttcccccactgaagcaggtcataacaccccggaaggattttctgaccttctccaagcaggtcaaaaggccctcaggtgagaggtaccccaagccccatacccagaggaaacgagtatccttatctctgaagacacaggctcccaggcacgaatctgaataaacaggcttgctacgttcc

SEQ ID NO: 35551 - DNA, 384 bp, Homo Sapiens
ggaactggatttcgtaggtaggtgggacattagaaatgactgcaaacaaagatgtagggaaatgtaaaatccagacaccctaattgattccctaggatgtgaatgttagttctaaaaggaaaccattttaaagctgtgagttgaagtggggtgcccaaccgatgcctattcaaagttatcagtacagattaaagataaatttttcaccgtgaagcaaaaacttctttaaaataagaatagagatgacttaatcactaatttttttcttcgttatcatggcttaaaacctcaagactgctaatattctcaagaaaacacagactaaaaaccactttttaaagggttagtatttatcaattaggtatctcgactcagcatctctca

SEQ ID NO: 35552 - DNA, 538 bp, Homo Sapiens
agtctcatgcgtgatggtcctaggcctggaagtacaggtgtctgggggttctgtacccagttctgcattgatcttatctcattattcaatgttcctgtttatccctggcaggtgagaattgccagtaagaagtaatagcactgtctgattctcattccactgtaggtagcgacctttattttcctccctagaagttagtaggaatgtcatattatctacttatgcttagtgttctgaactctgatggtggatgtgagtgtgcgcttcctttgcacatagagctcatggctctggagacccctccagattgaagcagattccacatcaagaaggaatataattacctccttgacaattccatcgcttcctctttcagttcagcctaactggatttcctctattagaccaatttacgttctccccatttgtcacttattctttctcaagatttgtaactttgccttcttgctctgtattctgggaaatgtgcttaacttccaacctgtctatgtaagtaattattttgtcaatcacactg

SEQ ID NO: 35553 - DNA, 363 bp, Homo Sapiens
agtctccatgcgtggttacagagaaaaggactggcccagcactatagggcctgagtaactgggtgaatcatgaatttactgagacagagaactgtgggagaggtctgatttggggggaacagccagcattcaggttctacaggttacacgggaaatgccgattgagaggtgggcaggcaggcggacacaagcatgtggcaatggtggcccaggtctgggctggagaggaggagttgggagtctcaggctagatcacggggtgacctagggccatggggtggggccagatgggtcacccaaggagggaagattgagaggaggccagagcctgagagtgctccgatgcttgcaggggaggaagat

SEQ ID NO: 35554 - DNA, 473 bp, Homo Sapiens
agacaccagtcatgacgcctcccacagtgctgggattacaggatgtgatcacactgtgtcggccaaatatcgatagtattctaagcacaagtattatatacttctctccagtaacaacttgactgctcaacacacaggaaatgcattttccttttatcagctgaagtcaattcactaccatccgctagataagcagatcaagttttattttagggtaggtgatctaaacaatgccacaatatgaaatttggaatcaaccaatatatattgcggatatgctttatgacatgtgtaatatcacgtgtattacttcacttattcctcacaacaacccgtgaagtaagtattaccaaagcctatgtgtagatggggaaacttaagatacagtaacgctatataacttgtgtcacgcttgctgagctgacagatgggagaatcaggacacaagtctggtttctaaggcatcctccttc

SEQ ID NO: 35555 - DNA, 494 bp, Homo Sapiens
atccggattatcagcagtgatatcgacataggtgaggactggatctctatcaaaataggacatcttctataaatatagcctgcacattagctgcccaaagcaaaaaggactaaagtgaaaaaccgaagtaggtctaagggcaataaacactgaagacaataccagagcacacacattacactttcatatgctgacagtccctgtcagcagatgcattctcatgattaaaagggaagaatgaagtcacgaaacccattttaaaaatcagtcctcctgaacctatgcaacaagatgactgcgtgcccttacaaatagtcactctgactgctgtgcctcaactgttttctgaaattattctagagaaaatgcttccatattatgcagactatgatttgagtactctcagtgatagctcatgttcctttgaggatgaatctgactgttgaaagcacctggaagtaagctttataatacatataaatggcagcttatag

SEQ ID NO: 35556 - DNA, 389 bp, Homo Sapiens
acagtggatagcgataatatatacaataggatataattgagaaagtgggattacaatggaagtgaagacataaggaaaggcagaaagaccatgtatcttgaaactatttctggtctggttcttgagggtttctagattcttgggtcttgtgcatatttatattatcttatcaatattaatcaggcaatggctctaaaaattttacccgtctaaaaagtgttgtataaaaaggcctcggaaaatggaaaccattaacgaagtatcttctacttcactttaaactctgctttaagcatcaactagtctgtcttgaaattcactgtaaagcttggctgcctggattcgaatctatagtataagcaaattttgtgaatgcataaactggtatc

SEQ ID NO: 35557 - DNA, 565 bp, Homo Sapiens
gtgtctaaatgtataatgtggtactgagtgctgtggactaggaatagggaactttactatagggccggtgatggattcttgggaaaataaaatgaagggcaaatggaagcaaaagacaatataatttgcttctgttttaagggaacttttaaaaagttaattcttaacattttatcaatttacaggacttcgtcaagaacaccatcgacttaaatcatcattgagtttaaccctaacaagcatcagatctttcagtctgctgtcatgaggaaatacaagtttctttctgctttctattcatgattgtagatttgcatgagcgtgttttaggttaggctgtgttatgctgtggtaatacataccaccaacatcctcatgatttaacacaataaaaaacttctgctcacaccaagtctgcttgagggctcattggccccgtggaaactgatctccatgtccaggccagtttggtcttgtggccgtccgttttagggcagtgcttagggtcaggagagcaaaacaacaggctggagagttaagcacaggcaactaaatgcttcagcat

SEQ ID NO: 35558 - DNA, 525 bp, Homo Sapiens
ttgacagtatgaggcttgagctcgggactctagcaaggtttcattttaggttaccatctcactcaaccaggcgagttttatcctgggaacggccaaaggcagcaggaaggtagtgaccctgactcgccttgggcaaatcccagcactctggtttttcaaagccctgtgggggcaagggatgtggtagctggcacagttaaccccttcaccaccagtttctagaatgctcctggaaaagtgaacagaatgggatccatacttttgaaggagaatcaatttttctctgctacctctttaaatttcactcgctgtgcgcctcaccgtatccagaaagccttccccggggacttcactcgttttccaaggcttgatctcatttactgcctggttctccaaggagctagtcttgtctcccagaataggatgccaagtaggatcagagttcaagtcagggccgttgggctcgaagtctgccctccacacagcctggttggttgtcctcctctgatgggcttacacaacaac

SEQ ID NO: 35559 - DNA, 640 bp, Homo Sapiens
tggtacgctgcaggtacggtccggaattccgggtcgacccacgcgtccgcaaaattggaataatttttatcaaatacaaatgaaatgctacatgaattctgatacagtgtttttctccccaattcactgaactaaagcgaggcctttattggagcactactagtagcatagcaaacatgcatgcattattgtactggtgaactagctactgcttgctttcttcctgctgagaagaacaacccaacaactcgcgactcgtgactcgtgacaggcagatacacacaaaacacgtggctctagtcctgtaatccactgagcactgatggacaaggatcacagcatgagcgcccacttctgggtgggagtgggactcccagtggcgggcttcgacacgacgacctggccgctacccgcagacgatggcctgacgacgtccaagaccatcccggtgccggtgttgaagatggtgccgtcgttgcggaacacccagcgctcgcaagccgatccagcccagtcgcagtatttcaccctcacacgcccgctggcatcagcggccaggcactgccactgaaggagcagccacgcgggcgggcggatggagccgtcggggtagaccgaccactgcacgccgtcgcggccg

SEQ ID NO: 35560 - DNA, 508 bp, Homo Sapiens
atcactatagggaagctggtacgcctgaggtaccggtccggaattcccgggtcgaccacgcgtccgatacaggctcatttgggggagcatgacagttatgtggtttttcagatgtcactgcagtccaagtccctggaggagaagctcaaatcttccgggataccatatgaagttcacatatatcctggatgttcgcatgccttcatgaacacttcgcccgaggccctcaagaggaagaaggggatgggtctgactgatgagaaccaggaagccgtcgacctggcctggtctcgcttctcttcttggatgggccgtttccttggatctgcttgagccattccccacttcatgtgctgtgtgattatgtgtggagtcagggcccatgaatcaaatgttcagattcaggatgctgtatccaaaccatacaaatggactgggttgtacggtgctttggatttggtcgtccttccttctgtttatggataatatataccgtagtgtcgtttcc

SEQ ID NO: 35561 - DNA, 372 bp, Homo Sapiens
cgtaggtacggtccggaattcccgggtcgacccacgcgtccgaaacatgtcagctgacgagcttcttgagcttatgtcaagttctgtagttttccatgtatatgcccagatgctcctagaacatgatcaaatgatgagctataatatctgatgattacatcataaattatgtttaatggttacagcaatgatcactggctatctttcgttcttgtgtttttcttttccgacaattcgggctatttgcggtgagttcagttcttcatgttcactgatttgggtctccaaattgagttacggctatgtttagagttgcgttacaatcaaatttggtttcaacctgttcctaatgaattttttcgaacctcaaag

SEQ ID NO: 35562 - DNA, 606 bp, Homo Sapiens
tagatcactatagggaaagctggtacgcctgcggtacggtccggaattcccgggtcgaccacgcgtcgccgctctcccaactccaaaccctcgccgactcagatccagctaccccgcgcgccgtcggcatgccgttcactccgggcccctactctggcgtcagcaccctcgcccttgtggcgagggcgtcggccttcagcgtcggtgtcgtctacgggagcatcaagctctcaatcctcaaggcaacaaaacctaaaaaggaggaagcacatgctcatgctcatcactaaggacgatgggctgctacatgttaattcatgtggaaggatgttataaattggcagtgcacccttttctccataggtgcaatttggtttatgatttgtggacctcttgtctgtaacacacctgctgagttaccttagttttgtgtcataataaattcttatcaaatgacttgaaatcagtaaggaaggggaaaagtcaaaagaacccactcttgttttgtgaggttgcaaagttaggacatggcctcttgaatatcggtcacgaggatctgccttcctgattctgttttgttgcgacgatgtgcaatggatggtttct

SEQ ID NO: 35563 - DNA, 428 bp, Homo Sapiens
tcgaccactatagggaaagctggtcgcctgcaggtccggtccggaattcccgggtcgacccacgcgtcgagcgggtctggtgcaactggtggtgagccggggagtgagggaggtgtgcagcaggcctccggtgagcaaatggacatggacaagcctgacgattctgctgatgccgccgcgacctaagtttggttgtcatctgtcttatgatcgatcaaattttcctgttattgtgtctggtaggtggatgagttttaaaggctacactagcgttctcccaagccatttcgtttgggggttggacagttagattgaggtatgcgtcttgtccagcgttgttttggtctggactaaatccgagtagaaatgttgcatgatcgaattgtaccattggaatctcataatcgaatgttgtggatgattcgacc

SEQ ID NO: 35564 - DNA, 569 bp, Homo Sapiens
tagagaagcagtgatgtctccccttccggtgttcccatggagtgttacgtgcccgtcttggttaccaccctggctactggtggacacagacattgcccaaacactaagcggagaggtacagaggtgcggggagctcagggcgttcggggtggtgttctggtggaggggacgctggtaaagagcaggtctggctcagtgcttatttcagggaaaactcttgtgatgaatgggccatccgggataaacagatgggacggagagtgcaatttacataacaattaagctagtttagtacatccggcaatgctgctgaaagcaggcctctccctgggcgggctttccgtgttattaatctactttatgacccagtttccccaaatggataatttcgccttggtagtgttaagatgtatttagcgactcaagtatctgcagcagggaagagggtgggtgtgggagtcggtgaattgtctcttacgccttcctttccgggttttcctggagaaggctgcctcactgggtctttgcagttggcgtgttccccggtgccattcgtatctgattcatgc

SEQ ID NO: 35565 - DNA, 544 bp, Homo Sapiens
gcagaggtacggtcggaatcccgggtcgacccacgcgtccggaacttctatgatttcacttcgttagtacgtgaattagatattcctggtgaaatttatgaaaggaagacgtctccatttgagttctcaactgttgaaatgccatacgacgtcttacaattgggacaaatgtcagactgaggtacattttgaaggtgacaattggcagaaactatgttgggaatattgtcgagtaccgggatttctgtgtgagaaactactcacctgtccctacgatcaataacagcattaaggttgaactggtacaatcttccatatcggcattgtgtgtgcctggggccttgacaatgttgacaaaatttcttttcacagttcatgttagctgtggtcagtggtcacagcaggttctagaaactcctgaagactgttctttttctttctttctgaaaactttgaattttagtcagtcttgttttgactaaatcggatacttcatagcccaatagacacttttgtccccttttaagaatggatactttttttt

SEQ ID NO: 35566 - DNA, 675 bp, Homo Sapiens
gcccgaggtacggcccggaattccgggtcgacccacgcgtccgggaacgaacttcatcggttcttaacaatcacaactcaagataagaaacaaattcgctatagccgcaacggcagcaaacatgattacacgggataacactgtcgcagctcttaaaacctacagaacgcaaggataaaaggattccatatctaagcaggctccaactcaagttatagtacaacagctgaccgcctaccgcagagatcactatgggatgatgctcgtggctttaccccatcgctggattaaacaccactactttatgattcgtggccattggccatggctgctgcagcattctctagctcagagccaggcgcagacatggcacttccattaccagcatctagaagcggagctgattgcataacttgaagaggtacaggagattttgataggtccctcaagaggcccttatttgcccacatgaggccacaggcattgcatagtgttcttggtccatcgggtccacggcgcatcatcggtgtagctgttgcattagtaccacaatgatgacattcggcagcagatggaggtcggccttcaactaatgcccaattgggggaagcatctacagctgtcatttctgatgctgctgctattcatcaagctttggttctgagaatgtaactg

SEQ ID NO: 35567 - DNA, 376 bp, Homo Sapiens
taactggctatataaattgacagctgattccaacattcacataaaaatccaaagaatgtatgaagagccacacagctttgagaaaagtgagaacaaagttaaagtgattcacattatctgattccaaggcttcttataaagctacagtcattgacgtcagtcggaggggtggcaaaaggagagacacattctatgtatctatctgtctatatatctatgtggaatataataaagcagttcagaaatagatccacaaataagatcaattgaattttggcaaagatgcaaaaaataattcaatggagaaaggacagcaattttcaataaatgatgctgaaacaattagcacatccatatgcaggaaaaaaatgtttga

SEQ ID NO: 35568 - DNA, 592 bp, Homo Sapiens
acggtcggaatccgggtcgacccacgcgtcgccagatcatactgaaccaagctgccacttcacttcagcagaccacttgatcacgcacaggaagttcagatcagaaaatgcaggctggcgctaccgcctgttgggttctcgcgccgtgctgcccgccaaggcccggccggcggcgaggagcacggtggtggcccgtgtccctgccactaggaggagcgtccgtgcggctgccgccgccgtcgtcgtggcggagcctacgcaggtcgactacagctcaagattctcggtgttcccgatggaggcctgcgacctgctcggcggcgacgcgtgcatcggggagatgtacccggaggccaagctcgccgcggcggcgccggaggcgagcaggaggggtgcacggggtggagagggactacctgtcctacgacgatccaaaaacggtgttcccgggcgaggcgtgcgacgacctcggcggcgagttctgcgaggcgccgtacctggatggcgtcttccaggcagctggcgcaacgcctgaatcctggcagatccatccatgtctgtccagaaacgaattggtctcacagtgagccag

SEQ ID NO: 35569 - DNA, 605 bp, Homo Sapiens
ggctggtacgcctgcaggtactggtcggaatcccgggtcgacccacgctgtcgagattgcttgactcgggagcaaagccgaggtcgtaatggcgtcgtgggacaacctcggggagctctccaacatcgcgcagctcacggggctggacgccgtgaagctcatctccctcatcgtcagggcggtgtccagagcgcgggtgcacaagcgcaactgccgccgcttcgcgcagcacctcaagctcatcggcggcctgctggagcagctccgcgtgtcggagctccgcaagtacccggagacgcgggagccgctggagcagctcgaggacgcgctccgccggggataccttgctcgtcaactcctgccaggaccgctcctacctctacctcctcgccatgggctggaacatcgtctaccagttccgcaaggcggcagagcggagatcgacaattacctacgcctcgtcccgctcatcacgctcgtcggacaatgcccgcatacgggatcggcttgagtatattgagaggaccaaggtgaattattctttgacgaggacgacaagaaagtgcaagatgctcggtgaatcctgaccgtgcacgaatcctaca

SEQ ID NO: 35570 - DNA, 435 bp, Homo Sapiens
gatgagcggtacctatacggatcggaactatgcacttctaacttacagcctctttaatctgatatcgttcatcaatgaacagtttggtttagtaatactaattaaggagtggttctaaaatttcaacttgaaaattaggattgtttcatttagtctaatgcttttgatttgtaattcttacagtggttgttcataggatattaacttgtccagttaccagataaaggttttttgttttccagatgatctgtcttgagattaattttttaaagacaacaagagatatacatttgtctcatttgagtatcaggtcataattccatgatgcacagaagtttcatcatgtgattgattactttttaaaaggtaaatttttgatagaattaattaaaataactactttagaatagctttttatggcataacaataattct

SEQ ID NO: 35571 - DNA, 525 bp, Homo Sapiens
tcttataggacaagggtatatgcagacgtcatgacagaaatgccagttagtgcaatgcgtgactatatattacagacatcagtatgcttcctcataagcacttcagcatgcatataactaactacagttcaagatatgaaatattttctcctcctagaggtaaaatgtatattagcgaaatgaataaaacttaaaacttaaattatgtgttctgagctagagaaatgcataagactatgtaaaccaaatttctatcaagatatacaccattaactttactctagaatatttttaaggtctattcccagtcaatccctgcaccttcttccccacccaagaggcaatcgctattacaattttttttcattatagatgaattggccttttatagagcttcacataaatagaataatatattctgtactcttttgaataaggcttcttctactcagcataatgtttgggaaatccatctatgtagtgtgtatcagtaatttcttcctgatatttctattttctgttata

SEQ ID NO: 35572 - DNA, 440 bp, Homo Sapiens
actcctgaggaaaaatcatattattgtatcttcaaaacacctaccatataatttacttgacggtcatctataaactcagagatttcacgtaggtacttctccagatccttaataaacaggcttactaaaaccagactttaagtctaccctaagtgacatagccaacatttccttatatatctcatatgtgcttacctatttagcaaactattctctgtccccacctttcaccccattccaccacaaagaacaaaggggcaaatggcagccaaagataaattactagaaattcagaattagtcgaatgtaaaataattctgctttgattaataattgataaattttgacatttcaaaacatttggctgtaccttggctgcacatcctcaatcgacagtgacaagttttccatctcctcagcatttaaacctagctcagtgc

SEQ ID NO: 35573 - DNA, 436 bp, Homo Sapiens
tggtaatggagtctgtttagtcgttgaggactccatactattctccatagtggctgtactaatttacatttccatcaacagtgtacgagggttctcctctctttacattcttgccagcattcattattgcctgtcttttgggtgaaagtcattttaactgggatgagataatatctcatagtagttttgatctgcatttctctgatgattgattaatgatgctgggcattttttcatatacctgtggggcatttttatgtcttcttttgagaaatgtctattcagatcttttgcccattttaaaatcagattttttctcttgagttttttgagctccttatacattctgggtattaatccttgtcagataggtagtttggcaatattttctcccattctgtgggtggtctctttatttatttatttattttctttg

SEQ ID NO: 35574 - DNA, 369 bp, Homo Sapiens
tgtgttggtatttatttctcattgaggttgagaaggtcttggtgctttgaacatcttcccacctatcctgtgcacaactgcacacactctcaaataatgaaaacatttttctttttgattttacacgctgatattattctctttggagctttggtgtcttagaaatgcactgtaaccttaattacaactcgtatcaggggagttgtactcagttttaagggactgcttcaccgttctaactgtggagaaatgggaagttatttcccagtggctcgaattagaattactgcactgagctctccagaccacagacagaatcatgagacattgggtaagcatctgaatcggggaattttcagcctcctggca

SEQ ID NO: 35575 - DNA, 377 bp, Homo Sapiens
tgacacctcctcggatcggggagaaatgaggcaggctgcagacagcagagcgacgttgtttcttgattgggcactgtttgccaagacagcggactgaacgacagaactccactgaggacttgtgtgtccagtgttagaggctgggttaaaatctaaaacaccccagagagaagagggcaggcggggaagaggggatggtcccacagagaaaagtgcagaacctgaaaaggtaaaatgtcgaaacatggcagcatgatgtatcacttgatgaggccagcccaggccggggacaatgctgcccaactgtgggccaaagcaggaaggagcttcacctgtctcacatcaaatgacagctgtcaacacagaagacttacata

SEQ ID NO: 35576 - DNA, 377 bp, Homo Sapiens
gagaggatggggcagtacaggaactgagatacaggagttaatggagttcagtgtagagctagaaggcagcttgataaacttgggtttgtgagaaaataaaggggaaaagaaacaaacaaatgagtctggtagtcacagagggagagacacaaaaagaaattaagaaagaaactgagcaggaagtgggaaagcgaagggagcactgaggacaaaagtgctatgtcaggattgaagaatgtgtgagacgcaggaaaaggggctgtaggctaccactccctctgccctctctccattccaccctcagcccaaagacacagaaagcccagctgtcccttatcacatcgcctcccagacacagttccatttccctccctcat

SEQ ID NO: 35577 - DNA, 382 bp, Homo Sapiens
acatattaggatctggaatatgaagttatggagggtctctgttagtctgtcaccatcacacctgtaccctgaaatagaggaaaaggttaatgtgtgcaaagtaatattctggataggttgtcaggcagcactctgcacaggcaagcggagggagaagaaacctggaatgatagaaagatccagtagcaatgcactaattcaggcatgatcatagcaacaaggcctaaactaagatgatgtgggtcacaagaactggaggagtcatgcaccaccattatgcaaggcaagaactttgaatgccagtgctggtccaaaaccggcaacatgatgaaagttacgtgactctcattctgcatgaggacccctgtgcacggacatttgg

SEQ ID NO: 35578 - DNA, 371 bp, Homo Sapiens
acgctgctatataaaaaattgtagagacggggtttgccatgttgcccaggctagtcttgaactgttggcctcaagcaatcctcctgcctcagccttctaaagtgctggtattacaggtgtgaaccgctgtatccagcctctttttcaactaacatcttatctgaggtataatatccgtatgcaaaaatacaaaaattccaaatatctaactcaagaattttacaaagtgagcacacctgtgtaactagaacactggtcaagaaagagaacattcccagcaacccagagtatctcttgtgttcctttccgatggctttccaaaaataaccattgttctcacttctaacatcacagattattttgcctgtttt

SEQ ID NO: 35579 - DNA, 421 bp, Homo Sapiens
ctcagtaccatgtgggcatttagcaaatatttagcattcttgtattcaggagaacaaagctgagcaaactcttgtaatcatccacacacacttgatgagcacagtccagaacgtcagtgcaggcccagctcagcagctggaggaacagctactgatagcactctacaggcgcttccagtactcgagacacaggagagcggatagcggggcaggttctcgagtcaaaaggcgtgaggccaaattctgccatcactagctgtgaactctgtgccatgatttcctcaactggaaaaatgggcagcaacagaatccatcttggacagatcagtgtgaggaccgagtggaacacaaggaaagcactcagaacggtgctaagacaccaagtgtacatagtgtgtaagtgatcctataattatacgca

SEQ ID NO: 35580 - DNA, 442 bp, Homo Sapiens
ccaggattggaatcatgacccaaacactctcataggccccattcaacactgctgcacgtgaaaacgtttacttttggtgaggacaaatgacaccgaaacttatagcaactcctagtgtgaacaacagaaatatcttcctccatctcaacagctactttcgcttcacactttcttatcaatcccagcttcttttatgagatctggtatgtcctgtatgtcctgtgaaattcaggttggtagcaggatctctttgtttttatatgtttttcaggaatttcaaataaatgcacaggtcctagcttgctggtctgatggtcgttttacacgggccaaagtcacggttgttcccaaggatggtaaggcattggagttgaagtggttttcactcatgcattaggtggtggggggggatcttggtaatatcgggagctggatagtatat

SEQ ID NO: 35581 - DNA, 536 bp, Homo Sapiens
tatgcaggtgctcctttactactcttccaatctcgcaatttagtgggagctccaagtaccaagatctatggtaaacatgaagggatataacaagaagaagtgatcactgttctggtataacactagttataccacattctagtgtccatctgctgtaaatatctggaacattctaaagaatttttaaaaattcagttgttttggtcttcagtcctcacctctcccccaagtactagtctcatgttgtcaaatgcccactggatcttgatatctgaatattgtactgttatctcaaattgtcaagccatcttatctaactatgacttaacttttaagactcaatggaaatctctcctgctagttcccagaactttggatttgccttttctttttaatggttttataattcactgttattcagactgttccatttgctcatccctaatatccagtcattgtttaacttgattttcttttttcctcatactgacttgtggctgtgtctcttcttttccttctcttcactactattctag

SEQ ID NO: 35582 - DNA, 360 bp, Homo Sapiens
ctcccaaagtgctgggatacaggtgtgagccatgcgcccggtggtaagtactcttatgtgaagtgtgctttagttttatgtaaaagtgtctatgtacatattatatcaaatgataaatatattacttcctgtgtatcgcatttaaaaagtaagagaaaataatttgagagagactagtagtgtaagtccagacaagaggtgcaggggcccaaataaggacagatgagatggacataaggtacagataacacatttcagaaaataaatgtgcaggacttgtcaatagataacaggtaagggaagaacgaagattaaggtgtaaaaagtaggggaaggagtggatgacacagatagggacgt

SEQ ID NO: 35583 - DNA, 373 bp, Homo Sapiens
tattaggactggaagagactgaggggtcatctggtcaaccagcttattttacaaatgagacacaggctggcagttcgcccacagcctgtctgtcacacagggagtgggtggtacacacaagacgataactcaggcttctttccaatttcagctgccctcagttttccatttcatttggcagttgtgcattttggcatttgctggattcacacattttggtttgtagaaaattaccaagttttaacgtatgaatgattgaggtgaaggcagaatattgtcacagaaacacttgatggatagttttgctcctctacttaagtctgatggaaacatttgaaataaaattgacttcaactcagtagtccctttttct

SEQ ID NO: 35584 - DNA, 365 bp, Homo Sapiens
tgtgcagacagatcacaactcatccttggctctgggtgtgtctgcgtctattactgacttaccctggatatgtaaaatgagtaagaaaaactttttgtgttagccactgggatttttggtttgtgtattactttagcatattatctcattttgaatgctatagtttaggacactagtttaaactactgaagttaaaatgttctccttatttcagaggagagaaggatcttacagtgacagacatccattagtaagaattaatttctagagataaagtgaattcagtaaccacagtgtcagtagagtcagcatggtcaaaatagtctacatgggaaatgtttggtggctcttagttgatcatggag

SEQ ID NO: 35585 - DNA, 531 bp, Homo Sapiens
agcttatcaggacaggggtaaagtcccaatactaacaggagaatgcttaggactccaacaggttttcgagaatgtgtcagtaagggccacataagatctgaccttcctcagtcctctttgtggtctaagaggacaggcaagggtgcaggttttagagaatgtgttagtaagggccactaaatccaaccttcctcagtcctccttgtggtctaggaggaaaactagtgtttctgctgctgcgtaggtgagtgcaactattctgatcagcagggtctagggactgtcgcgggttcttgggtaggggggtgtggggaaacaaacaaaccaaaactgcggacggtcttgtctttcaggtgggaaacactcaggtatcaaccggcttacccttgaaatgcatcctaagccattgggaccaatttgacccgcaaaccctgaaaaagaggcaacacatttttttctgcactatggcctggccccagtattctctctctgatggggaaaaatggtcacctgagggaagtctaaattaca

SEQ ID NO: 35586 - DNA, 413 bp, Homo Sapiens
cagcgttatgatgccaggtcttctctatctgtagctcttagcctactttgctggttgtggttgttcttcagtctttctcttttattttaaattcttatttttaaactcataccctcctatttgttccaccaaactcatatactactttgctttagcagctgctgcttcgaatctttactcttgcttatttcacgtgttcccttgccttgcctttggtatgttcttcgttttgaggagacatccagtcatgtaatattctggaagtccaagagatccagaaagtcaaacactagacaacttaaggtttattactcacaagtcctttctgtgtagatatttacgttcgggggtcacaggcttcgttagtaacctgttatcatatgaatcatacattgaactgtccgatgaactat

SEQ ID NO: 35587 - DNA, 576 bp, Homo Sapiens
attgccacgctcggttatgtggaagcgggggatgaaggtggagggaagtggctgggttcaagaggtacttaggaggcagaagtggcaggactcagtgccagatccgttgtggggatgcttggggttctttaaggtgggatagtcagtgacctggttaacgagccctcaaagagggctggagacaggggggaagctcatgaggctcagcatccaggtctggagctgagtcctggccgggctcttccgtgagtcatctgcacacaagttctattagtgagagtgctggacaagatttcctgggggcaaagacccacctccaagagctccgtgatgtgccagggagaggggcatgagtctgagaagagagaaggaacagccaggggctggcgtgttgatggtagaaaccattacagagttcgcacctggtgggtaactgtggaatgtcacctggagacaggacaaaaatgtcctgtttattaaccgaggggggagagctggaaagacaagaagttgtggaaggaagaagggacattaaagatggggcctgacgggaaacagtggttcccagtgatgccc

SEQ ID NO: 35588 - DNA, 453 bp, Homo Sapiens
gtgcgttgttgttactatgtgcttacaagcccctgcctcatagaacttactctcaagtggagtagatggccttaaaaatgcaggtaagcatttggtgacgaggaaggacttgagtggcagcagtgaggctgagccaaagaagcatgctctgtaagacaagctcagcgcgccaccgtcctccagcacagcgccgcatgtgtgtgggagagagacagtgtgacttgagagcacgggcgccccctgcagtgctagcaaggtgagggactggccacctcatcctcctccactgacaaggttgtgggatctccaggcctgtgaaccccaaggagaagcccctacttgggagctgccccattctggactcaagcaccaaacacagtcatgggctctgaatgcctgtgggtcttcagggccaaattggagacgctagcgatgccaaagttgagaactgaa

SEQ ID NO: 35589 - DNA, 494 bp, Homo Sapiens
tgtgcgttgattgtttactaaggattattataagggcctgaaggtgtgggagtagagacagtttcaccatgttggctaggctgaactcgaattcctggcctccagtgatcatcccaccttggcttgcaaagtgctgggattacaggtgtgagccactgcctagcccagtgatccttgttctgaattactactgttatattcagaaaaaattaagttttagtgtcattttgttgaaaatgctgcagttatgtcaggctgttgtgtgttagagtacacgattgggaagtttaaatttttattctaggagatggcaaagaaagcgcaagcgccactttaaaatgacgatgaaagctttttaatttgatagaggtctttttattggcatggtacacgtgcacttccactcatttgtattgatgggagtgatccctttaaccctaggttagctagagaagagaagtgtgtattaaaagaagtggtttatatttggtgat

SEQ ID NO: 35590 - DNA, 606 bp, Homo Sapiens
agaggatgccgtgcgttgttgttacataacacgagattgtttagctccagaacacatcagtgtcaaaacaccaaggttctgcacagcgacagcgacagtggggcaggaacgatgtcatccttctccaggaactcaggcagcatttcccaaggcccggaaaaaccccagtccacaaataggacatcagccctccagtatgtacacccacccagctggctgctgggcgcagccaggactctcagaatctgcctgtgtcgggctggccgtgggaataagccagattcaggtttaactgaggcacaaggtggggtccaggaagccgcttcggggctgcccatgcagccacagccacagggaggccccgagcggcctcccttccggagcttcccaccagcactccccacccagatgcctccgagaattctggaaccccaagcagaggtgcccagcacagggtaggccagcctggggctcagacttgtgggggtaggtactctccactcccttcttgggaacaacgtactagccctggactctgtgtgcgaacctcaggcccccgtccaagtctttgaaagctgggccagagctgcaactgagggagagaga

SEQ ID NO: 35591 - DNA, 499 bp, Homo Sapiens
cccccactgcacaaataagtgtaatccacttaaaagatactgtcttaatgtctaggtatttttatatcttttgtttttgcaggtgttacagacagaagaaaacatgttaaaatggaccttatattttatttctaggtcatgtttatttctagaaagttagttgggtatgaaccaatggccaggtgggcatgaaccaatgagccacgttcaagacatgataggggaaaatctcttgcctgtgaccactactatacaactacatttcccctgctagatccaacctgctcatcactacacttataaatatcatttcagttttctctttggactgagcaataataaatctttgtttcatcttagcagctgaccatatttcatgcaaactttgaatttaggttctctttagccccaacagcaacgtgttgtttgtcttatctttttcaaatatcttattatttttcatcacatttattctcttggttaaaactgaaaacattct

SEQ ID NO: 35592 - DNA, 416 bp, Homo Sapiens
actgaggacgtggagccccgaggggcaggatggcctccatggtcacacgtaggaagtggcccccaccctccgatgatcctctccctcctccctttcagcgccctccccaggggtgtcctcagccctcctgcctgtgctttgtcccgtcttctgcaggcgcctgggacgtgctgacaggtcctctgccggctcctgccttgctatgcgcatgctggtcaccacagaggcctggcccttcttctgtagcagtcccacacccgcaacaggtgtggctgctgaccacctgctttctgcccctctggtcctgaggagggcgcagtgggcactcaggcgtggctgagcagatgtgtgttgccgggaggaggaaggactgctccagtcagggctgaatttcccacccggaagcatttttggtg

SEQ ID NO: 35593 - DNA, 494 bp, Homo Sapiens
ctgaaacaatgggaggatataatgatttttttggattaatttggccagagctagagatttgtatgatctgaggcaagatagtaaaggtgcactctgctgtcttccagattgtagcaaactgcttctggtcctttctgcttttgaaaatttacatagagaaaaacatgttttcttagattaaaagttatatatgagctgctaaggtctacatgtatttgcttcaagaagaatagcacagctaaaaccgtattttcaagtagagcaaccaactgaggaagctaacgtgtaaccactaattctctaagaaccacatgtcttatgcacagactaaactgaatgcttaaatggaattgtctattcatttgttccacaaatagatatcgaatgccgaagtgccaggttctatctcagacctgaaacacataaatgaacaaacaaaggttcttgacatcatctagctcatatcctccagaatcttgcccttcgcaaccccc

SEQ ID NO: 35594 - DNA, 415 bp, Homo Sapiens
tataccgatcatccctatttatcacattcagctgctccccgctatgggctcagttcacattcgcctttgtgtcctgcgaatcgttctatgggggtagattcctagaggtgggagcatccaaggacaggacacccaccctccgaaatggctgtccccattcctggcgcccccagctctgagtgacatggcctgtttttgcatgtccccaccagtgtgacgacaggaaatggagtcttggttctgtttgcatttgcttgattctctgtctatggccattacccgctttcccatctggaggttcaccttttccaaggcagatggatttcacaggaaacgcggtgctcttggccagaaatgcagcgcaaattagcgcgaggagcctttgcaatacaatattcacatgcatagaatttgg

SEQ ID NO: 35595 - DNA, 394 bp, Homo Sapiens
caacacaatgaaacaatgctgttaagaacttaattttctgtaaatgttactcttggcttttagtggtaatttaaccccacaaaaatatgcccttaataaatttttaatacagaaaaattatcactggcttatcatggctgacgtcataattggaagttttgttcaacactaccaaatgccgtgaagtaaagaaaagtgaatgctgagtaggttagccaggcttgatttagagcataaaaggataactcaggatttcagtaagtctggttattatttatatacatcattacaaatatgtttttggggtttcctggcatactgcaacaaataatgaggaagggtattattggaggcaggaatattgatgccattgtaaaccaaaaaaagcatttag

SEQ ID NO: 35596 - DNA, 429 bp, Homo Sapiens
aggatccctagtcccttctctaaatttctatttgaattttcaggtgaatgtttgaattttggaataaaaactcttgaggaaattaagtcaaagaaaatgaaggaaaaatctaagaagcaaggtggtaagtcatcacgttttggcatggatagttgtatgttgctagggaagaatactaaggacgcttctagaagcaacagccaaaatgagcaaatagattttcatttccatggcctgtttgaagtaaaacacagacttatttaaattgtggttgcttttaattcactgcagctgtgtttcagtccctaacttttcagagctgggtacaataaagaatctgaaagaacttgtatatcttgaaaaatatagctctgaagaacatcatataagaactatattaattctgtaagttcttatagtggttaaaaa

SEQ ID NO: 35597 - DNA, 357 bp, Homo Sapiens
tgtgagcatctgagatcaccccctagagattctgattttactggggcggtgcccaggcaatgataatttaataggtacagagaagagggaggtggaactttgagacctgcccacgggtggaagcagaacaaacccagagatggggctaggagaggctaggaaactaggagaggctggcagaaaggagggaggagattaggtcaggagcaaggccgtctcaggaaagacggaacagcagctgcgtcagagggaggaaagccaggcttttcatgaggactggactgtccccttgaccttcgtctctgggctgtggacattggtgggggtggagaatgactcggtgtggggaggtgtggt

SEQ ID NO: 35598 - DNA, 450 bp, Homo Sapiens
tgtgtggtatatttgtttacgtttaaacagctataatctggttatttacttcacacttaataatttcatgtacaattaacatctggtgaaatttcaaagggatgacactttaatttagctcatttattcataaacttttcagtttttaagtattagatgcaactgcttttcgagtatgcgggagatagtctccaaagacagccacccatcaattccttcctcccgtcatgtatgcctccccttgaatatctgccccctacccgacgaatgtggtttgccctgtgagtagtcttgaccaatagaatggagaagaagtgacattctgaggcttttgagccaggctttaagtggattggcagtgtctacttttactctcttagaagccatctgccatgttgtacagaagttggggccagactacttgagtggtgagatactatgcagggagag

SEQ ID NO: 35599 - DNA, 396 bp, Homo Sapiens
acccagaggatccccagttccttctctaaatctcttcgtatcacttgtcgccaggctgaaattgttatttttctgttagtttattttctcttcctttccatagtattttaagctccgtaaggaacagggacctggtctgtctttataccactgtacaccaagagcgcaaatggctgtgtgctcaataaaaacttgtcaaatgaccacaactacccaggtaatttactttaaggtcaccaagtacacataagatcaagtcaccaccaataaatcagtaagtccaatgaaacagtaaacacaaaataaattattactctgttcctgggtaaaatgatcttaaattgtaccagctttcagcttggaaggtttgataaaagtttgatttggaagacaggt

SEQ ID NO: 35600 - DNA, 398 bp, Homo Sapiens
aactggtctatctagtgcctaacttattctttattatacttttctctgtgcagacaatggaactgggctgccgttcatagcccactgccactttgtgtttttgcctccaattataccaaagattatgatcatgtgatctccaagtaccatcttagatatttgcatatcttaggtaataactttggaaaggggtttcacagtaccttatgtctaacaattagctaaaatttaataagttggcacctataattatacaacgtgtaccttttctccctaaaagtttagccctacctcttaatgcttattacatttattttaaatagtatgtctctatcttaactatagggaaagtcagatggtctcacttgagggaaggtagcatgtgctaaccacttttg

SEQ ID NO: 35601 - DNA, 655 bp, Homo Sapiens
tagagttaccagtcccttctctaaactgcagggttaagggcatgagggctggactcccaaggccttgggcaggtctgcacctgtgtctttgcagttttcagtccccacagctgccctcatgggctttgctggtgcagagtgcctgtagtctttacccacagagggtacaaagctcttggtgggtccatgaatctggggtctgcatgatggtggcctccagtgtggaggctccaaccccatattttccttctgcactgccctagtagaggtttcccaggaggctctgcttttttggcagctttctgtctggacatccaggcattttcatacatcttccaaaatctatatgaaggctctgaagcctctgggctagtgctctatggactcgctggcttaagactatgtggaagccgtgaagccttatagcttgtaccctctgaagcagtgatgcaatctgtacctgtgcatctttcagccaaggtcggagcaggagctgcggctgctgggatgcaggcagcagtatcctgaggctgcacacagcagcagggccatggggctggcccccggaaaccattcttctctcctaaggcccagggtctgtgacaccaagggctgctgcaaccatctctgaaatgcctccaaggctttttcccca

SEQ ID NO: 35602 - DNA, 574 bp, Homo Sapiens
cctatttaactgaagaaaaggcaaacgattccaatgttttggaaagatattaagtgttctcaaatttgagaagggctctttgtgctccacctttgagccaggtgccctttaccttataacacgacaccactgatgaaattgtgcagtaaagatggaaaacacaacaccactgatgaaatcccctgtgcagtaaagatggaaaaatccagtgcccgaccagtgaatgctgctccacccgacaaagacagcagcaaaagcgcgtggctactctttctgccttttccctcccatgctcgcccaacatgcatcaccgcacagaccttcaacgacagtaaattattcatccggcatctgacgtctctctcccaaagagacacatattcagaacttcagacattccatctctgataaatcattcatatccttttatccgccacttttaaatgattataaaaatagctggtggtagtaaactgtggctctcatacatattgagaaacagaaatgcagttaccttttaccaaaattccctgaattatttagaacaatgggagtactccaggaaactataatc

SEQ ID NO: 35603 - DNA, 410 bp, Homo Sapiens
ttagaggatcccagtcccttctctaaatttcttcctgagtattattcagcatccgctatgtgttggtatcacgtcaggcattagatatacgggaatctggaaatctgaaaatccaaggtctcagcttcaccgaccttagcaagaagacacagatgataaacacataaggaaatacataagaacgcttcaaacaagtgaaaaggtgctgtgataatggttaaacagggtgacaagacgggtaatgactggtgtggggtaggtaattaactgatcccagcattgagcaatgggaataaactagacagatattcaaggatgcagggaaaagcattccaggcagaggaatagtgtgtgcaaatgccctgaggcaggaatgagctcgccctggtggctgaaacatattgatgagt

SEQ ID NO: 35604 - DNA, 669 bp, Homo Sapiens
agttccttctctaaatttcaaaacaggtcaaacatacaagaaatcagaccaggctgggtgcggtggctcaaagagaatcctgcaggaagactgaatcccactcaattgcccatctgctgatggttactgactactctgcagatggtaacaatgaggcgtaatgataaatatgcattgctctggagtcctatacaatcaaagcacttcacgtgagagtaaaaactaattaaacattgcagcaccacccactgaatgaaggtagagttaaatctgtcaaattatatattctgagcagcactggtttataagaaagattcaccaagtttcctttatttttttgtccttaattataaaacctgttttcacctgacacttttccagcagtgtaacttttgccctggggcaaactgaggtggcgatgtctgtagtaactgccaagagagctgtttgtttctccccaggggtaggtcattagaaactgaaagtccaggaccaattttctccagctgctgcaggtgttttacttttagcattgtggggtggggatagcagatgcctgagaaactatagtgttttacataagtctgaaatcattggatctataacctcagttcttcacaaaccttatgtcatccagagatcgaacacatttctagaaggaaacaacaa

SEQ ID NO: 35605 - DNA, 356 bp, Homo Sapiens
gcgtagtatatgaacaattcaatcacaaaaggaatggggagagtattaagtaaaaccaacctttttagatttgtttgctaacaggtctattaacagatttatttagaaaggacattgaaggcattgaataaaatcatgtttcaaattattagtagacttcaaatatttgtgttatccctaactactaaataaatttgggacctttaatagaattaaacctcgtgtatttttgttgttcagtaggaaattcagatgcatttgtttaaggtcttaattacaaaacctggggtgtttaagggccagctttaaaaggaaacaaaaaactattcactgtttagtatggccgttaatctaaa

SEQ ID NO: 35606 - DNA, 511 bp, Homo Sapiens
cctgaggttccagtcccttctctaaatttccactctttctttttcttcctctaagtacagagatggaaatgagccaggcactaggccccaagcttggagggctaatactgacctctttgacagagaagctggcttcaaatggattccatagaggttcaccagagcccctcacctggaactctctttccctcctgcaaacatttattgagcagctactatataaacgttttctgttacacattgagaatacaacagtgaagatggagcatgttgccctccttgaatttctagtctagtttatactgcagtgttatgatgatgtgagtaggaatgaacattcttggtgaactcatagaagggaacttgatgtagacttgtgaagtcaaggaaggctccctggaaggagtgacatttaagcagaaacttctggactaagatctggactaagtgtgggcaattggtgtgagaggaatagggaggaaggaagagagaaggaggaacagcaggggat

SEQ ID NO: 35607 - DNA, 411 bp, Homo Sapiens
caggaccttcagtccttctctaaatttcccccagacttccattatctggaatatatttatttcatgtttctaaagaagaaaagcttttaaatacagtgctgagtatcatcatttagaccttggttaagttaatgtatgtattctctaatgattgaggtctgaattttagcagaggttcttggactgttcagggaaatatataccactagttatatgagtaaatactttattaaccattcatgatgttaaatagactgtgacttataaagaatttaaaacagaacaaaagaatttaggattaataaattctgctttatacgcataccattcatttctaaggaattcctttattcatctacaattaggatgagtaggaatctctcaatgcttacagatgatcaacattatcta

SEQ ID NO: 35608 - DNA, 452 bp, Homo Sapiens
tcgtcccttctctaaatttctgtttattgtattttccacgtgtatgggttttacaacaagcttcccaaagctttcagaattgttgtaagcatccctgaccaggaaataagactattgtgggttgtttgaaatgtctcaccacattatggatgctctttatattgagagatagtaaagaaggttgatgcgtaatagattttaaaacattttattaaacgagataagtggaaggaattagaatatatcttgtagtaaggatttctataacttctaagaagtctgatttatcttttaatatttatccagttttcatatattttagattttattttgcttttcgatctccttattacatgagtggtgttatagggagggtgtagtagctttctttttctttaaatcatcttctggcctctagctatagcttcattcaggcggggcacctatacttt

SEQ ID NO: 35609 - DNA, 441 bp, Homo Sapiens
tgctgcgattacaggtgtgagccaccgcacccagccccccttacctattcttttggaggagaaaaaacaagaagccttcccaggttgtaatttcccaagctgttttttttgtccagctcctctgcatatctgacaaaatttcccatagcatctttcagtaacacttttatcttgctcatacttcccccatcatcacaattacacttatgttcacagggtctctggggcttgctgtcattccttcatctggccaaaaaatgcttcttcctgaaaagccccgagtgaagcattctcctggttctaagtacagttcattagctccctggtttcccttttctcctccttcaagtacacagataactaatctaaaatagggccttcccagtccgaaccgtgggtatcaagtacacaggagtgccacagcctgggtgacagaacgag

SEQ ID NO: 35610 - DNA, 427 bp, Homo Sapiens
cggatcgacacccatctgatgctacggaggtctgtggtcagtatactttaggattatctattctatttctgtacacgagtattataggtatatcatagagatagcattgaatctgtagaccgctttgggaagtctggacattttaacaatattgattctcccaatccatgaacatggaatatctttccattttgttgtattttcagtttcttgcatcagtgttttatagtttttattgtagagatctttcacttctttggtaaagtatattcctaggtatctttttatatttgtagctattataaaagggattactttcttgatttctttttcagattatgtgctgttggcatatagaaatgttgattttgtatcctgtaactttaccgaatttgcttatctgttctaatagttttttagtggcaat

SEQ ID NO: 35611 - DNA, 383 bp, Homo Sapiens
gtcttactcttatcacatcttcttatccttagacccgctctactaaacgactggtcattagctcacactaagatgtctccctctcccagaaatctctattttcctcccaggcttttcattgacataggcctgcagtctctatgccacctggcctccacctcacaactcaaatataccatcagggggcatctgggctcccagaagcccacagcccctactggaacagccttaggaaatcttctaatgctggaagggtccttctcctctgatcactgtatgccatctgctgctgccgacagggtatgagatttggtcgcagttatagcttggcttttctcccaatatcatgaatgagttgactcttagctttcctggtgtatgtg

SEQ ID NO: 35612 - DNA, 366 bp, Homo Sapiens
gtattagaatgccagagcgcctgatctatattggttcatcccaaaaaacccacactaacaacacccgcctcaagaatgcattgctgtaattacctacgtacatgcccccaacgcaacgctgcccaatgtgtgcggcgtacccgactcaaccccaaccaattcgaaagcctcacgagccacagctccacaagtgcacaactcactcacaggtcacagcccatccgccagccacgcgccggtcgtactcatcgacgacgctcgtgtcacactcatttcgcgcccttgggggtgagcccgaagccgaagggaaagagcgggtcgtagtgcttgtcgcccacgttcaggggcagatgagtccaccgattt

SEQ ID NO: 35613 - DNA, 474 bp, Homo Sapiens
gggacccttagcttagtaggcaggaggaatgtggcaccatttctaggagaagtgtgacatggtccagtgtgttctgaaagttagttctgatggcacagtgaacagagggactagaatgaatgggtgggagacaattgtaacagtccaggctagagacaaaggtggtgctgggtttcttatgtgtggatgtgttgctgttggccaagaagaatgagaaggagcgaatttgggcagtgggacctccaggcagccttacagttttcagttggggagtgagatgagacctggaatttaggggtctgtgtagttaaaaccatgcggtgtacaagattgcccagattgagtatgtggaaggtgtgatggggaggagagagagtgttaggaagtgctggggtcctgccatctgagaacaggagcccagaggcagcatatgcagcccgaaaggagagaatccatgctgagggtcgtgaatac

SEQ ID NO: 35614 - DNA, 404 bp, Homo Sapiens
gcggacccttagcttagtaggcccaaatttgaaatgagaaagtacacttttcctgtcacttttccagttagaggcttctcttactagagactgcagtcaggtacttggattctgaaatggagttaatgtgacaactgcttgggaatctcagtgctttggtactggatttaaagtaacttacagttgaaactgatttccaactgcaagaggtgacacaaaccctgacttttttggaaaatgttttaaatataaaacctgaagtgaaaaaggcttctaaggtaaaaaagattttaaaatatggtaagtgctttaaattagtaagtcggttttttaggtgggtgattcaactgctttctagttagtctggtcattttttattccagagatttcttaatatgcctact

SEQ ID NO: 35615 - DNA, 429 bp, Homo Sapiens
cctgctccaagtctttaccgctaagatagaatgatcagtattaacaaggaagaattcacacaagaaaacaatctacattcttgacagtcacatgatgattagggagatcaagttttaaatcactcactacaagcagaaagggaggacagacacaactatgtatccagactgaatcattgtgagccaattctaacatgtaattaggattatattgggatggctaagtatatttcccttcccaaatcttttatctttttcagtgccattaatattttccacaattccttatgtttagctcctacagcaggtcgtatcatttggggtcgaggttccaccatatcaccatatgtccaaataataggaacttttgttgtattttttatagtgtctaccatctgatcattttctttagatgcagggtgaccatta

SEQ ID NO: 35616 - DNA, 451 bp, Homo Sapiens
ccctagaggatccaagcgttaacggatattgtacctcacagtaatccactaacagtggcagtcctgtccttggggaaagcctcatatagattacagattccctcattcttcctaccacttgaggaagagcaagctgatgagccagaagatgtgtgatcatgctctcatgcccttttctcccagaggtaaggtatatttagtgacattctgttgttattactatagtaagaaatctcttcgcaaagtatttgataatttaaaattgttaactaataccacttcatattcattgtcttaatcaccataagaatctcaagatgaagatgtggcaagtaaaactatcagaggttaaataacatacaagctcataatcttcataaagaaagctgagagtaaaacccatgtcagctgaccactaacccaagttttcttttcacagcggttaaagctt

SEQ ID NO: 35617 - DNA, 678 bp, Homo Sapiens
tcccaagcttttaccgcattacttactttctgaagatgtcccagtgaatcctctgtcaattcactggcatatgtaatctatatgataaggaatgcatcttccttctaagtactgcccaaactcttgccagctcctctcccattgccccttcatgtgaatatttcttggctaccttagtggaaatatagatcagttttctccccatccatcctctcaaacattatgagattggtttactttttagatttatgcagtgaaaatgcccagtcaggtctgaatcgtcagtgcattatattgactctgagcactttagaatttagagttgcaattgaatgccagctgtggagatggggtgcatatcagatatataaataaagctcaggtttgctagggaaccaggtatagagaaaaataagtctgatatgaggaaaattgcacaatttagagtagttatgccgtagagaaaatttccacaaactaggaaatgtagagagttattctatagaatactcaaaagaggaaagtatgtgattttgggaaacaggaaaatcttcaaacttctttcttcacttccctttgtgtttagttgaccctccaatgtgatcattgcctttggaagttgggagaggtacgggaaggtggctgatcccggttccatatttaatcctccatacatct

SEQ ID NO: 35618 - DNA, 353 bp, Homo Sapiens
aacagacggccaggattactaaggacgagtcagctagttaaatgacagtacccttgaaaaacgtcgagcagaggtctaacgtgaatgtttgtattaatcaataatgagtttatgtcaagattcatattgagtagtgagctggtgctattagaatgagcttctttattccagatgttgaatctgaagttgaatttagatatttctttttaaaacatctagtacagaacacaacacttcctcaactaagaagaagccactgggaaaaaagaactgctgcatgaagaagaaactactgagagggatggtacaagatgtaaacagtctaaataatatgcaaactgaacagtcgaagc

SEQ ID NO: 35619 - DNA, 569 bp, Homo Sapiens
atccacaccagcacattgagttgctgtatttatctgcaactgtagagctaaattgttcctcgggttgggtcaagacaatggaaagcaacagcaacctgatagctctctgaaaacttgggacccaggcccagcaaactgatagctctctgaaggcccatgtatacccaggaagtggtatacatagcgaggcatttagaagctccacctgtatacttagagaaacataaacccaataatagtaaacttcctgaaagagtgccttagagcttagattgtgagaggttgagaagcttcccaggcaccaaggttggaagaatccctttctgctttgttatcttttgtgttacccattttccccatatggattgaagtcctggggaaaaaaatgcgctcactatgtaggttatcaggaaggggattgtcaatctcatcaacatttgccaaaattgagaagtaggcatggttattaacttttttactcaccaatatacaaatgaggataggcatattttgaatggcttatgtattattgatattcagtatcttttcctcttctgggcaatcaagct

SEQ ID NO: 35620 - DNA, 396 bp, Homo Sapiens
cttattgcccagagcagatatctggacaggtgagagaaggccgcctggactcccaaagtgctgggattacaggcttgagccaccgtgcctggcctcttaatgacatcttttatattagcttataccattaggataaaatatttgcattattgctccttgatctgttttatcactataaacatataagacctttgtgctatgtacttactccagtgactaggagtctagtaaactagcagagttacctagatgacccttttctgatatttattccaattagaaatggaggtctgtgtagtacccctgtttgaatgggtcatttaaaagtgaatggatttattactgttatacttaactcaaatttgtagaaaaatgcatgcatttacccacggcaat

SEQ ID NO: 35621 - DNA, 421 bp, Homo Sapiens
aaccggaccttagctgaatgctactttttgctgactttgtatccttgtcgcttaaaagatgatgaaaagtcacaattatatatttttggattaattagtcacagcttatagaccaagtccatgtccaatggtacagagcagcctgctacctatttttgcacataaagttgtttttttgttttaggaacttggctgtaaagtgcatatcaaggtgcgttggaacacagtcacagttacaagttgactggctgctctggcacatagctgagtagttaagacagacagagcacaaagactaaaatctgtgctatctggcccattctagaaagtatgctgatccctagtttagagccacaatgaattacccagattttgtgcttagttcatcaaatatgattaaattctcagtacatgaggcaat

SEQ ID NO: 35622 - DNA, 537 bp, Homo Sapiens
cctgctcgtggtgcgttgctttgtcctgtatgactgataggatgattggatggctgtttgcttatttgttttgttacttggctggttggctgaaacagaatcagagtttacctaaagtacactaagttgagatgtcacaacttccttggtttatgtgtataggaaggtatgcaaaaactcagggagactggatttattatgtcagacctgctcactcacactggagggtctacagaacatacttctcacaacgatcatgagaaagaatattgtgagaggagcccagtatcctggaagagctttgagctcgtgctctcagtaggcaaaatgttacagcagaaactgcagccactggactgggatctttaaataaaatgaggataattgaatcctggggtggcagggaacatgggctgtccttaatcaccaaagatgaggtgggtgtggtcactacagtggaaagcagtgtcaaagcagcagtcagaatggtttgactcacagaaacccatggcattgtgggcaatcaagcgggtaccg

SEQ ID NO: 35623 - DNA, 372 bp, Homo Sapiens
tgcacaaatttccaaaactgttctgctgcattgcatcaataagtatatattattttatgtgtgccagaccagtgccaatattggataagaattaatcagaaaacatccctgccctcatggaagtggggagggagaaataataaccacattaacaggcagatctacaaagatcctcacctcatagggattaaagtgtgatgagcattaataaagcagaaatataacatggaagcaagtacgcacataatgtaatcattccactcttaattataataacttataagtcatcataaaatgccaacacccacgattgaatcagtgctgtgattgagctgtggagtactttggagttccccaggcagcctaggccat

SEQ ID NO: 35624 - DNA, 373 bp, Homo Sapiens
tctagctgtcagaggcccgagttattgcatagaaaacaagtaaggacagtgtcttaggttgtcctgtttgggcaggtgtgctaagttccagtagacagtttatcatttggtgaatgcagtagcattgtgaattttaaaaaagcaatttctctcaaattcagtaggataaaatttaaattctgggactcccatataaagtaattcaggaaggacttgctacccacacaacaagcaggttcagtcacttggtgggtgtcaactcaatgaccacaaccaaagaagatttagcaaggggattttattacttatcaggagtacggagaacaccaggaatagtcccccaagcagtgtctgactgagctggggggctggg

SEQ ID NO: 35625 - DNA, 446 bp, Homo Sapiens
atgagccaccacacccggcccaatgagctttacttttctacataaggaaaataatggtagaaatgacatagctgtgaaacttgtattgctatttttgtaccatgctaaatgttaactactgcttatgtcggcatacaccttagagctgctgtgatttaagcctttaaatttttctgggtatgatgtaactcctcccctacctcatccaagtagataagtccatggaggataaacatgacagctgctgtttcttttaaagctggttccagggaatatccactgaatataggacagattgtcagttgctgtgtgctgcctggtgctggtggagctttcagccttcttctcagaggaaacatttaaatgttttgtgaaacctagaggtctgggttagtaggacagtctgagcagagcaggcaagggtgaagggagtggagccagacgtc

SEQ ID NO: 35626 - DNA, 557 bp, Homo Sapiens
ctgggtcctgagtctcgcaatacgtcacattgtcattgctgtaacaagtgtaaacagaaaagaacagagctcttcagacattcaggctccattatagacatcgaagtgtccatggggtatacagtaatggacttggaactgtatccagcagagagcccagagaaatcaaacaatatgatcttggctttaaaggatcaatacctttgctggaaaagacccaatttacccaccaaagtacaatgcctttcatttcttcagatcgtacatgtctgtaactaaaagctcccccttccttgagcagtcataacgtaccaggcactatactaagggctttctaggcagaggctctcacttctacaaccaccttgtacagtgcaaaccaatattatcccattgcacagatgggcacaatggaggcctaaggggacaaagcaacatgaccaggtcctacagctgccaagatgacagcgtgcagaccttgattcagggtgcatgtcattcccttgtgtctcttgcagcacttaccaccttctttctacccggcaatcaagctaggg

SEQ ID NO: 35627 - DNA, 547 bp, Homo Sapiens
tcgtgtcattctatactgacaagccaggcatatcggttggcagtgacttactatttttccaactggtaaaaatagctttgcctaagtgctgcagaattttagtcgaagaaaaacataaactagaaatgcatgtgaatttttaaatatgaaagccaacatattgtctgtcattcattactatattagtaagaatcataggagattgttctaataatacaaatatctaacaatattaaatgattcctattcccactgaaggttaactattatatcaactttataatcatacttgacaattcattcttaagtagtgcataatcaaaatatctaaaataacataaaccaaaatactagtcaaaatcatattttacaatctaagtaatatgcaattttaaaatatattaacagagtcaacagtaagtctgcattgcttggtttgaatagataacacccttagttttaataaactactataaatgcttgtcattgacagggataccattttatcatgaaaccagttattgtggcaatcaagcttgggtaccga

SEQ ID NO: 35628 - DNA, 368 bp, Homo Sapiens
gcactcatagttttccaagagcatcaccagtgggacacggctcctgcttccaaccgctgctccgaaaagcagctcttgcccacagaaaacgtgggtcaagtttcaaacacttcttcctaaacctacctttgtgtaccttatatgaactcacagagccacggaaggcagaaagttgatcgtcagtcctataagcaatgttaataattaaccagtgaggacaaatatttgccatcattattttcatatcgtaaagtggtgccagtctttattgtcaatacttaaaaaatcaagagcccagagggaccaagtggcctctgctggccaccaccaactcagactccccgccccccgccatgaaacatggcact

SEQ ID NO: 35629 - DNA, 409 bp, Homo Sapiens
cggccgagtacaaatgcactaccactatgcaagtaagacaagattctggtacagtggccacactatcccaaagtcattgttaaaacaaacattcatctagaaacactatgagcggaatgtcactgacaaaataaacacattacaaaagacgcaaaaccacagtgcagctggccatgaagccgcattaggacactgctctcaacagagctttagcccagttatctctaaaatgtacaatcccaggccctcacaaatcgctgctcatacaacagaatacttctcctgacgactggtatttgtgcacaagggagcacagcttcctattttctccaatgaatagccttgtctgtaaacatgttatttcatgcacgctgcttctcaacattcttcagcacggggtaccgagctc

SEQ ID NO: 35630 - DNA, 635 bp, Homo Sapiens
gcctagatgatccccgtgctgaagaatgttggagacaggactcaaacaaaggattgcctgattctggaatccacagttttaatcatattgtctattacactagaaaaactgatgtccagagtgactgtgtgtatttagtcatgtatattgatttgtgtgtatttcgtgtgccaacaaagtttgctagactgtgacccttggaaggcaattaatgtgttttatttctctcagtatttgtagcatccattaccatgcctagtacacagaagatcctcaacagaagctgtttgaattaaatttctacagatacgtagttatccatctctataaacattcacagataaatatatacagaggacatctcattttcaggtagcatctgagaacaagttgtgacaactagaaaccttccctctctatcttgaactatttcaatcaagcttttgctagcattattccattgacatggctcttgtcaaggtcaccagtaacctccatgttgatgattccaatgatcaattctcagcctccagcttgtctgacccctccacagctttggacatagggctttcttccctcctgcaactctctctcacttccttaggcttccaggatattcctatctctttgaatgc

SEQ ID NO: 35631 - DNA, 630 bp, Homo Sapiens
caagttactatattattgactgacacattagaaaaaaactgcatggcctgctacaggccagaggtcagctacgtttccagagaggaggagattttgccttagttgttcagcataatttacaactgtgagatccactcaggatatattcctataaaaatattttgcattatttcaaaaactcataaggcaaagtcaggttgtacaataggaaagatacacaatacaactgtcatgtattgaatagtttgaaacatttatatttttaaaatgtaaagcaaaatttcactataaaacatgtaaagaaaaaaggaaagaggaagaagggatgagtgcttgttatttccagttttataccaaggaatataaaagaaggttaagttataatatggtcccttgcctcctaggatcttgtaaacctatctgaggagcaaaataaaagctactgaagtctatgaaatttaattcaaagacgagagagatgagactgaatggaagaatctttttatcaaggcgagatgcgaggacttaaaggaaatagtagtattcctaggcaggagctggctgaccagtgaatcagatgtactttggagatccatgttactaaaacttgtcattcactctggcagctgt

SEQ ID NO: 35632 - DNA, 595 bp, Homo Sapiens
agaatgtcgctatgtgcttagatcaaagtcttaagtgtacatatgacaccaccatagaaaagtaatttatctatgctggaaatttggcaaacacttactctcttgactgtcaatcagcattaccttttgaactgccctaaatacacatttagaaattctgggccccatccctagagattctgtgtcagtgggtatacagtacaataaattaagaagaaaataacctgcatgctcacctcccctattgtagacattatccatggtatgggagaaccagaaaagatatatctgaggaagattgcaatgttatgttccttgaaggttgctggttcagtcactgggtttactgaggcagccaggaatcatgaacaaataaggtgttgaacctcagttgtgctgccttagtcaggggctcagtcctgatcaaggtagcacgtcatccagttatattcttcactggttcatttttcttgaggctgtctttctgaaccattgagcatgtggtttcttagtactaaaccagttcagcaaagggtggaacttagtatagtcatcctattttatttatcatgttttggaaccaaaatctttattt

SEQ ID NO: 35633 - DNA, 477 bp, Homo Sapiens
cagtcactaaacaagataggaaaaacgttgtcaacatggacagagtaagcaggcattctagggtagatggcagagtaggaagcatcaggaatccatcttcccacctagacaacaattgcactggcagaatctgtctgatgtaactgtatagtaacactggagtctattgaaggcatgaaacttccaggggaagtcttggacagtaaattgtgcttaatttcagtcaatattagctgttaacatgaaagcagctactctgaccacagccccctgtcaggcggatgtatgggtgttcctgcagcaacctgcacacagcttgtgagagccaggatggacaaaaaggaccctatagtgaatacagagtatctgagctctgatcactgattatagcttctaatcaaagaaatacagacacaaaagcaggtggccattgtagttgcacctctcctgttgttcgcaagactctccccctccagc

SEQ ID NO: 35634 - DNA, 475 bp, Homo Sapiens
cgtgctgaatgaatgtcgaaagagtacgctgaagcaaggtctaagcatttagtacaaaatgggtgttacatttagttttagtattcagcgatttcatgaaaggaaggagatttgcagaggttccctgttcagataggcgactcgttgagggaagttttctagtagctgctgcaatttcagaagtgtgttccatgactgaagagatagaaaggagactatggtacatggggaaggaaattctctctgctgggctctcggtactctcccctgactgccttgctcccctgcaaggcatacacgcactgctttaaaatataggggatttatttttcttgtgaatgtgaaacactgaatcagcaggtgctaattggaaatagagttttgtggactactcaaggacagcagtgtttccctttggggccacaaactggactttataatttcctattgaatcactgcaacattcttcagcacg

SEQ ID NO: 35635 - DNA, 489 bp, Homo Sapiens
acatagacaatggtcttggaaaccatgcaggactaagtaaaataatctagcacgagagtagagataagaaaagaaggccagaatcgagctatagcaccgtcacacagttagtctgatagagtagaggagccaagaatggagatgggaaaaaatcagtaatgaggtagaaggaaaattaagagtgatgtcacagatgtcaaaaaggggagtggctcaagaaggcagttgtttcggggagtaccatgaccacctactagtgatttgctggacggactcactcacgactcaatatagaatcatattcaaggctaagatttattacagcaaagggtatggtgcaggaacagcaggatacagatatatggtggcaaaactagagaagtcgtagtaggctttcttgtcctctctctgtagggattccacatgtatctcaggaatgcatgtttctctccagctgtaaactgcagagacatatgcaaaacgcctcca

SEQ ID NO: 35636 - DNA, 521 bp, Homo Sapiens
cagtcttctcccatcagaggatgaagatttgccatcttagcagttagccaagagtgagcagcagagcctgcctttcaagggctcagcctgcttgagtgaacagtgagcttgcttatttattgcctatgaaagccatgttcctgggtagcagtggtctacatagcacatacctgacagttctcttgggtgtaaagtcactttgggctccctgggtagactattaacctttggtaacaaaagcattgtctgagagtgccatctctgtggcatggttgggtgaatgcctgataaccatcaaagcaagcagaaggcagtttttggtctccccactgattttggtcctccacttttttggcttataaaacaaacatcacagaattgattttgatattacacagttccaaagtcagattccatggtaggggagcaaaggctatgcagatgagagtggccccaacccctcattctcccctctccctcgtagaaactgaacgtcacagaacaagagaagattgacaaag

SEQ ID NO: 35637 - DNA, 497 bp, Homo Sapiens
cagctctcccatcagtttggttctttgttaaacggttattttgtctttcggctcatctcattttattggattttttagattcctggattgaaattttaactttctcctgaaacttccttgccatataaattttgaattgtatgtctgtcacttcagtcatttccaaaatgttaaggaccattcttggggagccagtggacttgtctatgggtagggggacacactggctatttgttttgccagaattcttgggctcgctctttttcaactgggaggactgacattccttcaactgtattgtaatttgattatagtcagttggctttgtttctggatgttttcagagggccaaggctctgtggtgggccttttttgtggctgaaatattgcccttggtttcacagatgagtatattagcaaaatatttttggtgttctagttcgggctgcaattcagtagatggtgcttaagagtaacagtaaataggctcttattac

SEQ ID NO: 35638 - DNA, 394 bp, Homo Sapiens
gtgggaccgccctgctcactgtgaatgaaaggatggatggatgaaaaagcaaatgaatggatggacgtgtggatgaatagatgaaataataatagatgtatggatggatgaatagatggacaaatggatggatgaatgtgtggacgaatagatagatgaaagaatggatggatggataaatgggtagatgaatggaatgggtggatggataggtaattgtactgatgggagaagacttgtcttgctcccatcagccccctgagtagctggggttataggtgcacgccaccacacccagctaatttttgtaattttttgtagagacagggtttcaccatggtggccaggcttgctctcatactcctgacctcagtggtctcctcctcacctccca

SEQ ID NO: 35639 - DNA, 394 bp, Homo Sapiens
gttgcgtccatcagatactcagtaaaagatatgaggaacaaattcagaaagcttaaagaacttgcctctgcagtcatagcattgaagtgatagaacttctaatggggaaactgataagtttaatgccactccaagatggctgtattacatattcaaatctaagaaatcttcatatacaatgacagaaattagggtgaataggatgggtttaggatagaacttcaactgagaattaagccctaaggttttaaggcatacattgtaatgaattcatttatttcctatgcagctagaaggtactagctgtgtacattattgggagatttgcaatgtagtcactcatcgttttctttggagcttaattctcttgtggaatcctgatgggagaagatgg

SEQ ID NO: 35640 - DNA, 644 bp, Homo Sapiens
ccgcatcttctcccatcagtgaaaaagacagaaagatggttgactgtctggagatgagatgacaggcctgcaggtgcacctgtagcctctgacctgccagtagaatcttcacttgcatgactaaagcagcagcttagatttccagaaatattagcagttttcatttaaactttctctagagaccctgggcagatgacatgaatgaactgctcaaaaatttcctcagcaaacctttaactctcatttttgctgataccattatttttgtaggaataagggagagaaattacagagacagaaggaaagaaaaattttaaagaaagaaaagcattatttgctgtgtaaaggcagttacccaaggctaatatgcagtgtgtcaaaggtataactgaaatatcttaacctgtaatccaaatccaaagaataaacatgaacattaaaataatactgaagcataaaggtctgaaggataacagatatccacagttattctgcaggaagacccatagactaagttggctttccagccctactgaccatccctagaggcttcaactgtgagcctggtagaaaactgtattagaagttgcaatgatttcattttctccatctcttgagatgctaggacaggtccaaattacact

SEQ ID NO: 35641 - DNA, 659 bp, Homo Sapiens
cgaagtcttgcgtccatcaggcagcggtcactccctcacaggatgtatgttagttctgctgctctcaaggtgtgtgccctgggggagacgctgtgttgggcagtaggagagaattgaggtaggcatctccacccccatgggtgggagcttctacaccttgggtcagaagcttaggagtgggggctctgtctaccaggctcctcaacccatgccaggcgttgcttggggagttgggctggaagctgcgtggtctcagtgccctgaggaaggccttggcatctcctgcaggaagtaggggtggcagggcccctagtcacccaaaactggctcctcagaatgcctgaggtgtgtccttccacctgcctgcccccactcacagaagagatgcagctgatgtgcagaagccaggctgagccgagccaagctgcctgtcacccctccgttcgccggtcaccccagttactgggaagcctggcttgttggagccgctccctgggactgtgtgtggggtgtcagcgtctctgaagggacaggcaggctcctgtctgagcaaccagctccctccaggcctcatcaaggcccagtgcgtgcctgcttgcggctcgcccatggtctgctgtaccccacttgttggacctctgttggagcaggggtctcta

SEQ ID NO: 35642 - DNA, 439 bp, Homo Sapiens
cacttcattgcgctgcccagcttattggggcctaagaatgcctgggacatgatgaatggtgctttttaaatgtgtgttatatgaacgaaataatgctttggacagataggctgctgagaatttgacttttatcagaactcaagggacacaagaggtattggttttgtttgtttccgcattcattttctgtttctctttttcctgtgttgctcactgagggaggttagtctagtggttaagagcatattcttcagagagaggcagctataggttcaaatcctacctctaccattaattagccctggggccttggacgagtcacttataatttttgaacctcaattttctcatttacagaatgggaatacaaatatttaccttaccagataatttggtgggatttctacaagttaatgttgagttaaaaaagataaaaggc

SEQ ID NO: 35643 - DNA, 446 bp, Homo Sapiens
tataaaaagtcatcagatgatgcagcatactagcgataaaatgtctcatgctagcaaactagagcatttatcaattaagaaaagctttaaaatatatcatgtgtaccatccttagtctgcagactctgaatgtcaccttaaaatgtcagggttaaattacattacggttagtacatgaggcaggcgtgaactttacaacagaaaattgagatagatatacttacatttactttctcttttatggggtaataactgttataatgttaaattcgtatagtatgtcggtgcctcattaagaaactggagatattgatatgatctataagcaaatgtctccaatacgagaaaaagaggactgatttataaatgtggaggactgacacataatgtggaggactgatgggcgcagatctgttcagaactaaaaatggatgtcacaactgata

SEQ ID NO: 35644 - DNA, 386 bp, Homo Sapiens
ggtgaatctgaggatccctcatcttgctccatcagccttgtacacctgccaattccctccgtgcctttctgctttctctgtcttcattcacagactagtatgaatgacctggcgctgctctcctactaaatgtgatctggtgtcagtgaaaacaaaacagacaatttgatgacagtgtttttagaagcaaaagccctgggaattttggggtcataggtgagggccagaaaaaggttcctagactattgtggtttagctttgcaaaaggtgtgaccactgggactggcccagttgtatcaggaagcccatgggagggggaggtagggttttaagccagttgatcggatttatattcagaaagttaatgtggctgatggacgaagatg

SEQ ID NO: 35645 - DNA, 353 bp, Homo Sapiens
catcttctcccatcagttgggtggtcaactccagggacactattcatgttatatttaactggaagaatttgccattcacagaaaaggcaatgtgaatgctgctccccagagcaccattcacagaaaatgcaatgtgaatggtgcctcctggagattttgccttgcttagcaaggtgctagagctaaggactcagaaatgtttgttaagtgagtgaatggaatcccaggctacttcttactcattccaacccccaggacgaaaaagaaaagttgacaaggggtgaggagagtgggggaggagaaagggtgatccttagctacaaggcttctatgagattgggtgtgggtcggtg

SEQ ID NO: 35646 - DNA, 437 bp, Homo Sapiens
atcttaagtattaatttgattcttatgtcttttgtaagtgagaacaatagactttcaagatacaaaacatgcattgaggctttgaaacatccaatgtgtaccatggctgaaaaaaagagtcacaagtggctgagacactgctccatacaggactcatgtgtggtcattgcccacccaatcttatgactccatcatcttgggacctggaacaacatgacttttttgatcgatattttgtcctcggtgttttcaaggtctgatgttggagccctgtggcccaccctcccttctccaccagcatgttggtttgaaaaggatagggaatttagaaacagttctgtacttaggtttggtttggttttctgtttgtgattgttttcatggactgtttaattttttcccaggaagagtctttatcaatactcatgtacagccag

SEQ ID NO: 35647 - DNA, 513 bp, Homo Sapiens
aaatggagtagcctcagcctaaaagatcaggcatcctgggtcggccctacgcagcttgtggtcagaacatcgtgagatcatgcagcctcacggcggggaacatacgggatcaggtccaacagcaggttggagttagggtacatgatttcaaagtcaggatcgtgagggcacccaagatgattaccgagaaggcaaaagcacgtgccaggtaatggccatgtgaaggtctgggaaacagccaaaacgtagcgtgtcaggaatgtgggacagagtccctagggcagtcgtttcccaaagacatgttccaagatatactagctctatgggatgtggagttacaataatatgtggtgaaaaggtttgccagacaaacactgagttcagagtaaagcaggtcagatactatagcagacgctgtcatagctgctgataggcgcaatagaatagtaagtgtacaagatgaaggtttcaaaatgggcaaataacaaatatgtcatacagaatcctggatgt

SEQ ID NO: 35648 - DNA, 396 bp, Homo Sapiens
cagtgtactctgtggttggattttaaaatagatgatttaatcagtgcatttaatatcctaatatggcatcaaaacttgaacatagatatggcctgaaatctgggaaaatgatcatactgagtaaagtaaagtctctaccgaccggtgttaataacagggtgatctgtttagaaattacattttctctgatacatcaatgagttttgcaaaggagagaaactggatggtacctgtagtcgagtccagttccaatactgccacagaatttttcttaaaagttctatggtaaataataggccacagaatattccttcactttctgggatgcaaaatggattcgtaaatgctgtaccacaggcagtgagtatttacaaaaaaatatgccaataggccgca

SEQ ID NO: 35649 - DNA, 510 bp, Homo Sapiens
gctgtccctgcactctggctttaaaaaataacgaagttggtgagacagtggctcagcttgtaatctcagaactttcagagctcacgagtgatccagctgcccaccctcccaaatgtgctggggttatagggtgtaagccacctgtgccgtacttacgctgcacgttcagactgagaaaacccagacacagagaggacaggtcacttgcttggtgtcaggacaggcctgttctgagacagccattcctacaggacgctcccactgtgtgggccctgggctcctccccagcattcccagaggcagtggtcatgcaccaggccttgctattgggggctgctgttgagggctgcgtcctgggctgtggggtgtaccctctcctggggcgatggctgtcacccacctcttgtctaccagttacaaaagagggagcaaaagtaccttattcacaggtgttggtataacttagtcataacgttcttgcgtaggtgctcatccctcacatggttcctg

SEQ ID NO: 35650 - DNA, 416 bp, Homo Sapiens
gtcgtcacccctcctcctcttggtcagccctctcctgacctagtctgtcagccagcagcctacccacctcaccctatcctctacgttgttccaacgagtcatcttcagattgacaaatgatcatatcagccccctaggcttgaagcccagactggctccaaatgtctacaggaaaacgtgcccattccatggtgggagttacaggtatgctgtaacaggaacaggtcttgttcctattatttttccctccttgtattcccctctcattcttcaaaatgaagctcaaggtttactccctctggaaaccttctctgacctctccaggtaaatctgatcctctcttttgcactacagacacatccgggctcacacctctcacggggtcacccaggctgacgtgcaggaaacaagccggg

SEQ ID NO: 35651 - DNA, 474 bp, Homo Sapiens
aacttcgcataagctgaaataagtcaaagattcctctaactgccaacgtcaacactacatttttccagtgaagataagcaggctggagtatcacgttgcacaagtatgactcttaacgtgcccacaacatccatgcaatgtgctctcagggtggcagctgcggctcctgcacccctgttgacaggcgacccccataggttcccagggactggaagtttatttgcatgaagcttatcaagttccttctaacgtcccccaaacatatgtgcccagaacaaattatgtatcgtctctgtcttcactgagctacaccctgaaaacagatgtcaacaacgaacgctgcctggatgggaagcagggagcaaagtccccttggcttctgtccccatcaaagcagacgggggtggagagagaaaacagtgacattgaagattaaggaaaaattagcccaggaccctttaccctttactttct

SEQ ID NO: 35652 - DNA, 481 bp, Homo Sapiens
accgttaggatactcaactctactccctcttcatctgctcttcatatgaaataatcttccagctatcaaatatttgcaaaacaaagcatgagtgtcacagccgagtttttaaatgtatttgggaagtacaatgcacttaggggaataaaatgacaagacatttaatttaataatataaatgacacaattttgctagccagaaacaatctcaataaaagtaatataaaatcagcacttaacatgtcaataaataaatagataaataaatgctgttaaactaagattgatgaaatattcataagatttttggttaatattcatttgatgtttcttcatcctctttcccagtagtatttagcaaagacttaactgagatttgagtattaccttaatttttgaggtaatttcaaaaacattgaaaatattcgtcaaaaattattgcagggtcttatgggggcgctcttgaggtaatccgtgaggg

SEQ ID NO: 35653 - DNA, 374 bp, Homo Sapiens
agctatgtggcaagtatccctagtcttcccccaataccagcagcatccccgcccccacctagcattgtcacagccagaagaaatagccctcacaaacttccatagggccataccatccccactgagaaccactgatctaaatcaaattttgtaaacttaggtaaacttagttttgggtaaaaacaatctctgtaataaagcaatctgacaagtaaagtccttatctctttacaacgaatggagagaaaggctagagagaaattctgtcatggaaactagagtaccgtcaaatttacttatgagaccttttcctaagttaattgtatcaatttacctgtggtttactaggtcactgtagcaggtttattaatggc

SEQ ID NO: 35654 - DNA, 635 bp, Homo Sapiens
ctgattgtccagtgtaccttctggcggcaggcgcagacacgagtttgcccacattctgcattgatagataaacagtctactgtagtgatcatataaccatccagtggaatgctgagttggtcacgagcctcaagtcttaggctcccaagccttaggtaggaccttaggacactacacacggttcggcctcattgcttcttatttaaatttgttcatactctccagggtgactggtttgtctctgcattctccaaatatacgggatgcagggcctcaaatcctccaccctcataccacaggctaactcttcaagggcttgcagtgaaatctgtgtctgaacatttcacatgagaggaaagcagagaataagcactagacatttgcctgaaaaatcctttctgcctctcctcctcttatctttccgagacacagacaccttatcaggatgtctttgggatgcggttcctttctggaaacggtacagggtgatgtgtcttcagtacaccctcctatcttttcctggttgagggtttaagaactgcctcgggctgactcaagttccccataagtgccatgtctcctggagggtctagtgcgtatcagtgcctaggggagtggggcctccaatggagcag

SEQ ID NO: 35655 - DNA, 435 bp, Homo Sapiens
tgtaggattactcaaaacgtctccacaaatatattcatggatagtgcctagcacacaatttaaagagtgtacatagattcactgcattatgggcacaaaaagagaaaaaggaaaaagcagaaacatcagtttgcagaaataaactcgtaagcacttcaggcagtgaaaatgtcagccatggattgatcgtaaaacaatcaggtttgctgtgtttaaagaaaaaaatatatgcaggaatagaaccctataaaaagtgacctaccagatctaaaaaagaaccaaatggagtaataaatggaaaatagaaagactaaactttaaaaatttgttggatgtgtttaacaaaagattaaattctaccagataaaattagttaactgaaacataggggagaatgtttcatctagcctgtattattgaggtaatccgtgaggg

SEQ ID NO: 35656 - DNA, 360 bp, Homo Sapiens
aggttcaagggatacgcgtggaggttggttatgtgggtaaatggttagtcttgggggttgggtgtatagataattttgtcacccaagtcatcagcataatacctgataggtagctttttagtcctcaccctcctcccaccctccatccttaaaaaagacctgacgtctaatgttcccttctttggtgtccatgtgtactcaatgtgtagctcccacttataagtgagaacttgtggtattgggttttctgttccagccttaattggcttaggatactaactagtcttgggctctgaggttcagtgcaacttccaattctttcctaaatctttcctgaatacttgaggtaatccgtgaggg

SEQ ID NO: 35657 - DNA, 650 bp, Homo Sapiens
gctcttagattactcaacaattaggtatattatacttcacaattcagaaaatcaaatacaaagaacaaagaagtcaaaggaaaaaaaccttacctataaaggaacaaggctgggaattacagtagtcctctcctctgtagtttttcaccacttcagttacctttgttcaatatttaaaagtattaaatagaaaattccagaaataattcatgtttaaactgtacaccattctgagtagtgtgacgtctcgcaccatcctgctccaccccagcccgaatgtgaattgtcctggcatatctatgctgcgaatgctacccacctgttagtcacttaggagctgtcagatcacctgatgcagtatcgtagtgcttgtgttcaaatgacccttattttacttaatcatggccccaaagcacaagaatagtgatgctgacaattcagatatgccaaaaagaagctacaaagtgcttccttaatgggaaaatgtgaaatttcttctccactcaataaggaaaaactctctcatatgctgaggttgctaagattacagcagaatgagtcttctattcatatgaagaagaaaacaagcactcagctagtttcgctgttgcacctcaaactgctatagttgcaccaaagtgcataagtgc

SEQ ID NO: 35658 - DNA, 354 bp, Homo Sapiens
ttagagcataacttgaagtacctaatacagtaggggcttaaatattagtcccttccatgtgtacccattttattatttttcttcataaagtaagtcttgtacagaatgtttggacctctaaatttaaggttcctgtaaaatgtcttatgactgttgtaccatttacatataatttgcaaaggtaaaatatctgtcccactgaagtattcacagaagcagagtttgtttctgcagccttttcacctcatacaacataggctgcaataccagaaaatcattcaaacatgagcatgctttaacctacacttatatgtgagagataacagaaagaaactttgaggtaatccgtgaggg

SEQ ID NO: 35659 - DNA, 613 bp, Homo Sapiens
agggctataggtgctaagtgtactctctactggaatattctttgagattgggtgccatctatttcccattccaaaagtttatttgtaagattaataattaaactattaaattactcaaaggaattatgggagagaaatactttttaaaaagaagtatgaaagtccctttctatgtaagacaaaacccctcagcgtgacagttgtcagaatgtgggaatgttattgcattctctttcaaaagcaatttgacaaaatccatcggttctaaatacacagtctccttaagcctagcattttttcttctggaaatttcagagaccttttggattgcagttttcatctaaagaaccaccaggatggctgattaatagaaaggagaggtttataggcagtaacattttacagactgggaagagaccttctctggtgtgtgctgaagatgaagggacacattgggttttatgcctcacagggcctgtatcacgctagagtcacatatatttaggagttcgggggcaaagcgatacgtatgtatgagaggagtcaagagcatgtgcagtaggtaaacatatgtaacatccatccttgttgactttgaggtaatccgtgaggg

SEQ ID NO: 35660 - DNA, 379 bp, Homo Sapiens
gtgtaggattacctcaagtgatcccaaagtgtgtagttacaggcgtgagccacagcgctagccctgtagtttaaaagcctaggcctgttggatttctggggatttacattgatcatatctgtcgcttggtttttttggtctgaaaggaagcttaggtgtttagttatgattggatgacttatttggccaagttaacaggttacagagcagtgatttttagtgttttttaatgttcccattgttagtctactgaggcccctagtgtatttgttgaaacacaaaaggccttctaaaaaagattcagtccttgtgtttaaaaagcttactttctagttggagagacaaaataaactgagagtattgaggtaatccgtgaggg

SEQ ID NO: 35661 - DNA, 496 bp, Homo Sapiens
cgctccgcctgtaggattactcaagtgatctgcccgcctcgactcccaaagtgctgggattacaggtgtgagccagcgtgcctggcctagaaatggcttgtttgactcagcataatgtcctcaaggttcatccatgttgtagcatgggacaggatttccttcattcccaacgctgaataatattccactggacacttggattgttgagaataatgctgctatgaatgtgggtgtacaaatgaatctctcctcaagaccctgctttcaattcttctggagatatgcccagcagtggagttgctggatcatatgatatcctatgtttcattttttaggaactgccatacagtcttccacagtggctagaccattttatattcccatcatcagtgcacaagagtaccactttctccacattctcgccaacacgtatttggtttttttggataatcctaacaggtgtgaggtagtatcttattgaggtaatccgtgaggg

SEQ ID NO: 35662 - DNA, 606 bp, Homo Sapiens
cgacgtttagtgcagggatactcactagcaaactaatcacagacaagcaagttgaatttttattcagcagtttttttgggtatggatttagtagcaccgttattagaatgctgttaatgaaaggtagagtgatcatatgaaataatctttagagaccttttaaaatgactatttttcaggagtagaggtaagcaagaatgagttttcaggctcctaattgaaattgtggtttggagaacattttaatcctctagggttgtctttgtaaaggaagttgctgcagagtagctccctttgtattaacaggcagtagagttagttgtttcaagtgagttagaattttagaatcggaacgacagcatgtaattcattggagagttcctatgccattacgctttataaaaagttatctagatgtgatatgaccagttgatcccctgtaataaaaacaattaattttctagagaatttttatctgctgtattcaattttcatagcataatgctgaagcaaaatgtaatgagtttcccactgagtttcgttgtccccattcaaaaagaactatttcacaatccatgttgctactatttgggattgtatagatcc

SEQ ID NO: 35663 - DNA, 476 bp, Homo Sapiens
tttattttaagggaactggcagatgtggttgttggggccggcaagtctgaaatctgcagggcaggctggcaggctggagacctagggaagggttggtgttgcagcttgagtccaaaggcagactgaaggcagaattccctcttccttgggatccactttttctcttaaggccttcaactgactggatgaggccaacccacattatgaaaggtaacgtgctttactcaaaatctactgatttaaatgccatcttaaaaatacattcaaagtggcaactagactggtgtttgaccccccagtctagatgtcccaatatgtgaatatcccaatatgtggatagcatggatagcccagttgacatattaaatttacaattatacccacttatgtggggaagttagtacagtaattttaattttttattcccatttggctatcaactggtgagagcagagaaagagcttggcaaccatcgt

SEQ ID NO: 35664 - DNA, 383 bp, Homo Sapiens
tggttggaagatggtctcaatctcctgactcgtgatccgcctgccctggctcccaaaatgctgggattacaggcatggggccaccccgcccagccatgcattttttaggtaatagcagcatctttctttgcaggctttggcaaagtcttctctataattggagtcagtcacacaccttagagggttgttgtgagttccacagcctcatctgtcctattgggaatacaaagggttttgtaaggttgtgttacatgagcggttcctcatcttagttcatccaagcattgctaggtgttgacttttaagtccctggggagctcaccttgcttcatgattactgagaattagtacacatggctgacttttgcacttgcaaccatcgt

SEQ ID NO: 35665 - DNA, 522 bp, Homo Sapiens
agatggttggcaagcttgaaagaaaattattgatctataccacacataagagttttgaaatcttcccatcagagtatattgcacctttagcataaaaaaggctctgatttattttactttatttttttgcaaatggctgctttatagttctttaagttcaattcaatattactctttgttaaactttaaagaagtcttcattactttcctttgttaaaccatttctgcattcttcagataatccaggatggtttcagtaattaaaataatttagcttcatcactgttcaacataatcactgttaagcatgttaattcagatactgatccttaacatttttgactgttatgatggaggcctggccacagacgtaccttgtgcatgtttttaaaaaacctaacctgttaataatctactccaggttctaccagtaacccaggggatatttgttttcttttgtggcttcttccaaggaatcatatcaaattcctttggaaaacttgtattacttgcaaccatcgt

SEQ ID NO: 35666 - DNA, 426 bp, Homo Sapiens
cagcagactccgtataaaggtcttgagtctgagaacccctctgcgggaaagcagcccctaggaatactctggtgcctggatgggtgagaatgtgcttgaaagatggattaagaagccaggacactttgggcttaaaactcagctctgccacttacattcctcatttctttctatcctgggtctgccaaaatgtaagaaaagttttcacatttttttaccagtttttctcacccatgaccaccctgtctcaaaatgattatgcaacagcccagagtcccccattccaaaattctttgcaaagagcaagatttccctcgctatttctgaattcatccacacctctatttctctctctttctctaattctcccttctccctacttcttttttttctccccttcctccctcagtggttttctttattctt

SEQ ID NO: 35667 - DNA, 372 bp, Homo Sapiens
agatggttgcaagatattaagaagcaggaagtagctttttaacaacctcagttttgtatttccacaacaaacacctaattttttgaacagtattttctttgctacattttcactattgggtatctagtttggtcttgctgtatctgaaaactggccaatttatatccgtatcacaatgaacaaatatattccttcatgtatgacagtttcagcatacagaatgcaacctcagctaccaattatagctgcaaatgagcaatagtgtggaatgagacagcctgctggctttgttagtattctgtctcctttgggatcccatggggaaaggggaggctctgatgaagagaagcccttggctcatggtttattgtg

SEQ ID NO: 35668 - DNA, 533 bp, Homo Sapiens
gctgttgtttgtttccaaccatgccaacagcatactagatacatgtagtctcttcctcttttgccttggtaacatctgtggggcattccttttgccttggtaacatccgtggggcatctcttgacgtctatgacatctcctttcttgtaggttcgtgtggatgtggccagaggaacaactccatgtgttctaaaaggcctgagaatatacagcaggtacctctcctctttccccatgttcatcattgtggtgacggcagttctagttgaaaggactctcttggtagattttggtgcagacaaatctgttaacattttttccttatggccagtactttctggatcatatttaagaagtcttttcccagctcaaaaccccaaatatattctcatcatagtgtcttccttctctgcagctctcgtgctaaagtctgatcagtgttaacatcatttgagtcatcttttaatcaaaataaccagctaggatccttggttcatgtagagcccctatcttcttcattttctttgtcttca

SEQ ID NO: 35669 - DNA, 505 bp, Homo Sapiens
tagatcgagctcgcacgcgctgtaggattacctcaactcctagctactctaggactctccaatcaactacataaccctgtctttttgtcttcattctatcctatctattgtttctcgtctggccaagtacatgggttaagcctgcgtcttacctatttttgtacaaactagctaagaatagttttaatatttttaaatggttcaaaaaaataaaattcaaacacatgaaaattatttcaaattcctatttcagcacccataagtaaagtttactggaacatagcaatatttatgcatcatctaataaccattttcatgctttaccagcacagtggagtggtcgtgaccaaacccatatggtatgcaaagctttaaatattcaacagccttttgtacagaagacatttgtcaactcacactctaaaaattttccacatatagtcactgtgcatttaaaatgtgactagtttgagatcagctatattcaaagctgacttgagatcag

SEQ ID NO: 35670 - DNA, 435 bp, Homo Sapiens
acagtcaacatgtagcgcaagtaaagctaaactaagtgtatattacagaaataaaaacatttttttaaaaaaatcacagggaataatatatataaaaaataaacccactaaatctatttgtcctgtggttttaaaaactgcccaaactgaccttgcccatgaacttccaaattctaatactttttaaattgaacactacagataatgttagtctgtttctttttacattataaatttacatgagccttccctcaattatgtccttgctggatactacatgcatacttttctcataagtctatggtctacacaaagtacactaagagagaaactaaggtggctttgattggagtaaagatagaacaggggaaataaaagttaaaagagttcattattattgagtacatactatatgcttgaggtaatccgtgaggg

SEQ ID NO: 35671 - DNA, 454 bp, Homo Sapiens
taggattactcacaaaaacacttaaaaaatagaaaatctctttgtcctaaaatgcactataaaataggctgcggttacagcagtgatgtgctacgggtttgcagtcactgatactttagggcaggaattcccaggagtatggctggctggctgctgttggggttctgacttctgtgtgagggtcgagccattggattatccagccggtggaaggtgttgcttcagcgggttagcagtgaaagaaatctttgcttcacaaatttgttttcacattcctcacactgaaaataggacaattgtgaataacttgtgtgaaaatgtttcatatgctaaaatgctagatggagttcacctctccagaatagctgtgagttgtcctttttctctgcaaaggatgaggacgtttaccgagttacagtcttgacatgcatttcattgaggtaatccgtgaggg

SEQ ID NO: 35672 - DNA, 406 bp, Homo Sapiens
cctgatcactccatatcagcgtcactcttctgaattccttcactgttagaacactgttagaaccccattctattcgtattcattatttcagagagtttcttctttcccctgcctgaccaggaagaaaataactgccttccggtagctcttattcacttccattcccacagcaccatgcagtagttttaaaaaaattcacaatgaataaatgaatgaatcatttctttacataaatagtgactgtgaacaagttaggtcgtaacttgctatagctgtatcatatttataaaataactagaaccagaaagaactataatgtaggtttaagaaaaaaactgaatgaatataaaagagtacaacatgaatgatactatttttctgcctacgttgaggtaatccgtgaggg

SEQ ID NO: 35673 - DNA, 663 bp, Homo Sapiens
cggatactcaattaggaactgttctgatatttaaaaattatatgtaaatagtaaatagacagattgtagttgtgtttattttctgacactcataatttttccaacacactaaggagagaggtaatgcacatacatggataaaatcacattgcccagaccagcaacaccccatgcgtgatctggtttcagaaatgtcactactcaccaaccaaagccaactagtctataggctggtggcgttgccttgttaggccttgagcaatgacattatgctcactgaaaaagaatacctcagtcattacacaagctcaacaaggagtatttataacttttcagtaagtgagatcaacttccttggccaaagcagaatccatttacatttgacagttatatgattcttcatttaaaaaatgagttaaatgggagcatatatccattataccagtgatgttgtaaggcaggtgtgtggttggtcctctccttaatcagattccaagattatgctcactttacagatggaaaaactgaggctgagagatgtcagatagtttgcacagaattatacaggaagtgagtaaaggagacagttaagtacacttaggtctggcactatctgtaccaatacgtcttacagattcaatagcctacaataactgaccgcac

SEQ ID NO: 35674 - DNA, 601 bp, Homo Sapiens
ggttagatactcatagagaatacttctagctagctagagtcaaacttttcccagtttttagcccttcattctgcctgtttttttggagctgttctacttctgactgaagttccctattcttgggctgagctaaaccatctcctggattcctggactctgtcttcttttggcctttaatatcaaagaccttttctatctttatttttttcctggaaggcttctgtttttctcctagcttcttgctttccctgtgatcttttgtgcttttagaatagatctttttccagatgttctcccaggcccatatatacccaatgtcaaatcactttttatgtatacaccaaaaaggcactcaatattaggacctatcccatatccaggcacacagtagggaaccgtactccaaagtgactatctgctaggccagaaaagaccaagataaccttgttagtctccttaccacttagaaatattgttatggttttagaatctatttttacaaaaatggttttctctaccatatataaatccatgaaaaatattgatgttaatattctttcattcctgagtttagtcaaaatcttgaggtaatccgtgaggg

SEQ ID NO: 35675 - DNA, 423 bp, Homo Sapiens
atgaaggattactcaaaaggacacctagataattaagcagtaattcgcccattgctccctcccccagccctggcaaccacccatctgctttctgtctctacggatcttcctattccagatatttcatatgctgtaaatggaatcatataatgtgtgccctttcgtgactggcttctctcatttattcaaggttcgtccaagttgtagcatatagcaatacttcattcctttttatggctgaatcatatttcattatacagacacatcacattttatcccttcatcagctgataagacatttgggatatttccactttttagctattgtaaaaagtgttgctatgaacacatgtgtataagttgcttaataattttttttgagacggagtctctgtccccccggcttgaggtaatccgtgaggg

SEQ ID NO: 35676 - DNA, 404 bp, Homo Sapiens
tcgtcctttactctttgagagtaagctgctgagctgatgacatcatcacccctgaatacttttatacttcctacaaagacattctcctacagaaatacaatcatctgggaattaacattgatacattattactggaaatcaacacactaatacattactactacatactcctcaaaccacattcaagtttagtcggttaacctaataatgttatgccaaaaggatctagttcttaactaagcactgcatttggttgtcaagtcttcttacttcactttagacaagtttcttctccatttttactttattttcttaaccttaatactttctagattacagaataagtattttgtagaatatcatttaatatgtgtttggtatttccttgaggtaatccgtgaggg

SEQ ID NO: 35677 - DNA, 411 bp, Homo Sapiens
acccgatgtatggttgcagtgtagcatagctatgctctatttataaggaatctatttattatctcatttggaaacaaatttatcgctaatattgactggttgaggtcaatagtaaaatgagtttgcattctgagaactcaatttaaattcgaataattatcattttttcttatggcttaaatgatcttttcccgctttcaagaattaaaaaattaaatatgtaacattccaacttcctcatcctttaaaatgagggcaatacattttatccataatcataggaaaattattttaattattaaaacatgttgcctatttactacatcctagtttctcctgttaatattagtgaatgggaataaatcctgagcatacttgcttatatgtagaacacttacctcttttcttttg

SEQ ID NO: 35678 - DNA, 395 bp, Homo Sapiens
ttgcaagatgccatttccaaaataagtgcctctaagggagattgagagctaggtgggagttgtgaaatgctgttaaagcgtaaggttgagaagtgttctattcagaaggcaggctctcattcacgtgggaaactacagtacccctgttcatggctacagaccaggatagggtttacccaagttggtcccacagagaattctgaacttactctgtaaccagctcaaactcccagccacagtctggcagaggtcctgccattccagagacctggatgaaggcacccatttacagcaatgtaggcaggcttgcagactttggcctttactggggtccctgaagaggttcaatgactcagtttcggttacctgagccacagtttatggtcaagttctgc

SEQ ID NO: 35679 - DNA, 446 bp, Homo Sapiens
ttatgccgttcgactctacagtgactcccccagttacgtggttttggaaactaacagagcccgacagactacatgactgggtccatggtgaagatactagagaggctccagcgaaatgctgctgacatagtctctgactgtgagaacccctgggtgcacaaagctcggacgatagagctagaagaggcagaagagaaggcaaaatgttactttatgacattcctatttgagatctctttaatgagctaattcttaattctccttatgcaggttatactttttgtaagattatacaagttgcctttccactggccttcaatattctcctggatcactttctgctatagctaatgttgggctcacagaacgcaaattcatcttctgcaccttagcctgtgccaaataacacaaaatcatcaaataatgcactttcaaccccgagctgg

SEQ ID NO: 35680 - DNA, 472 bp, Homo Sapiens
ggaaaaacctatcgttcctgtaatagctgtgctcacccgacgactgccacccatcaaagaagctaagcctcggttacagaggctcttccgagacttctggctgtattccgttctgatgggattcgctgtggagggctcaggactctggccagaagaatggtacgagggggtctgtgaaatagccactaagtcccccttgctcacctttcccagcaaggagccactgcggtccgtcctccagtataactcagccatgaagaatgacacggtcacccccgctgagctgagtgagctccgcagcactatcatcaacctgctggacccccctcccgaggtgtccgcactcatcaacaagctggacttcgccatgtccacctacctcctctctgtgtaccggctggagtacatgagggtactgcgtccaacagatcctgatcgcttccaggtaatgttctgctactttgaggataaa

SEQ ID NO: 35681 - DNA, 381 bp, Homo Sapiens
ccagctcggggttttcaatagcagcagagaccaccttagaaaacaggaattgcccaggtgcaattctcagtttaagagaacacatggggctgattacttgtagcaaaaaaagagacccgtggaagacacattggctctcaaagcttcttcaaagcacatgaggcctaaataagtggaggtcccatcaaggcttggagagggagtgaaagtgttgggagggcctcattcttggccagatcagtggtaaggacgcaggcagtctatccaggcccgaatcatggcgtgccatctaaggccaggtggagacaacactgttctgtgatgaaagcttcacctggaaacaatgggcctagtacctgtgtccagccaaccccgagctgg

SEQ ID NO: 35682 - DNA, 464 bp, Homo Sapiens
atgccttgtgggagattaaaggcagaaataaggccgcgagttagcttgtcaactgcaaagcctctaggttggttctataccagttgccaggaatttcgtactctaataggagggtccgcagacccagtgggagccgcactgcacctaaggacttcccaaccctggcggagctggaagagttgagctgcggctgctttctcaaacttcctggtcttaggtctagccctaggggaaggctcatttggaaagtcacagtttcgtggggtagaaccgcgctggattgggtgtgaacagagtcatcctctgcaggcagggaagtgtgaagtttggaggggacactgagtgggaggtggtggtttgctgaaatccttctctggtcgtaaggcttgagcgttttgttttttgtttggtcagtgctacagactgcagcttgtggtggccagttagtcggcaggtcgtcgagg

SEQ ID NO: 35683 - DNA, 379 bp, Homo Sapiens
gccagtatcgggtgcgggagcggcagataacctgattcattaacatgagcccagtgggattggtgggggtgatggggacacagattggagcactcaactcaggcacaggaccccagcagaacacgcccaggtcctcctagacatgggcccttgcagactttctgaggcctcggtttcgtcatcttaccaaggtgtgaccccaaccatcatctcctgaacttctggccacagagctctgagcaagcttccatcatgaccccattttggagatggggagttggcgcagccacactgctgctcagtggtagaaccagcatctgacccaggccacctgttccagagaccctgcttttagccagcagctcagtccccagtcatg

SEQ ID NO: 35684 - DNA, 604 bp, Homo Sapiens
tattgagggtgatagaggttcccaatgtgagagggctggcaggatcttaccagtggtgaaggtcacgccagaccacgaggtagacaggtggggtctcaaaggactcccctgtgaccagcgctgctccctccccattacccactaacttgtgggccctgagctgatgccccacgcaaagatactgtgcccgaggggctccaccaccctggtgccccgctgctgcctccaggagctgcccgaatccatcgtcctctgctccatgccagcccaccctgcatgaggcccctttcctccaagtgaccatgcatgggacgctcatttctcactctgagctagacaggttggtggggggagtcttagctctctgaagcccacccaaaaaccccgactaagcacccaagtgagcatgtgagctcctgagggctggggtagcatgtcccttgtttggaacccccacgtcctcagccattgcagctcccactcaggatgctggtttttcagttctcagttcacacctgctctggagcagggctgggagaaagacacgggcttcctgcctcagcggcactcccgagcaacacgtgccgagcagggaccacagggt

SEQ ID NO: 35685 - DNA, 556 bp, Homo Sapiens
gcagcagaggaggccaagcacattcactgcacccctagtacctgggcagcccatactccaatgtggtatgtcccctcctggggctcccagctcaaaccctcccatgcctgcttcccccaggcctaactgaggaagtccttcttgaagtgtgacctcggtccacttctctacagattgatttaagagcctgggaagtcattccacaaacagacacacatgcacacacgcttctcaccttcagagcttcaagagcactgaggtgatcagtcccctacccctgttcccatccagctttccacttagctttgacctccatggcagcagtagcagtaacaatctcagtaattgttctttaaagctgactcgttcttcacctacttgcaaagtgctttcttgtctcataaaagttagattccaagaaggacttcccacggagtggagtggaaacactgtccttgaaggcctgggagaaaggcatccccatgggtacagaggctggggaaaggcacagggactttgggtgaccctaaccctgaccctctgctccagttcacct

SEQ ID NO: 35686 - DNA, 408 bp, Homo Sapiens
gaaggaagcccagcgttcccttctctctccacttcctgtccccattgctgtccctggagcacgggcagcacaggtgaaggcgagggggacagacagacagcctgcccctccgtctcccgtggccctgcagcccaccctatctgctccaggttctgaagaaggccttccaggccacgctcaggtggctcctgagctcacccaagacccccggctgctctgatctcggccccctcatcccgcagttcctcagagagctgttccctgtgctgcagaaacgcctgtgccacccctgctgggaggtgagggactccgccctcgagttcctgacccggctgagcaggcactggggaggacaggctgacttcagatgcgcactcttggcttcagaggtgcctcagctggccctgc

SEQ ID NO: 35687 - DNA, 453 bp, Homo Sapiens
gggggttggtacttgccctgaatcccagttatatgtgttctgaatctccaactgctcctttaaatcagcagatccttgttcagactaaccggccaaaggggaagcatttggtccaagcttcctcacaccaggctgtggaatatttatcacagagtcctaaaatctaaagacatcctcccaaccccctggggatggagatcgtcgggagcctcatgcagacagcgagcttcttgatgacatgcccgggaccacacagcaaatgagtgtcagggctcgggatcaggaagcacagaacttggagcccagctttgtgcaatctccgcctgagtatgcccttctaggtctcagctacgtgacgaaataccacattatgtcctctcccagctcagaaaactaggctgggaaactgagcagcagcagagctaacggcttggccttgttcaaccccgagct

SEQ ID NO: 35688 - DNA, 496 bp, Homo Sapiens
acctgcttcccaaggttctgaactatgtaatctaggtcacgacattctatatctagttccaggatttaagtattagtctcatctgtcaatggaagttagtacctacttcattagggatgttagcagggtcaaataagattatccatatagactaaatggcagtttctggtacatattaaatcctcagtgaatgtcctgctatcatcatgatagacatcaatgtaattattagccctactattgctcttcatgttgtcaggaagggcctagtgctaatgtctcacagggggttttgtctaaggctcttgtgccatcttctctgatgtgccctctctgaagccatcaggtgtattcacaatgtattccccaaaaaggcagttctctaactgcagtggggagattgaactggatagtagtcagaatcttccttggcccttcttgaccaatgcgaaacaggtctcaaatgaccatatttcctgtgcttatacatgaaaga

SEQ ID NO: 35689 - DNA, 562 bp, Homo Sapiens
caccagctcggggttgcacaccagctcggggttgccagtcccaagcaagtctgaaattcagcagggcaaattccgtggggtttcaaggcccgtgaatgctgcaactgcggctcagtgccccaccctctgcacctgcacctctgccagcctctgcctctaggcctaaggccctgaccttggagtcgttcttcctttttctcaaagggtagcacatgtttgcagctgcctgggtctgtcatcctgtttcttgcctgtagactctcagaagcccaataccttccttcatttcatcctgtctctgttcccatcaatccaagcaggcagtgtttctgctggtaaaacattctcataaaccttctgggtctcccctgtatgtcacagggagccaggccattagagagaagggttcactcggatcctccctggataatcttgtctctattcctggcttctgttgagatgagtgaatggacccatgagtcacatacctcatctctgcagagatggctttctctgcagaacacactttcctaacagtgaacctcacaaccccgagctggtg

SEQ ID NO: 35690 - DNA, 427 bp, Homo Sapiens
ggctcgttagtgcaggaggcctcagctcacaatgcaggctttcataggactacgtgagtgtcctttcaacatggcagcaggccttccctagagctattgaaggatgagaaaacgacaaatcgcaatgtcttttatgacctaggctgggaagttatactccatcatttatgcaatatcctgttatcacacaggtcatccctattcagtgtaggttggtactacacaaggacatgaatatcaggaggaagagaatctctggaggccatcttggagcccatagtccgccttctgccccctaatgattcacgtcttcgtctgttcctgctctctaagagccaggaggcagacttcccttgagctttcttgcagctaaagtagagcatcattagcagtaaagattaagatatcatcacaaagggccaggcac

SEQ ID NO: 35691 - DNA, 506 bp, Homo Sapiens
ttgggcacctctctcctagattgcattgtttctagggtttgatttatatctaggtttcaggatgttctagatctttatcttagttctgggaatggtgggaattctccccaaatcaaagtttccaggtgccagcccagggccggccctgcaggtgggcctttctagagacagcagcctcagccttgccacggccactctcttctgcacacccaccttgccctgcctccatgtcacaggcatagggcatgtgcccaccagccccgcctcgggctccggggaaattacacattgctctgcctcactgcatggctgaagtctcggctttaggatatgaagagaccctgagcatcatgatcagggtatagctgctgctccctccagagcctttaatgttaatttcagatggactctgctggctctttatgttttattaacaagcagacttaatcttgctgaagcatgtgggaaaaatgcagtggccaagttttcaaccccgagctgggtac

SEQ ID NO: 35692 - DNA, 511 bp, Homo Sapiens
ccagctcggggtgaatgacctgtgtatcatctgctcccacttaggctccgcgatacaggttcaccatctaccacgattcctggctccagcaggacttcaatgttggttgaaagaaccaccaactgaacgctgggaattgtggaaaaggagtggaaaattcccaggtttttactctggatgactgggttagggaaaatacttagaaggaacgtatgatttggtaggaaaaagggaaagtccattttggatatgtgggaaatatatcctggaaagatgaaaatgtccagcagacagctggaaatgtggatttgaaatctggaagacagatctggactggggatttgaagagtattattataggtgacaaatgaagctatgaaagaatcaataacatcagccaggggaaaaaaagagtgaaaatgggcagggatatagttgcctagagaacactaatatttttaaagtgcaaagaaagtttctcaagccataaaactaggaatttcccttgaat

SEQ ID NO: 35693 - DNA, 439 bp, Homo Sapiens
cagaccagtctcggggttgcgagtctcaatctgatgtgactggagtggggcttggaggctccacagctgaagaggctcccttgtgtgctgtaggctaaagagccttgatgcctcacccacgtgagctgctccacaggctgcttgagcatcctcgtaacatggtggctggcttccccaagagcaagtgttccaagagagagcaaggaggaagttgcaatgtcttttatgacctcaccgtggaagtcacacaccatcatggcagtcctatttgttggaagcaagtcactaagtccatccacactcaagggcttagactctgcctctcagagccatatttcagaacccccacactgaccctacaatggtcacttaggaacattgtcctaatggtggtcaagggaggcctgagaacagtaggaaaaatattcccccaaccccg

SEQ ID NO: 35694 - DNA, 458 bp, Homo Sapiens
tgcgctggcttccagaactacgatgtaccattatgtacgcgtcagaagagcctggtcacagttcatggagagccactggagctctctgcgtgtggtggaaacagtgaaggtggtattttaggaagtttgggcaaagttgttggcgacgatttggaggagagagtctggagccagaaggtcagatgtgaagggacaaaggcctgtcctaagatgacaatgacaccaataggaatagggagatgagtgcccaccattcctcaaggaaaaacaggagtcaggactagcactgactggggtggaagggggacagtaatgccttcaggctgtaggaccgaagcaaagggagactcaagaacctagggccaggtataaaactgtaaaagttaggaaaggagtggacagtatgtttctggtgatagcagcatagtttctcttgcagataaaagctaccaaccccg

SEQ ID NO: 35695 - DNA, 509 bp, Homo Sapiens
tagctcggggttgacctgggacttctctggaaggagaagtgaggagaaggcagcttttcttgggtagagcaaacaacacgtgcaaagggacatcagacagcaagtaagagcaggagactttgctttggagaaagaaccgaattcgatcacaactcactctccctagctaggtaaccctgggcaagccaaagaatcttttctcatcgacaaaatggaaatcacaatgtctacttcacaggaaggattaaacatgatcatgcatataaagcacgaagtaaaagctggaaaaatagtagctactgtgattaggtgcaagaactgtgggaaaccaaagggcaggaggtgaggctcaagggattgctttcagccagtctcagaaaggtcctgcatgccaagtaagaggttaggattaactgctgaggacaataacaccatagaggtttttaacaggagtgaaagaattgagttatctgctttaaaagaactctggtgtccgtcaggggtagtct

SEQ ID NO: 35696 - DNA, 360 bp, Homo Sapiens
ccagttgagacgccggacgcaaatcccgccacgatcaggagtaaaagctcgaccatttttggcatccccatagcttgtacgccgcaagtggcctaaaaggcattggtctgcaaattggtctgcaaggaatggtgcatcatgcgggtagcggctgtcgacagtgcattgaaggagctgctcgagcggtgcgctccggacatcggtgatcgcctcccagctgaacgggacatcgcagctcagatggggtgtagccgtcagaccatacgcattgcatttaccaagatggagcatgcaggcctgatctggcgtcatgtcgggaagggtacgtttcgcgggcctgcgccccttgatgttccttta

SEQ ID NO: 35697 - DNA, 557 bp, Homo Sapiens
ctcggggtgcatcctcttcaactcctggttcaacaatgaaagcacctgatgtttccaatgtaatactagatttcatccaactaaatcagagttaaaacatgatcataagtttttataaatatttccttacatgttttatgtacgtgcatgactaacaatattacagagtgctgcatatcagaagattgggtaggaattcaagctattcagtttatcacacaggtcaaatatagttcacctgctcatttccacagcaccagacagttatagaaaatgcaagtaaagtgaaatttaaatagagctggtctacagtatcctttgttgaatggatttagcaaccttctgcttttgggaaaaatctgtctatactaattttttatttcctataactctcttctgcatgtcatatggcattctttgtgaattccggcacatttggaaagcgaggctatgatccattataaccaaatcgctttgctactgctatgaacaaacacaggagaaaattaggataccaggtagttcagtaaagtaattcacactgcagatacctgtgt

SEQ ID NO: 35698 - DNA, 445 bp, Homo Sapiens
ataccaaagtcactatattcttacacagcaacaaacggggaaattaaatttttctttaaagaaagtagtaccatttataagagcatgaaagacttagattatcacctagtaaagtacatgcaagatcgctatgctgaaaagcaaacactgataaaagaaatcaaagatgacctaaataaatggcgagatataccatatttatgaaagactaaacatatttaacaattctgcccccaaattaatgtccacattcaatttagtcctaatcaaaatcccagcaggattatttgtagaaatcaacaagctgatcctaaaatttataaggaaaaacaaaagacccacaatagacaacatagttttgaaaattttgttagaagatgcatactacctgatttccatacaagctacaataatcaaggcagcatatatatacgtgggcaatcaa

SEQ ID NO: 35699 - DNA, 397 bp, Homo Sapiens
gagtgtgtgatgaaacctgggacatgcaaatgcacatgacttcattttcaagtaagttttatatacatatatatttaggagactcagatacggaaaattcagcccaaatatttgctagaaattaatcatgaatctgaaaaggtcattataccttggaaaaacatacagaattctattcttgctaaatgacagatcaatagatcacttttataaatagggccttgagaacccacaaattcaaagaaaaactaaactatgttcattgtgttctggtttgagctcaaactttattatattcctgttttttgaataggcagagatctacaatttagaatagaaatttacaggcaatataattaataattttaggccgggtgtttatgtctgcaaccccgag

SEQ ID NO: 35700 - DNA, 499 bp, Homo Sapiens
cacaccagctcggggttgcacaccagctcggggttgcacaccagctcggggttgcacaccagctcggggttgcacaccagctcggggttgcacaccagctcggggttgcacaccagctcggggttgcacaccagctcggggttgcacaccagctcggggttgcacaccagtctcggggtttgcacaccagctcggggttgggtaatgtaaaagtctggatcaattttctatttctgagctaaaatcctgcaaatcctgccaggtgatgggaataaataggatgcgcatcactcagaggttaccttttgggaaagtaagaccaagggagctaaccaaagccaagcaccacgcacccaaatcctggctagcatgactatagctaccagtaatctgggtgtgtcacaagacatcattttctctccctttttggaggaggactcaattacacagcttcaccttagcattcagcttaatgataaggagtccatgcaaccccgag

SEQ ID NO: 35701 - DNA, 567 bp, Homo Sapiens
cggtagattagcaataatctattctacagtaggtctgggtggcatggaatataagctccgtccagcaaggattgctccatcgagagataaacacagccagcgtggggtagatatgaggtgctcctgtcttccagcaactccagacaactgatacatgttagaagacagcacattaattatgaaacaatgcagaaaagatcttaagggagaaagaaaggatgacaaacatgaataatggtaggagcacctttcagcagtcaacttggactttacttacatatgcatgaattgagaggcagcacggaaggaaaaattcaagaatacacaatacaaaataagtgtcggaatcttgttctcaataaagcatacatcttgttatcagtttggggagcatcgtgtgacaggaggttatctagtattatctgtaagaatcacctgctatgtgtacagttcagtagtagtgctaggtatacttgggtaccttgacggattacacatgaaacctgttgcccaacataagtgtgttacagggagttcggcaaagagaaatgcatataagatacaata

SEQ ID NO: 35702 - DNA, 621 bp, Homo Sapiens
tcatgctattatctgggacacaaactcagagaggtcaaacaaccttccccaagtctgccagctagaaagcagcaagggctatctgacccatgctctgaagcactccggaagtggctggatctgtatccagaagtggtttccattccatctcctctgcctcctggctgagacaggatggcttcatgggcctggtgtcctcagggctattgggaaatggtgcctccaaaaaagggaataccatgaagaccttagggctacttttgtgtttcagacttctcaaagttcccaggcagtcaagggtgaaccaagctgcccaagtacatagtcaggctcacatctgaaacatgtttaaacagctaatggagctgagcaactaaaagctaaatgagtttctatgctgggctgcctatgagacaaggtcacaatagttaccaagtataataactattattaagagaccctggcagtcccaataaaagtaggtcctaaaaacttttaagagacagaaagtggctggaacacctccatgccgtggttgaccaaacatatttctagcacaagggagactgcaaaccacaatgagactcaatgagaccttcatttaatgtgggacacagctca

SEQ ID NO: 35703 - DNA, 586 bp, Homo Sapiens
tctcatccatttcctgttcactacctttgacatggaccccagctgtctcacggcatcatgatcgtaagcactatcactctgttataactatataaagagatgttaaagttgaacacttacattaagttctgctttaacaggatatacaaatatacaaacaatctcctgcagaagctttatacatgtagcagcagaataatgtaatatgtttgctcggacacagagtttacattcttaggctgccctttgcaacataccaaaagtgtcttgtatcttccacaaacttgaattacttacggaaaactataatgacacaattggcaggcttcttcctactgacttgggcttgctggtggggtcgtttgctaacagagctaccaaccgtgttataaaagaagcacctacagggaacattagaacgagggtatgagatttctgccagtctcatctctttaagaacacagccatatatttatggggttgactgggcaaccatactactgtagggggaaataaagtaggaaaaatcacagttgatccttcattgggaggacttcaaatgacacattctttatcttagagaaga

SEQ ID NO: 35704 - DNA, 404 bp, Homo Sapiens
ttccgttcaacttcagatgtctatctaatgaacacacatagatttccataacatcttttaatatcagtaagttactactctaacttccctattcctatgaacaatgaaggtttctagttagcacaaatggatttgataaagccattctctccacatttatcttcagattcaattggtccccaagtcctcacttctaaatcatcagaaacacctagcacctacctttatctctaactacaccttagcttatatcttccttatacttaatccactgcttttgacaggtcttcccatcctcagcctttccctcaaaagtgtcaccatttgtctttaaaaggtacacttctgaatattactttaaaatgtgacgcaataaagctatcttacttttgcaggggaacaga

SEQ ID NO: 35705 - DNA, 370 bp, Homo Sapiens
tgctgcaaacatattcatactcaaaacactaggaatcgcccgagcagaacactgaggcactatctggtacactcataagtgtccatctattctgcccaacacccacattgccccaacatctctgagcatattttttacttttcctctcacaaatgtctcctgactttacattcccacagcagtggtctccaaatgctggtcatgccctaaatcatgtttacagagatccctcgtgaaataagaaacaaaagccaatgtggagagcattacttagatctaaattccttatcatataagtagctgttactttatcctgggaatatgtccttcctaattgtttaggtactaaaaccttaaagaaccacggcgg

SEQ ID NO: 35706 - DNA, 438 bp, Homo Sapiens
tcctgttccttcatctttagtctgatttttgcctcagtctggtgaggacatcattggatagactggtgcaggcccgaaaaccactgtttggtaccataatattatttctacctggatttaagtttcatgcttaacgaaaataaggatctgcattcatttcttgagtgaaatagtaggtacaaattttatagtgtgttgcaaatcgtaggtgctagataagctatactatgaacagtttactgttaacacttttcttcatttgtattctgtggagtacgctagttaggagtgattttcatttgcttcatacagaatctgatgctttatataccaagccagaaactttaaataattgaaataattttattgtatttataatactatatttaatagttaatattcacaagatctctaagggtttcttagcggggtaccgag

SEQ ID NO: 35707 - DNA, 514 bp, Homo Sapiens
agagtaacaacgtggaccatatcaggaaaggctaagagcaggaaaacttaaaaaagtgggactgcatgacggcagatccaccaatagcaccaataacaataggataaaagcattcctagggaagagcaaatataacattcatcttttttaaaggaggggaaaagaatttgccttgtgactttagggtaatatattaaaagcttagaaagataatttaattgcctcaataattgctcaatcaccaagaaatgtgcaaggcactgggaaacagtgtacttatctgcttagctttctaaagagaaaattggggtaggactaactttttctataataataatgggatgattagagaaagggaacatctaaatatccatttaagggtatttgaatttttccattttcaacagatatcataccctgctagccagctggataaagggtcttaaagatatcatcggggataatgaaccaaatattcatggatggaggggtttcttagcgataggggtccgag

SEQ ID NO: 35708 - DNA, 400 bp, Homo Sapiens
ttgtggcatggttggagctactttatcagataaactgtagtcacctccaaggcgtatgtgcatttagatatgaggcattcaggtaggatccagatcttggacagttctggatgggacagtgcaatgggaatgagaagcccagggaggcccaagtggcagcataagggcacatagggacggctgccaaggtttcccatttacaacctctaagtggaaggagtgtgctcttatcatttagcaaatggctggttgggagtacatggtggcagcttgtgtctcactcttattgggagaatttggccaactcagaatgtttgagtgtccccttctatgttaagtcgttttgtaaatctgcactctgatgaagtaatttgtgttctcagtgcactgcttttattat

SEQ ID NO: 35709 - DNA, 464 bp, Homo Sapiens
caaggtgctagattgcacccagattagctgtattgcagtgaaggtggtgcccaaggtaaaggtcctacagagggataccgtgaggcagtgcaaagaggagcgacagatcaaccatccctttgtacacagcttggtggacagctggcagggaaaacggcaccttttcattagtgagtgactggactctctcctcatcccccaggatctaagtaccatgttccccacctgagattacctctttggcttgtactgcctttgctctgtcccccttctcatggcacctctctgtcccaaaggaaggggaacagcaggtggtatcagtttgggcaggaggcctacaatgccttgagcccaggcattgcagctcccaaacattgcctagacttctggcaatgtatgtagctccacactggctttgcagtgtgtagctactgcagcacagatctgtactccctttggtcgtg

SEQ ID NO: 35710 - DNA, 499 bp, Homo Sapiens
attgttgtatcaaggcctcactcagttctgagggatttgcagatgttactgcatttaatcctcacaatacagtgaggtagatgccactgtaatcccttttatacagatgtgaaaactaagaatcagagagggtcagtaacttgtctgtggtcaccaagctagtaagtggggggatcagcagttgaatccatcactgcctaactccagaaactgggtcttaaccatcacaatacactgtccctagagtctgtcccgctccaaaccctctgcttgttgaagggaaacaaacagaaatgaggcctgaactctgttgttttcacgcccctgtctcatgatcaagcggacctgccagtttcttgcagctagcgatcagatgtggaatcggttagagcctcctacctctgcccagccatcttgtcccctctcctgctcagtgctggggcttgacgatgggggctggctgacccactgacccactgcccgcctagctggttgacca

SEQ ID NO: 35711 - DNA, 382 bp, Homo Sapiens
tggagaagcaagggcaggccggactcgggggaggcgccaggtggacactgatagagaggtcaggtccctgcaaacctcatctggaatatggaaacatttattgctgtgaagggctttggaaggatgactgttattaaagcagccaaaacatctccactgagggagcttcctaggggccagggaccttctcacagcctccctgtagcgggtgctcaaggttgtgggaccagcctgcttgcagagcgagtcccggctctgcacatccacaccagtgagcacacacccagctccatgtagccgtgagcccgttccaggtttggggcacagtgctgctctcctcagcctggggtctcagggactgtgggcacagcgcagggcactg

SEQ ID NO: 35712 - DNA, 398 bp, Homo Sapiens
atcctagatgagaaaggggttgctaaataggttttcttggacagtgggcaagctttcaaatatttaccagtcacatgtaccgtggcatgctgggtataagtctttctaaggcggagaccatacaatctatttcttttgagtctctctcatagtacaattatagtacttcttacacagtgggatgatgaaatatttgtggattgacaggaacgtactttgataactgagtcctttccttagcagtttgacgggtctaagacatggttgtgccgaaatgtgcatgagagtgtcgggtgtgtgtgcctggcgatagggggccttgagtttccaaaggctcttggctgctgctgcctcacagattctccatgctgtgtggctgtctgctgaggggcacatgt

SEQ ID NO: 35713 - DNA, 406 bp, Homo Sapiens
aagggtaccgtgaagaagatcactcccaccaggcccactccaacacgggaatcacatttcaacatgagatttggagaggacagacatccaaaccgtatcaggtagtgttgaggttgttgaggtaagtgtatacaaagctcttagcacagagtgaagctcagtgaacaaatggctcttcttatgaagagcagccctcagcggaggcatggcacctccttcaagagaaccaaacttggaaaccttgaattaggaagtgattactcactttacagggaatgactacggtaatgatatatttgctttctgttacctaaacttagcagcttacatatttatcatctaatggtttctttagctcagaaatgtgggcatagctttatgggtcctctacttagggtctctcaag

SEQ ID NO: 35714 - DNA, 686 bp, Homo Sapiens
cagcctgtcagtgctgaatgttaggactctgtctccgctggagacacggctggtgcaagtcagcgtttagtgtttgacagctttctcagcactccctgactccgtttacctttactccgcatcccattctcttactgcctatctgaaggattggatgggcagagtataggtggcggtggttggtcctccccgtatgttgtccatttaattccagagcactgatttttccgaagtgtgctctgccctgggaaaatggacacatgttcctcacaatgggaataactaattacttcttttcttacagaaaaagttggtgattcaaggaaagcacattgcaatgcattatagcaatcccagacctaagtttgaagattggctttgtaacaagtgctgccttaacaatttcaggaaaagactaaaatgcttccgatgtggagcggacaagtttgactctgaacaggaagtgcctcctggaaccacagagtcggttcagtctgtggattactactgtgatacgatcattcttcggaacatagctccgcacactgtggtggattccatcatgacagcactgtctccttacgcgtctttagctgtcaataacatccgcctcataaaagacaaacagacccagcagaacagaggcttcgcatttgttgcagtgtcctctgcaatggatgctctca

SEQ ID NO: 35715 - DNA, 375 bp, Homo Sapiens
gacaatgctgtttagcgaatgcttgctcctgtcatttaaaggaccgggatgatggctctcaattctggaaagccagccaccatgagcacttggggaaattttcctttaagtgtgaaagagcaacagtgggtggcactcaggctccattcctggctgtcagggagctcttccttcaatacggacagtgtcacccacttgaatctcacaatggcacacaggctgtcctcgcactgtttgggtccatcctggactgagagctgagtcaggccatgagtcacctgcctggccaacatgcagcaggacgatgctgtggcatcgtatccgcatcccatgacatgatgaagttactggcaaaacaagaattctttctcctag

SEQ ID NO: 35716 - DNA, 512 bp, Homo Sapiens
gactctgaggatcccgtcacaagcctgcccatcacatgcacaggagaattgctaagcctgagcttggggatattaacctcaacggagacagaatcaagaccctaggaaaaccaacacagggagcagaaagcagggtgtggccctaagcaggtgcacaggttgaagaatctatggcaataccttgaaaaatgaccgcagtgataatatgtaccaacccatagagaactggtaccaggtgctgttctttgatatgtttagccacttcctatggagtactatggttgggaaaaaactgagtgtggggagggaaactgaggcagggcttgcgtaacgtcctctggaatgtgtctagacttgctggctccttgcttctagccttcctaggctcctgttcccattatctcaagtagcagaatatgttccatataaatgctaaaccatcgcagctgtaaatcatgtacttaatgcaacgtgtccttttgacctccacattctcaccatctgtttctttg

SEQ ID NO: 35717 - DNA, 395 bp, Homo Sapiens
aacagtgcagcttcagtctgtgattgagcccaagagtgctggaaaatcactggtgtaagttcgagtccaaaagcctgaagaacttggggtctgatgttgagatcaggaagcatacagcacgggaaaaagatgaaggcgaggactcagcaagtctcctcattccattttcttctacctgttttattctaagccacgcttggcaggtggttagatgatatcccctcagattgaggggtgggtttgcctctcctagtctactgactcaatgttaatctcctcttggaacaccttcacagaaacacccgggaacaaatactttgtatctttcaatccaatcaagtttgaccctcaatattaacaatcatgcgccatgattcgattagttttttattttg

SEQ ID NO: 35718 - DNA, 361 bp, Homo Sapiens
tctccacaaaggatgccacacgacaagacttcactgcttcctctgtgtcattgtacagtggagtgatgctttggaaaccgaaatgagaagtgaattgaataacttaagccagaagacctgtcaaggccctgggagagtgtcccccgatatagtgaacaaggcccagtgaccctgaggcgggtagcactcaggctgcatagtgtgtgcatgagtgagtgacttcatctgccacaagaggtgacactgcttttcagtagaggtggtaaagaggctttcatgaatgataataaagaaagtttattcttgtgttctctttagctttttgcccctcaagacaggagtgcttataggtgactatttg

SEQ ID NO: 35719 - DNA, 439 bp, Homo Sapiens
tggacaggtgaatcccgtggacatttgtagacaccgtccaagtgctcagatagcatatgtgaataaaccctccccattttagcatggtccctgggcaatttcaatttttgtccatcagcatttagtttttccgatctacttcagtgatgggccctttcagatggaattttagagggcaggactgacacccagttgagtgacttcactttaaaccaaggagaatgaatcaagtgttgacactcaccttatcacttgtgcctagaggttttgccaatattccagtaaccaaaaggaaaggccagaaaggtaagaaaaccgctaggtgtcacagaagccagagaagaagctatgggcagctgtgctaaatgctgtagaaagagcagtaaggacaactgactctgaggtcatggtgaccactggctgatgcagttgctctagg

SEQ ID NO: 35720 - DNA, 428 bp, Homo Sapiens
tgttgctcggggttacctagaggatccccgtgctgcacaaatgatgcctacctccagaaacatgcacattcctgggctcatctggcctcggggactccctgaacatagggatgacctccccatttctcaagagcgcaaaccacagccaggagttcagagctcacacaagatgttactattgaagaaagaagctgaccttgaggctactgcttctcttctcagtccctggggagaaaattctcttgttggcagtctatattccatattagcccaaggaaatcatatgatgctccacctccatgcccccatcctcaggtggctgtctttgagattttcacctgacatcctgcagctaaccacctttctatctgtcatctccctgggagacatggtcattagcagagagcaccatgtaggtgtctaattaa

SEQ ID NO: 35721 - DNA, 378 bp, Homo Sapiens
aaggatgcacatcttttccaatgaattcctttccaacttatgttaaccaaagatggtttctgttgcatgcaacaaaacaacaaaagctagtagaaccaccaacatggtagaaacccacatctaccacagctatgccctctacagcatgcctggcaattgagctttactatcctcggatggggagctaatattattatgtagcaaccagttggtcagtatgggctgttcttcgttagcctgcacagatggacctcagtcctacttctcctttagaactgcaccacaaaaattctatacaagagctctttggacattagatgacagtgtaacctctgagctagagaggccaatcctcgagtatctccagactccttctaa

SEQ ID NO: 35722 - DNA, 414 bp, Homo Sapiens
tggcctggtccaacctttcctgggcccgaccaggaggctttgttcacagtttttcccattcttattccaggtgtgtgtggctgctgtggtgccctacgccccaggtacaaaaggctggttgacaacatcttccctgaggatcccgaggtgggtcatgtctccggcagccatcgtggctctcatggtccaggcagggcctctgtcgggggcagcttgtaagccaggcctcctgccgggtggggaaggcagggcctctcagggtccctgggcactgagccttcccagagaaactggaacctgggctacagccatgggcagtgctgagaggccgctagggacctgacggatgagggcatttgggatctgcagaaaggcagttggaagttgcgtcttggaatccctttgtgggcagca

SEQ ID NO: 35723 - DNA, 523 bp, Homo Sapiens
tcttttgtcctgtgcttagcatgccttggtatcgggctctttttggatccatgtgaattttaacatagttttttctagttctgtgagaactgtcactgtcagtttaacaggattagcattgaatttataaattgctttgggcagtatgaccatttaaaccatatgtattcttcctatgaatgagtatggaatggttttccatttgtttgtctcatttctgatttctttgagcaatgttttgtagttctctttgtagagatctttcacctccttgcttagatgtattcctaggttttttattctttttgtggcaattatgaacgagattgtgttcttgatttggttcttggcttgattgttgttggtgtatgggaatgttagtgatttttgcacattgattttgtatcctgagactttgcagacattgtttatcagctgaaagaactttagggctcagactaaggggtggtctatatatacaatcatgtcatctgccaacagagacaatttgagttcctctctt

SEQ ID NO: 35724 - DNA, 461 bp, Homo Sapiens
tcgttgcctgctgttcttgatgtatccctggtatgcagacaaggatgctcccaacctcaatgctgagcatggaggaatacaagacccctcaattgtaatctatgttccagagtaaactattgggctgatcaagtctttctcagaactctatcacagttggggctctcactacccagtcctttgatctgcccccattcctttcataagcctcatttcagtatcagctctcaagtccttccctacatactctttttccttctccactttatctttcataggcattacctctattaaacctcttgtacatctaaattcatcttggcatctacttcccagaggacatgaattatacatctgtcagttgcttctgactaccttcagccaatgagatatactgtatggggctcgcagggaggaaccaagagtgacactggggaacaatttctctctctgctacagga

SEQ ID NO: 35725 - DNA, 538 bp, Homo Sapiens
cctaggggaggagtagcaggcagcagtggaacagctcccaacccaactcaatgaaagtggtagtctctgatttgatatgtgtatgagtgtacacatatatatgcatactcacatgcactcacatacatgcacacataatttgctctatacacctgattttctttgaagaagtgctctgctgctaaagataattttgaaaaaagatcaatttaaaaatgggatatatgaaaaccaggatttgaatagagagaggaaaaaaatggggaagaacagcttgagtagaagtaggaaaagggaaaagtagaaggagggcatgggatattgttttacctttttttgcaagcaatgtattaaattatccattggctcaatttatattgataaatttataaattatatttcaaaataagatttatgccatgctatgcccttgcaattcttttactgggtataaataccaaagccatgatcaatatgaccattaaggagcatatacaagggtaggcagtgtatagttgtttatttgctagggagttga

SEQ ID NO: 35726 - DNA, 582 bp, Homo Sapiens
gagaatgacagcctagcaggtgcagctcagagaggttctgagacggccatgaatgatgaggttgcggcctttgtgaacaaaggtaagcagcatgagtaatcacgatgcccttccttgatctgccgccgaaaatacaagagcgcgttgtttgctcgattacggctgccgtcaagtacgaagtcccagcaaacattgtattggcagtagccgaacaagagggcggcaagccaggccaatgggtcaggaacacaaatggcacacatgatgtgggaccaatgcagttcaatacggcctatctggtcgagctacgtcaatatgggatcacgccacaagacgtagcacgaggtgggtgctattcctatgatctggctgcgtggcgtttgcgtggtcacttacgtaatgatcaaggtgacatttggacgcgggctgcgaattaccattcgcgtactccgcaatataatgctgtttatcgcacctctctcattaagcgtgccggtaagtgggaaaactggctcgtcgctcgctttcccacgtttgacaccatacaagcgagtaagccgggtatggcagctaatacgacac

SEQ ID NO: 35727 - DNA, 413 bp, Homo Sapiens
ggggtgaggatatgtcatggttagttgtcaacatggctctttgataattaatacacaaattactgttcagatcttacaatattgttttataaatagaatctattttttagagtagttgtaagttcacagcaaaattgaatagtacagagagttctcatatactccctagccctcgctgcctagccttccctactatcaacatttcacaccacagtggttacatttgttataaccaataaacctataatagcacaccattatcacccaaagtccagagtctacattaggattcactcttggtgttatatattctatggattttgacaaacatgtaatgacatgtacccaccaatatagtattatagaataatctcaccaccctagaaatcctcagtgctccttctcttcaacca

SEQ ID NO: 35728 - DNA, 379 bp, Homo Sapiens
gtgtgagccaccgctcccggcctattccctgcttcctttattgagccatgccaccttcctcagttggattttggtatcaataaggatatgaaggttttggtgacatatttctaaataagaggctgtttccctaggatgcagaggttggtgacaaatgtcagcttttcagttctttcactcaagaaggatctgcaacttgaattcagcaggtttggtcttcagtggggcctggaagtggaagggatgtggtggtgtccacttgttttctgatcaccttggctctttcacggcctgactctcctcttccagtgaaaacctgctatgccttgagcttcagaggatagaggtccaggtggttgtttggtttggtctttttaac

SEQ ID NO: 35729 - DNA, 416 bp, Homo Sapiens
gaatgactgtggttgagggctggctgagtgagcaggtgggcagctcttgtcactgacccagtagctgcctggatggggaaggaaggtgtcaggatggaaaagaggccccattcaggattctcagcaggtagcgaggcccccaggcagacaccctctattctccagctgcaggggaaaggaggctctaaagacctggctctaagagcaaaaggcaggaagaaggtggcgcatggagaaaggactgccagggaaggctgatcaccagcccccaaaggggcagtaagttggcgtggtcctgataaactaactacgtccttctctggcccagacctgaactttagcaagacactcactggtgatcttcagactcacaatgactaaatccaccaaagactaatggatacctcaaccaccag

SEQ ID NO: 35730 - DNA, 581 bp, Homo Sapiens
aagtcctatgtcccctaacattcagctcaattgcagctactggactacaaatgacatactgactctaaactcagttatatccctagctgtctacataacacaactatgtcctcatctgttaaatcaggcaggaagtttcatagtcatcgtgtatcattttacagatactcatgaacatatgcagttgtaaacttcttagagctcctacaattcagcatgcaattaaacagatggcagcatcaggatgcagcaaatttttaaaatgtctcatctgtgaaggccaatcctttgctatcttccctcccactccctttactgacatgtgagtaaatgcttcccatttaattggattttaaggtcatcaaacaggtaagtcacacctaccacaagaattttttacaaatcagatgatgcactgaaactactcttgttctgctaaatctaaacattagacaaatggctaaacaatgacattttcaagataggggtctgagcctactctcaaagcagtcacataagatgtcattactatgggcggatcccagtgaccatgaaaaatatagaagaaatcttatgtctaa

SEQ ID NO: 35731 - DNA, 525 bp, Homo Sapiens
cagaagcagtaggaaattaatatactggttatacacaagcaaacagtggggtggtgaggcaatgagggcaagtgacaaggaaagtgattacacagaaaaagagccagcctaactaactagtcaattttatccaaacgaaaactcaagtatttctgtagaatgacccagtctaagatgagactgcaagtacaaatggcatcaaagcactgggccactgaaattctgtttgttcttgtaggccctacagaatcctcagtcctccttcatctggggctcaaccaataccaacaatagcatcagcaagaactcttctcaggtggaaggagataagggaaatgaagggtgatgttcccagaatcttattcctaagagtgcaacccttcccacccctccttaggagctgcatgatgttctatgaagaacaggtatgtggagcacatgaaggtgaggaggtggctcccctgctaggttaaaacagacctatgatgcttccatgtggacagtcagctgtagggctgcccttcc

SEQ ID NO: 35732 - DNA, 449 bp, Homo Sapiens
cgctgcatgccgagcatcccccctaaagatacaaaccctcccccacgcatggtgttcataacccggcgtgttcccctgttagccacttcctctctcttcacaccctgcactcttgctggactgatctacttgcagtttcttgaatctgcaatactcccctctttgttgctttgtgtatggtgctatttccgccgcaaacacctcctgttggttaacaccttttcagacctcaagactcagtcaagatgtaacttccagaaagccttgactcagcctacgactagttcagatcagtaacacttctctggttttctcttttctcacagctctctgtgagtacttgaacataatacttatcacataggattgtagctatctgtttccttgttgggtcctaccactagatagggagatccttgagggtagggactgtgttttagtctcccttg

SEQ ID NO: 35733 - DNA, 471 bp, Homo Sapiens
gacagtcaaaagaagaatccataagacgctacctctgaaaaacaaaggagtagggctttcaattatttgactaatgatcaacatctgccatctcaaatgtcactgtcctctggtattatctcaagacattcatgttaaaaacaatttttggtgaaggcaaagataaaatacgtcatctacttctagattagtataactataacagatttagtaaccctaaatgagattctagaaaatatttaagcagtgaaaataccttcagaaaatagacatctgacattcagttccaaacaatgaagtacaaaaatatttattaaggataaattacaaggcagcaatgtagattgctttatatatggagatatataaagaagtccactgttataaaatattttagttggcaaggaaataagacagatcattctacctttgttaactggtatgagacagatataaaagtcacaaaagagt

SEQ ID NO: 35734 - DNA, 478 bp, Homo Sapiens
atcccctgttgaggttgtggcaggaagtcaaaaggtaaagtaacagagggcagaattaaggccaagggtgagagaaacaggaaaagaaatgtcagtatgaaatgaagacatctagcaatcagggcagcccaacaaggaggtggtcatctcggccagcagtgtcttccaccttgacaggcgggaaggctacaaaggatggggtgggatgggaggacacaaaggcagtccaggcatcaggcactggatgagggatcaggagcaatctcctggcttcccaggtcccttctaaccctaagattttctagcaaagagcaaccagcacatatccacagcatcatgtacaaatggaacactttattcaggatactaataaagtctcttacctcctgaagctgagattctttcttttgggaagacaaattcaagtgtttttctaagatgccacaatacccgccacaacctctagaaggggtaccga

SEQ ID NO: 35735 - DNA, 604 bp, Homo Sapiens
gtagaggtgtggcaggtatccaactgtagtgctgctgcactttatgcgttagtgcagcatgtctatagggcaggatggatcagaacgtgtgggcaccacctagggtgcttccatgtgaatcctggaaccagtagatgtcttggacttagtttctggcctcatggcagcacagattcccatgatcctaagcactgatagagaaacctccaaaattaaaatagcattgcttcatccttcacagatgcctgacagactctggatggcagagggcacggggttacctccaacttctcaatcagttgtggaatcagtagtcataactcttgacctttgttctttatcagcaagtgtgggtcctaagttgatgaaagtataacctagttcccctataggcaccccacttctgcagctgtctacaatatacaatttaggaagagaccctaagctgtgggcatcaatttggaactagtctgacagatctactgtatagatgagaagatactccatagccaaaacttcaaaagctctagtaacattacaggggaagatgacccagtatagaacgttcagttgagcccgccacaacctctagaggggtacgagc

SEQ ID NO: 35736 - DNA, 639 bp, Homo Sapiens
gacgatccccttttagaaggttgtggcaggcttgtagaggttgtggggttcaagcttgagcttgtttaccaggataaatactcagatatctcagaaaatgggctaggctatagagctccctgggggcgtggtcctgttgtctgtatccaaggcaggtgaaaggggcaaagctgagtgggactgggctaggcaagtccatgcttaggctcgccaagggcacgcacaagcaccagcccagacaggagttagatagcaattctaacgagccaccggggcaatgctccaggaaggagtgaaggaaccccgtgctgtgccaaagagcatgcatgaggaaaggggcagctttgaattcaaaccctagcatgtggcagtgggtcccacattgcttccacactctcaagcgggtggagctctctcctgcaacctagcatgggcagcaagctaaaacagccagacgagacacaaagcagtttgccttcagatcattaaattgtcccaggctgccgaactccctgataggaacaaaactgaggctcccaggccacatccatgctggtctagtcctgccaagggaagagctccaatttctgcactgtagctcatgccatgccacactcactctcagttctgtcatgaagt

SEQ ID NO: 35737 - DNA, 350 bp, Homo Sapiens
caaacaaaaagtactgtcatttggttaacagctgccttttatggaggccaagctatgcaaaccaaactatgaaaaactttaagagtaaaagggaccctggatgccatttagcttggtcacttgccactacagaagctccttcagcaacaacccagcatgctagctcagtgacttcatcctccagctgaggaaggctgcccactccagcctgatcaaccatgatagctagaaagtgtttccttggatttcaccaaaatcctctttctctcatttccatccagctgtcctaaactctgtctttcagggccatacagaacacaaacaaccccgtggcacaacctcgtagcaag

SEQ ID NO: 35738 - DNA, 456 bp, Homo Sapiens
ggctgagccagaggatcccctggtgaggtagtgcggatcgcatgggaacggaatctggaaatctcggtagtgccctgatggtagcaggcaggggagtgggcaattctgcgaaccatgcaggaaaggtttctgatcctatattcattccaagcagggtctagcccaaaccaggaccccagaatcccttcccatttagatccttcactagagttaagcctaccaggtaaatcacatccttaggagtatccacagctatcatctttataatcggaggggctatcaccagcatagtcatcaattatgggtagagctctttgggccctgggatgtagactctacagttccctgagttagagacttaataacagggacaggagcaagggcttgacccagaaagcaaatgcctgtgtttgctcaggaccccggccacaacctcgagaaggggtaccgagctcg

SEQ ID NO: 35739 - DNA, 498 bp, Homo Sapiens
gagctcgattagagtactgtatatcgggaaggtaaggggagggtaaggcaggtgaaggagagacagcataggcaataagtgtggctgggaaagaatggccagatagggcagtagtggatgaggtcaaagagaagggaatttcaacatgggagaactgagcatgtttaaatacttaggcagaaaccagtaagatgggtgggtctaaagacataggtagaaaaatggctctctaaagataggattcagggctcaggttgggggctaactcttctctagaaatagaagggaagagagtgaagaagagtatttggcttgggcagttggtgtgggtttagtggaagctgagggaatttcctgctgagggccgaaaccatcaaaatgactgatgacctaagtcagaggctaaagggaattcccttctcactccagtcaggccagtagaagcaaccagacaggttaatggcaacaagatcgctaccaaaatcaacagatacattt

SEQ ID NO: 35740 - DNA, 502 bp, Homo Sapiens
atctagagatctccctgtgaggtcgtggcaggttatgaataataactctatatctgacgtcagccagaggttatatctaataaaccatagctgagacgtggaagtaaggcaatttgagaactaccttccttgtgcaattctatttcagggcctttaatttctacaagggaggaaaattgagatcatgataactatgcccataaattaaaaccagttcccttttcctcaaagaaatttttctcaaaagcctataaggcattcctaatctcatttccatttggtggtgtccaggaaataattatgatcaatggggaaacctttgcagtaggaaaaagctgcttgttgtgatattgatattttggttgttagtaatgggggaataaatggtaagggtctggatagagtaatggttgtttgaaataatatttaaactacataatgctcatctggcttcaaacactatatattgagaggctataacttttattttattatttattta

SEQ ID NO: 35741 - DNA, 516 bp, Homo Sapiens
aaagaggtagtggcaggcaagagagcgttcaggcgactgctctttataaagccattagatcttgtgagacgtattcactatcatgagaacagcatgggaaaaacccacaccctatgattcagttacctcccatcggtcccctcccatgacacatggggattacgggagctacaattcaagatgagatttggatggagacacagcccaaccatatcaaatggggttcagattgggcagtcaaaacatgactaagctcccttacacttgggacccttttaacatgcaataaatcgtgagactatcctaaagagcagttgttccatcgaacatactttgggaaatactgtcctgggtattttacacagaaactggtgtgaagatattatgtcctgaagaatctaaccaattctgggctacttttgcctctcactccaagagctaatcattttctgtctctccaggttcctcagtttttgcattggtttgcttttcttttatgagatggaatttcactct

SEQ ID NO: 35742 - DNA, 458 bp, Homo Sapiens
ggcaggatcattacagaggcattatcagcacttagagaaaggagttctctgtttgcacacacacgtgcatactttatctctctctcttccagtttttgctttgtccccaaaattctgatactctccttcagagaaggagctgaagtaaacaaatcaacaatcaaggcattttctgaacagaatggatgcattattctttgggtgagcagaacccagattctggtttctgttcttaactcagcttcttctcccttggagagggggagtaatggagaaaaacagaaacaagtgatattactagtaacaaccctgccagctctcttttgattactgatcaaccgggtgacaatcccacagggcagagagttatctcggcagcctgtgatacattcagtttaagctgatggcggcgtatggcagcacagctccagcagaaaagcactgtcccctgtctgagg

SEQ ID NO: 35743 - DNA, 367 bp, Homo Sapiens
tgttgaggtgtggcaggagaggaggctgaggactcatcttacagtgactttggtaccaaaggtctgctaaagaactgcagacctaacccattaggtacaatgcaggttttcaaacagaaaaactacatgatctggtccttgtgcgtgccacgtaggaaagataactagacagcaaggtggacgggagacagtgaggagggagggaaattactgaaaagaccatgacaacagtctggagaggaaaaggaatcaaatgtgattccaagattactttgtaaaaccttggttgattagacgccagctgatgccatcataaaagcaagaggcggagaagaaacaggctcagagggacccttgtcctgctgcc

SEQ ID NO: 35744 - DNA, 379 bp, Homo Sapiens
tcagaagatcacctctgggaattttattcaggaactcatttttgagttcccaacatgttgacttcgcatccatttctgctcaccaaggcagaaccatagcagtggtgtgtgacaaagatgcaaatggagggcagcccaaacaatggaaaagagaagattttcagcccattctgggggctaagtgaggttttgatttatggtagaagacagttctaaaaagcagctggcagcatgggcttcgatttgtggcccttctgagttcaaacagaaggaaggaaaaggagccacattcaattcatcctagaatgatagctcccaccttattacactgtacaactatttaataatctgggttacacacatccagaggtgatcttct

SEQ ID NO: 35745 - DNA, 449 bp, Homo Sapiens
atcgtgcagaatatcacctctccctctactggtgtcccaaacatcatccttctcatctacttaaaggtatcagttcatcagttcatacctttttttctctttgatcattaccctttgtcctttctccccactggattgttgtggcagtcttgagaatgcacatcccagcccctcagctagaggaagcacaactgatgatgctccagctgttgccgcctgaaatctattgctacatttgctctcagaccatacttgccatttggcttcttcgattcaataattgagagaagaggagaaacaaagacaggattgtccctcctttaaaggcccactgaggctccagggctcacccttactgaacttctcttaacctgcactgggtctaggatactttcagccaaacttccttccctctctccttcactggggtataaacttgcattgcagtc

SEQ ID NO: 35746 - DNA, 448 bp, Homo Sapiens
gcccgcagcagtcccctcacggaattcccccgactcgacacccctcccgcgaggataacgatgattcagactcttagcgttacagattcactctgcatctggcttctcctgcttagtattatgttgagttcattcttgctgcccagcattccatcatgcgcttataccacaatttgtttatttcttctacttttattgggcatttaggtatttccagtttggggttattacaaatagcgctgctgagcactgtctagaacctagctcctggtgagcatagaggctcatttctgttatacccgttcctcacagcagcgttgctgagcacagggcgtgtgcatgttcggagtgagtgggtgctgcctgagcacctgcagcagtggttgatcctcagtcgtagttttttctgtttttaacataagatgaattgacatgaggtgatcttctg

SEQ ID NO: 35747 - DNA, 368 bp, Homo Sapiens
aaggtcaggtttaggaagggagcctggattcagatttcccaacattagatcaggaactctggaactgtaaaccagagggctacccagatccctgcctcagttcttctactggggtggctgctgggacgataacttcacagtagaaaaaaggagaggctgctgttcttcaaagccagagaggttgaacgccttctgctgcacagccgctgcctgtgtgtgcgcatgctcccttccctctagcgtgtctcctcgtggatgtgggaaatgctgtcagaatgcttcctcctgccagatcccatgtagccccccacctcccttcttccaggagttctggtttctgttatgccagcctcttcctttcctgttcg

SEQ ID NO: 35748 - DNA, 495 bp, Homo Sapiens
atccctcacccctctgggctctgctgccttcacgagtaatgaagtaggctaatccaaggggccccccagcccaagtgactcgcactcttcaactctaccaatcttccatgctatgcagaagagccaggtctaaaactcaggcataaacccgtgctggactatcaggccagtgctctttccacttcccctgccatgccacttctaataaaaggcagtagaaaagcccccaaagcagctcttcaacaaataactccctcagcagctaggacttggcctctgggtacctcttcccccaacttcctgccccatccccagggcaagttacccagggagctaatgggttgtcctatcttccaggaagggagtggaggacagcaggtgtcgaaaggagagtgaggccattgcatccagggggccagcccggaaccacaggggagagatgtataacagagagataaatgtacacttttggttctcactccctagtttcctcct

SEQ ID NO: 35749 - DNA, 378 bp, Homo Sapiens
aagagttataactccttgtctgaggacttacgttttgaacatgccttaagcaccaattttatttgcacatttactttgatattctttttcattttttattatatgattggttttggcaagatctgacttctgcattgagccctcatctgcaggaggcatgtgcaatagtgagactgaaatttgaatgaaaacactcaatatttcagcaagataatttgagaatgtttgcattgatattttcttatgtttatctagaaatgccagtttccttcctagaagatgtgactgatgagaaattttttactggctcatgcattttttgaatatttttcattagcagctgtttatagactttaagccttcaatctgaggtgatct

SEQ ID NO: 35750 - DNA, 569 bp, Homo Sapiens
tgttcttgaggatcccatcacctgagtgacttttgtgtttgatcttgaaagaatgagcgaaccaggcaggtagtcggggaggagaatcgcattccttgagggaagagcagcatgtgggaaaacataaatgcacgcaataacctggctcacatgttaagagaactttctgactataatgagggatgtgttactgtcccaagcttcattatctaaggagtttgttgaacactctctagaggcttttaataagaggattgtttagctggtctgtctggactggttagatataacactatttaaatgacccaatctcattacattgtgaagatttccattttttaggttacgtaagaaattttggacctaaaaatcttgcattttaagacagtctttgtcagaattactttttggctctaaatgaattctgtaacatttgtattctaaattgacctttagtaaaagcaggaatggccatattcaaactggtaacctcgcaaatcctgcccaccctttcactttctgtctcaatacattgatgtcctctaacccatttcctgtcttatgtggct

SEQ ID NO: 35751 - DNA, 391 bp, Homo Sapiens
ggatggcgctgagaataccgatgacgggaagtgcccgagcatgggtaatgcgagctaacctcaaaacaaatgataaccatagacaagactagaggacgaaccggatctcttatagtagtatccttaatcatgcttatagccagaagtagcctcctcgggttcctgcgtcggtcgatttacagcgaaccaaggagagtatctatagatctgagccgtgggcatcgcccttatgagcgggcgcagagatttataaggcttgcgctctaagattacaaatgccctagcccacttcttaccacaaggcaacactacaaccattatcccatactagtaataatcgaaacatcagctactcatcaacaatagcctggcgtagctaacggtaattatg

SEQ ID NO: 35752 - DNA, 624 bp, Homo Sapiens
ccttaatgacacgacagcgagatcgaccggaaatctgggccctgcgtgctgtcgacaagcgctacagaccagcttccgctacggccagatgaactcgccgttcgaatatgaaaaggtgcgctacgtgtacaccgaggcgcgcaagttgcagatcgccgagtaataccccctgtaggcgctggcttgccagcgcctacatcccccgccgacaccacttccgccacgtaaaccgcaattgcagcacggccgccctggccatatcccggtcctgaccagccggcaccgaaggctgctcaagggcttcaagcatcgcaacgctggccgcatccatcagtgactcattcgccacgctcggtccactctcctccagcgccgtctccaacccccgcaaatagcgaacgcgttcaatcgccaacgcgccccggctgcccgccaggcaggcacgcaattccagcaactcatcccccaggtccagcccgagcaatccatagtcccaatgggcacggcgatcagcaggcaaggttacgctgtagcgcgacaagcgaatcagccggtccgacatgcacccgccaaaccagctttcagccagctccaagggaggggacgtccatagcgccaggtcgc

SEQ ID NO: 35753 - DNA, 658 bp, Homo Sapiens
cagttagttcctggtgtgccctctggttggaggactctgctgagcatcttgtcaattttatgcaaagggaattgagccctttgcgcaaagggtgtagcttctttggatttcaagaatctctagctaatagagcttaacctctgtttgcatttttgcttctgtgatttagggctaatttccaatgcgttgtacaagataatagaaaaatgtatcatttatctcattcttgcagttagtggaggacctttattaggagaggaggctttcttttctgactaggctccaaatttacagcccctgacccacttcagggggttgtgagcaggaaaagctgatgttgctgtcttgacctctttgccgccaggatttggcttctttgcaattcctagtggttgtcctctcattctctagggaaacggggaactttgctcccagcacctgattaaactgcctctttgtagggtggagtccgctgcctttgtttgttctctgtggagcctgtcttagtaatcaactctatgcttgtagggagaaagtttgaaaggctgaaaacagaggtggatgatagggaaggtgaagtcctaaagtagtctccaatgggatatccattgactgatccgattggaataaattgcataatggattgtccatttgctga

SEQ ID NO: 35754 - DNA, 421 bp, Homo Sapiens
gtgtgatggatatcttgcagaattcggcttggtcagtgtcttctggacaatgattccacattctccctaggtgaagagaaaagaaggtagaacatgatgaagctaggtatgtatacaggatccagatcatggagtcatgtagccaaaaataagtttggattttactctaatgacaatgagaaaactttggaggtttttaagctgggtagtgacatgttccaatttaagagagcagaggaaaaggagatgctaagttcttgtcatgttaacttagattagtcactaagacattcaggaagatatgcttaatagacagtggggattatgagcctgggacaagggagattggcctggactatggtatcaaatttgtgagtgatcacatagatgccaaagaagcatgggtagaatgagaacagag

SEQ ID NO: 35755 - DNA, 413 bp, Homo Sapiens
ccgacgtggtcagtgtcttcactggggtgtgacgggtagttacaacgggcaagtttggtgatacccatcagactgcacacatacattttattgtatgtaaatcctgcctaaaatgtgattgtgtatacaatttcattctaaataaaataaaccaacatgggcaaaagaactttacaaattttaaagtactgtggaaagacaaggccactgtcattagtccagccacacagtgtgagtgtagaattctgtggagtttctcagatatgggggcttatcctagaccccaggatgagtctaatgaagacttgccagtacggggcttaaccttaaggtgcaacgtatgagaaccggactcaggagccagaggacaagagtctagagataacgcatgaagagaccggaggacaaaaagg

SEQ ID NO: 35756 - DNA, 445 bp, Homo Sapiens
aaatgctgatgctccttcacctgcgtctaatagagtatggcatctagaacaaagtgagtgggtgattctgcaaacctagaacacctggaaactggcaagtgcagaggtcatgtgagcctcaggcacagtttgaacaggactctagctctgtttttctgcagcacttcttgctctgcccttttttgtgcctgggcttcatccttggaatgttttacctcatgggccatgagacggctgcctgctgaaacccaaactatagatatccctgttcccatttaggggaaagagcctggtttgctatattctcataggcttggctgactgtatatttctgaaccagtcattgaagccaagagaatgggattatggtaatatgaaccactattctcctgaaactgaatttggacatagtcccatccaaacctcatggtacttacacagtgga

SEQ ID NO: 35757 - DNA, 419 bp, Homo Sapiens
tctagaggatcccgagtggtcagtgtcttccagagtccaatgatatgtggacccaagaccagcgagggtcatgtttctgggaatacagtgttggttcttagaatttatatattttttctcatgaacttataaaaatgtttaaaaacaaactcaacaaccctgattttaaagagaatgagcacacgccccacgacttccctctagaagcattttaagcatttagcttttcaaaaaacaatcatttctttttgatgaccatgacttcaaatgccctgcctgctgggacagttgtgcctcatcaaatagcaactgatttcaataattcacccttagaatgggggtgcttgcaggagccctagtttataactggatgaaatgatacgcagccaagggccttatttgagaaattaaatccaaac

SEQ ID NO: 35758 - DNA, 429 bp, Homo Sapiens
tgcaacttctctcaatactatatcagtatttggcttgatacatgttcaatattgacaacagcatgtctagttcaatactgctcgcagctggccatgggacatattatgaatacctttgcttcccagatacatttataattgtttagtttttcatttgcttacttctctgggccataattcaaccccaaattatttgccatttgtccagatctctccacatcctgatggatcaggttgtctacaaatgtcatcttgttcaaaggcctctgctccattctaacctggcaggagtagaggggtgccatgcagaacgggagcagagaatgccaggaaggcaggagaacaggggcctctgggctgaaccagcccaaaggctcctgtgcagcttcccagtgagaaaaggtgagactgtcagcaaagagaaagtga

SEQ ID NO: 35759 - DNA, 420 bp, Homo Sapiens
agcgttctcctagtgtctctttctgttctctcatcatggcaggtagaccaaggcagagcctttttgcctttatgtttccagaagtcaccatttcctgggccctccaaagtccagaaaatatacgccaagttctctggttctcttgtggcactggaatcctgggggccccattatctgacttggggtgagagaaagcccagcatattgactgctccaccaagaacagacctgccctcctcactcttctaccttaatttaaacctttttaaaatttcgaggtggctgatgggctgagaacagacagggatttttacaaccttctttgccaattctgcataggcctgctaatatcttggtttggttgggttgacaggtggagggacatgtcacctaattttctttctttagagatggggtttc

SEQ ID NO: 35760 - DNA, 672 bp, Homo Sapiens
ggctccttccgtataattagttttacatatacaaagttcacaacagttttcatccctctaccacgtttacctttacttactgtggctgtcttcagcctttcctctagggcagcggtgtcacgcggtagtgtgcgctgcaatcaccttgctaaacacagatgctgctggggcccacccaccagggcgcctgagccagcaggcctgggtgcagcctagacacctgcatttccgacaagctcccaggtggaggctggggccgctggtccaggagccacacttggagaacgatggatttctgtcaatagcaatttcagccctgctatgtcgttggttgctgtttgaaatgaattggtttggttctgacactgtttcggttctgtttgcttcctgaggtctgacatcttattttcatttcttagtcttatacgttgttgacatttattttattgaattcatgttcttatcaaactgttctcttaggcaaagcacaggaatattttctttttctgtccacgagctgtgcgtcctctgccttccgcatgtttatcttgcgcatgctggggtcccttctccagcactgagtcacgggtatctctgtgggacgtttgcttgtacttggcctccccttcctgctttccttctcttcagccgagggtctaatggtcccttttt

SEQ ID NO: 35761 - DNA, 405 bp, Homo Sapiens
gattgtgttgaatgccagcctactcatgttgccttgtgggattttccccactgaaggagcatatattaactgatgccagctcagatcagagatcagagatgacaggacacagtccctgtccccaaggaaatactagtctggtctgtaaacaaatccagttcaactttggctaccacacacgctgaagactgagttaccctacagaaaagagagacagagctattcaagtcaccaggatttcccatctcacacttcggaaaaactttaaatatttctttaagttgaattaaaataatagcatgatgacaacaatagataatttattgagacatttctatgtgttaagcaaggtgcaaagtgcgttctgagtattaacccattgacttccttttttctgagatggaa

SEQ ID NO: 35762 - DNA, 631 bp, Homo Sapiens
gcgagtggtcgagcaactgatcaaattgccacagcgctttgtgttgttctgcgatgacctgtccttcgaagccggcgagagcgattaccgggtgctcaagagtgtactcgacggttctctggagcaggcgccggaaaacgtcctgttgtatgccacctccaaccgtcgtcacctggtgcccgagaaccagagcgataacgaaaactggaaaacgatagacggcgaactgcatccgaacgaagcggtggaggacaagattgccctgtctgaccgttttggtttgtggctgtcgttctacccgttcaatcaggagcacttcctggatgtggtcgagcactggatcggtgagttggcgagcaaggccggtttgcagtggcagcgcgatgaagagctggacatcctcgcggtgcgctgggcgaccggacgtggcaatcgcaacggccgttgcgcctatcagttcgcccgctattgggtgggcctcaagttgttggagcgtcaaccatgatcgatttgcaacagtccggagtcggccttaatggctacgccatgcttcatgcacagctggaatcgctgttggcggatgagcgggatttcatcgccaatgcggcgcagctttcggcgtttctattca

SEQ ID NO: 35763 - DNA, 565 bp, Homo Sapiens
tgcctcagctcttctaagtgctgggattacagacgtgaaccactgcgcctggctgacaactagtatctttgaaattgcaatgcatcttacaattgatgtgatcagaaagaatagtgtcatagtttaaatggcagtttttttaattgataagcagtttttattgttaggcaataaaataacagtgcgtcttagaattgatgacatattaaagttgataaaatacaataatgctaattatttattttctactcaagttgtcagaaaatttatgaatatctgttgtccttgtagtgagtccatcccctgtcctctttaaactgtctgggccgatttcagtgattctgttttgcttcacccaaaccaggcttatatgcccatcaacccagaattgctctcacaattgtgtatactttttgctccttcatttagcaaggaccagggggattgggccagtagtttgcttcctatcttctccccatcttcttccactcttccctctacaaattttataggctcatgtcccggtgggctgtgtggcagatccgtatcgtcggtacgagctcga

SEQ ID NO: 35764 - DNA, 618 bp, Homo Sapiens
caccatttctgttcttctttctacttactcctacccagcacatctgtattgcctgggttgtacctgtaatggaatcatatagtgtacaatcttccgtatctggaggtcagataacccttcaaagaaacttttgagaacaaaggtgatggttagagagccatggaggcatgaataatgatttttttaaggtgggagaggtttgattaaaggcttgagggaaggagccagagaaaggacattttaagatgtaagagaaagaagagatacccagtggggtaaggttcctgaggtggtagaaggagatgtcatgtggaataaaaaacctttgtaaaggttccgaaaagctggagggaaaggggagttttcgtaataccatctttcttggtgactgctgggttgaaagctgtttcatgacttttccgtggctatagttcgtttttgctggtgacagctgctgctttagaggatgcccttggctatgctctgtgaatggccttgtcacgaacactttctgtttgtctcctcccttgtagtgcgagctgttaatgctcagtggggccccaggcgaggtgggctctgtgctcttctcactgttctggtccgtcagggcagatcgct

SEQ ID NO: 35765 - DNA, 535 bp, Homo Sapiens
gtcagagcgggttctccattcctcccacatggaaggacggtcgcatgaacagcaatgtcataccttccctgagaatgtcggggaggtcacctagatgccctggcatcctggagcagaccctatctcgcctccctttccagctctatttccaagccctatagcagatgctctcactatacaagccgacttctaacacgaggcccagtgcggaaaataaagcccaggctcctcaatgcttctcccatgtggctcccctgccttgctgggacttccctcatcaaggtggtgtctgctctcctggagctcactctccaggcatttgtttccctctctccttccaagcaggggtggaggtgataaatgtattatcagctccatcacatggagttccctggaggccaacttggggtcataaagaccaagctggagccttttatctaaggagcctaaagtctgaagatgtcaaagttaaaaacagagtgtggggaaacttccagcaatgggaaacacaggtcacaaaggacttgacggtgct

SEQ ID NO: 35766 - DNA, 491 bp, Homo Sapiens
cgactgcgcagtgacatccgttatcatcgtgcatagcggttcctagcgtaagagactctcagctgatatcgtgatacctacgttcctcatgcgcttggcacagatccaggcaacagcatgaccatgagccttcttggtgctgtcttctgccatcagtcagcttctgtgaatcagaagccctatataaagttctaggatattgcatcctcggtagggacctctatattgcctcatcctttcagacactcaattcaagtctagcaaccctaaatctactctgatgtgaaagtaaaatgtggcaggtacaacaggttgcaggaaatgtcagcaccagctctacatcctacatctaaataattcctggaagagactcaaagctggtggaccatatgtgaacttagtttttctgggcgtgaacaataggagtcagtggccatgctcagagtcaactgagggagactcacacaaacctctctctgttgaggaatgca

SEQ ID NO: 35767 - DNA, 543 bp, Homo Sapiens
ttgccatcgatctggtctacctacttgcagttcacaatatatactggtcactctttataagatttaattatgcttgagtttttgtgtgaaaatacctcttgactgctgcttctcaaaagttgagctagataatacttcctttctgctgaaactaatggtggcttatcaaagcaatttgcgtaaattacaggcacaatctaacatgcttgaaactgacctgattgtctgcataccatcagattgctttagaaaggagcagaggaaggaaaggaggtgtcaggggtaactccaggaattggaatggcataggctccctctgccagagaaacaactctgctcttgatctaaataaatttgaattggtacctcatcatctggatccatttggatacatttagcatcctttgcgggtgtctggctatacaaaagctaataaagaactcgctacataaacgcagtccagtagtggtattctggcattgttcacacagcataaacacgtgctttgtacaggtagataaagcgaatgagtttgagggtcct

SEQ ID NO: 35768 - DNA, 441 bp, Homo Sapiens
acggaatagatacgaatgcgtcacatgctacacataggtacaaacgcagagctactagtaagggtctaacaaagatcatcatgcttctgagggaacaggacaaagggcaaaagcagacctactgggaagtgtccagcaaagatcacaaagcaaaggacaaaagcagaaccactgataagggtctatgtacattcacgcatgtattgtcttgataaacatcttaaacaacagaaaacagggttcaagagcagagaaccagtctgaccacagatatatcagggcggaggttttctccaccctagtaagcctttgggtactgcaggagaccagggtgtatctcagtccttatcttaaccgcgtaagacagacgttcccagagcagccatttatagaccttcccccaggaattcattcctttcccagggtattactattaatata

SEQ ID NO: 35769 - DNA, 510 bp, Homo Sapiens
gagaacactgacttcagacctaccaccatctaggcgtgagttgagaggatccctctctgcaaaatacaggccagaccgggagcacagttctacaggatgctgacatagaccactaaagatatatagtataaaggtcagaatagacaagccccactcatagtagtttacagctaccactcaactattaagtcagtcactactaaaatataagtggccaagcaaggattaacagacatctgagaaacagtcatcacaaaaaagtagacactgaaactatatggactaaacacgcctcacatgaaacagagactgagcagagagaagaagaaaaatatcctccaaatgatgaggatattatgaccaatgaaagccgtaccgggtattgtctgtaaacaaggaacagtaaaggaagcagacaaaagttcctgaaattaaaaatcagaaagtagaagtgaacatgaaatataccagacagtacttgagacaatctcccttaccactagaaagacg

SEQ ID NO: 35770 - DNA, 488 bp, Homo Sapiens
agtcattagccatgtctctacattggaagaaagataggagctaggaagacgtgggaggttcagagtgggataagggaaggagggagagacagcatcaaaggttggagtaataagctatgaaaggacagagggggaaagagaaacaggagagcttgtgggaaaggtttgactggctcaggaagggagcagtgagggccagcagggcagggctgggccctcttgtattaggctaagggcctactgtgtgtctccaggaaggggagaggcaaactggaggcacagcaatggtggtacagggtcccccgcctctgctccaggaaagcagaacaaagacacctgcgggtcagccaataggcgcgattcaaaggggacagtactttgcactctgacaaaaaggggataaggctatctttagagtgtgtacatgtgcatagttagcaaagcacttacacatccagttctgaatctattcgtcacaacagatccac

SEQ ID NO: 35771 - DNA, 556 bp, Homo Sapiens
tctagaggcactccccagtgtcggcctatctgtgtcttctcatttcatcccgcaggattaccttgagcatttcttacaaggcaggtctagtggtaacaaactccatcagctttgttcgtctgtgaatgccttaatttatccctcatgtttgaaggacagtttggacagacaaacgattcttagttgacagttttttctttttgcactttgaacattttggcccactgccttctggcctccaaagtttctaataagaaaactgctggtaatcctatggattatctcttgcatgtgatgggctgcttcttccttgctgcttttaagattctctcatctctgtctttcaaaactctgactataatatgtctccttgagttcatcttaacttggagctcaccgagtttcctggttgtatatattcgtgacttccatcaaatgtggaaaattttcagtccttatttcttcagatattctctctgcccttttctctttttccttgtttcccacaatgcgtatgtaggatagaagaacctgacagaagggggtaccgagctcg

SEQ ID NO: 35772 - DNA, 637 bp, Homo Sapiens
cagatggcccactgtacacttcactctagctcctccccgtggagcagcagggcttaagaaattcaaacaaatcatgtatccacataaattatactgtcataagaaaaaggaagttagaaaacaaatggaaaacccacttcaatagatacgcttttgactcctttgaactctgcacagttgtgaatggagcccttatgcttgggctgaaaacttttcctctacttctgagcacatgtgtgacttaacattctccttgctgagttgaagaattctcagtatgtatcacccaaagccaaaaataagttatgattgaaatttgggcacatcaagtgattttgatactcattttttcctaaaatgaaacacttagattaatattaggtaggggtttgaacgatgtggaaatcttttaactgttctttgagtcaggtcatgtcaagtatctttgtttgccttccccagtatgcggtgagggctcttaggcccttacatcttcgggtggtgtaaccagtctggatgataggcatagaggactgcagatcaggagatggaaaagtactggaagtgatccgtgatactgaggactttaagaaaagcattcctattacacacagtcaccaatcccaacttctcatgg

SEQ ID NO: 35773 - DNA, 376 bp, Homo Sapiens
atatgtttgttctctgtagagatggggtctcactctgttgcccaggctgctcttaaactcctgggctcaagcgatgctccctaagtgctgagattccaggtgtgagccactgcacctggcccctgtcctgcattttacagatcaagaaaactagactactggtaggttaggaacttacccctcccaacaaatgacagagccaggattcagacccaggtgatctatgtgcttatgtttttgaccattatgttttatgctttcttacttttctggaaatgacaggaatttgctagaagggtagggccagaatcacatgtagactcctaagaacctggtattgaatcattgatattttgaagcaagggcataatttgat

SEQ ID NO: 35774 - DNA, 606 bp, Homo Sapiens
aaggtccagagcaatacttcttttcacagtgatgagagatccaggtgacatgtgtgtatttgtgggggggcgacctgatagagttacattgtgaggacgtcatggagctgcccagagaagagagtgagaatctcaatgcttggagaacattaactaggggccggattacttgatggactacagatagtttaaacttctggaagtcagctcttaacaaagctccatgtgggctatctgtgaaggaaaggagtatgtcagacctgcttagattaagttttaaaatctttgtgtatgcctatatgtatgcctatctgtctatcttgacaggaaacacaggatttctacatcagagacagattgtgattgctcagagcatcttgcctcagttttcccatgcctccgtcctctttggggcaacacaatgagggcaggtgttatctacatgaataatgcagttagtaccacaaaaaaggaacactggatttatgaatctcagaacttaagtagggcattaggcacatttccccctcctccgctgcagggagagagagggaaaagcacgagacagagatagagggaaagacagaaggggagggaaagcaagtg

SEQ ID NO: 35775 - DNA, 447 bp, Homo Sapiens
gggcggggactctctcttcctgacaccactgcaatgtgtccacttctatcgtctgccagcaccttaactcagatcggtagcatctgctgcctgtcctgtgcatctcatggcattattcctgctgtcctgcagaccagtgcggttttgctagcttaggaacatgactgtgtcacccctacagttccgacaacccttcatttcaagcccatctgccttgctgtggttactcaggctctttggactgggcctggcttcctgcctctcttctcctcccctcttgccccagtgtactcctcagcttggccaccctgagctgctttccacttttcacacaaaccaaatcatctttttcctctgcgctgactgctccttcttcctcggtgcctgactagccctcacgcatccttccgtgactcagcttacactcttttctttcagaaacctctg

SEQ ID NO: 35776 - DNA, 381 bp, Homo Sapiens
ccccggccgatggcccatgccccgtccccaaggcttgtattatgatgggccatgtgaaatggaagggggatgagactggtgcctgtgctatctactaacagagctgtaaaaagatcacataagtatagtccggcagttaggaatatggactctgaagtcagaactgaatttcagaatcactttgtcacttactgccttgtattcctgagcaagaccctttacttttctgagcttcagtcacttcaagtgtagaaaggggagatggttataatattttctcttaggttggatggctatgcccattcagtaaacaaagttcattgactacctacttctagtggctggagataaatctgtttaaagggtagtccaatatactca

SEQ ID NO: 35777 - DNA, 604 bp, Homo Sapiens
actgatctagagttccccccgatggccatgacactgcagcccatggagatagagcagcgtgttgctcaactccacctttccctcatatcgacccttcccagcccgatgggcagatcatacacatgccccctgagtctctctgctatcacctgtagtttgtacgatgcttctgcaaatcctaccagaactctcatctccttcactgggctgcacaccatgaagcacactccctctgtacaacagaccctaggcttacctgcgtctctcagttgtgcaggaagcacagggaagggaaggggacagtaggcctaaataaagtaggctaggctgggaacaaggggatccaataagatctggtcctcactggcttttggtttctctccataggcacatcccctacactcagcttaaatcatttctgaccccccgtcccgatcgtgcccatgtggcccagtaaggtgggtccatgcaggaagctgagggaggtggcaagcccgtgcggctcgagcgcttctgcctgccctagtcggggcctagccggacgccggagaagacgctatagagccctggatgcccatcatgtcgtagtaatcttgacagccag

SEQ ID NO: 35778 - DNA, 542 bp, Homo Sapiens
gataacttctttaccacttcagctcacatgaaagaagcagacaatgtgagcttgcatctgtcgttgctgatcttttaacagtatgctgcccgagtacattcagaccctatcagtgttctcacatctgccttcctccttcctgggaattaggagaaagaagagtctcagcctctatttcttacctcaaaagatagcacaaactaatcttcagcctttctcagacagtattggttgttctgttgggttgttgcttgtgtcaagtcagctaggaaagagtgtggagtaaaaactggcctgctgagtaaaacgcatgatccatgtcctccccaagccgcgctaatacacatcaacctgcagaaaagtgacttcttactcttgagacactctttcctcttgcttaatggttcgtgacagttcttcattttcctcctaccactctcaatattttgtttttgggatggataattctcctgtatctggccattaaatgttgatgtccaccaagcagccttaggcccttctgtcattcttatttcccttta

SEQ ID NO: 35779 - DNA, 356 bp, Homo Sapiens
tgttcagagtgctatatctacatcttatgttagtcccgcattaattagccattgactccccaggttagtatacccgttctcatctggcattatttacagaaccacattttaaaccattggtaatcagatatccacttatgccttccagaatataaacactactgcctgacacaaatcgtgtgataagcaacaggctgggcctaaatattttgagtaattgttctgattcgcctagataagaaccctctacatttagtaatgctctacttactctcgctgtatctttgatgctggttaagagctcttgctcttgcatgacattctcagatttagaccttgttttaatttttatgtat

SEQ ID NO: 35780 - DNA, 361 bp, Homo Sapiens
tacaagcgtctcaaatatgccatactgtgtcactggtgtagagacagtgtgagatgtacgtaccaacaatgggtatcaccaaacgaagcagcaggtttagagtgtagctccctttgtggggcttcagtttattttggcctgcatttatttcctgtggattcctgccatacagttttaacaaggttgtcactcacaatacttgtcacctcactcgcagggtgagcacctgaccctggcctcctaatcataattcaggctaatgctggagtccaagagaagggccttgtgaccaggcaaggccaattagaatctttccctaggactgatgtataaaagctggggggaaaatgctttctctttc

SEQ ID NO: 35781 - DNA, 451 bp, Homo Sapiens
agtgctatatgcagacacacgaaggttcttgcccggaggtgtgccatgaggaacgtggtgctgtcggcggatcagcacaagtaaacaaagaaggccaggcatgaggtcctgtctccagccaggtggaccagagtgggaacggagggagcagagagggaagagtgagcaggagaggctgtgatgaacttgtccctgaccagcgaagctatctgtcctgcggctggcggggactgtctcctgggcaccttggtaaaagactggtgattagttagttacaagctaagcagggctgagagtggatgtaaaggcgccaaattagctcttaccatctctgggaactagtacaaagtgagcttttcatctgctgaaatgctgtttatgaggcagtaaaatccagagccaagaggcatgaatgtatcctggttagggtaatactctcctgggcaagcag

SEQ ID NO: 35782 - DNA, 576 bp, Homo Sapiens
tgtatcctgctgttcacgagtactcgatggcattgcagcacagtatctcagtgttagcgattattaaacttactgggggagcttgaaaaatattagtgctgaggcttcctcatttaactggtctagagtgagatccaggcatgatttgaaagctgccagtggtacaaggttgagaactactggctacagggaagaactaactttctctggcctctacccacctgtctgacttttacctttggccacacatttccttccctttgcatcccaaaggctgaagtgcttacggagtcaggaacacacagagctggttcgtgctctgcagctctgcccaagctattctccttatcagaactgcattccacctctgcaggccacccctgcctggcccacctgaaaaacccctcatctttaaagaaccggctgcgtctcacccctcctgcggtcttctcgcattgcccatatttgcatagtcatctaccatcatcacatcatcaaggctggcccaggcctgcggaatctggctgctccccgctcgctggctcctgttttgccccatcccccgtgctggacatg

SEQ ID NO: 35783 - DNA, 444 bp, Homo Sapiens
gtccagtattccagcagcgtctcatacctgactttgacagtggtttcctaattgatctatttgcttctagcacaattcccctttcggtccatttttaacacaacagccaaaagtgattcttttaaaccttaagtcaggtcaggattatagcactgaacaactctacactgacttctgtgtgaagagggcccccatgaaatggtacaatgtgacagccttacagatcatatcactcttttgttcaaacccctcccatatcttccaatctcactcagagtaaaagccaaaacataaaggccttatttgacctaggtgccttgttacctctccgaccacatttcccattactgacactctcactcactccattccaactatcctggcctctctgctgctctcaaatataccagacaagctccttcattgtgtgcattcactagcaac

SEQ ID NO: 35784 - DNA, 541 bp, Homo Sapiens
ggacatacataaacaaaaaatatgaccgtgaaacctcttctggtcatatggtcatgtgtgtagagtggtactctgcagaacatacttcagaaaccactgacaaaaaagaataccaaatgcgaatacaaggaaaatctcagtttcatgaactaagtacagcgcatagaagtagttttgttaaaaagaaacattttagagcttgatcttagagcatgaaaagtctcaaatgaggattccactcattcactcagaaaagatcctgcaggatatggtaagaaggaaaggaggaaaggaaagaagggaaaacatttaatgaacatatgctatgtgcaaatcatgacaggaaaaaggacagaacatacatgagaagcagcaagcaggtcatcctggccaaagcataatatagtgaaagacaagactagatctaatatctgactagatagaaaaggatttaaatacacagtttagatgctatgacagtcactaaattagtaatataagtagaaagacacatgagacttgtcatatcataaaagcaaac

SEQ ID NO: 35785 - DNA, 498 bp, Homo Sapiens
ggaatgatcacttcctgtttcatgaatgaggaaactgaggctctgggagatgggaaatcctgcccggaatctcacagctggaggccaggccgggctttgaatccaggcaactgagtctgagtggatggtgtgtgcttagtgttggagctggcccagggctggatgaaggcaacatttaattaatgaaaaccactacccactcccggctgttacctcttgagcgcttttctatgaagcatcctgtttaagcctcgcacttctgtgatgtggaggtgcagtaattatccccatttcacagacaggatgttgaggtcagaggggttgagtgattgtcatgggccaggtctcagccaggcttgctaaccctggagtctggcgtctgctctgaagtggtcctctcagctggagactgacctggccttttgcttgtgatgtcggccttaaaaattttgggggatgctctcggacttttggatgggttcacattttaattttttc

SEQ ID NO: 35786 - DNA, 568 bp, Homo Sapiens
gactccgaggattcgtagcatttcagcaggcacagatgtgtagcgaccttgagtgccagctaggggctgagtcttccttctgccagggatgggctggcatggaaggtgtctgagcagagggcacagtcagatttccacatcagaacaaccaaggagccgggcgcagggggccatggcatgcagaaggggtgagttttagaaagttcagaaccagtcaacttacggtgggatctttcccatctccacaccctctgtgccctccttacaatgggttcagtccctcttgctactccatcttacaaggagctgtgaaggtgttgagccctgccccgttagccggcgctcacctgctcccacgtggtgctgtacctgaggtctgctctgatagaagcccccagcaatgcctgtttcatcccagaaggacccccaaggggtcgtttgagcaagtccctcagagacaccgcaaaaaccctccaaggatccttgcacaggacaccagaatcttgcccccttgcatgaatccagtgtcccagtctccagaagagacccccctaacaagtcctggaat

SEQ ID NO: 35787 - DNA, 514 bp, Homo Sapiens
aaggctccgcgagtcctctcttccttcgctctatgccgtcgcgtctgtatcccatcctagcagccacgtacacttggagtgcagtgcttctcctccatgggacttcgctatttgccccttggacctgtgactgggaagggacaaggtggtaggtcccttgaacagccagcagcttaggagaaaaacaggccctgacctttcccacagatagctcaccagacctggttcgcgtggatctctagcctgatcctggagcctctcatactgaccgtggaacctggcccagggctgctcctcatcatggctgagaaaacaaaggcagaaagccagtcagtagggaggactgtggagacagccacaaggcaggagctgggtgaggcacaaatccagcccccaaagccttgggccagctcctcagcctcttgggagacagctggtcctgtgctcactcaccttcagtgacacctgctctgcctctaacgccatctaaacgaaggagacatccccacgcagc

SEQ ID NO: 35788 - DNA, 423 bp, Homo Sapiens
ctccttgttgtttcctcttcctctggctgctttttctatctcctccttttctagttcctcctactgtatccaacctctaaacactgaagttgttcagggatctttctggccccttcttctctcacctcacattgtctccaaataattgcatatttcccacagctttaatcattgtttgctaagtctacatctgcagctcaaaactctcctctgagctgtagacccctatatccagtgacccatatgtccagtgaataatgtctacgttcacgtgtctcaggctcacaagttcaacaggaatggaacctgtcttcctatccttctcccttcctactttaggggtggggaagatgctctttcagcaaatggtagtgccaaatatccagttgcttaagccagaaatttgggagctattctttgtca

SEQ ID NO: 35789 - DNA, 690 bp, Homo Sapiens
ccgaggattcgctagcattccagcagtgcactaaggtatgataactgtggaggaggctttctctaggctgggaaagtagtcctaggggagcacagactactttgttgactgaaggggactttgttcaatgaagagttacagtgtatactctgggaattggtggtgggtagaggagacacaaaagtggaagctggtgttacaaacctgacataaactgctgctctcaagttggtctggcatcggctctccatagaattcttttgaattcatccttccctgtaacttcttgtcccttactctgccctcaaatctccaggcaaatccttgcctttcaatgtggtttggatagcaatgggcactgagttcatctatccattcatgtactgatttgtggagattcattcagtaccagctatgtgcctagtactgtgttcatcactgagataacaggaatgaaagatcccgttgagtggatgatccagcttcctggtatcaggttgaggggactgggagaagcagaagggatggagagtcggacgaagagaaaagcgttcttagtccagaggaagcgagtctgctgtaacccaacctgcagaacctgcatgcgtaaacattgtgtgatccgccctgtgaacattcataaacactgagagctgggttcacaagtgtcactggtcaccaaaactcctg

SEQ ID NO: 35790 - DNA, 383 bp, Homo Sapiens
taccgaggattagtcagcattcctgcaggcgctaagcttactcagaagcttagaaaagagaggccatgtctttgtcatgcttgggctgccatacaagactggcgacttaaacacattaattttctcacagccctggaggccagaagtttgagatcaggatgacagcctggtttggtttctggtgagatcctgctttctggcatgcagatggccttcttcttgctgtatgctcacgtggcctttcctggcatgtgcatactgagagaggcaatctcactctcttcctcttcttataaggcccctgtattatctggttaggaccccacccttatgagctcatgtaaccttgattacctcctaaaagtcttgtgtccaaatttagt

SEQ ID NO: 35791 - DNA, 600 bp, Homo Sapiens
tctcagtatttccagcaggccaaggcaagcacctgtgcagaacactagcaagctggtatagctgggagcatctgcgtgcacataaggagggtgtaccactgggaaaggggacgtgtgcaccagagaaggtatgtgtgcatgaatgggtgtgacctgggtgtgtcacatgtgagggttacatgtatgaaccagggcatacaccctcatgagtaggggaggaagggtgacacacacaggttgtgaacgtgcatgtgtgggaatgaatccaagtgctaaatctgtgtgtgcatgcacagttaagtgtgagctgtgaacctgcgttgacacaagtgtatgaaagtgtgagagaaaatgccagtgggtgtgtgcatgagtgtgctgtgctgcttatggaggctcagggaaggagccatctgctatggcaggcaggacctgagatgtctgctcctaatttcatctttctgagcagactcagaagaaacaccaaaacttgggacgggagaaagaagcctcatcttgaaccccagatgattctttggaaggggtcgggagcctgacttttcttgtccccgaagtcagccgaagtgcccgtgtcctaca

SEQ ID NO: 35792 - DNA, 432 bp, Homo Sapiens
aaggatcccctttcagcatgaatacatgtgacacaggatttcctccataatgctatgtgccacgaatgcatgaaggaatgaatgaaaagaaagcaaatgtgtgggaataatctacaagagttggtaagtcattggaggtggagatgtatatctaatgggtgggaatgcacaaatttgtaaatatgtgtcaagtgtaccattgggtacatgcggacaaggaatgtggagggaacaggagctgatacgtgagaaggagcacatttcagaatcaaaactattctgctttctaatactggctttgccacttatcaatcttgtgacttaaggaagttttctactctgagtctcagcttcatctctaaaatgaggataatgataactgtttgtgaaaaatattaagttggataaaataaaacaatgtaaatgactcaa

SEQ ID NO: 35793 - DNA, 362 bp, Homo Sapiens
tcccgtcagcagactttgagatcccacgtggtcacacaatgggattctgggggctgcgacaggggagacagagggcactcgaggggcaggcaggacagcccagcccagaaaccagccaattgacctgttgctggcaggcaggggcacgccgtgcaggaaactgcatatatttggggttattctgctccgatgaccatcacagcaggatattccaacttctacaagtccagtctcccaacctaagagaagacaaggttggcgatgccagagcgagtatgggaagcagaatcgagaagtggccaaggctcctggcccaagctgggtgggattttgggcccactttgaggaaaaggtggcacctg

SEQ ID NO: 35794 - DNA, 639 bp, Homo Sapiens
cgactgtagtcattgagacaaacagcacatgcctgcacacagttagggtagggagtggttcaaggcactggccgtcgatttcatacacatgatctgaaatcatgattctgctttaacccggctacaggagctaaggcctattttttagccctttgggatctgtaaaatcagaatggtacccacctcatggggcacatgataaggattcaaatgaattgatgaagatgggccataaagcccagcacagtccaagtgctcactcactgagagttacggttatcacagggagttgggcccccagcccctcccaggtcatccgctctaccactagctggtaggaaagagcctcctgccctcccaagccccgtcacctactcggcccagatttggctgcaggcttccctcgagtgcctgggcttctctaccctgtgtcctgtctgtcggctgcaccatacgtgcctgaccacaagggcatccacgtggcacaggagtatgcgcctgcactgggaaggaggctgactcagacggtggctgtggatccagctctgtcatttcctggctgggtgaccttcaaacctaagtaaccttttagagtcagtttctcagattatgaaatagaaaatttcttctcgtgaatag

SEQ ID NO: 35795 - DNA, 559 bp, Homo Sapiens
gataacacaaccactcttcaaatacaagtgcaatatgtgtttcgaatgatcatagactagtgagacagacaaaaactacaagaaatctcttctgccaaattattcagtcctataagacttctgccctattcacacatagcgccagtttgctatgctatatatttagtcttcacatcatattcaatactggtggtataagttgtatatattgtttttgttttatgcgttttttgcacatttgactccactaaagtacatttttagtgttgactttatgtgtaagcattgtacatatatataaaacagttgaaacttcctcagtaaatgaagagatgtccttttttgtatatctgcatttgtgaaatgattaaatttaagatcttagctctctgagcaactgcatatcttatgtttatccatcgtggttcttggtagatctcatcaaaagacataggttgtagatcactgcagttttaaagctgattgcctacgattaccacccgtatttttacgcctttcaatatttttacgaattaattaatgataccaggtcttgctt

SEQ ID NO: 35796 - DNA, 539 bp, Homo Sapiens
ctcgtagagctattagtgcgggaaaagctggcggactcgggacactcgcgcctagaccatgcgcttgacccgaagcaccgatcatcgccctggtcacgacgtatactcagatcgggtttggctgtagacaggcgattggacttcgacctgatgggctgagttgaagtttcttgtacgtggcccacttcacaagccggtcccgggatctagttcaggaaatccggcccgcgttggaacggttgtcagacgtgactcgtgagacggtccatctggggatgatggatggaacgcatgttctccatgtggacaaagtggatagccctgagcgatacggcatttcctcgcgcattggcagccgggcggtgccacatctcaccagcttgggaaaggcgatactcgcggcggaatctccgcagttcgtcgacgcctatctcagaggcaagggtaggaccgcatcgccgtatcggatccaaaacgttgaggatgaaagagcggagatagagaggacgcgggcaaggggatacaggttaccgagctcg

SEQ ID NO: 35797 - DNA, 509 bp, Homo Sapiens
aaaggtgtgtccggctggtagatagttaggacttacctgagcaggaataagttttcaatggtacaggcagatgctttgggaatcaggaagtgacctgctcctccttgcaatgactctgggctggggcaatggtgacactgccacctacatgggctctgtgggttacctggtggagagaaagatgcaggatgaagagaaccaggtataaccctgccacttggagtttttcctacaacttgggctggtgaaatgctgaatctcagttaatgttcaaaataaatgacaccctcattctattacccaaaataaactgctcacatgtgatgttgactacatgcgacagccagacagacgctgccttcataccaaaagcaagtgaatcaggtggtaggaataaatgaacaaagggcaaggcattgtcactgccccattaccttcagcagtagaaagcactgactagaaaattcatacgtacagacaacgaccttttatctgttgtacaacctgaa

SEQ ID NO: 35798 - DNA, 522 bp, Homo Sapiens
accagatcttggagtcatggatatctgaatcactccacagtaagatggtatttcagaggaggaagacaattctttctttcatacacatactaaagggctttccatgtttttgtgcaaggccacaaatggaaaaaactaccactggcagaaaaaacacaacactgtggtatcaagtacactgccaaagttccaattgcaagcaattgaatgttggtgcttattttttaaatcacttgcaagcattttggccatctggagtaacaagaagttgttcctattagtttgtaatccaagtaagggtcttatatccgtcaatcaacatttgcataatttcatcctagaatacataattttccttatgatgaatactgtataatcactgcaaatatctacacttaatgtaacgttccactttactttcttctacactagtgaccaaatactatatggcaccttcaacttgtagaacccctacatcatataacttaaatgataactgactctatgcatatacttccaagc

SEQ ID NO: 35799 - DNA, 470 bp, Homo Sapiens
cgactggtgaccatgacattaatgctatagtttgtgttagactgctgttactaagaaacagaatagaaacaattttttaaatatttaaaatgttttccaaaaatgtttgggaagactttctccaggtttggtgggagaacgccactgtgcattaattcatggtggggcttccataaatgtttggatctataaatacctatgctcggaagggctccatccaagcaaccgtttgtcatagcagtgaccttggccaatttcactcttgttccaaaaggctgaaagaagctgatgatgctggtggcttacctgccactgctgaccttcaattaaaacctgtgacagatgccacagagcacatcagccaatgagaagaggaacggccctgagcagcacagatgctgcgtccagaagcctccatggagtgtccgaaggatcgagatggcaggtcactgaagactggctttagtgat

SEQ ID NO: 35800 - DNA, 394 bp, Homo Sapiens
ggtgactctagaggattcctccacactagtcaaagaagagaggaaaaggttagagtttcactgaggagagaggtcacgcacgttgtttagaaagttagttcactggtgctggcagcatcttacaacaaacagctggtgagttttgattaggagagccagtggttgttaggtggaagactgaaggctacaaattcaggaataacttacaaattacaacaaaggactgcttcaggagtggcacaaccactgccacttctgggcagagataaacttgtaaactgagagttatggttaggcctctgcagtttcgaattgggcttgtgagactgtgtcaggcacatgttcctgtataagcagctatctgtctttgtgtgatgctccggcttggcaaaat

SEQ ID NO: 35801 - DNA, 525 bp, Homo Sapiens
aggatgtctccacactagtcaaagcaaacacataaaacacactaggtttatcaacagcatcgaactgattaaaatatccatttttccctggccaacattaagacattcagacttcatgatttaacagttaagacctctcattaactggctcagactaggttgtgtgtcataatccaactgcaccacacattctaggttcctaatcacaccgcaccatatgcaaaccttaagatataaaacgatgttcaggactttgcttttgaatatacctttctctcatttagaaagctattttctcaactgcttgactatttcttcacttataatgttctatccctggggccattcaaactaaattcatcttctagtcactactttatttcctggataagtttattactcattttttcttcagcgtactgatttgtgtaaacacctacattgatttagacgccagagtaaacaaaaacaaaacaaaagcagcctttatgtagcttagattgtatatgaggactcgcgatgaga

SEQ ID NO: 35802 - DNA, 391 bp, Homo Sapiens
ggaggctgacccagaggatcctccacactagtcaaagtcagaaacttttccttacattttctttagtagctttataatataaggtctaacgtgtaagtcttaatccagttgagtagattttgtatatggtgtgagataagggtctaatatcattcttctttatgtggatatccagtttttcagacatcatttattgaagagactgttctttctccattgtgtgtaataggcatctttgtcaaatatcaattgaccataaatgcatggtttatttctgggctctctgttgttccactggtctgtctgtttacgtgtcagtaccatgctgtatttattactatagatttgtagtatattttgaagtcaggtagagtgtgacgctaccaggaaa

SEQ ID NO: 35803 - DNA, 538 bp, Homo Sapiens
tgttgttaatttccatcatgctttttgaaaggagaaataagatattgttaaggtgcccaaaaatatacagtaaccactgtttttttcaagaaaaaaaagccatttttttctcttagataaatattttatagctggttttaattttaatgtgcatcattgctaggtaggcaagaatgatcttgaaaaagaaagctttagtaatattaagccaacaaagacattgcctgcaggataaatgaatagttgaacatattcactggtcacatggtcaagtgttatctttaacttattttaatataagatggttactatgtttcatattaagagtgtacccttttaacagtaccttataaataattcttaagcccaggtagggtgagttagaagtatctagttttacaattagaaatatgaaatgagaaatcagtgctcctttgtatgactaagctcaagcaggatttaaggcagggaggggtcaccactgattgatcttcaaatcttaccatgtctgagactgtcactgctggctgatgaattc

SEQ ID NO: 35804 - DNA, 649 bp, Homo Sapiens
aactgggcggggctctatgaaatcttcgatcatattcatgagttttcgtcggcacgttcgatggcatcaacacaggtctcctgccaccgaggcagctggaattcgagtcagttctgcagactgaaagccaaaagaagaagactaaagacaaagaagattgtctgaagagctgagaaaaatgacatcacgtcatatcgctgataacagattactggctgagcaccaggaatgtgggggccctgggttaaactcggtgagcactttaagcacctagaggatcagctgtgtctcaccggctgagaggggcaaaggctctgactcaaaaagaaatttcctgatccctcagtgtgaatacagagcatgggactaatacggggatggtagatggttaagagcaagaacagaaactcaaagggagggagggagcaatctgtatgaatcccgttttccaggtggccccagaaacgccaaccatcactttctccctcccactcctactaaaagcagcacctccaacacaggccacgggccccgtagttgactctgaccgattcagacattagagaagtgaatcagacactgtcctgagagtctgtctatggggaagagggactgtgggtgagtggtgggcaggtgaggacgccccaca

SEQ ID NO: 35805 - DNA, 351 bp, Homo Sapiens
cactcactcgtgtgtcccagctcctcagccttcaggcctccgctctggtgtcctcctccaggcagccttcactgaatgcctctgcctaggtcaccctgcccagcactcagcacgattgcagttgaatgcacattgtgcaaggatttgctgacggacggtctgtctccttcaccagactgccttgcgtgaggtcagacttaaaatgtccgagattgaactctctacccgccccccaaaccacagtcttcctgtctcaatgaaagtggccttcatccttgccagtggtacaggccagaaaccagggagacggcctcgacttccctctctctcgtccctcacatcccatctctc

SEQ ID NO: 35806 - DNA, 443 bp, Homo Sapiens
cactggaagcgagcatggacagagggaggacagacagaatcgagccatctcaagaagaataagcttgaatgcccagaggcagcatggtgctgggaagtgctaagtccagaaatcgagtttttcaagtgatgaacggtaattggttgtgccttccctttgcatgtaaactttgctaacacttcttagcactgtgaactctactgcaaacttaactgctttgcagagacctgaaaagagctcagtcaggtgaaaaattcaaaagagatgaacactgggaagagtctgtaataggacgctagcttgtacgtatgtgttcttgggctttgatccttatactaaacccttttctattctttctgatcccccatttccacatacacactttttcatggtctcacctcacactcggttaagtctttatttttctccctttctttctttcc

SEQ ID NO: 35807 - DNA, 618 bp, Homo Sapiens
tattgtagttatgtttgttgttgcttaagggtccttatcttatagaaatatactctggattccagcccaggcacattactagttctgtctgtggcaggaattttaacagctgtcctgcctaatcactggatataaagccaccacaaataggtatgaaaactttttaaaagctaatgcataatgcattgtacaaattcaacatgtgactaaatatcatgtactctgttagaatatatgtgaaattaaagcatcaaaactagctttggagttgaaacatacaggaagaaatcattttaatttatatatttccaagctctgctgcacctgaatatttggaaacacacaggtcacatttagcctcatgggataaatgttaacattgtcactagaattttccaacattgtcactagaattcttctggcttactagagcattccagacagaattttacatattttcaaatattaaaatattttaaatcttctgaaatgctgtttaaaatagttggaactgaaggtaatctaggaagggtgtctagcacaagaaaatccatcccagtgaatccacgttgcggggatccctaagtgactgagctgaactgcgcgcctataaaaaaa

SEQ ID NO: 35808 - DNA, 380 bp, Homo Sapiens
catttttaaagcacacctcacatttttgtcccaactgtaaagtaaacattatgaaatttggtagttaactttctattcaatttgactgctgtttctcgcatttctacttgagaaggtcactgtgtttgatcaaattctgggagaaaaagatgagatgaggcttcttggagcaacttcttcttgtgtggtgcttcactgagcttgtggcacatgttagtttggaaaggagatttgccttgaaaatggggtctctgaaccttctgggagggataaggtagtacagtggagttggtcatgcaaggatggctcttccaggttccaggcaaatctcctttccaaactaacatgtgccacaagctcagtgaagcaccatacggaaa

SEQ ID NO: 35809 - DNA, 361 bp, Homo Sapiens
ccccttggaggcaaaatctcccccacccttttgagaaccactgatctatgtagccttttttctgggactaatgtagccttgcttctgagatgtggcccctaggtctctactgaatgcccggcatatttaattagatctttctttcctctatggcctcaagggatttcaccctaagtatgcacaaatttttattcagccgaagactgtacagatttctggaggcctttctttgtgtacctccttcgtttccagtagtctgacccataaattgtacagatttctggaggcctttctttgtgtacctccttcgtttccagtagtctgacccataaattaaagctgctttagcctcccctaccct

SEQ ID NO: 35810 - DNA, 373 bp, Homo Sapiens
accggcgtgccgttccgcgtggtggtgggcgaccgcggcctgaaggaaggcaagctggaattccggggccgccgcgacgaagccgccactgccgtggcaccggccgatgtgctggctacgttgaaagcgcgtctcgcgcagtaatggagctgacccgcatgcgccgctacctgtctgccagcccgatagccgctgtgctgtgcgcaggggcgttgctcgcgggcacgcaggcggcgtgggcgggggcccagaaagaggagtacctggcggattcggtgcgcagtgcgctgtccgctgccgtggctgacagccggccgctgcgcccggtgttcgcgaacaatgacgagcaactcggctatctgcgctggcgggt

SEQ ID NO: 35811 - DNA, 477 bp, Homo Sapiens
agaatcatatgcgcgaacctaatgattgtgcttctgtttgtagatctaccagtttagctacctttgttagcacacaccttgtagccacctgacaagaggaagatggggaatggggaattggaaaggaagagggagcaacctcactgaatatggtatgccaagcagtgaacatatgtcgcgtcatcacactctgacaataacccacaaaggagaccaatatcccattataacagaagcagaaaagaaacaacccttatgttactttaccaataggaaccttctctagatttgaccccaaatgatattattccaaagcctatgcttttgaaaacttaagaaatgtacagatttattttgagaaaaacaaccttccataattcttgagcatactccatgaaatctctagattctgtggagccaagttggtaaaataccacattagaagtgaagcgctaccagttggaggagcaaaatagc

SEQ ID NO: 35812 - DNA, 374 bp, Homo Sapiens
tatggtggtacttacggcccatttttcagttttcctgctctgttacagtcttttccagttttaaatatagcttatcatgtaataaggactagcttagaaaatcttcagaactgtaattttatatttttggccacgttaatagtcctttggtagctatcatattagcttataacaagaaaagcatatttgtttcagaagaacattttttaatctgatgttattgatgttaggcatttttgccaaatatttggtaaatttgataattatttaagatcaaccttatagcaaaaagattgcattttacagtttttaagaacagcattatcatttgtttttatgttccttgaaatttatttaatcatttttatgaagcc

SEQ ID NO: 35813 - DNA, 612 bp, Homo Sapiens
gagatatttacggattgacggtacggtcgatcacacactaaggtatacagctctacgcagtatagtgagtcagatgtgtacatgcccatagggggtaatcatcctctaggttaagggatggaccctttctggctcccagacagctccccatcccctgtcccacatagtccccctttaggtaaccgtgactctcacctctagccgcgtggatacgttgcccatgcttggacttcctatgagtggaatgctgcagtctgtactctttcatgtctgcctccttctgcttcatgttatgtttgtgaggttcatcctcattgtagcctggacctgtaacttgttctttttcacgggtgtgtagcattcagttgtgtgaatctaggaaaatgtaccccttcttccttgtggacaggtggtcaaggatgacaggcagtcggctttcagcttggagctcttagaactaaaactgctcccgaggctcgtcttccggtggcatatgaggatggcttatgttcgtcacgtgctcaggagtggggttgctggagagtcctgctgaaacgtcaccagcaggcattcttgtgggtcctgcagacacaccgtcagcagcgccttgtg

SEQ ID NO: 35814 - DNA, 383 bp, Homo Sapiens
ccagaggctcacagtaaggatgagaaggcagaactataaacaaattattatgcaagaagttcatgaaacaaaggaacccatgacatttcgttagcgtcatagagaagagaaaagttaccagagtggtggactgggtggcagatgaggcagctgaggctcggaggatgacaacagctcttcagctgaacaggaaaacaaagagataaaggagacagtagtcacaatggaaacaaggcgcagaaactgaaatcaaaatttcctcatgaaagggtaagccttatctttgcctagattatggtagggctatctatacagcctctggggtccctaagttcagtgtccctccatagtgatgccaactcacatatgtatcgcccccacca

SEQ ID NO: 35815 - DNA, 369 bp, Homo Sapiens
tgcggcccggggaagaagacacaaaagcatttggaatggataacgaaaaacaggtgtaccttttacaggaacaatatgattcagagggtggacacactaacttcaatctatgctcatgtgcaaatttgagcaactttccaaatgagaaacagatataatacacagcattattaagtcaacaaacttaatatgctgacatggaaacagtcactcgcacatggccctactgtatatttattaactatatttactgacactaagtataacttctaccgttaccccgtgtttttcgttatccattccaaaatgcttttgttgttctttcttctcctttaattcttgccagcaccaccaatacagacagcacca

SEQ ID NO: 35816 - DNA, 415 bp, Homo Sapiens
tacccttcaacatctcatccaggtggaacgtcacatggtatcacataggatataagtctagttgcccccaagaagtaacaggcttattggcacttaatttatttttaagtgtgctgtcttgggaagactcataggccttttctagtagaatcttacctagcatcagccctcataaatttgctgatgtaattttaagttatactttctagctgctggaacacgcatgagcgagtgtctatcctatttcctcaaagttgctcaacttgcttaagaaatacataactgcatattggacatcagaagtgcttggttctagctgggggaaaaggatggttaattcccccctaaagcatcattgttttgcaatcgagtgaatcggatggattctccttcccagccatgagatgttggaagg

SEQ ID NO: 35817 - DNA, 584 bp, Homo Sapiens
tcacacggggatatattattcaggtagaaagcaagatttggaaagtgtgggtagatgagtcagataatggtaggatttttctcctgatctctggtaaggtattacaaagttctctcctaatggtctgcaggcccctgacagcatatcctgaattaaacttgttctgttttcccagcttacccttctaaattctctatttcctgtcacggcatctctctccatcccttaatcatctaaactggaatcccagctctctatttcacaccccatatccaatcccctcggcccttaggggagagcgggcaatagatcctggctgcgctggtcacctgtgggctccagcagcaaacaggtgggttcatttcctgcagtatgctgtacaaatgttttatttttgtatgccctgatgtgaaaaggtttggaaagaactgtttccaacactggacaacaggcagtgcagacagggatctctaagagaggggaacagagtcagtcttgggatcaccacaggtttctgagtgcaggcactatgcatccaccacgtagcagagctgggcgatgagatgttgggagggggatcctct

SEQ ID NO: 35818 - DNA, 499 bp, Homo Sapiens
gattatctggatgaacaaaacagacgtggatgtactgaggatagagggactatcaatgcagagttaatgttaatggttattaattgtgatatacaatactcaggtgaggagtcaacattcctggatttaaagaatctacagttttgtgcaattgtgatttgagaaactggaaacattgtgccaatggctttgagttcctataacaacggtgttaatttgattaactcactgatatcttttaaaaataatagacatttgcttcctacacctttttgtacatgacctaaagagtatattcccagaagctactggtcagacacatttagggatgacagttgaagaggacttttttaaagctgcatgtgaatatttcctctgtgtgatttgtctgatgtagaaaagttttcccctcatttttatgagtaaaaacactaagtgggtggcaggggggtgggggttcttatgggagtgtcataccgggctatgagatgtcggaagg

SEQ ID NO: 35819 - DNA, 353 bp, Homo Sapiens
ctgaacaccaccatttgctataatgaacaccagcatgacagcgcacatctctgtcccagcaggaacgggtactccaggccctgtcacagcccttatcctatggagatgccttctgaacagatggtgacctctgtgcggacaagactgtgcttggtcatcttagcctctctctggctctgggccagacctggcccagggcagacaataaacccacatctgtggaactgactggacgccaacagtggcctgcagccacaggatgctgattcacaccttgggtgcggaggaggcaatggtgacgccaacgcgtgagttctagctaactttgccagcaaaacgggcgggggccatga

SEQ ID NO: 35820 - DNA, 489 bp, Homo Sapiens
tacaacatctcattgcggtatccttcctaatgaaatttatgccaaaagctggtaagtagcaatgcaattggcctatatcatgtctcattcctccttttcttgatctacttacttcatgggttactgagctgtgaaatagcttgggaagggggagtaggatggtaacagttggaggctcagacaatctactcaaataatctgctcccgaataatcaagagctgaccatgagcttttcttcaaagagccaggcaccctccagttggtgcaggttccaagctttactatccttgcctattacttggtgatcttaagacaaagataaacagtattcttggtggacacacattggccagatacctgctttaggaatggttgtcttaggatgaacatttacatacctaccttttttcttaagtgcataaaaccctaacagtactcagatggcttggggcatgagatgttggaaggagctatgagatgttggaagg

SEQ ID NO: 35821 - DNA, 499 bp, Homo Sapiens
tcagccggtccttcaaacattcatcgctggtgggagcagaataagtattatgttctgtttcaagctctgattgttttcactatgtcacattgtttttcacttaccttaacccattgaccccgatctggcttcacttatagtgagatatagctgcccaaacttggaggtgcagcttatgaccatataccaaaataatcaatgttttcaacactttgggtctaagatacagggatactgattaacctcaccaaacagtccaactttgtcattatttaatttctccttttcctgcttagagcttcccaggtgccactgtttaagatcaactggagggagtgtgaagatggggacctgaaatatggcctgtccctcacggaccgagacctcagactctgtgatgctgtttagtgctttgtgcttggaaataggattcttaggggttatgggtttaggtggtagttgcagggtctggctgtgtggcctttcccctcttctgcca

SEQ ID NO: 35822 - DNA, 629 bp, Homo Sapiens
actatcagctcatgtagaaggagtggtgccagatctagtggagacaaaagccatatgagcctggcagactcccaatggctggaaaattctcattgagcattcccatgctgggagagtgtggcaccatgttacacaggatgggatggatctggagaggagaatggtcagccctggaaatttctgattgacatttaaagggtatactccttctcaacagggccccaggtaggactcagacctggaaccagtattttctatgtgttcattatttccatttgaccttccctcctcttcactctcctacagtctctcccctgcctttgtgcactgagtgatgcaaggcacattgtatcactcaagtgttcattgctttctggcttctggctttatttggctgatagaagattcctgcaagaggctggaaagtaggagggcaaaagaagtcagggtctatctcctgacaatggcgtggccctccatgagcacagttcctgttgggcagcccctctttcagagctcaagctctcactaagctccaatgacactgccctcgtcacctgaccccttcatgtttaggggtgtgagaagtccctctgttgctggctcttgggtgccttgacatcccttgg

SEQ ID NO: 35823 - DNA, 554 bp, Homo Sapiens
atagcaaaactccatccactccggttcccttgtataatacaaaagggttttatcagtcatgtatttcgcctcaaaactagaagcatggatttcccaacccgattcaccattaaaattgtgaatttttctggttctggtaaggatacgttgaccgtataatggattgcataacagtgtgttttcttcaccttagtaagtagccctgggagtttgtagcaaagaaagaagaaacccgagcctcaagaaaatttctccgacgatggtgcccagaacaggggtcaggggtcacgtgtgatgcgcgaaaattaaataagtgataattaagggaaaagaaaaactcagtgcctcattgcactaactgtctggcaagcgcccagtgtccagctgtggacagcacagttgtctggggcagggaagatatggactttcctgcagagagtgctactctgcagcagtgaggtacacctttcagggatgtaccatgatggtgacagagacaccagatacacaggtagcaccagtttaatatgacaagatcattcccaaaggtagga

SEQ ID NO: 35824 - DNA, 427 bp, Homo Sapiens
atcccagcaagctctactctctattctctgtgatttcagagatgataacctggttcagcatcatgtatgtacgtacaggtctataggataagcttctgtgaatctggaaggtagaacttatttaaaataattgaggtgcttgcttatagatatgggaataaactctttttggaaaatttaggtatgctattggttacattttgtagattactcttcttgatagagaagaccaaaagatttttttgcctccatcagaagtcacacctaacatgcagtggtagaacaggcagttgtctctagccataatatttacctctctaataatttgtgatgcttacctccctctctaggtcctgctttccttatgttaagtacttgaagtcacattaataattagatagctattagtaagcacagtcaatgacaa

SEQ ID NO: 35825 - DNA, 358 bp, Homo Sapiens
catgcaaaataatgactttcagaattaatggcttttacccctgtcactaaaatcagacatcgtgaaaattgacttagacagccaaatggtattgtaagttctcattcactatttggaagtgttgaggcctgatcggtgtttcctactgaagacctctgtgttctataataggtaaacaattttgctcctgtagtggattgtatggctttaacatttgatagcagtactttaattaactgttatataattttgtagataattaaatgacaatttattactttcaagctccataggaaactcattgctaatttagcaaaacttggagcatctcattcaagatagaaaaatccatttgaaa

SEQ ID NO: 35826 - DNA, 456 bp, Homo Sapiens
tgcaagtgagacacaatcagagcagtccaacttcgcagtggacagcccagaagcactggagttctggataagctgaagatcatttatgtcacagctcctgacaagagaaggcgatagctggtggctgcagagggagaatatgaaatgacctgcattttgggggatggggaaactgaggcttggagaggttacataaatgtcctgaggctagacagcccagtggtctctggactttgtggtgggggaggaaggggacctcctgctttgccttcaaataccatgggccattgctcccaatcaccactcaccacgtcctgctgctcctcaaatcccagctcaagggcggcttcctttggcactcccctgcatccccctccaaactctctgaacattttctttatacacactcgtatcatgcaccatgccctgcgaactgtgaatatgtctgttcactcg

SEQ ID NO: 35827 - DNA, 569 bp, Homo Sapiens
agaggatccccagtgcaaagctcctacaatgctacaacaaaaaacttaaaagtgtgaattgggaagaattttacttatgagtgaagaacctttttcaattgcaggcaccaaactcaaaatcataaaatgtcacaacttggaaggggcattggagatcacctgcgttctcattgtatagattgggaaaacgaggctggaagaggcaagttggctttctcatggtctgtcagatccttagaggctgagttaagagtagaatccagattttttacctccctattatctccaggtgtgtataatgtttgggataagattaacatcccccaggatgattcataaggaaagtgagaaccaaatgtagataagggtttgaagcgtaattatctctggcattagaaccacacacccttcctcacagttgtacctttagccttgaacaggcttcctggtactcacctggtctaatagtgatttttatggtgcttaccatgtgccaggatctctggttcaagaactccttccgtcctcagcaaatctatgaggtagctgctagtgtgatcctatcacca

SEQ ID NO: 35828 - DNA, 545 bp, Homo Sapiens
aggcaaagctctacatggagcttatttcaaactccagaaataacaaaaagaacccggggggaccaccctcttagaataactccccatgggtgatgaaaggaaggcatatcaaattcactttaggagagaagggattctgagaaatggattttcacgatgtccaaatggagctggcctatagattttcctctggattatactggcctgctttgccttcagatgagcacagatggtcacattcatgaactggggttgctgaaaacacatttttaagggggctcgacatgtgttaaaacaaccagaagttcttgaacaaaattactggtcagccaaactggtttttggtattggtcagtaggttagtttgtttttgaagtaacgggctatatgtattagagcagttttaggtttttaggaaaattgaatggaaaatatagagctcccgtggaacctcccctccattaccaaaagttcttattatcagtgtactgaattcagttgatgcatttggacaagtgaagagagccaatattgctaatttataa

SEQ ID NO: 35829 - DNA, 441 bp, Homo Sapiens
tttcagaggtcatgcactctggagagagaacaccagacatgttagagggcgaaaccactccgtggtgacacactgtggagtcctggccaccagccggacacattcattcaaaattaaaaccttaaggcccaggtccagtccccctctttaaggaaaaggtgggaacggttcttagaatggaggggaatggatcccctttccaggccacccggtaggttttaatgggcaccactacttgccagaggttattgtaaacgggagttaactggtctttggtgccctttaccttaaaggaaaaagaaccctaaggttcgatctacaaaataaagagttggtacggtcttctttccggggccttcatttccttggcggtttggattctgtggtatttttctactaagttaaaaaccacgggttggattcaacagggttttgggtggt

SEQ ID NO: 35830 - DNA, 368 bp, Homo Sapiens
tgatcatgatgcaatctatttcttaggtccatactatcattcaaaacctcacaatcatcccaactctgatgacagaaagcactggggaagctttctattttctgagattgtgcagtaattccctgcaacaaattacaagcagcatcagtatgtatcgctaccacctctccacatttacaccaacatacacaacacacacatacattgggtacaaataataaaaagtgaaattactaattccttagagtagatgtcactgcaattcttgaaacggatttccatttcctagtttgttatttatctgaggctgagtatcaaaagaatgagtcttcatgccagtgtccctaatcccgaagctccagccagcc

SEQ ID NO: 35831 - DNA, 371 bp, Homo Sapiens
cagctcctactaaataaagtccacatgaaatcaagttctacctctatacattaccccctaaatgatgaacacacaggacaaaaatttataaaaataaacatcagtaaaattaatgttagattaaatatatataaccaagacaaaaatgagttaatacttctgagtaatttataatttaatactagaatcacatgttaagacataaaaagtactcacaatgtacacaatgtaacaaattaatttcttaatgggaacatttcctataacagcttacaaatagagtttgagaaaaatacctcaaaatataaagactcagacgataggatcgcttctatgggattgactagagataaaatgcttattaatctggt

SEQ ID NO: 35832 - DNA, 548 bp, Homo Sapiens
ggcgacctagaggatccccaggcaaagctcctaccagttctgggctggacacttcctgagtttctctctagagagagggctcacccaacatccccttgtatagactacttacgggaagattttctcaaggagaaaatatatcagtcacaactaagttccctactcttgtgaaggaaaatattctacccaatgagcaaaggatattccaccctgtccacaatgcttttataagcatagggtagaggagttccttcaacacgtaatttatttattaattacaaagtagatttttatcaagggagaggggttctgctgagataccagaatggttaagagcctagctgtagagatgacttccagcccctccatttacctgctgtgttgactgcaggcaaggtacttaacattccttatctgtaaaatcatcatcatattcttatttccccatctcattgggtattggggaggatctaatgtgattcttcatctaaaagagcttactacagtgtatggacaggcataagtactcagtaagtcttagctgtcag

SEQ ID NO: 35833 - DNA, 639 bp, Homo Sapiens
ctaactctctagcactaatgacttacctatctaatctgcccaccacaataaaaatgcagaattaatgttaaacatcactttgttcaaccagatcactctcctacttaagaaggtacacagactttcttctgccccatattttggttaaaatctccccgcttagttctcatagctgttagtccataaccttttgtcccccttcctccttgatgtacactccaggctttggccacctgacccttccccggccctatctcgtactctcccatgcctttccatctcttcttcattgggaaagcttaataattcaaccttcaaattccagctccacttctatctttccccacagagccttccaagatgatttcaccttcctttctacaactccagcttacctcagacagagaactacacggtttagtagcataaagctctttgtgtagtttcatctctccaaaaagaatgaaaacacttagcaagcttgtgccttaaaagctttctgtctcccccttgagcacctaataggtacggcatattcatcagataaataatttaacacgtattgattatctgtggtttcaaataatcgattatctgatgtcactcaaaccaatctaattcttatcagagattctgcaa

SEQ ID NO: 35834 - DNA, 584 bp, Homo Sapiens
ccagaggatccccaggcaaagctctactcctccatttacaaaccaaggtatggaatcataatctttaagtcaaccagtttataaatcttcatctttggtgcttccctctccttcacccacacattcagataacttgcgaatatttgttgattctacttctgtgcttgcatatgaccacaacttttaccctggtggagcttttcatcacctcgtctatgctactgcaatagtctcttagttgaacttttggcatcccaatcttgcctccctcatcctcttatatactgtcactagggttctcttaagcacaagttcaaacagatcagtcccttccataaaaaccaccaaggactcctaattctgaaaaatagaatgtaagtaaggatctgacactaagtaaacagagcaaagacttgggctcatctcaccctccaagctctggtgttgccctattcttttttactcgctgattactagtcaggcacttccatgttcatgttttcctcagcctaaaaggttcttctcctgcttcaatcaaactcctatttatacttcaagtctttcttcaaaggtttcccacaaaa

SEQ ID NO: 35835 - DNA, 540 bp, Homo Sapiens
tagaaggcatgtgtataggtgcattaattcctggtacataactaaattatggaaaggagacactgactgataggaagctggtactggatagatgagggatgattatgccaatatttttcagagtcccaagatgatcaaggccagctttgatctcagtctactgagtcatgctggacgtatatatagctcggtcactccattgctgcagccattggaatgctcctgtcgggggtaacagtgtccagccttacggagcaggcctgaccaccctccgatggtgtggtgggcactgggccaggagggaagctggtggggtgtggggcacgtaccaggcaaaagaagtaccaggctctaggggcagactgctggattatgactcaagttgacgcaggaagataacaaatccagtcctctccccagaggaattgagacctaagagtggccttctcacaacttcagggtgcagggtggagaataagtcaggatcagatgcaccaaacataccagcagcttgtgccaagcaatgtgcctcaaatgagg

SEQ ID NO: 35836 - DNA, 418 bp, Homo Sapiens
gatgcattacttgatcaagtcttcgaggtctcccaatgctcccaggctccacggtgcacaggagactgcagtcctggctcaagggtcctctctgagcatctgaccaatgctcttgacccccttgctcctccgagaggtgctgttgtgcctggtgccctagggcttgtggcatgtgggcaggggctgtgctgagcctacctctggggcctgattgtggggactgcgggttacacctcaggaagtgtgggcatgagcaccccagctgctggtacccccgagggccctggagagcagtgggctctggatgaaggctgggatgtgaccacaccccagaccagccagcagtgtccctgccaagcacctgcccctccgggaagagagccacgttccggggtctctgcaggcgtgcccggtttct

SEQ ID NO: 35837 - DNA, 536 bp, Homo Sapiens
ctcggggcagaagcccgcgatggagcactgggtgtggtgggggcagggtgcctcctctgtcaagtggacgatcggcgcctcgctcgtgcctgcgagtgcgcgccgcgtcgaatacagccgtacagaacgcactacaggacagtgacgccgggagagagactgggaggcggagcggggactgggggccgtagacgcctttgctcccgggcacttgtaagaagagcgagtggatcgcgcttcctgtgcgtcactgaatcctcatgacgggcactgaaacggacacgcaagatctttgcttttcaagagggaactgagtccaggccagactgggttgctcccctttctctcgggccctccatctttgcaagttgctgctccttctgcctggagtgggtcctccagtcgttttcccggatcacttcccaccgtccggtgtcagcaaaaacaaggcttcctcacagcccgttgcagcccagcagtcgccttttgcttcttaagaagcacagccctgtgaccagcccgtgacatccgggtac

SEQ ID NO: 35838 - DNA, 355 bp, Homo Sapiens
cggccaggactttcggtggaggtcgcggtggactgtcccgggtagtttcccctctaatgtccttgtcctttacggcgtgagggcgatggtgatgctgaggcctgcgtctccctgcggcatctccatcccgggcgcgctatgggctgtgtctccccgcggcatctccatcccaggcgcgctatgggctgcgtctccctgcggcatctccatccccgggcgcgctgaggcctgagtttccctgcggcatctccatcccgggcacactatgggctgtgtctccctgcggcatctccatcccgggcacactatgggctgtgtctccctgcgccatccaccgagacatccaccgagacat

SEQ ID NO: 35839 - DNA, 360 bp, Homo Sapiens
ggtcgcaggcaggtaacccaatgaagtgggaagggtggactgcagtgaacacaagctttcaaagggtggtcctggagaagcagctatttcaaaaccatgtgggccaaacatttctatggaacagataattccttgaagcccatctgtaaaactctagttgatgggagtgtatacttttaactccattctttaaacatataaactactgttttgaatcttgctgaatgctccatcatgtatcttggactcctttccctatgagcacctgtagctctaccttagacttgtcagtgtccacaaggcactccattgcatgggtgccccaaaatgtatccacacagaccccaggaacatcccccg

SEQ ID NO: 35840 - DNA, 365 bp, Homo Sapiens
gtcgatctacacgatacccggattctcggtacactgatttccgatccaaaatcattatcttaccttgacttttcacgaatactgaactttctatcattcagaaacatagtggcacagccattgccttgggctccacttaaagggtctgaattttggtcctctggtctcttgccatgtttcccagcccctctagggagaacatatcgtgcagcgtttgacttcctcctgggctttcccgcacgtgcttcaccgtgcatgccctgcgcgtccctcagggcttcaatcctcgattacatttctgagacctccgggtccgcctggaggagaggcccaactgatttgtccctattgcgctctgccttttc

SEQ ID NO: 35841 - DNA, 382 bp, Homo Sapiens
tctctagacggataccccccaggtggatcacttaacgctttcgctgtgccgcttacactgtatcgcataacagctagttgatcatcgttttctgcgtagactaccaggtatctaatcctgtttgatccccacgctttcgtgcatcagcgtcagtcatggcttggcatgctgccttcgcactcaggtgcttctgcgtaatatctaagcgtttcactgttacaccacgcattccgcctgcctcaaacattctcaagccccacagtttcaactgcaattctatggttgagccacagactttcaccgctgacttaaaaggccgcctacgcaccctttaaacccaataaatccggataacgctcggatcctccgtattaccgcgact

SEQ ID NO: 35842 - DNA, 538 bp, Homo Sapiens
cagcgagtatgctgtcgcagtcagacagtgtcacgttatgctgcagtaacaaacagtcctaaaggctatatggatatacaacagcaaaggtgtattacttgctcatgccgcttgcccatttcaatgtctgtgctctcatccatgccatgttcactctgggacctgggctggccaaaccacccccgtctgagacattgccagtctcatggtggtagagggtgacagatggcataaccaccagctggctcttgaagcttctttccagagacgatgtgcgtcccttccacccaaattttattggccaaagcaagtcacaaggtcgccctggatataaaatactatcagagagaggcactgccagtcagacatcaagcgtgatatcagcgagacaggaaggtatgatctacccaagggagagcaagcaaatattttcaacaataacacaaatctaccacagctgggatcccagcaggggtatggtttatgcaaatcaagatcccatcaagcaggatcagacccctggtggggccttgtgtgc

SEQ ID NO: 35843 - DNA, 426 bp, Homo Sapiens
tcagtgctttatatcttcccaattttatataacgctttttctccccaccaaatttgcacacacccacctctccctcctccctcccaggggcctagtccagggctaagtaaacaggctacctgcttttatggaacatagataccttatagataccttttgtaggcggcatctgtgattccgtgattgcgtctcgcgattgccaataagaacacagcacacaagcaccatcacacccacacgacaaaacgccggctgcacgggactgcagccttattgtcacaacattttgagctttctgacaacataagctgcacttacaaagaagtcagagcaaggaaagaaaagtctcaaactgtgctagttagttggtctagcaaggtactgtgatagcaacttaagtgggggtatggggtctcggcgtgtgca

SEQ ID NO: 35844 - DNA, 549 bp, Homo Sapiens
acacttctgtatcttaactgctttgagcacatcttacatatgtgttttcgtgcagttggctcttcaggatataacttttagtcatattaaatagcatgtaagtgtctgttttagtcttgatcctattattcactagataatattcctctcccttccagtttgggtcatccgcagatggggtaggcatacagtcttcaggtcatcaacaaaaatgttaaacagcccaactcttggtgtccctctccctctccctttgcctctctgctttagtccttgtggcctttttaaaaattacctcaaagtcaccgtgctgcttcctgtctcaggcacttttcataacctctgcctggagtgtcctccttttgccatttccctacttttttttaatccctaactctgaccattctgacctcaagtaaaatgttgtttgcccagggacttcttccctgatacaaaactaggtcaagtcccccttttataggctttcacagcacctgtacttgttcacctagcacttctcatttcgtaattatacatctatatgtgtgg

SEQ ID NO: 35845 - DNA, 515 bp, Homo Sapiens
agtccaactttacatttacaatgaactttaataaaaataggttgtacatattagagatacatgttatacaaaagtttttgaaaagtaaaacacaaacacttatacagtaaagagaatgaactgaattgctatcatttgtaatattccttctctcctaagtgaccaacaactgtagaatgttacctttagcttttatgaaactaccaccactgtagctatttgggcgtgtgagatttctttaaaatcaagtaataattattgcgcatcaagtaattttatattttcagattatcagtattactaaaagaatcaaaatctctaaaagttggttttattccctccaaattcagtagtacaactcaactaattactcccaaactaacacccgcacttaagtctgatgatacaaccaaaccatccttaaggcacccactgcctctttccagtataatcaggcttcactacagaatttttggagacccactgaacaactgtttgggtcttcggcgtgtgca

SEQ ID NO: 35846 - DNA, 367 bp, Homo Sapiens
catacagacccagaaatctttggatttcccagcgagatacttaccacatctctcaattactatagaacattgggataatgtttatgttcaccatcttatctcttctatgagattgagtagctcttgagagacgtgggatttggttcttactgagatctcttttcatccaccagggcctaacacactgcttgacacatggtaggtagtaggtcagcagctgtttgctgacttttgctgaaaagaacttcacagtctatgaaggagatagacaggcatacagctacttctaataccaggcaggaggtgtcgataatataacaaaggtaccaggagagttatgctggtctgggggttcggcgtgtgcagc

SEQ ID NO: 35847 - DNA, 399 bp, Homo Sapiens
catacaatagtgacaacttaggtacataaacagaactgtctgacttcaaagttgaaacttcctccaccatactatgctccccgcaccaacgagaatatttagtgtaattaaactattgaagacaacaacaggtaaacgagaaaatccttggaaaagaacaccgttaatttacaatagtatatgtctctctctggccaacgtactttgtttcatgacactactggcatcatccatcccaaatactttcggtcgctgtgtgtttcagactctgaaaaaccttcaaataacacaataaaacctgctcctcttttcctttaatcttacataaaggcagttctcttaagtctatagtcaaagcagattataaaaagaaaacaaatcactttgcgtgtgtgtgtg

SEQ ID NO: 35848 - DNA, 458 bp, Homo Sapiens
acgccgtaactccacactgacagtctgacaatctccagatgtctatagatgtgtttggggggcgatgtctatgggccacctgagattgtccacacacggttgtggggatgtttgctggaggcaggaagacccatagaaatcctcaaaaatcggaaagggacccacagttcctaagaaggtgtgagaggcctggttgtcgcaaaggcaggctgtgtcccctcacggccctagtgcagggctactttctgctccaaccgaactaaagacttgttccagggcagcagggccccagggcacaggcttttggggccacccctgttcccagctccggccctgcctttgctatctgcagtactcaggtcagtgtccccaaaagccccagaggctgtcagggagggaaatggggggatcgtgggggaggtgacttgcccgagggcccccaccaggaggtggtggag

SEQ ID NO: 35849 - DNA, 559 bp, Homo Sapiens
ggtacaacggtgtctataaagtggcactgccatccatgcagatgaaaaatcttcatcttctctccacgatcagaaaaccctacagagccctctcatctctagtatacctaatctaaatgcctaatctctaatatactgatgtgcaatgtccttcccatccatcccctcctagtcactcccataagctctgacctagttcaagccctcctcatctcctaccagaagtgttgtagtgtcagcctccttatgggagatagagcctccagaataattctcctcaaacacttgttgaatatcctaaaaacaagggctcccatccccccttcctgtgtatatgctgcatacacagaaaagttgagaacctctaatcttactgttcgaacatccttgcctggcacttcactcccgtaacctctcagcttacaagccaccccacactccatccacccttctagacatcccacatgcttaccagcctccttactactcctgaaaacactgtattttcacatctctctgccttcagctttctctctcttccactttgtccaatccctgc

SEQ ID NO: 35850 - DNA, 363 bp, Homo Sapiens
ggcatatcataatcagattagtgtaaactagaaataaaaaagaaaaatctttacagcagctgaggggttggggtaggatgcgtggacagagacactatatacaaggaaacatttttttaacccactcgaatactcacaaagttatgcaagccaataagacaatggatcaaaatctttaaagtaaaaaatctatctaccatagaacttctactatccacacaaaagatgtcccttcaaaagtgaagggccactagtggacgaacgtggcgacgcatgacacacgtgcgtggatgagatataaaaaagtggtgcacgccactcacgtgtggaagggcattcgtggcagctccctcagaagggtca

SEQ ID NO: 35851 - DNA, 670 bp, Homo Sapiens
acgctgatctccagacagatgtactcaagaacatcaggtgcattctacctattctggctatagacagagtagttagaaggcaagtaattaaccatagagcagactttgaagaaaatgagattctttgaatttgagacaaagtgctgaaaagtagctctggataatgtatttaggagacataggaaatggctcaacaggaagggtgaaatagccttaccagtctggcctctttaaatttgtttcaagcctgtttcccttcactgatacaaatcttactaactctgcaccttccacagaccctttgttatgtgcagctgtttttgtttgtttttatgaaattcacttgaaacgtcattggacttgaatttatacagtaaaaaatcaattaactagattcttaaattttctcttccactttaaatgaagacacctaacggtttgaaaccttctggctctgaggagaggaagagggtccccagatacaggtttcaattccttaccatttagtctggttccattgatcaggggttcagttttctcaccttaaaataagaggattagaacagataatttctaaaattatttttaccaccccttttctcttttctttctttaattcctgtggcgttctctgcagtttatatgtccctaattttatgaaatacttaag

SEQ ID NO: 35852 - DNA, 653 bp, Homo Sapiens
cctttgtccagcctctgcagagacttccagatgcagctcccctggaggccagtgaagaccaagaagaaactcaagcacacaggaaatgctgcctcttatctgtcctgggacagacacagacccagtcacactgagcccaccacagggtgcagagcacccttccatctggtcacatccggcttctcatgacatccaagtcatcgcacagacacgtgacagacttggccctgggactctggccttggacacgaggctgctgctggttctccctgctggaacccgggaggccggatagagaagcttcccctggcattcttacaccacccttcccaacacgcccggccagcccactcctgggggcctccctgcctccccttggggaagtaatggcagcccttaatccttaccctgttccgggctttgttcccagtgtcttacatctataatcccattgaagcttcacagcaaagctaggaggtaagtatcattgttatccccatcatcatgaggacattgaggcccaggaggttaaggaaggtgtgacacagcagatcccccatatgacgtcggctagttagtgtggagaggtgcggataacgcagtcgtggaagtcataacgccatgagtctcggtattcggcgtgtgcagccgag

SEQ ID NO: 35853 - DNA, 417 bp, Homo Sapiens
tacatcccctcgtcctcaattacacttaccatggtttctcttatgcaaggtgcggtataataagatatgttgagagagaacctacattcacataacttttattttagggtatagttataattgtcctataatattatagttgttaatctcttactgagcctaatttataaattaaactttatcacaggtatgtatgtatagaaaaaaacatagtatatttagagtggagtactattttggtggtttcagacaaccgctgggagtattagaatatatgccccatggaaaactggggacgtgactgtataccacactacccctcacaggttcaaatttataagcatttttcatttgatctgctcctcatgtgcacacaaggtatagagaacgcagatggaggaactaagaagaggcaga

SEQ ID NO: 35854 - DNA, 383 bp, Homo Sapiens
ctatgtcacactttatttttacaaaataaaaatgactatttgggaaattagccttaatgatgaataaatcacttaatcaaacaagaaaattgctcttacatctcagaacatacaagaaggcgaattgtacctcccaactccaaatgaatgtgattgataaggggctctgtggaaaccaaaagtgaccctgtcaattccaaggtcagtgggataacttacaggacaatttattttagccttaaacactaacttcttcctctttgactttacacctatctaaattcagatggccttccttctttttctcagttctccttctgctcaaaatagcacatataaaagaaagtcacttctagaccatcaaatgaaggcaatctctggtt

SEQ ID NO: 35855 - DNA, 424 bp, Homo Sapiens
acgcgttatatcatacaccatcagctaccgaagtattaggtccatagaagatgaagtgtgttatggtctgaaaataggaatattatctcaaagtctgtataataagcaattaaatccccaagtctctactccaagccaggcagtcaagcaattcctttatgacacattcattttggaagtccagacatttatcttctcaagaaaataaaccaaaaatccagagtcatcagacatatgtgtgtgattatgtttggtttgtgtgagtgccctgagtgtttcttcattctatctaactccaaaagagcagacagcagccaagcttaagtggactggaagatccttctgcaaagaggctaaacttctccagggaagacagtgatcactaacaacaattgaggatcttcacaaacaaacacaacaaaga

SEQ ID NO: 35856 - DNA, 356 bp, Homo Sapiens
caaacgccgaatccccacactgcaatgttcaaggccactttttcatcacctcgtaatgggactagagtaataaccatctaagcgagctctcaatatttatttttgcctttattccaatctaaataagtcatttcaaaacacaaatgtcatcaagtcaactacttgtttaaaacattcaatgatttcttattgatcttggaaaccaatgcaatgttcatattgagacacaatctggcggtgcctgcctttattacctgtctccctctactgcccctgctcctttttatccatctccagccacattagtttttgttcattttctcacacatgctttattagtttgtcagggaagcggg

SEQ ID NO: 35857 - DNA, 480 bp, Homo Sapiens
agccagggaatggcatgaataatggaaatggatggaacggtaacactgacgtgcagatcaggaatagctcacacggggatgctcttgcactagaagcagaaactatcctgggatctaaagaaatcacttaaaaagaaaacatttcctcttcattgagcctcagtaaagctgcatgaggagaattctgcacaattgttcatactctagctaagaaaatggagttgattaagtggaaggaaactttaaaaatgtgacaaagatgatgaggtgattaaggggtaggttttaagtagcaagatgtggggaatttaagatgtatgactagtagcggtgacagtgaggttaatgatagctgcctataaatacccaattacttgcctaatgtggcaaatgagaagaaacaggcttttaccaccaaaagggaaacttgaagtatatgagggaaacagtatttaacagtatggacgctcggcgtgtgca

SEQ ID NO: 35858 - DNA, 444 bp, Homo Sapiens
ttagctacctctacgatgctgtagaaggaaatatcaaagagggacgaacaatcaacctgtccaatgcattaattgtcataatacacttgtatgacctcccattttgactccaggaaaagtgtaatgttggtacgggctcgagaaggaatctgcattctggtaactttgaccagaccttgggaatcctccccctcaatacatttaattaatgaagtgttacagcaaattctaaaaagatctaagagatttgttttcactttaagcgctgtgatcataggcctaattatagtcactgcactggccaccactgctggaatggcgttacatcaatctattcgaacggctcatttagttaacgattggcaagccaattccacccaaatgtggaatactcaacaaggcattgatcaaaaataggctaatcacattactgatttaagacag

SEQ ID NO: 35859 - DNA, 350 bp, Homo Sapiens
taacacgctcgtatatttttaaatgtacaggtcgatcgtttctatagaaatgggtttatctaagaaaagtctggttgtcttgctgctgtaaaaggcctttccaaacccctccttttattcctgtgtcccgaaataaggtatttgtagagttagggacctactgcatgcctgtccccagggccccagtggaaggaaggcagcgcctgctcttccttgactcagcccatcatctgaaaattcagaagtgaaccaagggttagacgccagaggttgggcttctgttagagtggcttcaaaacatgagccttatgggaggtagccttaaaaaaagtatggggatccggcgtgtg

SEQ ID NO: 35860 - DNA, 500 bp, Homo Sapiens
ggtggcgttcagaggagtcccggacaggcgagcatcaaaccaacaggcaggatcacatctcagcatagcccaagcaggaaatatttcctaccctaggaggaaatcactcagtcacctaaaaagtgcaggaccgggagaacactgcgggagcgatcatgagggtaccagatccaggtggggtaccagatccaggcggggagggggcaatagaagaccggtggggcatggatggacaagggtgcatgccccaagactcaggatttaaagtcctgtcaaaggacagctggagcttgtcttcacgccagacggctcccggaagcttggacaccatagtggcctaccattaatgaggtagagatgaaggctcagggaagtgggaatgttagaacggatttgttacatgagaccagaaggtgtttcatggagctgcccagaggaggcgctcttcactaaggcaatgcagagttgggacgctcggcgtgtgcagggtaccgagctcg

SEQ ID NO: 35861 - DNA, 371 bp, Homo Sapiens
tgctgaaacgctgtccagggcaaggttatgcttcacgtacccccacgagagtgttgagggagccacaaggtgataggagcgggctgaataaactcgaatcgttacattgctggccagacacttcttccgcttcattcatcagagtaggtgaatgagatacagtattgagcgggtgagacattggcatgggctgctcaccgagaatccttctaaactcaagcccttactcagtctgccttctaccttgtatcaaataaagcgttctcccgtgaaagggaaaaacctcttccccttttatgaaaaaggtcgcaactcgaaagccccaagcggcaactcgaaaggcccaagcggcaattcgaaagacccaagcg

SEQ ID NO: 35862 - DNA, 422 bp, Homo Sapiens
ctggggctttcgagttgctggagattacggcgtgcaccatcacgccagctaattatagtatgtatagtagagacggggtatcccatgtgggacaggcgggtcttgaatctcactggacctcgtgaactgcccaccttggactcccaaaaacgctggggttacaggcgtgagcaaccatgtcctggatccgcatattctcaactaccaagcggtatgctctcgtgggatccttcagaaaacatgaagtgtcactgctctgctgtatgcctgccagtctccccatctctcctctccgtccatcatcataccttttccagcctgtcccttgtgcagttcttggctcaccatctgagtatctatgagactgcttaaagtctctctgcctggaactaaaacttgcaagtcgaaagccccaagcggga

SEQ ID NO: 35863 - DNA, 448 bp, Homo Sapiens
agatgcagtttcgggaacctttgaaaacaccagtatagatgatacctctatttaacctggagcccctttttctcaaatgaaacatgatacagaagctaacatgtaaaacaggttagaaggtattctaacaaagtagagacgaggtacctttagcccagctctttcctcctcatcctcccagctgcctctaaaagagctctgtggaactcaagggctcacagatcacagtttgcaaaatattcataatgtaggcttcctgtattacagattagaaaatggactcaggtgatcaagtgactctctcagagtttgttaatttcttcccctttgtgatagtgaatagagaacaatcaaagtaatgaagaaagagctttgtttttcctttggttcacccagtgaactctatacctttttttatatgctgtgggaatacaagactgtaagtcat

SEQ ID NO: 35864 - DNA, 382 bp, Homo Sapiens
caagggtaagatgtcagaaaacgcaggctctggagcagagcaagcagcccacgtccaggtcagagagcctgcccccgtattccctgttcacgcccaggccttcatggcagagtctcggtcaagactgaacgccctcccaactcttctcccttcctcacggctgggcatagaggtcttgggaatgaatgagccctagagcaaataccgaacagctcctttcagcacccacaacatctgccttctatgcatctgccagcgagaatcacctgctgctatgaagcaggatgctagctgggcttggggccctcactccttgcccagctgctgaggggatgaggaggacagggccggcttctgatgggaatttttgtttttgagacag

SEQ ID NO: 35865 - DNA, 353 bp, Homo Sapiens
ggaatacaagcagcagactgtatcggggagccagcggttaccgagactgaagactggaccttaggcatgtccccacgtgcatctaggtcaacggtgcggctggcagaaccctggggctctcccccgcggaactcggccctggccgaggccccaaccacgctagtaggaggaggccgagcatccctcctcgaaatcgcgaaatcccggcccgacaatgtagccacggagtcgaaagccgcgtgcgaacttggcactcacaaagcctagattaccgtctattttctcctgaaaaataggagggatggacccccacagatcattgtaaaaggttcttacaaagaaaaatcctcctg

SEQ ID NO: 35866 - DNA, 697 bp, Homo Sapiens
atctggtttgagaaggaggtgaaggcaggagctatatgactaccaggagaagactgccgcaggaatagccggggcacaggccctaacgtacccaggaccaacagggacggccgggtggcttgagcaagagagtgatcagtgagtaggagaaggcagcaggagaagctagagacgactgaactttacaggccacaaaagactaaggctttggggaggaagaggacgagaaaaagactaaacatacaaaagattttttaaaacaaaggttctggcgtgatcttattctcagaggatggggtagccatgaaagggccctgggtgcagggtgacaggcctgtctatgttaccggctgccaggctgagaatagacaagggatcacaaatgctccattatctagccttatattcaggaaaacaacaacaaaggctcagacctgggcaatagtaccagcagcaatggcatgtggctggactctcaaaagcatctgtgaaggactgcaacagactgcacaaagtgtctacagacaccagccaaaatacgttcaagttttccaggttcaatcagttgctcctgtctcagataggcaggtctgtggtacgcaagacttgaggatcgtgagcaattggactacagatggccgagacctaccgtcggggatctctaatgactgcggttcaggtggctgcgcgtataacg

SEQ ID NO: 35867 - DNA, 455 bp, Homo Sapiens
ggtcatatagttggggacagaggcaaaaagaaaacagcaacaaaaaaatgcaaatgaagaaattggaaggcagtgcctatgccatctgaagtggataattcttcctaatggccattggatatagatgagttggacagacataatttagaaacctatataaggaaatatcatgcattttaatgaggttataacccaaaatttaaaattcaattaaaaaattaaatcacagattttcccacaacatactaattcaacatactacttacgattacttaaaattcgcattttttctaaggagcaataacctaatgagtatgtaatactaatgtgtcagttaataagggcaattacttttgctcttattttcctgttatatgaaattaacaacatacctgctgcaatataactcatttggtacaatttaggtgtttcgagaaattcaacccaccagctcg

SEQ ID NO: 35868 - DNA, 351 bp, Homo Sapiens
tggtctgtggtccgcatggtagaactctagcaggctgtggcttttcattgtggggacgttgggagcagtatagccacagccccaggtgagctctgtgaggtggaagagattggacattctaacccctttgcctatggataactgaatgagtcaagatccaggcaaaatgatttgacgtagcaaggttttgtcaaagcagtagaagcaaggctcctggttcccatgtcagtctgttgtctgatatatttgtatctggtttttgttcttgttgttgttacagttctggttgtgagaattagggaaaagcctgtaaccacgaatcagaagttctcttcttttgctaacagatcg

SEQ ID NO: 35869 - DNA, 503 bp, Homo Sapiens
tggtaggatatataattacaagcatcagtcatgtttaattgcacggttgttagaggaaagggcaatgatttgagtttatagaaacagaattttattgttctattggtaatacttctcttctgaggcctgataattgctgtatctttctcactaagttactttaaaaagttctgcatatatgaaattgtggcaaatgcataaactgtgccttattgatttttgttgacattttacatgtttcttacgcatttttaccctccatttggaaactgtcagcttggcacatggtgctggataataagagcaaatgaagtgaatacagcaatcttcttgactattaaaaacagaattagcccaggctccgcttggtttcaaatctatctccaatagatgatttgccttttcctcccttgtagtttcaagataagaagtggaaaaataaaaatctcttagtgttatttcctctgttaataatgccagggatgatgaaaatgcttctgaag

SEQ ID NO: 35870 - DNA, 481 bp, Homo Sapiens
accggtagggtggtatttggttggtcatgcacataggtgctggtgtatttcttgtctagcatgccttttgatcatggagaaatactctgcaaatgtctgagaattagtactttctagcatcattttggcaagacatttttatttagctcttatccagcttcttgggtcttttcacctttatctctggataaagaattcttgtctgcagcatcctaaagttacttcagcctccttgtcattttcactgaaggacactgcatattaaaacaaaaattttattgccttccaaaagctgacttccttgggtccttgagaacatagatccgcagctcgatggatctaattgcttgcttgtcaactggaggaaagagtagagttccccagtatcatgtaccttctgctgccagcactcagcctttcttttctgcaaactaggatttttaaagaagtttgacttccatatactaaattgctatggaag

SEQ ID NO: 35871 - DNA, 389 bp, Homo Sapiens
tacttagcactaacgtgttctcccggtcaggcatctccaggctgtggttgtccggacgtctgtgatagaagagcaggagatgctgagtcggggccgagaggcctaagtcaggagaaagaaacagatctgggtgtttggtttccaaagaccactcttcccctccctccagacattcatctttccttctacatcctcgggaagttagacaaaaggcagtcacactgctttctcagtcctgcccgcagctgctaacacagagccaagagccagctttaccaacaaaaagtgagcgacaccagggccatgggctggtaaaccccagagcttatctgcagggctgtgaccactctgagcactctctcacttgctctcagtcacccagccgctcg

SEQ ID NO: 35872 - DNA, 384 bp, Homo Sapiens
ggagatataaccagaaagcacttataattagagcatgtctaaactgctcacatgtgaaatgatgagcctccaggacttatttcctatcaccaatcccactgaagaccaaagctgaagagagaagcttccatacaactgaaagatagatgcaaaagcctggtctcacacattaggtttctggcatgaatggtaaactctgactccttttcttcaccactatcctactgtagcttaactgaaaacgttaagcacagtggggacaagttgacaggactaaggcagaggtaaacaagctctaaggttactgggagaatggtgtacacacctccctactggggaattactcctcaccatgttatcttttgaaaaacctctactatctct

SEQ ID NO: 35873 - DNA, 399 bp, Homo Sapiens
actacgcaatgatgtttgaggaacaaaatgatggaagtaagcttacaataactttgtgtttaaacaaattcaatcaaaacacgcagaagaaagagccaggactgaagaaaggatagttaagtagtctttcctatccagttatcaaaattcttaggattctaagaagatgccatctataaagtacaaaaactgaaaaatgctaatgtagctactttgacatgaaaagtgtctttggtgcaccaccgaagtaatccactgctgactaccttatcatagaaatgacaatgcaggaagaagtgagaatggagacttcatgggaaagaagtactagggcaaacctagaaggtctgaccctggtctctctaccactgaaggtcaatatgctacccaacccgatcg

SEQ ID NO: 35874 - DNA, 459 bp, Homo Sapiens
ctagttgtaaatgtaactagtccatatctaaatagcaaatagaggtagagaaagctcctatgtaggtagacagatctattacctgatagcagtagaccagcgccataaacaaatttcagtctaaataaagggaacagtatcatttgaaggaggaaaaaaatgggtataactcagaacactaaagatatatgtcacattgtttccacgcccttggcagctggagaagccctttgttcgtctgagaatagaataatgtattatgtataggtttactcataaaattaacatgttagacatactaagtttaaaggtgccatctattcacacagtgtttacacatttagtaatttaatttactttaaaaaatctttagtgtggtcacgaacacctgaaggaagtcctcagctccttgtctgtgaccatttgggagcaatttgcagacacctgagcccaccagat

SEQ ID NO: 35875 - DNA, 394 bp, Homo Sapiens
tcatctgagtcaactgccatgagcggtggtccacatcatcacacaagctcttttggtgagaacttggactcccaatgaacgccggaggtggtgagcctccttctggtgctctctccaaagccatcaacgagagcttcggtagcctcgagaatttccagggccagatgaacactgctctcgccgctatccagggaagcggctgggcctggctggttcaggacaagcaaactggcagcatcgccatcaagacctacgcggtaagttgatactgggtttctcgtggtggcagagacgtagttacttatccaagtcgcatttcagaaccaggaccccgttgttggacagttcaagcccctccttggtattgatgcttgggagcacgctattatctgaa

SEQ ID NO: 35876 - DNA, 435 bp, Homo Sapiens
cgatgttaggcagagatggatgtgcttgtggacgtgtgcagatcctctgggatctgtcgtcaaccgtcgcccttcggctgccgcagtccaagttcagtgagaacttctctttatatcctagatgctgtctcctcgtgactcatcttccttcttcacagatacctcctctgccttcctgcatggacaggtctgtcttgccttgatcaggcagatctcgaggaagttccaatcaggaagcagctttagtttccccactgttgccctccgtcacgctgtgacagcgtgtcttcccgggacgactgccttcaacctggcagaactccttgctttctggacacttttggttattggaactgctattaaaggttcattgcagtccagaacaaaatatcactctctccaatttacatgctttcgccctctacccaccgaatg

SEQ ID NO: 35877 - DNA, 555 bp, Homo Sapiens
agctataagcaggatacaactatgaccaggagacgataagagacaggagaacatgcatatacgagagaaagcgtgtatgatctccaactcctactgaagacagatgagtccctcctataccgactgatctgtgaggacctacaacagctcgggtgcctaccggttcagctctgagggggctcagtcctcgataagtacctgcctggcgtgtcccagtgaaatgggtggacggtcacacccacccctgttgcatcctcaagttgaatgaagatacccgtaggatatctgtgcaaagattgcagagtcgtggtcatagagatcatctaaaaccttttgcttattccataagccaattgcatacataagtagaactatgatagtgcctgtatcagttttagcacaaagcctagagctgagctgtgcccaagacttcagaaaactggctatttatttattcattgtaggttgtacggcgtgtgcagtttggtgtctcggcgtgtgcagtgtggtcgctcggcgtgtgcacgtgtgcagtgtggatactcggcgtgtgca

SEQ ID NO: 35878 - DNA, 390 bp, Homo Sapiens
tacaaagtgatccgtttgtaacatctcatttcgtctgcacaagaccctcctgaggttcccgatcaccaaggatattaaggatagaaaccacatccttcataccattgtctacctgtgattccctaatcgtagtccctttgctcactccctctggcctcttgctgtaccctgaacagcagtctgttccagccacagcagcccctttgccctatgtgcccatccccgtcagccttggcactggctgtcctctctgctgggagtgccctttcttcagatgctctcatgcttcgcttctttgccttgttgacatttggtcaatgtcaccttctcagtgaggcctaccctgacctccctgtaggacaatgcaactcacctcactcccatgccccg

SEQ ID NO: 35879 - DNA, 415 bp, Homo Sapiens
tgtggcaagagctctgaacaggccagccacttctgagggctgacgaggcctccacacaggaacgggaagggacaggtaagggacgggaagctttggttactttagtcttaaatgcacaatggcagaattcattggagcaggacggccctgtggtaccggtacatggaacaatttactctgacagtgatttgcaatctggttttctagcccacagttgctttaggaagtattttccaaaaatacactccatatatctaaatacaccaaaatgtgttattttccataattgctcaaattcaatccttagctgctaactaaaaacagcagcatggaacaggtcaaggcaaactattattgtggaattcacacaatggcacactgtttaattatttggtttggagtttcggcgtgtgca

SEQ ID NO: 35880 - DNA, 526 bp, Homo Sapiens
tattctgctttacacttacagtcgtcaataaattatgtgagacattcaacacattataaaataggcatctattagatggttttgcccaactgtaggctaatttaagtgttctgagcatgtgtaaggtaggctatgatgtgcagtaagttaggtatattaaatgcattttcaacttgtgatattatctatttacaatgagtttatcaggaggtcaaaccaccataagccaaggaacatatatattacctaatgtatcatcttctgaacatctcaagctactatgacaaggattcattttcagaagtttaatccttctaatccacaaaattaaagtgtgtacagttatcagaaaaataacacttcatatctttagtaagagtacaaattagttgaatatttttaagggcgaatttcccaatatctactgaaagtttatgtgcaaatatcctttagcccagcaatatcacttccaggaactaacctgtagatattctcacagaagcaagcaaaaatacatgcagaaaca

SEQ ID NO: 35881 - DNA, 370 bp, Homo Sapiens
gacacacttcgtccactctgatttcagaagaagtgtttgggcactcggcggccgagagaccaacaaatgacccaaagggccacaggtaaaggataagatgtggcatctcccgttaagtcaggcccacagaaggagcctgaatcaacggagctgcttacggggttccaggtaaggagagatcccctattacctgcctcctgctgacgctacccagcaagagctccctccccatatgcagaactccccatgatgtgatctaatactttcatctcagaactaagaaagctctttaaactcatgaaaagatcaacatctttagggactagctgaccagttcacttgtactcaaccactatctttaccaaaaggc

SEQ ID NO: 35882 - DNA, 374 bp, Homo Sapiens
gcggaccgcacacgcgatagcccacacgccgaatacccaaactgcacacgccgaatctccaaacacatgagctaaaggtcgtagtggacgaagttgttgcgcaacaacttcgtccactacgatctgagggccgtatggttactcggcgtgtgcatgcacacgccgaaccaccacacacttcttaaaatcaagtcttaatggacgaagttgttgcgcacacgccgaacgtccatacctgtccaaggagatctcagtggacgaaggcaacaacttcgtccactcggatttcacgcgaacaacgccgcgagtatggtgcaacaacttcgtccaccacgacatgacttgaagaagtgtgtggagcctcggcgtgtgca

SEQ ID NO: 35883 - DNA, 406 bp, Homo Sapiens
cacacgcgatgtcccacacctgactgattattcttatattagggagtatgatcaatacttattagtggtcagtgatagtggagaatggtaatatcatagacaaaagcaaaccacaaaacatttgaaataatttaaaaatagaaaatactaggatttttctcccctgcttgttcagttaatatattcatgtggtagacagttttggaaatatatataatctcttcatatagaaataattcactgttaaaatttggatgtgcttcctctaatctccgcattaattgatatttatgtatatgtaatatattcagcatactttttcctctattgtttgatatttaagcagtttctgtttttcagatggctttcttcatatctttggtagtgtggtgcctcggcgtgtgca

SEQ ID NO: 35884 - DNA, 462 bp, Homo Sapiens
gcaccttaagatagtatctgaccagcttgttaaactgggaatctaaggatctcttaactccatttggtttgaagaaagatattaatattgaaatacatagttgcacaccaaatggcagtggggtcggggttggggtacacttttatatctgctctcatttttccatccctgccagatagttgttatttctgattctaattgttacttctgattctctaaatcagtggacttgtaattatatattgctttgctaattatgtttccttaacattattttgacaaagtttcagttattatttacatatggctccttttaccatcagattgccatacacaggcataaatgtcacaaatattaagatagttgaagttttcagagcggcagacatttggggaaaattatggaaccttcatgtgttggagctggaaagagcctttcagtctgggtattcggcgtgtgca

SEQ ID NO: 35885 - DNA, 520 bp, Homo Sapiens
acgccgaggaacagaacgatgattcagcccctagccaggtgagagcagcatctgggtcacaaacaaactgaggccgtgaagactccaccccgactccctctatttaaaaattcctctacaagaaacaggaatggctgtttccttcacctcctagaaggcaacatagtaaactgacaacagatggaaagaaaggcatatttttgtccattaactttccaagggttttggctttgttcagatatttgcatcacaaattccctttgctttctccctggttcctccagagaactctccagtgatcaaggtctccagcaaatgacagcaactctgtatcagtgggatgcacttttgcttttaaagctacgctaggttctcatcaatactccttggatctcaagcctcggcaacagactcagcactgaagacactgggtcgcagcgcccgcagcctggactgaagccctggctttgctccttatcgtatggacgctcggcgtgtgcagtatggtcgttcggcgtga

SEQ ID NO: 35886 - DNA, 399 bp, Homo Sapiens
cgacttccatggccacgtcctgctgtctatatcaccaacaccttttcaggggtctgggtgctcggcgtgtgcgtttggatcctcggcgtgtgcatgcacacgccgagggcccacacaaagcgcttagtgatttggggatgatgtgtctcgtgcacacgccgaatgcccacacacttcttaaggtcaagtcagggtggacgaagttgttgcacacgccgaagacccataccaggaatttaattagctgaatatcgcgatggacgaagtagtagctgcacacgccgagcccccatactgcacacgccgagagaccatacacttcttgaaatcagatccggtggacgaagtagtagcaacaactacgatccactccagataggaggggtggtatgggaacgc

SEQ ID NO: 35887 - DNA, 374 bp, Homo Sapiens
cacgcgatgagtcatacattacctgttggtagcccccaagtggcgtgcagtgacacagtatcttctctgtcttttcatcattctttgtgtgggcattcggcgtgtgcagcaacaacttcgtccatcacgatctcaacccttggtgacaggtctgtgcatcggcgtgtggtatgggtactcggcgtgtgcagtatggatgttcggcgtgtgcagcaacaacttcgtccatactgatctgattttaagaagtatatggaggttcggcgtgtgcagtttggaggctcggcgtgtgcagtatggtccctcggcgtgtgcatgcacacgccgaggatccagacccttggtgacacaagtcttaatggacgaagttgttg

SEQ ID NO: 35888 - DNA, 431 bp, Homo Sapiens
gcgattgccagaccatgcgtggtgaagtgaacagcaccctggggacagcggcatacatggcacctgaagtcatcactcgtgccaaaggagagggccatgggcgtgcggccgacgtatggtgactcggcgtgtgcatgcacacgccgagtgaccatactgcacacgccgaggatccacaccctcagatcactatgcagatcgggggcaacaacttcgtccattctgacttgcaacaacttcgtccattacgatctgcaacaacttcgtccatcctgacctacttcaagaagtgtgtggttactcggcgtgtgcagcaacaacttcgtccatcatgatctgtcaccgcggtggtatggtctggagactcggcgtgtgcagcaacaacttcgtccctccgacctgcctgaatgtttggtcattcggcgtgtgca

SEQ ID NO: 35889 - DNA, 416 bp, Homo Sapiens
ctgctggttattatactaactctaaaacctttagatatttacaccattattattaaattacctctgtacacataccacgtatcaataaaaacaattcttcacatttcttgaaagattgaaagtatcacactgcacatcttaatagatatgaacattcaagtgaaattgagattttcagaaagattgcgaaaaacagtacacacccacaatgttattctcaagatactgaaaatggtgctcactgacgttacaaaacctattactttttaaaaactcaccatgtctgatttttgtatcacagtatgtaaaacgtacagataaaagtatgacttgtgactctgccaataaacatgatctcttttaacattcatactgtgtctataatttaggttatttgacctagcaaacctaacctc

SEQ ID NO: 35890 - DNA, 353 bp, Homo Sapiens
cgcgtagggccatactcagccaagtacctgaatccttctaaaaatttttttattgaggtgaaatcacataacataaacagccattttaaagtgaacaattcagtgacataatattcacaatgttgcacaaccaccacctctatctcgttccaaaacattcccatcaccccaaaggaaaaccccaaactcgttaaggagtcactctctaatccctccttccccaggccctggcaaccaccatctcccttctgtctctatggatttatatattctgaatatttcatctaaatggaatcatgcaataataagactttggtgtctagcttctttcgtttgggcactcggcgtgtgca

SEQ ID NO: 35891 - DNA, 358 bp, Homo Sapiens
tggggcacaggaaaatagcacaggctagctgtcaatgtagaagccaaactcagaagattagcagaggacaggttgataatcaaggtccaaacgcaatatttgaaaagaatagtagaatagtgcaaaccttcagcaagttgactaggaggaaaacaagaaacagcacaaacactgatggtggaagcaagcaaagccggggatggagcggatttgacaaccgttgagaacaccgtgttcaacgtacacaatgcattcgaagtcctagatgaaatggacagttttctaggaaaatataaatcaccaacatatgctcatgatgtagtggcagatgtgagagtctggatattcggcgtgtgca

SEQ ID NO: 35892 - DNA, 410 bp, Homo Sapiens
caccgcgtgatcacaccagcaggctcatctttgtacatactcacacttaatctccaaaggcagaatatattacgttggaaatacccaatttggacttacaccaatttcatgataaatagcatctttccatttcccatcaacagtggccatcagaaaagtaatgcatttcatagaaacaatattttaagttgaccttgtgtttagtgtccatttttgtgtcttgaccccagatcaagattcccatgagtaaatctattcacctagaacgaagagccacggactctcattcacatgtccatccatccccttcccttgcatacctgcccacgcatacccacaccgaatgctctatacctctgctacaagccttgtgccagctgaggacaggcatgtcataaacacctcctggt

SEQ ID NO: 35893 - DNA, 488 bp, Homo Sapiens
aacagcgggggatccttactcgccagcaggtccagtggcaccatggggaacaccttcaccaggacgtccagcaggtacagtcaaaccacggggacactttgccgccttctatgccagcatgaccaggagggccaaggaggtccagcatatccagaggggccaaaaggaacgactcggcaataagcaccagggaaaaccagtaaatctagagagaccagaacctagaattcctgcttcccaagccaggagcgtctcccttttacctatcagctctccctctggccaacacaatccacttgccaggatagctccctcaaaaacaatattcctggtccccgggtctcccaatgactgcagatcttataaaggttaaccagacagccccaggttaatagggagtaggactgacaacaatgagccctagcccaggaaaaagaagaaggtagggaagtcagagaggaagcctttagcaaagcagtttgtcatca

SEQ ID NO: 35894 - DNA, 640 bp, Homo Sapiens
agaaatagcgaactgtagtagaccgaacatcattaaagcagcacataactgtatgtacatttacactataaataaacacggacagggtaattcatatagagaagacccaaatagtaataactttgtttcttgatccaatgcctcttaggtataaaaccactgtgaaaaatcatataaacaggtttagactaacaattcataataaatgacattgctagatacctcaacgcaatgttttcagagctgttcaagagctcagttttcctagttctctctcactggaattttaacttatcgggcagatggccactcttcttacccagcattatttatattctgttaaaacaaaatatactgttgcataattttgaaagcaaaacatcaaatacaaaacggctctatttgtgatgtgaaagcatctgatacaatttcgtctagtcatatgaggaatgttccttagtaaagacccaggaaaagtacaatgttcaatgaaagcgtacgtacaatttcaaacgtcacatgttcgtcaactccaaagtatctgtgctaatgagggaagcagcagcaaaggcactccccaagtgtctgccatactcactcttaacaagggtgtcgcgttttgcaactactttcaaacaca

SEQ ID NO: 35895 - DNA, 356 bp, Homo Sapiens
atcacagtagctaactctaggaataaaaaatgatttatttttatcgaatccccaggtaatctgattatctgtcaggcacgagagataaaggctatttctttttttctcacgttagttcttacaatgttttggaaaatactaacgccaggggaacccgcagcaggaagagtgctcagccctgcctctgctgggaatacaccagcccctgaaaccaagcacagtcacatgatgggcaggatgctccaggacagagaagcctcaccgccgagggcagcaatcacgcccccgggtttgcaatcatatctctgcagtgagtggcagtgcgccagttctctgccacctttctacaggtgaca

SEQ ID NO: 35896 - DNA, 381 bp, Homo Sapiens
cctgacattcagaaatcgcggtctcacctcatggtacatggaacatttgagttagtcccataaaatcctatgcaaaacaaagtagttcaagaatttttaggtgggtagtcacatttataaggtattcctctatactcttctgggctttttcagctctgatttatttaaattttcatttagtcgttttacttttggactaaggtgcaatacagtagaagataactttgttacatttatgttataggaaaactaaggtgctgtctcctcccccttcccttcccacaaaatctgtattccccctattgctgaaatgtaacagacactacgaattttgtattctttgtcggttttttgttttgagacagggtctcactctgtcac

SEQ ID NO: 35897 - DNA, 604 bp, Homo Sapiens
agccggcatgtttctactgaacgtgtggcagctgccattctccttcgtaactgcaaattggactagatacctcagataagtggaatcatacagtgattgtctttttgtgactggcttttgttacttagtataatgtcctcaagttcacccatgttgtcatatgtatcagaattcccttcctttctaaagctgaataatattccattgtatatatgtacaacattttgtttatccactcatctgtcgatggacacttgttgcttccacctcttggctatgtgaataatgctgctatggccttggctgtacagagatctctttgacaccttgctttcaattattttggatatagcctcagaagtggaattgctgggttgtatggttagcacttgttgtcttgttttgccgagaatccctctcaaagaagaaaaaggggcggggaggatgatgcatctctgctgggagataattaccattgattacacaatcaaggtgatagtatttatggaaacttactgtttgccatgtactgcaagaagtgcttggagtcatttcacagtaaccctgtcagatagatgtgattaatcatccactttctacagag

SEQ ID NO: 35898 - DNA, 462 bp, Homo Sapiens
actgcgggtggggggggaaagtccagcagtatgcctctggaatcaaatacttgtctgctacaccgtatataccgccttccccccaaataacttagaagcataagttttcaaacttacagtattgtctgcagaagctgactcccctaacctatatgttgttttgttttttaaattgattgagaataaggattggcattacaaaggactgaagaaaaacacatgtaacattgaatcaatgatttatttaggtggttagtggaattacgtggaaagctgtagtttcatatttgtccacaagatggtgaaattctcattaggtataattttttgaaacccatataaaaccccttaatttataatctgcatttgatgctatttattataagcactgtaatttctttttacaggcccatctgctggcaaggctaaagattacgaacagttcagggtaggacgagacat

SEQ ID NO: 35899 - DNA, 359 bp, Homo Sapiens
tttgctatattgtacacacatgaacatgtcctacttcaggcttgcatttgcactttcttctactgaaatagtcttcctctagatagtgctcatgctctcacttccttcagtgtagctgctcaaatactgcctttttattgaggcctttgctgaccaacccatataaaataatagtcttccttccctgccctctctgccctaccttccccaccctgccagactgacaacccctattcctcttatcctgctctctttttctccactgaactgttcactatctgacataataggtatatagttgtttactgcctcccatagtcttccttatctgattaaatggcagcttcattctttttgta

SEQ ID NO: 35900 - DNA, 652 bp, Homo Sapiens
cagtaataggggactccccaaaacattctagcataaaacatcttatttttagaaaggtatgaataattgtcatataggaagaaacagccaagaagctccaaaagaaactagatgtcacattctgttgggcatacctaggagacatagccataaaaacaggaatgggatagtaaaggagagaaatgtggattaactcagtgaaaattctaagaggccatgagaagacattccagcctctggctttctaagtggatcatctgaataaatggtgaaaataacactgcaatgggttctacactgtgggctgagactcccaggccaggcagggtgtagcatctttctttctctggggaactgatgagatctgaggaagagagttagctcagtggtccagtgggagatctggggctatgagtttacttcacttctgtcaagtggaatgattcttgagctgtgatgtcagactagcttatgtgttttgataaccttcagagctgtcttgagagtcttacaaacctatatgtagaaaccactgatatctttaaaagctgtatgttaggtacaatgtgtataacatgctctcttttgtgaatacaagaagggaaggttatacccagcaatatttgttatattgctaggtagtcagtagaga

SEQ ID NO: 35901 - DNA, 369 bp, Homo Sapiens
agatacattctgaaggggactatgtatggaatttttgatagagtttttacttttacctctctactcttgatattctattattgaatactcttttaaaacactgatttttaaggctttatatatgttttccaggctgatgttcacatctttttttcatgaactatcagaatatagtgaacacttttcaaatatttaaggacttaatgtttaaaaagccataaaatagagagtggtaatactaccaaataattacttaaaactgaaagctaagttatcaatagtttatataagagatgttttctgaggagatgtgcatccagtgagaccgaggtagaaagtttatataattgtttttctccagtcaatatg

SEQ ID NO: 35902 - DNA, 484 bp, Homo Sapiens
cctggattgtccatgacaccaacgagctggtggccgcgcacatcaaggtcaagatgcagaccatccacctgatcgagcgttatgccatcggcgacctgtccgaagacatgcagcagttgcccggcgagaaggcggacatcaccgcggcaatgaaccaggtcaagcacaacctgtcgaccatgaacaccgagatcaagcagctggcgcaggctgcggccaatggcgacttcaccgcgcgcggcgatgccgagcagttccagttcgatttccgcatcatggtggaaagcctcaacaccttgatggccaccgccgacggcaacctgcaatcgctctcggccttgttgcagtcgatcgctgccggcgacctcaccgcgcgcatgagcggccaataccggggcgtgttcgcgcagatgcgcgacgatgccaatgccaccgccgaacaactggccagcatcgtcggccgcatccagatcgcggccgatgc

SEQ ID NO: 35903 - DNA, 504 bp, Homo Sapiens
ctctaacgctccccctttagtgcaaatagccatgggtgagacacaatccatgatgtggtcttggcctggttgggatgtggccagaggaggctactaggtaacaagaggcagaaccctggcccttggtgaggcctggagcaatcctgggcttgaaggtaccaggaatcttcctcatgccccaagaccactctgaacagcagaagagtgctgctgaatgctggcatttgattaggtttactacaaccaacctactggcagggaacaagatcccttctcccataatgtctccaagtgagcacctgggacaaggaaggaggaatctctggtcctctgagagatgagagcatccaagaggtgaagcagcactccccagcccctggctaattgttctcaggactgtgccagacaaacccctgatggaatcccagggagcctgggatcacacctggcctgctggcctctgtggctgtcctaaggtcttcataaagaaggcccccctccaac

SEQ ID NO: 35904 - DNA, 502 bp, Homo Sapiens
ctagaggatccctggtacgggaaaatcgtctgaatacatataacatcccggtggatatgatacagaattcgagctcattccaaagagcaacagaatgtcattctttgagagagttattaataacacagcctactcagggtctaattattcagtgtgcagattatacaagctcctttttcctccttctccgtctctatctttttcctagttcccactctccaaccatttcattactattctgcacttctgccagaatatgcacagtgatagatgtgttgactgtctatgggtctacaactgcccttattgtagaggaaaaaaggagttgctcacacacagggatgagagggactcacttgccttccacagatgccagagttctcatgcttagaacaccttctgggaggaggacattatttctacagcaccactgagaaaacgcacagatgcatcggtgaatatgttaccaacgcaatggttcgattctccaaaaacaagggta

SEQ ID NO: 35905 - DNA, 415 bp, Homo Sapiens
ctagtgtaaccataccgactaggccaaccatctgatctgaatctctcctcatgctcatgttttaaaaatagcattctactgtacagcaacttcatccctgaaagcacaaattattgaaacaaacacttatccttttctaatagagtatcaaaataatgatgttaacgaaagattataattgttcattattattcaagcattattatttctatcacaaacttaagctggacagagaggatttcttatcatagctgtagccaggctacaatcccacagagcaggggagcttattaccaaactacctctacagattaatgatgacaggcacatgtgtcacttcggagaaaaccacagatgttgcaattctgcattacacccctaattcaacattaactgtatggttgggactgggtac

SEQ ID NO: 35906 - DNA, 423 bp, Homo Sapiens
ttaggaaaatcggacacaatggtttgatgtcactgatagcaacgaagctgagtttccaagggtttggggcgtgtgcaagagtaaacactagagcttgagttgttatccagcatggtaagcacggaagtctttgaagaatgtaatgtaaaaagggaacagaatgtagacgcttcaagtaccaaatgatgagttggagcccagtcaacaaatgcttatccctgtgtaaaagtctctctggaagggacattccatctccatggtgcactctgaggggcactgtcaactagagataggccccatccaggtgggaggaacccctttgggatggtgagtatccaatcttgctgtgcatctgacaggatctctgaatggctaggtaatggatcccaaagcaggctcacaattataaatgagggataagtg

SEQ ID NO: 35907 - DNA, 467 bp, Homo Sapiens
atggtggaagttagaagggcaagagagtgcatatgtgcgtgagagaaaaagagagagaagtgggggtggactcactttataatcaggaacctactcctgcagtaactaactcttgcaataatgacattaattcattcatgagggcagaactctcctgacccagtcacttcttaaaggttccattgctcaacattgttgcactggagattaagtttccaacacatgaactctgggggacacattcagaccacagtacctaccatatcaggcagtaactttaatttaagttctaggctgagcatgttcatttgcatacatcatctttttatccacacagtaatgctcttcctgcatctatattgctactttcctttcccacataaaatttgggaactatactttaaaaatcaccacagatgggaagatcgtttcctgaaaacagtctataaatcacagatcatatctcc

SEQ ID NO: 35908 - DNA, 423 bp, Homo Sapiens
atgtggaaattaaactttcatgcaccacttctgaataaattaaagtactaaagcaaaacaaacaaggaacaaagacagacaacaacatggggtgaggaacaggcagaactaacccaagagtaaaatggagagaaatacgagggcgacaacaatgcagcagccctcgaagcccatcagggcatcccacaaagagtgtgaagaagaagctagaagatccgagagcaacgaacggtgtaggtttcttctactcaaaagaacgaaggggaataccgaaatgctaggaaaagaacgcagcgtacagtcagatacaatacgaattatttacacaaactcagtatgatatcgagtaccttccactcaacagaacaaaaatactcacaacacataagtcgaatggcacccatactacagacccctctgaca

SEQ ID NO: 35909 - DNA, 432 bp, Homo Sapiens
gaggattccgcctagtccaacatacgttcattcttactccacagtgacccagaatatccatcgggtgtttatgtatccaaagaagaggctactcattccatctggtaaaccaacatactcatgatttagtggaaagagccctggagtggcacagagggctgcctcaatacacacttactgagcgtctaacaatgaatgggtcaagcccttcgtaggcactggcaatgggaagatgaccaatacagacggatgaaccttgctttcaaggccttcataaagcactggagatgacaaacacggtccgatacaaagggtcgggttcaggactccaaccattattatcacagagccacgggaatacaaaggaaggataactaggggggaagccccaggagggcactcacaaagagaactctgagcaggatccagaag

SEQ ID NO: 35910 - DNA, 399 bp, Homo Sapiens
agggttagtgcttgtccaggtctccagcctggaatggcagaatccgaatgagaaaccaggtctcttgattggcaggtcacgttcatgtcagcactgagctgaagcgtgaagccgactagagtagaaactgtgttttcagagtcacttgctgtaaccaggggtaaagaaaagctgcgatatgggcccttggcttgttctgtccaggatctggtcacaggcagtattcagtattctgcataactcttaaggaattgccattgggcaggtgggttttagtcatggatgacgtggcagggacggtgtctcctgtcatctgcctggtggccgtcagggtgagagctggggggtctgccatcagcggccgagggaatctcctgcctctggggaagcattggatca

SEQ ID NO: 35911 - DNA, 381 bp, Homo Sapiens
gacgatcccccgcatgaggggcagtggatagcttattcaggggtgagcagactgttctgtgccagctggccctaatgagcagtcttcggggtgtcccatctcatctaagtgtatgacacagctggtctatacaacacacaccccactggaatgtatttgaattccttggaattgagctaacatggccctttggcaaactatgagtcttaaaaatgcagatttttgcagcaaggcatctttctgagtagctcagagctaaggtggctaatgaggatataggtctgaatcctctttgattttggtagcttcttacatcttggcagtgcaccagacacaccagagaactcagttgtgaaaatgggcattaaaagcgtaaatcta

SEQ ID NO: 35912 - DNA, 363 bp, Homo Sapiens
gttttggatttggatgtgccacttgtattaagacagccaagaagacgcccagcttcaaagtccatttcccttcgggattcttggccttgctccttggcagaactttctggcttttcccccttcatgttacgtgggtcattgaggcttggctagcaagcgtcactatgtgttcagcctcacggggcggggatcacaggatcacggggatcacgaccagcgggaatcacagcggcttgccagtgtgtgtgccaggtggctagccctcggtagggacagcctccctgactgtgcgtgacaaacccgaagaggtagcaccatccccactttgtaatgcctcctggtcaaggggggatttgaagggcg

SEQ ID NO: 35913 - DNA, 355 bp, Homo Sapiens
gaccttaagaagaggaaggccgtgacctcacttaggttctaacaggatcccccagctcttttgatgaaattaaatcgcaggggtaagggcagaaacaggacactcattcagaggcccatggggtgatagggcagtgatgatggaagctcagacccgggtgctgagatgcggtcccacctgatgtatatttgggaaataaactgatcaatgggttaggtatgtgggttatggaaaagatacgtttcgagggcagccgctagatttggggcccgaatcaacaggtgagtggctgaatacccactcttaggaacaacacatttttgcaacatgatccagctaagtctcatgtctgaat

SEQ ID NO: 35914 - DNA, 427 bp, Homo Sapiens
gaagcaaatgctcatctagtggcctttcttccttgcaaaggtctaagtcaggtcatctgctaagagaaagactgggagtgaagtggacaggtggtttggaggagagaaggcggctccatgcagttgtggagaattgggagtcctatgtgcatcttgtgtttgtcagccatcctgagtgcattatgcaattttcccctttaatcctaacaaaaactgagcaaggcctatgccttaaccctttaaaaatctaattactacctttgttgaaactaagggtgcttgagtaattcaaaccctggtccatgtgattctgagatatgaaatctaacactgtgtctgacaccgtgttcagttcattgtatgatgaatcccagcagaacccagcacttaattggcttttcagtgccctttagaactctctcccctg

SEQ ID NO: 35915 - DNA, 358 bp, Homo Sapiens
aagtcccacccagaggagcctctccctgccaacaccttgacagctcacctattttcaggtctgctgagctatgcctggctatctttctaccaagtcagggaaaaggaatcctggaaaaccacaaatccatctcttttgttccacagaaaaagtatttacttttgaaagtcaccatataaccatacatactcaatttatatgctgaatctggttgaagagctaacccacatgaaaagacacaaggagagccaaatgggagtattaccagtttaggttatttatttgatgtttagctttcatttgtctacatgatttcaaggagttttcacagtggaaatgtacagacagcaagtatact

SEQ ID NO: 35916 - DNA, 360 bp, Homo Sapiens
atatttgatggttaaaaatgagaatgatcataaatagattaaccatactgtatagataactaaccaaggagttttggcttaatgtgatttgctccataacactgtgccaatgacatttcatcagggttggcaaaattgtgaagaaaatatttgtattcagggtcaatagtgtgccgggtcacaagaggagttccaaacttcttgtttgcctcttgagaagtttttcttgttgagctgctggagtaaacactcattattatttttattaacttctacctgtgtggcttagtccaggaagctgcccaaacactattgagatggagttgttttgcttctcttcaaatgtttatctttttgcta

SEQ ID NO: 35917 - DNA, 386 bp, Homo Sapiens
tttggtgtgtcacacctattgtcttcatgcctcagccagaaataagaagagtcctcttcaaaactttgttaggctaggtcagaaagttagatgagggatgaatactgcttcagtccgttttgtgctgctgtaacaaaatccctgagactgggtcatttataaaaacagaaacctacttctcacagctctgggggccgggaagtcccggatcagggcagcagctgggctgatgacggctgctccctgcttccaagatggcaccttgaatgctgcatcctccaagaaggaggaatgctgtgtcctcacatggcagaaggcagaagggcaaggaggcaaaaggggaccaactcccttagtcaagtctctgtggaagggcacctaatcca

SEQ ID NO: 35918 - DNA, 351 bp, Homo Sapiens
gcaaagaatcatcagcaaatatcacgaaaaaagcagcactaaaatggactaacagaagaagtagaagagaaccttaaaaatgctaattattgtcttcagaaattgttaacaggacatcagattcataagtcaaaaagccaacttccctgaaaaaggaaagggaggacaagaaagtttctggaagttagagcatgattaatcaaaactgaaactcagaggaagggttgaagagcaaaatggacagtccctgaaatcaggtgatctgaaagatagccaaggatttctcagaacacaagataaaagagggatgaaaagtgaaaaagaaattagaagatatggataataaatcca

SEQ ID NO: 35919 - DNA, 385 bp, Homo Sapiens
aataaaaatccctatggaaacagcatctttgtattttagttatgttgatatgtaattaaatacattctacaatttgaatcctgatttcataggcaacaaaggaggaacatgttaactatttttcactctaaacttcctgaaaaggtagccttgttttctgtctctcttcctcccttcccttgcacaatccagcccataacaatttggttgagcttcacctgctgatgagaccatccttgccaaggttatcagcgatgtccagattgttaggattaacggccttcatctcaggtccttctgcagcagcttacctgagcatctggcactctctctagcatttgtctttgaaactctctccctccctgactctggcagggcaggggta

SEQ ID NO: 35920 - DNA, 641 bp, Homo Sapiens
tgctgatgactatttgttgaacttaataagtgcacatttaaacatatacatacatttaaaaatttatttttttaatggcaaagcctgttgatgcttaaattgtaactgatgtttgcctaaaagtgaggacagttcactgggagctgagggagaggagcctactcagtgaactcctacccaacctccaggacccatctcaaattgtccctattctgtaaagccttctcccaccgttctggttgtaacctaatgttcatatggcggggcatctcttcacaacaatcaatcttctctaaaccaggagctaatcctagaggaatgcaggaacttgttgcacgaagcatgggttagtatgtgcttattaaacactcaatggttgcctaagacagacaggtacacacactcacaccctcacagtccagcagaagacactaatgcccacccccaaacaggatgtcagttcttctcaggcaacaggatccaggcacttggcttattatcaaaagagatcactttcaacatcccagcccaagcctcctcctttaacacaaatcacagccagaagagatcagagcgggccagagcaaactcagtttccagtgtccacccgaggaggctccccagtccttttgaggtcactc

SEQ ID NO: 35921 - DNA, 549 bp, Homo Sapiens
tgactacactacctaggttaactttataaaaactgacattggataaattcaatatgtgaataaagatcctcaagggaatctactttgtattatcaaaggattattcctatgtacaaaaagatttataatactagtctcttaaataggctcttcttttgagagcatttacatttgaatacagattagctattttctgctaagagtctagaagtcaaagaaatggtgtatagggtgaatcccagattaaacatgaaacataaataatatgacatctctgaaataatcataagtccatgggaaaatataaccacttaatgtaaatacatttttgccaggaaattatcatagagaaaaaggtatttattattatgacatttgtatttaactactgtatcataaatgccatttgagatctaataatgataaatctgaccctgaatctgacacatcctaaaagctaagcaattattatcacctaagtagtatttgtatggaagagtgccataaatgctaaaacagtcagtgactatacttatataaaatgtgaga

SEQ ID NO: 35922 - DNA, 663 bp, Homo Sapiens
ctgtgactatttgtgggactacaactgtacaattttagctcaagaattatgttcatttctgccaggatgaaaccagcaagcttagttcatggcttggaattctgatagttaatggggttatagaaccagcactggtcaaccaggaaagccaagtcagaagatcagccctcaaccgttggctaggtgcctgatgagaagtgcaaaatatagaagattcagaccaatgggttgaaatttcttacatcatatatactggaaatgtaggaatttaagtatattggtgtattcatggcccttaaagcccaaatcaagaccagaaaagttgcctagataagatgtgagtaaaccctaagtatcactcttcttcctcgacccagtcttccagcccagcccttttatcattaacttttctcaaccaaaatctggatagaactgtattttatggttacacacatgcacagattacacattatagtccattggcgtaattcatccatctgcctcagacctgccttaaccctgaagagtagttcagggtcatctcacatgtttaacagcatcaattccaacttgaactaagtagaataaacagatcccagacctcctaacttagagacccagctttcaatctttttctatctcctttcacaatagtcgcagagg

SEQ ID NO: 35923 - DNA, 479 bp, Homo Sapiens
tctagaggatcccttttccttggcatcacagcctctgcagacaagagcctccactaccaaagacagaggctgtgatgccaaggaaaaactcaggcccgacagtggaaagtagtaggcaatgaccccaatttggccataaaccaaccatgcagctttgggcatgcctctcacctttatgtcttccatgatgagtatgatgatattgcccatctctcagcaatagttaactactcattcttcaagacctgacttacacattgtgttctacacaaagccttccctcacgtccccaagatgtagtataatcctcacctgttttccaatggtgcattggcatgctgctttgacaattacattttaattaatgctataagcctcccccagtgagtacgcactcttctacaacacgtttctattaccaatgcattgactgtttctagcatgtaacagtgctcaaggaatgtttgtttggaaggcgg

SEQ ID NO: 35924 - DNA, 353 bp, Homo Sapiens
taattaacttgaactcaattatgccctaaactggtgaaagaagtaatgagaatctgtgacccccccatccctccccagcttcgctttccatttaccactaccccgtctctatcccactcccaactcgtggcactatatagataccagttacatctttatttttatagttttggactagcttatcagcctttttaatctctgcaccataggcaatagaacagcatactggctgttctattgtccaagatgtaagatctcctcaacatttacacacattttcactttaaagaaataccactaccaagaaaataaaagacagcccacaggatgggcagaaactgtatataaatcat

SEQ ID NO: 35925 - DNA, 512 bp, Homo Sapiens
agtgcttatcgaagatgatctcatttgatcttgaaaactaccttttgaagccagccaagtcattatgatccgtatgctgtagaaggtggaattggagctcacagaagcaaaatgacaaaggtgacaaagctgcagcagagctggggtttcaaccctgtcagtccaaaaacaagcccctgctcttcccaccagggacttcctgcagccttctgaacctattacgcattttcctgcctctgtgtctgcagatgctgttcttctacctcaaatgccttgatccttattctcttcacctggacagttcttcttcatcatccaagatccagctccttcctgccttctttaagaagccttcatggacctctcccctgggttatgccatcatagccactccatgcaattctctctcatagcacttatcttgctacattgaactgtctgtctctctaacagagtgtgagcccgccttgaaggtaggtaccctagcctttaccttgacatccccatattcc

SEQ ID NO: 35926 - DNA, 502 bp, Homo Sapiens
tggcccagcagtatgattgaaaggttacgaagaaaacacaggaagagaaatccaggctacaattgttatttgcaagttagtgactggtcctggaacctgacgctcccttcatgggtcagcatgcccagagtttttgtggttcatttaccccagaaggacttagtaccaaacatttcacagatttccgttataaaggtctttacaaacacagacccatgcaaaaggcccaactatcaccttcaacaacaatgcaatggccttccatggccttacagtagggccaagtcagcaaggacctaaacagcctccagtgtgactttgtcacagttcgcgcacctggttgttaatggccttcacctgacataaagcaaattgcctgtcacggatcatctgagcaaaagaagtcaaggaaattcaagtaaaaggaggaaaaatgtatgcatatgtaaatgcttactccaaagtcacctcatctaaagctcttgctcagaaagcaagtcag

SEQ ID NO: 35927 - DNA, 390 bp, Homo Sapiens
aaaaaaagaaagtttatgtgtagtaacatttgcacaactagggcctttaagactgaggaaatactccaagctctgagcaaactcagtaagtataaatccatatgtagacataccacagtaaaatgcaagatactaaagactaatacaatattttcaaatcaaccagagatggaaggcagattacctgcaaaggaaggacaatgactttatcacagacttctcttcatcaacgagaacagacaatacaggaataacatctcccaagttgtgagggagactaacagatgacatgaaattctacgaccaaataaagcataattcaatgggcagcagttaacagaattaagctgtttccagacatctatggagagatttaactcaaagatgtca

SEQ ID NO: 35928 - DNA, 484 bp, Homo Sapiens
cgacccgcattatgattaattgaagctatacagagaaaaagttaatgggagggctatctgggatacttatcctactatcaagcacttcaaagcactgagcttggggctaccaggcttgctttcctaggaactagtcctgtgatctttcaccatttaacctttttgtacttcatttctataattcggaaaatgatgatcatatccttctctaactgataaatggtttgaaattcaaatgaggtaacacatgtaaaaggatgctataaactttacaatgccatacaaatgtaaaatgtcactgttttctaccacttaactcatgattttcttaaaaggtcttaagagcagtttcttattggattcataaattttgaacaaacatttgaataaagttaaaaagtatatacatatttaagcttgaatattttacatttaattttatgagcagtatacaatatttaccatttattaggtaagggtaccg

SEQ ID NO: 35929 - DNA, 411 bp, Homo Sapiens
cccgtaagagccagtttctttgttcttgattcctttttgctgtctttcttacaggtcggggctgccttattaaaccccatccttgggttaggtatgtgttctccttgcatctcagctcctcagggagctccccgggtggcccacttgcttccttggctgtctctgccctgccttgagggagcatgcgtgatgatgcaaccagaaacacgtttaggagagctcttcccccctccatatgtcgtatataatagggagcttggagtcatgcccttcaggtctctaacatctttgaacactaccttctcacagtcagtggttcctgggtctgactgcattagtataatctgagataatctgagatccttgttaaaaatatagacatctggggtgtgcttccagagggactgaatc

SEQ ID NO: 35930 - DNA, 352 bp, Homo Sapiens
ctgccagtcagtatgattctaaagagaagtttttaataaataagcatttaaaagaaactagggttacttgttatgtttaaaatatatgctattctcacacaaaatgaaactgctgaaatccaaatttagaagcaaagaatagacttaaattgttaaacatagaaaatataaatatatactttgaagaacaggattaggcatgagccactgtgcccagccacaaataatttatctaagaagtgtttccaaactcattacatttgcaggaatcttcttcaatatacattccctgatgttgcacaaagttgggcaaccgctttagggtttccttctaatcatacttgcgggcagc

SEQ ID NO: 35931 - DNA, 377 bp, Homo Sapiens
tctagaggatccctgcacacgcgagcgacagacatcctattaacaaaagcactcaccaatggtactcaaaatgtaaaatctaacctgtggtatatctgggagatatcacatccttctcatggctatgtgaaggctagatttgaaagagtaagtatgcaaatagaagaccagtcaaaaagataccagtttttcacaagaaaggcaatggagtcctgaccgtgagatagagagtacattcaaagaattggttattactgagtatggtatggagagagagggagagtgactcttaggtttcttacgggtgcaccatcaactgaggcagatcataccaggggaatattgatgcaggattttttgctgcttagttcgctgaa

SEQ ID NO: 35932 - DNA, 409 bp, Homo Sapiens
aagatcggcgattatggtctggtttctcggcgtgtgcaatgtggaccgtgaagatcggcgattttgggttgctcagtatggggactcggcgtgtgcagtctggacattcggcgtgtgcagtgtggattctcggcgtgtgcagtatggtctctcggcgtgtgcagtgtggattttcggcgtgtgcacgtgaagatcggcgataacggattggagcctcggcgtgtcgtgaagatcggcgagattgcactcgtgacgatcggcgatttcggactcgcggcgtgtggagcctcggcgtgtgcatgcacacgccgaggggaccaaactgcacacgcaagcgggacagattctgatggccatggtggcgatatctatggatattcggcgtgagtatggaggttcggcgtgtgca

SEQ ID NO: 35933 - DNA, 445 bp, Homo Sapiens
tctgttagatcctgttagttaagggctgtgagttctgtattttggctgaatttctggtctagttttttagtcagttattgagagaggggtattaaagtcttcagctataaatgtgggttggtctctttctccttttagtcctatcagatggggggtcacttattttgcagctctgttcttgggtgtatacacatttcagattgctgtatcttctcagtagattgaccctcttaccatgatggaatgtccctctttgtctccagtaattttctttgctctgaagttacttcatctcatattaatataagccattcctacttacatttgattaatgtttacatgatgcattttttcctccctttacttcaacttgtctatatcacatttgaagtgagtttcttgtggataagcatataggtgggtcaagggtgcgtcagaacataag

SEQ ID NO: 35934 - DNA, 424 bp, Homo Sapiens
ggcgttcagaggtccccttatgtcgacccaccagatgaagtgtttagattatacagtagttaggctatactactacttaataaattggttttccccaacttggcttcttgcctgtcttaaagcagccttcttttcttgaacttaggaagaaaactgaataaaataaaattattattaaccaacattatatattaagctcataagtttaacattctagtttacagttcctaaaatgatagaatatgaatcatatgggccttaaataagttatctggtctacttaagtttggtaaatatttatttctgcataaaataggatagtatgttgtcatgtctgaatttatcctaagtttcttgatagtagagcagactctatccagtgaagggaggaggggcagaacataaggggtagcgaggacgaata

SEQ ID NO: 35935 - DNA, 432 bp, Homo Sapiens
ttatgtctgaccacctaatgtctaacagcaataattcagcggtaggttgtaagagctataaaaagtggaaagttgggtatgtcagaatgcataactggagacagggcctagtctgaaggaatagtggagagggtgggggtcagtgaaggtgggcatgtggaattgacattttagatgaactttaatgtgtaagtgggaatggtcaagtgaatggggggagagaaggaaaatttatggagagtaggcaatgccaagcaaatttggtagagggaatagtctgtccagaggcactgagagtaaaaggggcatatttgcacttgacaaatggaaagaaagcctgtgaatctgcataacaaagaggaagggagagggtgaaatagatggtgggtgagaaaataagggtgggtcagaacataaggggtaccgagctcg

SEQ ID NO: 35936 - DNA, 487 bp, Homo Sapiens
acacccccatcctgggttgatgtgttcacactcagctgagtcaaacaggatgtggctggggaggcggttgtcaccgagccatctaaatctcggtgatggctggtgctggatgcacagggacgtggtcctggctctgggggacaggtagggggatgtccatggggatgtacaagaacattctcctccaggggcagacacagtttagcccctaaattgtgccagagactgtgccgggagccaggcccagggacacaacctgcgggctctgctttctggagctcaccgaaccgtgagcaggatggctgggacacaaggagtgtccagggagcttccccagcagtggaagtacaatttcatcacgccaggaaggggagagaaaggcaggccacgtggaggcagcagcgttcagagctgccaggaacctgtcgctctggggggacggtggctatctccatggaataggatgtacacgttggagccggggcat

SEQ ID NO: 35937 - DNA, 375 bp, Homo Sapiens
ccggccataccaccttctctttatctattcatctgttgctggacactttgattgcttccaaatcttggctattgtgaacagtgctacaacaaacatgggagtgtggatacctgtttgatacacttacttcctttcttttgggtatatacccaccagcgagattgctggatcatatggtaactctaattttagtcttttgagaaacctttaaactgttttccatagtggttttactaatttatattcccacctgcggtgtacagtggttcccgtttctccacatcctcaccagcatttgttactacctgtcttttgtatataagctgttttaactgggatgagatgatatcttattttagttttgatttgcatttc

SEQ ID NO: 35938 - DNA, 363 bp, Homo Sapiens
ccctgcaattcagactaaccccgcttattcttgtgaaccaacaagtgatctctggctgctgctcagaagaaacaagacagatgggtaatgtaaaaatctggattagtattctaattctgggcaggtattggaatcatctagtgactccatattagcttggtttcaacaattgcccagttcatggaaagccttcttatttagtttacttgggatagtattacttatttagctttactcttgtggaatatattgttattgtactctatatgtaggaatgcaggataagcttaatcaatgttctcttaaattgaacacattaattttcctgatattactttctgccagagctcaagagttatgagt

SEQ ID NO: 35939 - DNA, 362 bp, Homo Sapiens
gctccgccgtcgctgctccagagactgcatgtccaggcagacagcgctgacattttctctcctgcgtggggaccagcgctgagccatacaggctccctcagggtggggtctcttgcgcgcctctcgccttcccacggcgggcatctggccctggctgcctcctgcgtgcccctcgccttcccacggtgggcacccggctggggcacggggacatctgccatctggccagccccttctccccttggggcttaggctgactccccacgaggccttcctggcctcctgtctgaagcgggtccctttccttactggtccctctccaaagccctggctgtaagactcggggaccccagcatctgcac

SEQ ID NO: 35940 - DNA, 485 bp, Homo Sapiens
gtttaatctatacatttatatattaagtatatgattatgtatggcttgcaatgttgactgacttgtggagtggcttcagcctgtgtgcccgaggctctgcctcctgagtgaacaggaagtactaaggagaattgtctttttgggaactccatgtggctagtggtgtttatgattgaaattgcatcaataaaagtctgactttgtggaaagacacaaacgtgcggggacctggttatctttgaatttgccattccgcttgaaattccagtcatgaatgaagttcagagaacacttctgttaggagtaccacctaacctgcagttctcctacatgaatgctctctcggcatgcagagccatgcaagatatactagacgcgtaattatcaggtacccataaggtaacatttatggcaaaacctgaaaaacataccaagagaaaggggataggaatgccggatagtaggtagggacagtgggaatctcg

SEQ ID NO: 35941 - DNA, 424 bp, Homo Sapiens
tgctgaggtggggctgggcaggtgccatggggctcctacaagaaggcagacaagaattcagaggtccaataatgatagtctagaagcaaagtggcaggggacaaaataaaattcaaagtccaggctcctgtcgccccctgcagcctaattttcacacgacagtccaagagatcctgctcacatctgaagtccttccagttccttctctgctcaggccctcctgttgcttgtctcactcttgagtgccaaggtctcagcttcactgcacagggttgcgggggagagaacagggaagggggacagagcatactgtcttggagggtagaggagcacacaagactctgtgctggggaccaatggggaagtcagtacacactgcactgagccgtcaggtacataagaagcacgaacagaatgttctggg

SEQ ID NO: 35942 - DNA, 477 bp, Homo Sapiens
atgctggtagtttctacctggaagagcagacggcttcttattgggtttttaaatgtttcttgtaaatttaggtgttaggagtttttctttatcattctaggagcagaatttgctctgagggaggtcaggattaattggtatggaaagaggccactaacattgaaagttaaatatttttatttagctttgacttaatggatagggatagggtttcagactagaatttaactcaaatggaaggaaaaacactgtgtaagttagggtaagggaaagagagatcctgtagatatgattcatcaattttaggttatcttttgggtggaatgaaaaactttccaggtgaccctgtcagaaggtgatcgtgaattgaaaataaaatttatcctgtcccacccccagatttccaggtttactttggctggtttgtcacaaagctccctgccctttagataaatcacctttcgattggaatattcc

SEQ ID NO: 35943 - DNA, 378 bp, Homo Sapiens
tgctgagatcacgcaaaaaaaataacttcttatgtttacaaatttatactgaaatacacaaagacaaagacaaggtctgactgagatttgccttaaaatactttaaaggggttaaaaaatgaagcaaatacggattctggataatatatgaatattttattctctcaatttgggtatgttacaaaattataatttttaacttgcatgatacaactaatcaaagcataagtgaggaactctagagcttctattagggaattacaaaacataaaagcatcaatgagaaatcctagagcctctattagagaattatataatataatatagcacaagtatgtaagattcacttgctagcagattccaaaacaaataaatgat

SEQ ID NO: 35944 - DNA, 479 bp, Homo Sapiens
ggtgacagcaggaaatgggaaggatgttgttgaggatggaatatagagtgataactgtgaagatatggaaagacttagcgagagagtgacaggttagtggttttgacctaattttggggaacaaggttcatatagacttttcctcttctattatatggaaagtaccataaaaatatgattagtaataatcgtgtgtatcagtttatcaatttttctgtagccaactctgcttttatgtacaacaaatgagaaagcagcccctaaaatatgccagagtgaagaacatcttcacgttttgtgtgttcagttggaagtgtttcagtaatcatccagggctgcttccacagtctccgtgttgatattgtagcagtttctcaggtttgtgggcaagtgactatagctattccacttggtggacaaagcagaatgcatgatcaggccgtctttggtgcagttcacagaatcatcacctgtgcctg

SEQ ID NO: 35945 - DNA, 429 bp, Homo Sapiens
atctaaatgaggcaaccacggttgggctgggtgactcgagaatttggatttgtcagactggatgagtcagtggcttggccggggcccaggtaagcttgaggtatcgtgagggaagccctgcttctggagtccaaccaaaatgtgctgggagggtaccagacccaccttgcggccgtgtgactgtgggccccacgtccttctgtgtgacagggggtgagtctgtcccccattcaggcctcgcactcagatggaacacgatggcaaacagggagtgactccacagtaatcaaaagaaatgaactagatgttcaggaatcaacggagagatctccaacacatgagcatcgtcggatagggtggaaaaaggcaagctgcaagggaactttaaaaacatacacaaagcaaagcgcggtagctcacacctggaat

SEQ ID NO: 35946 - DNA, 374 bp, Homo Sapiens
aggtagccattaaaattcctcctcctggtgcacagaccctttgtaatccccactcttgggtttagaacggaccagtgaatgtgatgggatagtcactgctgtgcttaggttatgttatatggcaaaggtaaagagattatgcaaatgtaattaggttaatcaaatgggaaatcaccctgagtgggtctgagctaattaggtgggccctagtaaagagagtccagatcttgtatgaaaagagaggttctgagtgatagagatccttttattgaccttgaaggaatctgtttcgagctgcctatggaggggaccctgtggcaaggactcaaggagatataagcagtgtcccgctgacagccaggaacaaagtgtgg

SEQ ID NO: 35947 - DNA, 656 bp, Homo Sapiens
aaactaaactcccctgaaaccccaagcatctctaattccaagagttaagtaacaagaaatggcataagaggggtgccaagggcttccccagtcccctcccaacttccctatatagtacagagcatcttgttctggccccttcatgacagaagggctaggctctgttccaccaccaagtcacaacaccaacgatcctagaattacaaagacattttatatggattttgaacagaatggagaggcagaggaacatctttgcatttagacataattatccatcccacttccactgatgagtcccttctttccaacttgacccgaccacacaagacccactctggagccctttattccttcccaatggtcccataataggaatggcacacagtgcctgccacatggggctgctaggttcatcctcctgtgctctggcctgatgagcttctgcttctcttctaacaaggaatctcccttacaccatgacccatacagggaaaagaccaaaagttccagagaacaaaaacaccatcaaggcagaaaggcaggaggtgaagtgaattctaggaatttctctaaaagctaatccttgaccaagaaggccccagctataaagaaggcaacgacgcttcccactctcagctcacagttggagcctg

SEQ ID NO: 35948 - DNA, 467 bp, Homo Sapiens
attgaagtgtttgcaaatgcctcttaaaccaagcactacaaatattaagaaactgagtcagcttctcaattaagtgaaattactttaaaccaacacaccaatatcagtgtttttaaccatttttgagaaattgcagacccctttgaaagctaggggcccctctccaaaaaattctgcatgtaacttccaaaagttcattgtcctccccattccccaaaagtccatttactcctctggtcaaaatttcaaaatgataaaaggataagctatagcaaggcaggaaaatgaagaaacaagcacacatgggattagagcatgttacaaaaaagtgcacaggttaaccagctttttcctttgcttgtatactcatggtctgtatctgtattaactctactaattaaaaaaggtaaataaaaaagaaataacatgtaaatattagatatgtgatctcaatatattaggagcca

SEQ ID NO: 35949 - DNA, 437 bp, Homo Sapiens
ttatgttaaaataaaggtcatcaaaagatattttcctaaacctttcctttaccagaaatatctctagtgtcacatggtcctttctcccttcttgcttttgtaggaacccaaagctaatctgtccctgatccggattgcacgcacctgtgccttttggggcccttctgcattagttcttccttctcttctaacctcaaaaatgtgttttctctattggctctttccctttaacatagaagtatactcacgcttttgttgaatcttgaaataaaaggcttcctttaccacatatctccctttaatactacatctctcttctcagccaaatacttgggaagagaagccctgagtttgtgtcattgttttctcacctccagttcactgctttgcccactgcctgacatccagctcgctcacacacacacccaagcccaatc

SEQ ID NO: 35950 - DNA, 595 bp, Homo Sapiens
ataagtctggttctttccaaagtatattcttaatcatggaagcaaagaacaacatttattcagtaaatttttcagtaaatattcagtaatattcagtaaatattctcaatgcaactccaaacacttcccactccaggacatagttctttcttcaggctggctaacattttgcaagtattttgcagatactctacctagatcaccaactacagaactgaccagatctgactcatagaatctttttgccttctacttgggtagctattacaatcgctccctcctttgctaacccagttacccatgactggttgaatagcatggactccgatgcttgctatttgaatttgatcgcccagctgctatgttggctagaagaaataattttattctctctcatctttttttccccatggactcaatagattagatgcctttttcttcaataactttccatattcaaagggtcctcctgtaagtttcaatggtagccattagaagcattagttgattagaagagcagaatgagaacattaggaatttttattttctaattttacttcgttggaattaaggtagaaggtttgggtagttagat

SEQ ID NO: 35951 - DNA, 379 bp, Homo Sapiens
ctagctcggtaccccagcggactatctccgttgcggctggattcttcccaggcccttaccgctgccttagaacaagctggcgggcagcaacctgacgagggttccggaggcggactcatagatcgggctcgagcggaatatgacaagtacttcacgcccgggggatcagagcgtcgcaacgtcttcgcagatcgcgacgagctcgaggagatccgcagcaaccttgctaaaggacaagagaggctcgcagaggtcgacgaagtcgtcgactccctcagcagaatcaacgaacaaatcagccacgatcagaccggggtggcatccaaaaagaccgactgccaaaaagctgaggctgcccttgcgagcctcaccgaactcg

SEQ ID NO: 35952 - DNA, 371 bp, Homo Sapiens
aggtatatagtataatctcaatttatgcttttgcccttagatgccagaagttaatattctttcaatacttattctcgtagaagcaaaagagatcctgtttgtgtgatgttcctacagcctctgctgtactgtattatgaaagctcaagaaataggagttaatgatgaggcacagcaggaagaaaaatgtctctaagatgccaaacagggaaaatttaggaagaaataagaaccaaaaaataaatcagttgatcagggtaaaaaatgtcttatgctctgaacttataactctatggagtagtttccactaatgatctcagtgtctacttaactaatcatgtacttttctagccagaaagacagtacttgtag

SEQ ID NO: 35953 - DNA, 596 bp, Homo Sapiens
tccccagctatgatcatcgcaggctcctgtattattttcctatttctgctgtaacaaatgctacaagcttagtgatttaaagcaacacaaatacagcatcttacagttctacagactcaacaggggtctcactggctaaaatacaggtgttggcagagctgtgttccttctgggggtttttgggtgaatctatttccttcccttttctggcttctggaggccacctgcattgcttggttcatggccctgtgtgactctgacttctacttccattttgttgttgttgttgttacctctcccactctgactcacctatctcccactttcagttagtaaggcccttgtgattacactgggctcatttagatgatgcaggataatctccccatttcgagatcttaatcacatctacgaaatcccttttggtcatataaggtaacaatatccacaggttctgggaattaggacatggacaccttttgtgggggggcatgattctgcctgtcatagctcctggaggggaaagtagaattcgtttttattgcctgggttttcataggaaatcgatttgttgctgaaatccctcaaggactatt

SEQ ID NO: 35954 - DNA, 412 bp, Homo Sapiens
cacgatatggtcgggctccccgcctgctgaactccaagtctgccccctgcatttccctgtgcaaggggagaaggagcagtaggagaccctcatgcaggagggagggagccgcagtcctcaggggaagggacacagggagaggcaggggcacagaggcaggaaaggatggccagagcccagcctactttctgctgagctccttggcccggcaggtggcagcctccacggcgctcatggtggctgctcgcagcccgccctgctccagggcgtggagtccatagatggtggtgccacccggggtgcaccacgtctgagcgcagctgggctgggtgttggccctcgtgcagcagcatcttggccgtcccccagcagggtctgggcagagatgcggtgggccaggctgctgggcatg

SEQ ID NO: 35955 - DNA, 614 bp, Homo Sapiens
agttatgactgtgtagtcttccatggtggtatatgcatttatctcacttcctccatatacaaataacacgtacagggattaataaatgcagaaagccagtgagacaaagggactctataaagcctgtggatactcgtgattaacctagaagtccttacatgctgaaacctaagctactattgagagacattgagaagcaaccttattttcatttcagaacctccaactgactcaacagtgagagtgaggctaagaatagtaggatttattagtcatgtgtttaaagtgaacttggatcccagatgcctcctcacactccagtaaaaccagtagtttattctgtggcgaatgtgaactagagaactcggttggggataccaaggtacagacagagggtgaaagatgaaatgaaatgcttagtaaacagtaagacaaccctggctgacttcttccacttattgccaaagttttggcagtcagctttacattctctaaacatggaatgggaagatacttccttggagaacctgactgatctatgcaaaagaccgatagacactgatggctggggtctgacagcaggtactctgtgcagtgaggcccattgtcaccag

SEQ ID NO: 35956 - DNA, 603 bp, Homo Sapiens
tcgcaaacccagtcgctgaatgcgggaatacggtcatcagcgttgcatgaataagggcatttttccgttgcaaagcagcatgcgagccggtaattttcactgcaggcccgccagccgccgaagcacgtatgctcccctccccattacgacttcaggctggcgggccttcttgtgtccgcggattgcgaagatgcaaggcggacacaaaaaagcccccattccagggggctttttgcgtcttccgtccgccgatcagttgggttcccaaccggtttccggcaagtcgaacaccagtacttcggccttgtcgccgttggcgatgcgcacctgcggctcggcctgcatcatcagcgcgtcgccggccgacacgcggcggccattgacatcgactttgccgcgcaggaaatgcaaccataggccagtcggccgtcacccagcgacaagctccggggttccctcgccatcgaacaggctggcatacatgcgcgcgtcctgctggatcgccaaccgaaccttccgcgccgtgggactgaccacacgcgcagttgcgcgcttcccctgttcgcgaagtcttctgtcgtcgaaggttgatcccagttgtcg

SEQ ID NO: 35957 - DNA, 603 bp, Homo Sapiens
tcttgtcagtaatgagtcactaactattcatgagcattgctcttggcgagtataataaactcacctatgctattaccttgctctaccgactgagtaaatcaaatatgctatccctctacatggacagtcagttcccaagatcagtgtttgaccagttgttcgtgataccaaagcgctcctcctagcttcttcttttactggttctctccagcatactagctggactactagtttatcctgcatctccagtgaatctaaccagtctcttccctattgctttgtccaacaacctccgcagtattattgactttctccacactcctgagcttctccatactttgtgcctttaggaaaagatcaggagctacctgttttacagcctacttctgcttccagataaaacatctgagccactctctacagctagagtggggacaatggtgtgtttatctgaatggcatccctgctttacgaagtggagtacccacgggaaagggaggctgtagacttagggcttctcggcttgaaaagcaagggtaaaggtgatcagagcgccagtattttcagcagtgccttgcccaaggcaaagttccatcctaagag

SEQ ID NO: 35958 - DNA, 354 bp, Homo Sapiens
agcggagttcgtagtcctttgtagtcaaaatcttggaatgttaaacctccaggtccaccgtcttacctgacagctaaggaaattaagctcagactagagaaatgatttactcaagaacacatgggaagtaaattagtggattgacactcctggctccagtgtcactccttgaagttttaaagcctacctgatctgaaaatcactccctttccctgccctccttgtccttcggtgaaactgtccaaaaccagggcactcaggcaaggagggataaagtgaggagctctgatcatgtcataaccaagctttggtgcctgcaaagttcatttattgggcagcaggacctactcatgt

SEQ ID NO: 35959 - DNA, 491 bp, Homo Sapiens
agagtataaatgggagagaacacgaactgaggtggggtgcaggagcaaggcaggccctcaaagtgtgcatcgatccttcaaaagccagctgcagtatacggccacctgcgatccctgggtgcccgccatcagcccttgcccctactctcttgccttggatacggacagaagttgacacttgggggctcttggagaaccatttggagcacgtggaactcaagagtgaatcacttattttttgctgtgtggcagcagggcctcactagacaggacatattcgggggcttgcacccaggtaggggagtggaagtacctcctctcaccccacacacgggaattggagatgaggcagccgatcctgccctgcttgagtctcagctgtcattttccaggctggcagcaccagcgaggagaacccgtgtgtccgccgggctttctttaaaatgcaccgagtgcaacccaagtcctccttgtgtaaactttctccaaat

SEQ ID NO: 35960 - DNA, 593 bp, Homo Sapiens
atgagcagttctccaaactcttcgctatcgtgaaatagtgcatgtaactatacacagcaagtgcagggtatcctttgatatactgatttcttttcttttgaatactcagtagtgggactgctggattatatagtatttctatttttagtttatttgagaaatgtccagttttccacagaggttgtactaatttacagtcccaccgatgccgtattaagagttttctttgactgctggattacatagtatttctatttttagtttatttgagaaatgtccagttttccacagtggttatactaattgacagtcccaccaacaccgtattaagagttctcttttctctgcctctttgctggcatctgttattttttgtctttttaacagtagccattacaactgggataagatatctcattgtggttttgatttgcatttccctgatgattaatgatgttgagcaatttttcacatgcctgctggacatctgcatgtcttctttcgagaaatgtctatttgtgtcctttgctcacttttgtcttttttgagatgtaatttcgctcttgttgcccaggctgcagtgccaggcaatg

SEQ ID NO: 35961 - DNA, 566 bp, Homo Sapiens
agacaactatgatactgtgtgtgggggagtctagatcgtaaaatagcttccaaatagagttggtgccctctctcttccttgaagtgatggtaattaatttgggggtaagaaaaatagagcttgttcatcaaactatttttctgttccaattaaacaacaacaactctaatatatagttcactgggtgaaagagaattaggtagcaatttttcttcataaaaggcatggaacatcagtaaatagaggatcaacaataaccataatctaaactagttaaatgccacactgaatggtctgaaggccagggcactcaaaggaaatctgaaaatgcacacgtctttattcctgtttcttccaattgaatagaacctgctttatttatccgttaagtgggaatatacaacagctttttgacaaagtcataaacttccttcttcaagtattctagacaaatcataaagccagtggttgctttataaaggcccacatgaagtgtgtagagctttggactggaaagcagttaaatttagggtaaaggggtaaatatttcataggaagcaaatgct

SEQ ID NO: 35962 - DNA, 681 bp, Homo Sapiens
caattaaaataaatggcccataaagccaaacagacactgagtcttcatgttggtgtaaattcctttacacatttcataatgtcttctatgatattggtttacttttgggaattgaaacctttacagaaaactatcagtttcactaagattttaccatgaaattatatattagatcatcttcatttatttaataaagtgttaaacacaaagttatttctaattttatttgggttttctatgttttaaaaattaagactgcgtattctttccccgacaaaatccagctctgggattcattaatgtattcgaatattttttggttttctatttacttttcaatatgatcttttttcatttaatatgatctatcattttatgatattccaatggcctcttttgggtataaggtggaatcacattcacaggtcagcctgagatccaccggctgatagccctgccctggggccagcagacccttgggctcctttcgactgcttggctccggttgcgagactgttggccacccaaacctctcctctcaagagccctattcttatctcacccttccacaaggcagtgagatctaaggcaggaaacccatcctggtctcatgaccatgagcagctcagaagccaattggcccaacatgtagatgggggagcagaaagaataaacatgggg

SEQ ID NO: 35963 - DNA, 469 bp, Homo Sapiens
tctcccctatgacccaacaactaatgattgtctataccatcttcggaagcctacaaatatatctcattgggccctcaaaacatactacagggtttggaaactattagcattcaggatccaagagagaaataaccacaatgaatatgtgaaatctgtttgggtgtggattagaaaaaaatgaaaccataaaaagacatttctgagaaaagagccttgagaagcaaagttaaacaattattaattttatagatgtgacaataccactgtagttatattatactctcccatcctcacctctaaaagattccctgagtgtattaatacgttcttaagtatttaggagtgaaatcccatgaggactgggcttgctttaaaatattccagggaggtagaggtagaacaatggagaagtatagatgcaagattggcaaaatgctgttatcagagctaggtgataggccaggtaaaa

SEQ ID NO: 35964 - DNA, 440 bp, Homo Sapiens
ggcgtagtcacagtcctgcagaaaagatatagagagattgctgcatacctggatgacttcaaggtagtaaagctataacttttgaggggttataatttccaacacactctctcactgagtctaaactttttcatctaattttcttttgtttgcatgttgaggtgcatttggcagagggctgaatttttcacatataaaaacatatatgaaacatttttcaatacaagtcaaatataataaacacacattttcttgaggatagacatcatcctttatcacttccctctgtaaaaccaccatcaaacccaaccaagactgaatgacagaactagaaacatttaacaacggcatcatcatgccttaagcttagtacacaaaatagcgttgtgtttaagggttgaaacgctttctatgttgtaagttttccaagaggtacaagt

SEQ ID NO: 35965 - DNA, 420 bp, Homo Sapiens
catatcagatgaagagaaaacttgactccaacatcttaccacaactctggtttcttcctgcagaattcattttcagaggaaaatgatgaatcatccctgtctgtgaaccactgtgctttccttgagggtggcattgtaggttgacaccagcaaagactcagagtgacttgagcattggagatccttctacttggctgctgtattcatgccttatgttggtttgagaatagctagtgtattgatcccagtagtcaaagtgtcttaaaaggacacctatttgtccttttgagccccagctgagtgaatactgatagtggactagaaaagcctagtcaagaaaagtgacccaccttgttacttgaccagcagtctagctgagagatctgattttatgttcgtaactttctgtaaagaaagaca

SEQ ID NO: 35966 - DNA, 350 bp, Homo Sapiens
cgatcccagcgtagtcacatgtccttggaaaacctcaaacagatcattgtccggagctacagagaggccactgtagtaagatggtatcagtctttccattaatacaccccttgtattcatgggctttgtaacttgacacatgataacgttgctccaagatgcagtgtaccccgtttatggtctccatgtggcaccttccattttggagaataataagtgataaaatccatccttcttagctgaatgagtttcatgtctccaaagaaaaaaatctttgcttagtttctctgcttttcagttgctgggagaccttttgttgattgtcagcagggtttttctggtttaataat

SEQ ID NO: 35967 - DNA, 437 bp, Homo Sapiens
agacccaaaacaaattaagttgtcaaaataagcacatggtaatcagagtggctattgatctcagacagtaagcaggtgagtttagctggatttggtgtacactgtcagtcctcaaagtacagctactccatttgtgaatgtatgttgatttttcttatgattgtctgtattctgtagtttcctctcccccagtgtattcgagaatgtcttcctattgcttttactcatgaatgacatcttagattggaaaataattttctgggtcacatccagtttttttctcttaccataagacattactccattgtcttctggcattagtgttactgtggaaaagtccaaggtcagcccatttttgttttgtaagtgatatgcttctgctgggatgcttttagaatttttgttaatgggtaaaattcagcagctccaccaggata

SEQ ID NO: 35968 - DNA, 433 bp, Homo Sapiens
gagtttgctaggacgaatagtaatgaggatgtaagcccgtgcgccatatatgagaatgactgcgccgttaaagctccagggggtttggatgaaaatgcttccatttgctcctgcattcctcttctttagctctgattcttgctacctacactgttagcaccaaagagctcctcccatcatccagttcacttcttcatacctgagtcataggacccagtctttaaatcaaggatgtacatttagaacagcacagtacaaaagaaatataaagaaggacacacatacaattttttaattactaggttagtaggttcatatgaccaagttatcccaaagataaacattttccattaactaaatcaagcacacaatcttaaaatttaaatttaacttaattaaaatcaaaattctgttcctgagccacactagtcgc

SEQ ID NO: 35969 - DNA, 486 bp, Homo Sapiens
ctactaatacataatcttgcagcatagcccaactccgagtattgaattatgcttcattccacaaaatgactgcttctataaccatttgaaatgtgtaaattcactttcaaaatagccaacgcacagaggcccatagatgaaatgcaataaatatgttttccaactgccattttcagcattcacagaaacaacagattttattcaataatcctatcatgagatgtgttcttcagtcctcacccaaataaaaagccattgtcttacagacaatccccaatctgcaacctaatcattcctaagcaatggtccacgagtaaatcaaagtcaaatttcctaaaaacctattttataccacagaaatggcaacaatacgatgcagagaggcaaatctcaatgaggactttttacaaatattaaacatataaaaatttattttaaaacagtcacattatgaatattgtatacctttcaaaggagtcctttctt

SEQ ID NO: 35970 - DNA, 542 bp, Homo Sapiens
agtcatagcatctggccattcctcatgccatattctcctgtgcctcaggcatgtccataaatttggtaaactccagcctggtggcagagcattatacaaggagtttcgataattataacacaggaaactatccatgtgacatttaggcatttggattcctaaggtgccagaaagttatttgtatcggaataggtcctaatgatttaattcacctaaaagagaaatagtctcagtccaaatggtaactatttcagaatagaattaaatctggtacctgaacccacagtagcattcacaaaagcctatacttttctggacagaaattagtaatggcaaaccaatcactttccttgaaatacatttgtttacccaatcataaatgaccaattaaattccttattattgagagggtgaaggtcctatttcaacacccaaactactcagaattctaaggctccttccctcttttcatgccaggcatttgacacacacaactcaatttacctttaagaacacttccacatggtgcaattgtcacatct

SEQ ID NO: 35971 - DNA, 505 bp, Homo Sapiens
ccagataccattggaatgaactgcatgatatagaatctcacaattcaatgctaatctggactttatggggcagggaggaaggtaatccattccaaataccaaatttatacatgaagtatgatgcaaggactggaatgaaagatcagaaaaaaaggtgtatggtgtgttaaccaggattgtctcaggttgcctgtattttctcatagtcatacacagcatgtagagcttttataataacaaacaaaacttcagaaggataaaaaggggatgaggagtgaagaaaattgggctcaagggtctgaaatccctaaattctgtaggctaaactagaacccattctttgtgcagcctgctctgttacagatatccagggtccccatttctggatttgttgataaaataacctttctgttgccaagaggaaacttgactgaatattcctgagaaaagttctcattaatgtgactacgaattacaacgtttccacaacctgatggcctttggc

SEQ ID NO: 35972 - DNA, 451 bp, Homo Sapiens
gagccacctgccggcgggaaccttgtcacactcatcatagtatccccaaggctacatagtaaacacacattaaagggcacagagtaaacacattcaatattttctgagtggataaattggttaacattgtataattttcaaaactaggtaatggccttaagaagtacgactggcagaataggaaactgagacccagagacattaaaggattcagttggtaagaagttgcagaggcagggctaacaacaaaagcttacctcagtatgggaaaggtgatggccacaggtccctcaaaactggcctaatacactaaactccactcaggaagcttgggatactttggctcttcaagggcaaagcccttgatttactcccagacaggttgctttctgccccaaaaccaaggatgctaagagagggtagctgaggttgccagttagtgagacacgtg

SEQ ID NO: 35973 - DNA, 575 bp, Homo Sapiens
gaccccgtccttgcaaatgtgtattatcaagaaactatgcatggattgcaaaatcttttggcatcaaaataaactggtactaactcgttaaaaaatatctcgacaggatctagtttgaggcattaaaaaggagaaagcatcagtgtgaaaagagctcctatcagcgaaaaatggattctgctaaaattgaaggaagaacaaacataaaatttaagatgaagcttgggtggaagaacggtaaaatcactgatgctttaccaaaagtttatggggacaatgcccctaaagagatcagcagtttacaaatggataacttgtaagaaaggacaaaatgatgttgaagatgaagcctgcagcagcaggtcatccacatcaatatgcaagggaaaaaattagggatgtgaaattatgctttatgaggaagtggtcctcacccccactgcctacaacacaagaaaggagaggaagggagcaaactagaagaagaaagatggtattgggggaaaggatatcaattaaagatggcttttaaaaattgcttcgcaagaaggagggcccccctgccggttcactgg

SEQ ID NO: 35974 - DNA, 550 bp, Homo Sapiens
gtgtatagctgttccagtggtcactagctgttagcagatgacgatctgtgaatagaaccataatctgttctctctatccaagctgcatgcaaggcgtttgcagtgtccatttctgtgttctcttaggctagatgatcagtaatgatgggattgtaggtaggatggctttatctgcctcacactactcaatcgataaagactacatctcacttaacaagtctgccagggatttttagacagcctctgttgttgtagttgatgcatctggagggtcagcctttccagctaggtctttcttaacaaaaagtggcaaaagtgttattgttttttatcccctcttttcagatctcatgttcttgtgtggcttcctgcttcagtgctgtttgtgggtataatctatgctgggtccagagcattgtccagactggtaagtattagaggttcaggggaaacaactcctctctccctttcccctttgccttttaacttatcatggctcagctcaataagggcaagaatcaactttaataatgataataatgggacctat

SEQ ID NO: 35975 - DNA, 548 bp, Homo Sapiens
cagagaccattgaacttgctttaattaatatttatggtacaaatttccttctgtttcagtgatgatttcctcccaaacaggtttcttcaactgtcttttgtatttgaagtcaccgtatgtaaattttatgtttgctttggtatggtttgggtaacttccttgactttcttttctcatcttgtctgagacttgcttgaattatagttgaagactggttattggtcctactcatttctttgtacctaaattaaatggtgtgtgtttatgtcacatttgcaaggacaaagaggagaaaaaggatttgaacagagggtaagagtagtccttgtataactaccctggtaaccaatcagaaattaaattcattgaaagaatatctttagggtttgtactgttctcatttcacataaagccgtggagatttcttctgtccttgctgagatttattaacagtaggtaaggctctttgctttttccttgactttcattatagatctgatactctctccttccatctatttgcgtttaaatttgcaagtactgtcatc

SEQ ID NO: 35976 - DNA, 445 bp, Homo Sapiens
ccactcactctgtttgctgcgtctcactgctactgtcttgcattgcttctttcccaaggtgagagattagtgtcagtgtctctatcatgtagactttctgaactcagaattagggctgatagcacatccttgggagaataatccaagccttactcttctctagagcctatcagctatgaagaaatagtctagtccaaaaagagtccttgagtgttgtcttccttgacataagagtccttgagtgttgacctaaacagaggtacaatcagagggggtcaagaacacttttcctagcaatgatgcggccattttagaaaggagggtgttaacatttggaaaaaataatctgctgattatattgactggcgtgatgtccttgagtggatcgtcttccaagtactgtttttgtacctaatcttaattcagtacctcgtcaaacctgcat

SEQ ID NO: 35977 - DNA, 568 bp, Homo Sapiens
agtgttgttacacagatcaaactaatgagcaggtgctgggaaactttcagcacagtgtctgtctgagctcctactctgttctgggggctgggggcagagtactgagggtgtgaaaaggaaccacagggcagtggttcatgcacaagtatatgtatctgtcaatttctctttcatcccctgcctgccttattcaaatactaaacaaaacagagtgatatgaggcagcttacagtatacctattatacaacagaatcaaaaataaaataagctgggacgtaggataaatgaaggtaggaaaatacactgcagctgggaaaatgttagtaaacaaaatgtacatcagaaaatcccatatatttgctaggcatagacacaaaatttgttctgaacttccagatagtcacgcacaaaactatgcagtagagattaataatgttctcaagttaggcaaaagccagtttccaaggggaagaccagctttcctgttgcaatgccatgaaggggagtaaaagggagagaacgacattggctataacaggaaattcaggagagtgttacagagcaatt

SEQ ID NO: 35978 - DNA, 528 bp, Homo Sapiens
caccttggctagacggcagcaagttgcccagccaccaaagtgaaagggaagggaagagaggaaaggagaagccactgtccaagggggaagggtggacctgcaggggccctcgagtgattgtctcctattcccaacctgagcacttcccacgacactcttctgaaaattctggcaagaacagttcttagtgcggttgtagctgatgatcagaaaggggaaggggcttccctttgagccaggatcaaagcacaagcttcctgctttcccatccaaggaggcgccccaaagtttggcctgtgtgcggagacgctgtatcccctggggctcccaggagaggagagcagctgtggagtctacctagctgtgagctgcttctgggtggcaggcactgaggagacctggggtgtctcttgggggagcaacagaggagggaatcatttctagggcaggtcactaactgcagaatcagaaggctgaggccaggtccctgattagctgtgaatctcttgaacccggtgcatgtcgtgg

SEQ ID NO: 35979 - DNA, 426 bp, Homo Sapiens
aatagttggatgatctgactattcaatacttaacagtagtcctgtcaacacagtaggtgctcagagaatatacgtcaactgaactctggttgagttgatatttgtactcagcaaacactagaatgacgtagtgactccattctttaggtgtatagtctgggctctccttggggattctagactacttcagagttacttttctgtcatctccttgggccttgtattaatagccattggcagtaaatatcagttcccaataactggccatattgactagtgagatttaatatataatagtaatgcctccagtatcatgattacatagtattccagcataaattgatattccagatgccgaactttatgagacaattatgacaatattttctgggttcataaagagtattggtcgaaaggtgttgaaaa

SEQ ID NO: 35980 - DNA, 523 bp, Homo Sapiens
agtccttgtgatcacgataccctaatttgggtctcacaggtgtgttagccaggttgtccagaagacaaaaccagtaggatataggtatatataaaagggagttaattagggagaattggctcacacgattacaaggggaaatctcacaataggctgtctgcctgctgtggaaagaaaaaagccagtagcatgacttttgttttgaataaaatatgggtgtataactcaggagaaggttcagagttaaagctgtagatttgggagctaaggtctccagaatgaagcaggatacagagtttatggtttactcattagttagtcatgtgccagtcaatctgatgaaccaggggattctccactttagccacacattagagtcatctaggaagctttagaaaatggtgatgcttgtgacttacacccaaagattctgatttaattggtctgaaatgtagactgggcattgggacttttgaaagctccccaggggtgattttaatttggagacaagattgagagccac

SEQ ID NO: 35981 - DNA, 475 bp, Homo Sapiens
ttaaattctttttcatgatttttaatacgtatatagttcatcatagagataacgctctgagcttttaaattaatggggcctattgttaaacattttctttagtttcccgtgttagcaatatctttgtgcacatccattattattttcttttgataaatttgtagatgtggactcacggaacaatggaaactccacatggtaaggctttggacagatattgccaaactaatcactagaaaggttttattcatttatacacagatagaaaataatacttcatcataatttgtactaaaattatgatgaaattatcaaaattctaagtttttgttactgttaatataaaaaggtcatcctgctggcagaccagaacactaagaaatttctagatctcaagcagataggaacaagtttatatcaagactccactgaggaactctggtggcaaccagtgaattaactagatttagaatac

SEQ ID NO: 35982 - DNA, 393 bp, Homo Sapiens
gtcagcaggtctaattcctgggctcagtgaactttgcatcagcctcctgaatagctgagaccacaggtatgtgccaaccctggttgaattctccctttaaaataatataagaatgtttttatttgtaggacacaaaactgtagcagtgtcttcaggcaaagctgctaattttatgcatcatgattatcacttttagcaaatacatcataaaaccatgctagcaggaaagcatttgatttgttccattttctttggaaaataatacaaaaattgtcatccatgaagagcacaatcatcataatcacaccagtcctcatcagagcaaaaatagcaatagtataggcatcattccagggtcttcacatcaatgaagcagtcattgtgctgtattta

SEQ ID NO: 35983 - DNA, 613 bp, Homo Sapiens
tgcctgggatatacaaagggaagatgtaatctgtgtaaggtcgtagaggccaattagggattgaaatcccacggatatgggttgtcgtacacccacttcacaccagttgctcttattctacaccatcatttcacataagcctcccacaaatggcaagtggaatggcatgattctccttattgcaagatgaggctatctggaaggatccaatgacttccccagtgagtagggggctgccccgggctttgcacccaggcttttgtctccaagtgaagagttgtcactcactgcacaggaagcagcaggagaataaccaagtcacggtctaaagttgggacacccaactgagtttcagatttctgcctgcaccaatgacacaggaattcagaataagggcgagatccttgtgggttcgtgtgatggtggcatggcgattcatgcttgattgagaagacaaaacgtgaacactttaagggcttcttgcacaagtgaagtggttgtggaaatgttttcaaggaggaaatgcctttttaatagagaaatttacttggctagttagcagaagttttctttcttggggttaaagtagttgctgctattatatcctgaagca

SEQ ID NO: 35984 - DNA, 534 bp, Homo Sapiens
gaggtggctgcttcttgcaagatcaagaacccagggcggggggaacttgactcttggggcacttccggttcagagggcgcataagttcaagtgagaggcactgcagtttccagcagccaccaggggccaaagaggcttggggcaggggggtggcccaggaggccttcgtttctcctgcccaggttccttgaagccccaaggaagggcttttgcctggtggtccagtgggcacctaatcagcctcgcgtgcctccccccggttgactccaacctcagagtggtggtcactttggattgctggggctgattttgacctgcttagaggcaggggcctggacaggatgaaaaggtcccgaccagcacaccagtccaatgctgtctcattacttttgccaaatgctggaaggaaacagtaaatctggacatacggtgattttcccccttccatccatctttaatatgtcttttttctctgatacaaatatcaagtaaacagggacaaccttagatttacggctccaaatgaaaacatag

SEQ ID NO: 35985 - DNA, 394 bp, Homo Sapiens
cttgagcggcaactacaagttctatgacgaattttgatattttgaaacgcctgaatagattggaaaaagaagtttttggtaaacaaattttagataactcagatttctaagtagttatttgagatgtgcaatttttggataatcgcgtgaggagagttgcttctcatgaggaaagtccatgctagcacaggctgtgatgcctgtagtgtttgtgctaggcgaaaccataagcctagggacgagaaatcgttacggcagttgaaatggctaagttcttggataggccagagtaggcttgaaagtgccacagtgacggagtctttctggaaacggagagagtggaacgcggtaaacccctcaagctagcaacccaaattttggtgggtaccgagct

SEQ ID NO: 35986 - DNA, 561 bp, Homo Sapiens
tctagaggatccaccactatcgctagaaaccctccctcattgtatagcagggcagaaaaaaggaggaggagcaagaaaggtctagtgtagctacactgagaccagcacccaagtcctgtggctctatagctggtgctgttcattgtaattacactgcctctttgaactgtgtaactttatactcagtatttgccatgttgatgttgattgtcaaactaccaacagcagctataattatatgtataatgtgttagatattctgggaattttgcaagcgtggaagactgtagtccatgatctcagggtgttacatgttccctgtttccacagatttaaagatcatccaacgctaaatgacagatatttgttgttacatcttttgggtagaggaggtttcagtgaagtttacaaggtaagtataaggaactggatacaaagactgggggttaaattatcggctcctaccaacttggagaacattaagaatactgataattgtaggttgatatccattggttgaaattcaaaaactttaaaaacctgtatctttgggaaaacagc

SEQ ID NO: 35987 - DNA, 443 bp, Homo Sapiens
catgagataagcacggtgccccactcttgatatcaatttactgtattagtctgttctcacattgctgtaaaaaaaactgcctgaaactaggtaatttataaaggaaagaggtttaattgactcacagtttcacatggctgggcgaacacaggaaacttacaatcatggcacaaggtgaagaagcagacaccttcttcacaatgtggcagttgggagaatgaatgcaggaggagctaccaaacacttacaagaccatcagatctcgtgagaactgacctcactgtcatgagaacagcatgggggaaaccacccccaccatgattcatttacctccatctgctccctcccttgacatgcggagattatggggattataattcaagatgagatttggctggggacacaaagcctaaccatatcacatatactagaaaccctgtctc

SEQ ID NO: 35988 - DNA, 379 bp, Homo Sapiens
gagttacagaagtaaattgtctgtatcatgcatactgtatcgactgtgtaaatatgtaaatattcttgactgagtagtaaaccgggcgttagtagcaaaaaaggagtgtttcactttaattcactagcttttataagtcaataaaatttataacagttaaagggttattattccaatcaataaaaattcttaagaaatcaatccatagaaaaccatttacctattgaaaaaaagagcagagaatgtgaagaggcaactcataaaagcaaaattgaaaaaaatatctgtgaagatgcattacacttctctgctaaacagagggcttcaaagtaaaatacagtaagatgccactttttgactaagagatttgatgaagcct

SEQ ID NO: 35989 - DNA, 617 bp, Homo Sapiens
tatcgtaagaaaccctcatagagaacaccagaaaagggtgttatagacaccagcttcctaccacctgagacattaccaattgcatttctaaaatacaagcatgagctcctccaggaagctggtcctttacctgtccaaatccttcccactcccacctgggttaggtctactattctctggctggcatggcatcctgtgcatacacatacgataacacactgtactggaactgcctgaacactgctttgccagtcttcattaccataggagtatcttgtgatcagaggcttatgtcttactcatcttctaccatcttctacctggcatagttggtgcttagcaccccccaaaatgaatacttaaatataaatctaacaaaacacgcatggtattgatatgaggaagaactaccaaactccaatgaaagatagcaaaaaaagtggtaaataaggggagacagtgcatgtacttagataagaagactcaactttgtcaagatatcatttttttcccaacttcatctataggttcagcaaaatccttatcaaaatcccagcaagttattttgtggatatcgacgaacttgattctaaagtttacatgagaggcaaaaaacc

SEQ ID NO: 35990 - DNA, 492 bp, Homo Sapiens
gaatttgagtaaaaactataagaagggagggcaatccgtgtctatgtctggggcggagctctgcagggagaggcaacacaagcatcagtgctctgaggctgcagcaggagaggtgtacacagaacagcagggaggccagtgtcaaggcagtgagcaagctggagagtgcaagggaaggggccagagaggtgaatggggcagtaaacttggggaggaagttaattacctagcgggataatagatgagttctttccattttccaaatgttccaatatgtattactacacagtttcacaagatattaaaggaaacaattcattccgacatacggcttgtatgagtgaaaacagggagaacggtgagagcagttttaaaacttactccctaaacgcactccagggttgggagcgacctctagtggttcatttagacaattacttttttctttttcttgctcttaaaagtataaaacagcaccgtgcttatctcaat

SEQ ID NO: 35991 - DNA, 391 bp, Homo Sapiens
ctggttcacagtcctggtttgtgaccccctgctctgaggttcaaggaggtccaccaagttcagcaaggccaggttccagcagcagcagcaattagttactatcttcaccttacacaggatgatcattacccatgggggctccacagaagtggccttattctcataactttgctcagagtcaaggacctctaaaggatcctctcttcctggtccctggacagttaactgtctcctgggtcggggtctggtcagggactaattggagtctggatgcttgcatgctaaaagctttattttattacccatgctcacaatttattttcctatcttaaaattctcttaacataatattttagtcttatgcatgaatccatacttcgtatactctaat

SEQ ID NO: 35992 - DNA, 563 bp, Homo Sapiens
gggaggacacatattttaatggaaggaaggaaagatgatttatgataggttttatccatctaatttagatattttaggaagaaaatcactatacagctcttattttaaatttttgaataggtaacacattcatatcactcaaaacacaaaacatgtaacagtgcttatagtgaaaagcttcccacctgctgatcctgtctcctagccaccaactgtgcaacctgttattagtttgtatgtccttctggaaacaatttattcatatataagcaaatatattttgttccctcctgtctcattttaaacactgttctgcaccttgcttttttcatttaacatcttggaggtcaatacataaacacatcttcatgttgtcaatggctgtatgctattccattatgtagatgtaccaaaattatttaaacattcccttactgatgaacattaagttatagaattaagactttgataaaacgatgtttaaatttagcttaagtattctgttcccattaagaactgcaagccttggccaggcacttgggatcacacccgtaatcccagca

SEQ ID NO: 35993 - DNA, 510 bp, Homo Sapiens
gtactgtcgctgggattacagcttgcacggcaaggcaggcgtgatggaatgctggcacaccaaggccgtcaggctccctgcaaagtggacagacagcaaacaagagtcaacaactgctgtagatgttgtgtgctcagccaatttatcagctggaatgaaacggatgcaaaggctgagcccttatctttttagcaactggtatgttagattagtgtgcagctttgtgtaaaacttcaaagaagtacaaagttccacaagatagttgagaggtaagtaaatggaactgtttatcattcttatcatagacacatcattaccaaattatataaagactaaagcatacagtttgttggatcttgaatcaggagggttgacatcaagccaactccaactttaaccatatatattacccctgcacaatgcttcttaacaaagctctaataacaatgatgcctaaggctgcactgtgctttgtgtggattgctcaagtcatctttcccttgcggtact

SEQ ID NO: 35994 - DNA, 453 bp, Homo Sapiens
gtgtattgaggatacattctgaaatttgataaaatcatttctgtatcggaaagaaagccactgcaagaaggtctagaaaaacgcactaaattgtagttgtggtcttaggcgacgcgcacttcagtcttcctgcccctcccctccctgaaggggcgaagggctgagcgtcatcatggacactttgctcatggatggccgattggggtggccatgggctcctctggctggccctgtcctggagctgccttgtggagcgtgcaattcagtgtctagtggaaaggacgggatgatctgggtggggcacagaccaagggcgtggaactttgtcagcagcaagagatgcaggccctgctggccatcttgtctttgtcctgtctggccagagactgggatgccccagagactcaggtcaagccaggggtcatttgttttcagcttagcgacctttcacag

SEQ ID NO: 35995 - DNA, 374 bp, Homo Sapiens
tgggctggatataggtgtgagccagtgctgcctgggcatattccaactctttctaacagacactcttgtcccttgacattctgctaggtgaacagaagtgtgtaccgagaccagtgagagaactctccccggagctccaggagtgggcacctttactcgcctgggacattccagcctggcacagcaatcccccctcgccttcataccctaactaccgccgtctgttgcgtgattcagccacgacctaggggcgctggtggctgaaggtcggtgtatactcgggatgcctagtctccagggagaggggaggcagcatttcagagagctgccatgtgttttcagccctgaggtccagagaactgggaaatgctgtc

SEQ ID NO: 35996 - DNA, 363 bp, Homo Sapiens
tacgtgccgctgggatattaatgcctcatggggtgtgaggatcagatgaaacaatggataaatcacttgaggaagcactcagaaaatgggagcaactattctaccaaatgggttatttattgacctgcacctctaccatctataaaagggtgtcattgggattcttgaaaacagcaaacgaaatggaaattctgcacatttaataatgatgtaaaagtctgcccttgggtctgaattgaactctgcttttgttggctgggtggctgtggagagagttcctaccccatgggtctgaggacaaaatggcaccaatcgcctccataaacagggttcgccacttcgcaattcatcacttacagttta

SEQ ID NO: 35997 - DNA, 363 bp, Homo Sapiens
ctgtcgctggatatggtgtagaccaagagtcacaagaatgattttgttcccaactatgtgatctgtgtgacctgtggaaagccctttaaccccccaggggtcaggctcaatatctgtaaatttatgtggttagaagacataaactctatggttcttttaggtatagtatgattaatagggatccaacctccagtaatgagcagtaaaaagttgaattctggctggaagcaaaatttccccagaaaacataggttgctatgtataaaaaatatacatatggcaaatcaacttcacagtaatgaattaagcatattctgatgagaaaaatgaaccatctgtgtatttcttcaatgagagtttgga

SEQ ID NO: 35998 - DNA, 583 bp, Homo Sapiens
ttacaggctatgagccactgtacgtggctgggtttatattttcacaaagcaatttccgtaaatgctatgtacacttttacttatacagcccatcagcccccatccctcaggtcctggccattcctctacatacattcattcgcttttattccctaccctgtatgtctactgtaacaccgggagtcctggcccccatgcttctggctgcccctaagaatccctgtgttggtctctgtagtgttagttgtgtggccatctgctagaggaaccttcagtcctcagttctgcccgcaaaattcccctgcttggaaatcatcagaaattcccattgctaaacttgatgttttggctttcaaagcatccataatttaatttccaactatcatgttaaggctgttctctttcttattctctctatcactctcttttttaggatattccatgttctagtcaaaatgaactgttcaccctttcccacttttctagctttgtgcatatgctcacttcttccctcatctggaaagcccaatcgtgcccacctccaagctcaggaccatctccttatcccagcccagtgacatct

SEQ ID NO: 35999 - DNA, 555 bp, Homo Sapiens
aggattgagataagcacggtgacaaatagataacaataaaaaggaaggagagaatggtattgctggcatgtgtaggagccccagaaaagcatggagttgctaagagtgagggggaaataaccatctgaaagtggcagtgaagagcaaggaaaatactgtagttatcctctgaccctgatgtaaatggagtatatgataataaactgagagaggactagcagaaaagtagtatccggagggatcagccaagaaagtgacgagggaagagaattttcgttcagagaggattggtagctgtatgatagtttcctgatcacatagaggaagttccaggagagtggagaggtttgaggagagaatgagtaggggattgggtcagattaagggataaacagcactgtagagataagaattcaggtgataaggaatgagaagaaaggctgtgtcttatcagtaggtgagatggaactggtcctggtagtgttggagcaggacaggcacttagttctgatgctgtggtcctttgtgatagtagagcaccgtgcttatctcaat

SEQ ID NO: 36000 - DNA, 518 bp, Homo Sapiens
aaatattgtggcggctgtgcttttcgcctcctaatgtgcattttatccttcttaaacacatggagttaaaagaaatcaacgcggaaaatgacccttctattcatacatttgctaaaaaacaatgaaagtggatagtttttattttttaagtggggtagatacatacgcatctccattgccagggcctgagagggcacaggcacacccttcagacaacgttgctttaatgtggaggttttgtttgacatgcttctattgtcagctcatgctatgactcagaaaaaaatgagcaagcacagaaggggtacggcagtctcaatgtgtttgcaaagaataaagtaagtctagataatgcctggagggccttggtgagtcacttgggccgggaaaagttgcctttttacacatgcgtagagattcttgccaatttgggaacttatttatcacaattgtaaaccagctgcctttgtttcaataacaatttctgacatttattactgtcaaagaaaactttaggc

SEQ ID NO: 36001 - DNA, 352 bp, Homo Sapiens
taccgtactgcgctggatatggtggccacaacccggcatgctgggttcactgctgcgtgactttgttcttggttttcttatccataggatggggctgtgaacactgcctctacctggggcagcaggtgagccattctgaggccattcctagagtgggggctttgggatgatcgtgcactctctgtggaaggaggtgcaagggcactggaggaggtggggctggttttcattctgaccctgccatttcccagctgtggtccctgtgtgtgtcacttgacccctccagcaccaagaaatggatgaaaagtagcgtctcctttgtgggttgttgtgggttcaagtgtcagcctag

SEQ ID NO: 36002 - DNA, 537 bp, Homo Sapiens
tgtctcgacagtctggtcccactttagcctcctaaagtactgggattataggcgttagtcaccctcccagcccctctcctctcctctcctctcgattctcctgttatcacactggttactcctttccagtaaagactgatccctcctcacctctgtgacctctgaaggtttgagtgcctacaacccaggccttgcactgtttctcttctctttactcttattcccttggtgaactgatccagtctcaaggcccacacctcttgagtttacatctccagccagaagttctcttcacacttgtctagccggcgcctatttggcatgtccgttttcatgttaaatacacatcacagactgaacagatctgaaactgaactccctattgtcaccccaaaacctgctcctcctgcattagttcccttctcggtgaatggcagcttcatctttctagttgttcagcaaaaaaccttggcattatcttggacccttctttttattttccacccatatccaatttgacggcacatcccgttggct

SEQ ID NO: 36003 - DNA, 363 bp, Homo Sapiens
acgtggcgctgggatatgggagttgggggatttttatttctctgtaattaagtggtgactaactttcttccttgaaattacagactaaatgatggcaaagagtacctcttccaagccaaagacgatgtaagtttctaaatgttatttctctccactacttaggagtttgcaagtgtttgtgtgatgatgggctttattcagaaagttcttcatgtaaatgatgatcagtgatggtttctatcactgggctccagtcaccagcactagaaggtgtttggttctgtctctagaaggcagtgaatatgatctcactgtccctttgccgtggcaggatcccttaaagtcgatggaatctttgcctgt

SEQ ID NO: 36004 - DNA, 357 bp, Homo Sapiens
gtggcgctgggatatgccacagcccaagaaggagaggggcagtacactagataagcaggaaaaaccatgccagcatcgtgacacaaatgcaaagatttgaagaagttcagttccacgtgatcaattcacagattctccatgttggaaacagaaagagtagagatagcaagaagagactatcaataactataaaaggtggaaggtctgcatttatcttggtaccatggggtaatctgttcacatctggaattgaattcttgtatttggtcctcacccaccttggtgcttaaattacctaccactcatttacacaacagtctttcactgagtttatataatgcggtcaacaccctgctg

SEQ ID NO: 36005 - DNA, 358 bp, Homo Sapiens
gctgggatatggtgtaagctcaggacaaaatgctgatatggtgaagttttctgataaactcacattgcctacaacttcccttaaaacacttcggcaccaactgcatgacacggtatgtgtccattttaatattggtgcagttgggtaatacctgagaaccttaaacaggaaacacacatgccaggggtgattcatatttgaaagaccatatcagagcccactcccattggcagcctaatagcacgtctgccatctttatctcctatacacaccagagggtgggaaagttagtataacgaatgagggctgttcaagatgtgtgatttggctaggcttgccctgcttttcctcaaccagc

SEQ ID NO: 36006 - DNA, 451 bp, Homo Sapiens
ccccgctcgtgggcgggatgtcaccatcagcagagaaaccatgcgttaactcttgaaatgccaaaatgagtaggcattaaatacctgccctatctgaccacactatttaatgtttttatcttaaatttaaaaaactgaaatctgaaactgtatgatagtcagtaggcctaaaactcccccttgactttgagaatttgaagggattcccttccatcctgaagtctactttcttgtcatttaagggtgagagaagggaagcttctgtgcctttctagaaattaacaaagaacctgttgggtcctagaccagaaatccagcacgttatcctagcatgaaactcccttttaaaaagtgaacacccaaagagatgttacaaatgaagatatagccccttcagcatctctggagaccaataccacaataaggaataataacaacctaggaataaagg

SEQ ID NO: 36007 - DNA, 460 bp, Homo Sapiens
aaggatcccccgctactggcgctgggaatgagaccaggaaattgccactgcatcatggttttggaccttggcagatcggatataatggaaggcatttagagcttctgaatctattgactgtccaattctgtcgattgattgttcagtgttgccaacattttgactttagttcacagcatttctcttgaaatgggttggctatattcccaatcagatactgattgacacattggtatcaagcattcttatgtgcccagctcagtggtggtcacttggtgggagaatatgatctatcaccaaggagttactacttagtttgggaggaatcttaagtaacatggaataatttggtctatcttagccccccaaaagattgctttcatttatttatttagccacgctttggcgtaattctttaacttgctattgggagatattttggttacccattgtcaataat

SEQ ID NO: 36008 - DNA, 372 bp, Homo Sapiens
cgaagtgtcgatattatggaaggtggtttctgtgacctgcagctgcaacatgcctttgtcttaaaagccttatgcctggtgcataattatcaaaggctgggagaaaaaaggcctaatacatctaaagcttccataaggccacagaagaaagcttttccctgcatgattttgtctgatggttagtgctgcatcatcaggaagtgccgcagaaagatgtttccctgactggggatgcagtgtcctcgtggcatgacacagtggtccctcaggggccctcccagcttcctcgtgccccatctcttcttggattcagggaatttctgaatgccattcccagaagtgcctatcccaaaacatggttaagctagtgga

SEQ ID NO: 36009 - DNA, 500 bp, Homo Sapiens
atcaaacgaaaaatcagatacaaactccccctcttttcactcctcaccaaatgtttccttagggtacagctggctgtgcttccagggaagggaggccccaggttgggggatataaggagaggccaaagagtccagttccccctcccctggaagttccagccatttctcacctccccctccattctttgggccccagcaccaggaaatgcctttggtcccttggtgccagatacacaagacccacagttaccctcagactcatacactctcacatgcggtcactcacagtcacacgggcacagccacaccgcctcagactcagacacacttacacatattcatacactcacgcagtcacacacgcacacagcccctaccagggctcacagcaccgcctaaaagcaactcttcatcatggtctaagccccctctctcagggagctcttagccggggcagacccgcatctcatcactgttacaggcccccaactagccagaga

SEQ ID NO: 36010 - DNA, 543 bp, Homo Sapiens
gaaatgaaccatctggtgtgccaggccacaccttccaacgcttggctctgctgggaccacaaggatgggctttctcatctcaccgtacatttagatggccatattgggtttcggatagtctcccattcttaaccatggtcttcaaccgtttttgttttaaaagtgaatactcttatggtaaaaaagataaatgtgaaatagaaaatactgtagatctacagatcaaagttatatttgaaaaccacatttaattgtatattcatgaaattcacaaaaaatatacccatctgtaacttttcaacattcttgagtgttttgaaaattaacaatttgttctaaaacttgagagttacatagttttgaaatatttcaaagttcagttcaaacacacacaaaactcctggataccacctggagctaaattcaataccaatcgaattttttaggtttgcaaaattgaactaaagaagtaccactgagttgagggcatgtcaagatctagcattaaaccaattcagatttgtacttggaccagcatatcca

SEQ ID NO: 36011 - DNA, 552 bp, Homo Sapiens
tgtgacaaccgtgtgacctgtgtacactgcgagatgtaggtgcgtgcattgaaaccgtacagttaagatgacctacaactgatgctactctaagtcttccagagatttttcagatatccccagagtaaaccaaactagtgatatcccatggttttgcaaaccagaaccaacaactgcacagaaacagctccttatgcgccatcagacactctccagacctgcccctcactcacaaatgtaacaaagcagcatgaacccaggcagtcttcactcctcagggccacataacaacctctatcggtcaggaagcctttgatctgggccaggctgccgacccacaggggttaattgtgcctctcatgctgagtgttgtttctcctcactggactaacccccacccttccaccaagaagggcccccagggaaactgctgtttgacatccaggagcccatgtggaatgttccagcaacctggatggccttggccacctctaataccagcctttccctctgtggggctcccttcctggctcttgctcatgcaagtcaatc

SEQ ID NO: 36012 - DNA, 539 bp, Homo Sapiens
tgacacacttcatttaacataatgtttttggagttcatggatgttacagcatgtgtcagtggtttgttccgttttattatagagtagtattcattgtatggattcactgctatttgtttatccattcaccaattgatagacatttgaattttctccagtttttggctgttatgaagaaagctgttataagcttacatgtacagtctttgtgtaggtatgtgtttacatttctttagtataaataccttggaataagattggcaattgtggattatggaaatataaaattttatggtaactttataagaaactgcaaaatttttctaaaattttctaaaacgcatcattttgcctttttacttgccatgtagaagagttccaggtgctcttcaccatcactttattttttaatgttcgtcctcttgtaggtgtgtatggagtgatactcattgtggttttaagttacataattacagatatgttaagcatcttttcatgtgcttgtttgccattcatatctttggtaaagtgtctgctca

SEQ ID NO: 36013 - DNA, 429 bp, Homo Sapiens
gtatattcaaatgctaggaaagattattgtttttctaaatcatttgaaacatggaaggggattcaaacatataaatagtaatttgtaaaaccaagtttgaaaataataatttttctagatgcaagatcaaagataaatataaccagatgtagaaaaccagtaagtatctgaggctaatagaattttctgaggggaaaaattgttttctcgggaagtaaacattatttcaggtattttttcccagaactttaagaagtttatagtaatgtgtttcattcccagaaattaatgaaactaaattatacaattcccagaaaatatggtttaaaagttgcctttatagaaataaagtactctattagcaactattaccaagagaattcattgccttgagtgaagaagaaaactgaagttcacaaactttggaat

SEQ ID NO: 36014 - DNA, 384 bp, Homo Sapiens
tgagtatcccctctcatggcactgtgtacacaaacaagataggcacaaataggagagctgggttgtaggacctacccagctcagaatcctaattacaggactcagaaggtccaattagcagtctctgctgaactcttgaggcatgcacaagtatatgaactgacctgtgggatcagatgagaagctgccaagccataaccctgaaagaacagagggcaccccacggatgtaaaaccacagtggatggctccccgccaagagcgcttctaaacacctttagcgcctcataattctaacactggcctagggtgcaactcttctcagctagactcttagaaccaattcatggcaaggacagtataataattatgaaatataataatt

SEQ ID NO: 36015 - DNA, 354 bp, Homo Sapiens
ctctctcgctccagcgggctcaggactgtccggtatgcggagggcagcatgcggatatggtttaacgatgaaccgttgcagtgcgccgaagcgacctccgtcgccgatctgctcacgcagctggaacagcagcagccgggcgtcgcgctggcgctcaatcaacgcatcctgccgcatgaacagtggcaagatcatctcttacaggaaggcgatcaaatcctgctttttcaggttatcgctggaggctgacatgttacgtattgcggataaaacctttgagtcacatcttttcaccggcaccggtaaattcgccgcccccgacgtcatggtggaggccattcgcgcctccggcag

SEQ ID NO: 36016 - DNA, 457 bp, Homo Sapiens
gtttattcacctactgaaggacatctttggttgcttccaagttttgacattggtcttagttcagactgctataacaaatgaccataaactgggtggcttaaacaacaaacgtttacttctcacagttttgaacgctggaagaccaagatcacgatgccagtatagtcaagttctggtaaaggccatctttctggctgcagacagctgacttgtatcctcacatggctgcaagaagacaagctagctctctagcctcttcttataaggacattaatcccattgttgagtgctccactcttttgacctaattcccttccaaaggcccacctccaaataccatcacataggtgagtgtttagacttcaacatatgaattttgaggggacacaaacagcccataacagcaattattaataaagctgctataaacatccctgtgcaggtttttgtgtggaca

SEQ ID NO: 36017 - DNA, 383 bp, Homo Sapiens
ttgtatatgtacttatgtatgaagtacagttttaaattttgacacatatttatgttgtataataatctaattagagtagttactgtatccatcacctcatgcatgtatcatttctttgtggtaaaaacatttaaaaacccctcttctaactattttgtaataaagaatattttactgttaaccatagttaccctactgtgcaaaagattatgagaaattattccttctatctaattgtaactctgtacccactgaccaacatctccccatccttacgtctccactcccgtctccagtatctggtaatcactgttctactctctacttctatgatatatatttagatcccacgtgcgtgaaatcatgcaggatttgtctttctg

SEQ ID NO: 36018 - DNA, 404 bp, Homo Sapiens
gaatgagccaccatgcctggctgtcctgcctttttaaataagagcttatattcaaggtgacattagacacttaatgaatcgtgagattttagacagtggcagtgctgtgaaggaaataactctgacgtgtaatcttgcctccatccctgtcactgtgccgaaaaagatcactgctcactatctttctgttttttaaacttaactatgggtttttaagacttagaaaaaaggagagaggctagcagagggaaccattgctcagtgacagcggctgtcaggcacaacagcacaaatgatgctgtttttatattcccctttcctcccccttttctttctcactttggtgtttgaaagccccttccagacattgcatcacatcaccctgggcctgggcctggtggtgc

SEQ ID NO: 36019 - DNA, 354 bp, Homo Sapiens
acgcaatagacgaggcagatcaaagctagggaattataacaaggaaaaagaatttagaattcactctgtaactttaaaagaatattcttctaaaaagatgtttaaactaattctctgaaatctacttactaaaacacaagcaaacatcatattatgaagccactaaaatgaacgcagtagatccgaatgtgccaatacataccaatctccaaaatatatcattcagtataaaaagcaaggtacaggcgtgagccaccgtgcccagccatacataatcattctttactttgcatttcagtattcagtttggttcgttaattaaaatctcattttgtttgtcagctgtctttctag

SEQ ID NO: 36020 - DNA, 495 bp, Homo Sapiens
caggtcttaggaggctggataagtagcaaaataggaaacactaggtaagaacaaagatgtgtatgaagaaaacactgtccacccctaaggctgtgggaacaaagggagaggttaggattaacacaagctagtagcccagagaagggtccctgcagagcctggtgctccccagctggagctgctaaccaggagatggaaggccctgcagagctggggctgaagccttagcaccttagctcagaggagagtgtcagggaagctcagacctctgaggagacagcactgcctgactgctactggtaccttgaaggggtcgaaataaagttggtctgtaagtgctaaaatgcactgaagactgaaatcaactattgttgcttgaaataaggccattcctggggacaatatggggccgttcctgggggcaaggaaaggggatagagcacttctctgcttccccagctcctgtctgccagtctcccgctagtggccgctccg

SEQ ID NO: 36021 - DNA, 437 bp, Homo Sapiens
acgtgatctcattcttttttatggctgcatagtattccatggatatatatgtactcattttctttatccagtctactgtggattagcatctaggttgattccatgtctttgctattgtgaatagtgttgtgatgaacttaggcatgcatgtgtctttatggtagaataatttgtattcctttggttatatacccagtattgggattgctgggttgaatggttgttctgttttaagttctttgagaaatctccagactgctttccacagtagctgaactaatttacattctcactagccctttataagtgttcctttttccccacaacctccccagcatctgttatttcttgactctttaatagccattctgattggtatgagatggtatctcattgtggttttgatctgcatttctctaatgattagtgatactgag

SEQ ID NO: 36022 - DNA, 388 bp, Homo Sapiens
gtatcgaaccttccaatcatgaacatggaatatctttccatttttggtgtcctcttcaatttctttcataactgtcttatagtttttattgtagaaaatttccacttctttgattaattcctaggtatttattttatctgtggctactataaatgaaactactttttaaatttctttttcagtttgttcattgttggcatatagaaatgctactgatttttgtatgttgattttctattctgcaacattactgaattcgtttatcagttctaatagttttcttgtagcgtcttcaggtttgtccaactaagatcatatcatctgcagacagggataatttgatgactttttttctagtttggaatccctttatatctttctcttgtct

SEQ ID NO: 36023 - DNA, 489 bp, Homo Sapiens
gagcggaaaggagtaacttctaacactaatgtataggacctaagtgtctctgaaaccctccactacttccgcagaactcacttgtgtccatttgttagtgtgactcggggtacatacactgtgtagaccactgggaaaatgtgagcaggttccagagaacacagggtttgccttcaaggaacttattgtccaggtgaagaaaaatgtgtatgtggcatgtcgtagtcagatgtctcacaggaggtggagtaagagggatgggttagcctccgagaccagttacttgccttcccatgcgttatctttgtatactcatctgttacaaggatgagaaaggttaatgtggttgaggatggaggaaatcagaactgctgacatcactcaatcttcctttatcgctgtgatttgtggatattcatgaagtagtagacattctttggtttcaaaaaagctagtaatttatttttcagtgcaccttatgtcctttaa

SEQ ID NO: 36024 - DNA, 453 bp, Homo Sapiens
gatcaggtttgcactctgaacataacgaacgagggtgtgaatcttggctctcccttttagggcctgatagtctgcaaaacagtgctctgtgggcctgttttaagatttagtacagggaacagtcacaatcagtcaactgactaatttctccttaaccactgccacattctttgacctaaaggatattttaaagataataaaagacccacaaatccattgcaagcactttaaagatactgtgcattggactgagcccaacaacttagcctggtcatgaacttctgccctcttttcactccctacctatcacctatgcaagctctctgctctactcagcactggagagtccttctttcccaaaaatgtcatgccccttcccgcatctgggatattgagtctgccattttcctcacttgaaatgcttcctcctctttccataactcttctttcagc

SEQ ID NO: 36025 - DNA, 540 bp, Homo Sapiens
tgtaacggatcaggtttttgccaagggccagactggaatggggtggaatgggaacagctaaccggacatccgagtctcatcactctgagacagaaaatgggcaacccggcagtgaggacacctggatgactttgacccaatcctttcccatctttgtgcttccagtttcacagtctgaaaaacttctttgtatcacttattatgcttgtagttacacatctgtatgattatttaactaatatctatccactacacggtaggccccatacaacatgaactgtgccttgctcactataatcactcagtaactagcacaattaagctctcaatacatttatctgttaacaaaatgaacaaatgagggagactagaccccaagagatagttgtgaaaagaggagtgttccaaatctccttcctgactgctaccaagtttcacctcttggcttgaagtgctctatgtgagggaaaaaaggtgtcctagcagacggaaaaaccaataaactcaaagagctagttccatttgaggctagctcccaat

SEQ ID NO: 36026 - DNA, 495 bp, Homo Sapiens
catgtggatggagtaaatacctggttataaattcatgtacagcctttgttatggaagcagtaactgtaaactgtcaccctaacaaattttattagctgatcaattttaaggtagtgatctgtactggcagaattgaatacagacaatcccatcaccagggaaaccacatttagggtataaagtgaatttaccctttgtgtgaacagagtgattagtttttaaaaggtccttaattaattttcctgtgtactttttggatagatgatgacaagtaaccataaaatgtatttttagtagcaatttgccatctctgaaaataagtcagtttcaaacatcggttttcaaaaaatgttaatgtggaattagttaatagcagtcatttccaaatgtttttaaagcaatagagtgggttgtttgtgagtaaaaatattagatacttactgtgtaagaacaggtgaagttggtgttttatgagagcagatttactttagaagg

SEQ ID NO: 36027 - DNA, 561 bp, Homo Sapiens
acggtgtacacggatcaggttcctgttgttcctattcacacagtagctgctttctttaccgtgccatgaacctgatctcctggcattgtcagtcagtccctctcttctcaggtgccaaggggaaacgaaactggttagtctctgcaggaagctgagccgtctcctaagtgcccacccggctccttgtgcactaattaccagacagtggactgaaccttttgcatattttattagtgaggactctaagtttcgagtgattggaaacccagtgggtttaaatcaagaagattaatttatggcccatgtctccaaaaggccggggaggccttggcgttgccaagttggacataagggctcaaatgactcatcagaattaggtcttattctttccatctctgctttcttctggaaacttctattctcaggacctagcaagatgccaaaatcagattacatcctaatatctcaataagcccagatttactttttaacatttctagtagacatctgggaattgagtctccatgcccagtcctaagcctgttgctttgcccagggcat

SEQ ID NO: 36028 - DNA, 381 bp, Homo Sapiens
cagtattacttggagagtaatattcagaatctcaaataagaaaattaatatggaatacttttaaaaaatgaagaattatgtgaataagggattattaggattactataataacagtgacaattactaaattactgtttgcacccacagcacctaacattgaacttgtgagaagagcctggacatatcttttgactagctgagaaacgtatttattatttaataattttaaaccaatagaagcaagttacattacctttagaaactggtgtgggaggagttttatcccatgataggagttggccaagagaattctgtctataatctctactatgttagcagagctaaaagtggcatcagttattgaaacccattgacaagct

SEQ ID NO: 36029 - DNA, 526 bp, Homo Sapiens
cccggtgtaactggatcaggttttaccataactcaagatgctttctcagacaaacagagctgcctgtcatgtgcattacagaactgccagtaggctcaaaccctcctgtccatttaaatggattatttggggtagaccggctgacctgacttgagaccatttccacacattctttgatcaccatgtgcttctgctctcacataagagcaagcatctgtacaaagtctactatgtataggtcgtagcatgtgctagaaacacacagatgtataaaattcctgaaagaggctattatccagttagaggaaaataaatacaatactaagaaagtggaataacaagcaagataacagaccaagtgccaagaaaaaggtacagatattatgtgctagtgaattcaaaagaaagggagaaattgctaagtatgtgttggaatgttcaatgaaggtcctacaggaagaaagagaattcgagttaggctgaaaggagagttatggaaagaggaggaagcatttcaagtgaggaa

SEQ ID NO: 36030 - DNA, 384 bp, Homo Sapiens
atgagccaccacgcccggcctccatgatcttatttaccagatttatagctagttcccctaatctgcctttatgctcagtgaccagtaaatgcaggtccccccgtaagtatttattgtaagtgagtgtttagggaggataatagttttacagtaaaatttaaatttaatataattctaggtgcaccttgctgatttctaaattgtttcatatatcacatcctcaagctggcctgggattagttgatttactgatgacacttttcaaaccaataaatggagtgataataaaacaccaccagtaaaattggaacatttcccattctgttccaatctttagtccccaaaacaaaccctggtccaattatgagtatagataaactccag

SEQ ID NO: 36031 - DNA, 596 bp, Homo Sapiens
agaggaacaccggtgtaacggatcatgtttagggacgatgtggaataatatattcagatagtactgacaggaaaacagaatattataatcaacatggcaatcaagaattcttcatccaacaaagctgtctttcagcaaatgagggagaaataagaacattcccagacaaactaaaagctaagggagtcgtcaatattaggcctgccttcaggaattactgaagggagttctttaagctgaaacaaaaggcccctaattaataatacaaaaacacaaaagcacaaaatttaatggtataagtaatatagagccatattcaaaatactctatgactgtaatgatggtatttaaagcaattttatctctagtacaagggttaaaagacaaaatattaataacaagcatagctaaaaataaattgtcaataaatacacattacaaaatatgtaaattctgacatcaacgacataaaatgtgtgtgggggagcgaaagaatgcaaggttaagttgttatcagcttgaaattgacagtaaaccccatagtaacagcaaggcaaaaatctttaatagaagcacagaacaaaaattttcaaaga

SEQ ID NO: 36032 - DNA, 517 bp, Homo Sapiens
tataagttatagcttgtagtactgtgtaaagataggcaccatgcttacaagatcagaattcagcttgaggctgtgtgagtttacgacaacactgtagtgtgccactgtacttctctaccttctgtatcgccgtatggaattactacacaaaattagcactaagaaacctaaatttccttacagtagaaataagcttatatgaataattctcttatagaaattaaactatctgctgcagttgtcagcagggtttaatttttagcataagctgaggccatcagtttcttagcagtcctattcttaaataatcatttctgcttaagagatcattttactgaacaatttcaaagcactaaatatcttcgagattgaaaaaataagcacctatagatggagcagaaactaaagaagaacaatttaaggaaaaagacagtccttaactatgcgcgcatcctatgaattatccatgctttcagctggtttccttttactgcactgtctaaaactccatatttaa

SEQ ID NO: 36033 - DNA, 438 bp, Homo Sapiens
aaagacattaatttgttcattttctttccaaatcttgaacgatttgttctcttgttccatattgtaaggcaagttaacatttgcctcctatttgtaattgttccataatctcaggttttcattgaatgtttcattgaattcactatatgtttactcttggattttgacattttaattattaggaacatttgatcacatataatcttagtaatgttcaacaataccacactgctcacatttatgcagaatgctgacagaatgacaggcagtgggagccaagattatgtgccgcgtggctgattggtgcaggggaaggcagggtgttcccatgttataatgcagtgtctcttggttactgtgcagttccagacaatacatacctgctgttttagtcagagtttgttggttgcaaagaacagaagcccactcaaattaatt

SEQ ID NO: 36034 - DNA, 655 bp, Homo Sapiens
cctggatgtattaagagcatttgacatcttagttaagtcactgttcataactactgttccaccatagaatcttcacaagaacagcctgctggacttcacaagaaggctgatggatgttgggggtgggcatttggggtgtggaaaggccgcttggcacattctcagcatgcgccagcccacaccgccccttaccaccaaagccttctatttcccattccatccagtaggagcagctgtagctgacctgaaaccttcggggacaggctcattgattgtttaaatagggaggtgcaagctctcaggggtccggggccttgatgacacagctcaggcaccacaggcacctcccacaagcgcgtcaggctgtgtgaggctgagcacagcttattttcactttcttgtccataaagtctcacatcatattcagttgttttccttctaccctaaaagaaacacaaccagaaaagccagtctcccattttcatctgtttaaggaattatgtagccacaaggatctttagaagcaagtcctcttaggagaaaatgacaacctctatgggatttcaacaatggagttccttttgaaaagcagtggtgcagcccacaactcctaaattggcgtactttcttcggcttttgttgagtctgtatgaga

SEQ ID NO: 36035 - DNA, 520 bp, Homo Sapiens
gtgtgacccacagcgccatccagatttttaatgtattgtctataatgaccctctttaagcaagtcaataaagataaaactattttagtagatgcaggttttcttcactagcctacgtgtgctactaaaaatgttttggtataagttagtgtagtatcactgacttaagcaagttggtgcatgtttatatgtcttctgtttttataaaagacttgctaatttttctgttgtcttttcttagtctcttcatagtcagaaaaaaatattgggtattttattagcttagcctgaggagagttctgcagtaaaactgccggtttccaaaaaagagggagaaaataataagaattactgactcacacttttattttatttagcaagtaaaaaataacctgttgagctagaacttatttatagtaggccctagcagaccacagctacaactaggaattaccagtcatccaaaatacaatcaagaaccattaaaaacttacattaataaccttgtacgtaccacttcc

SEQ ID NO: 36036 - DNA, 592 bp, Homo Sapiens
gggtgtaacaggatcaggtttctgttttggaatataacttaaaatatttttgaagaaatatggtaaagtgattatccttctggaactagatacaccgacactgtcacattaactcacagcttgttaaatactgtgcaatctttctataacattctttgttatgagactagaatcagcatatgggaattgctcttttcctgctaaactgaagtcattactaactactcatctgtgacatgtactctttcttgcaaccagggattttagcttcacaaaatttagaaactgccgcattgtttcttggcattgctttcaaatgtgacatcatttaaattttggaatattccattttagcaaatacactagtgggtgccaggttaaagatgactgcccaaaaaggggcagcagcatctctgtagggaacaaccacagattattctttcaacctataccatcccacgcctttcaccagaggcatactgaattacaatgagctcaataaatacatttcaaaaatgggttatcaaattaccagcctatagcaatggcttccagtcactgaagaactatattgaaaaacaactgtgatata

SEQ ID NO: 36037 - DNA, 553 bp, Homo Sapiens
agcagaggagtaaaacagacaaaagctcctgtttgttttatattttgaaaataatgtagcctaaggtaaaatgcaactccatttatgaagaaatcagaatacatagtgttctgttgggttgcttaggaaggttagcatggctgtggcacagtcttccaaatacatttttcttattgagccaatcccttgagtgcttcttttcctgatgcaacttttcttctaaaatgtgtgctaaaggccagatgtgagcaccctttgcatattcaactactgtactttgtttcttcttctgctaacagtattctttaatgtgattggtatcctgtgtcattttttctagttcatcatcatgggagtaaaatgttacgttcggaatcaaactcttcaattactactactcagcctactataggttggcaacctctctctttgcctctcccctctttccttttctctttcctacttttccattcttgcttcagtcatttgttttaaaataacatgcttcatccatcgcgtatggcttaactcatattcagctgagctggtgctt

SEQ ID NO: 36038 - DNA, 572 bp, Homo Sapiens
aggtacagtgtcacagctcctaagctgggtaaaaagggaaatttctgaaaatgcaatataaatagtgtgtcgccatggaaaatggtttgtccttatctgaaatgaaagcattaagaagtatatctttaagaaaaaaagtacaatacatttggtgactcaagtaaaatcacaagatgcaaacaactctattagaaattttaaattctgaggaggaagaccctttgggctgtcaaaattggtcttcacttcctcctttatgctgagaaaagactcctttttaaatccttgaaagtataagaactgtgcctttggttgaacatggagagggaggggaaacacttgatggcttacagtcttaaccctctgcatcacagagtaaatcccttccctaagaaccactgcccaataaaatgctttttggcctttgactcaccctccaagtatgagtggtagggagataacaggagaagccttgagcttctcctagaggccaataccaccaagcactaccagcatctaagttacagggacacgctggattagcagcacgttgaagtctggctcctaatctt

SEQ ID NO: 36039 - DNA, 610 bp, Homo Sapiens
accgggcgagctcaacacgtcttttatctttctaagccatattcatttctcagggatgattacagaattggttaatttgaaagagttgtagcataaatattgtgactcatgaaatgtttttagtacttgttttagactttcatttcctttggtcatgctcttgtgggagatttaagcagtaatagcattttcatttttctttcctgcattccttacccatgagaaggtaatctttaatacactgtttttacttagtaagttctggtgttttaaagaaatgggttttttattcaatcataatttattgaacgcctactaagtgcccagcacagaatcagatgttaatctaacataattttccttttttcaaatggtcttatttgattttttaaaaaatggatattaatgtacactagaatggagatttttgtttaccagttatttgttgctatataaatgtgggttaaattagtttttcttccttataccaccaacctttcagacttttaaaggaattactgtagaattaaaattaatagattcctcagtactggccaaactcatggatttgtggcacttcagaataatattggcttttaatgaacagaat

SEQ ID NO: 36040 - DNA, 619 bp, Homo Sapiens
gaaatcactagtctgaggtctgagaaggggcagtgtagccttccattatctcaccagcaagctctgtacaggattattttcaaattttctgctgccattacaatgtgctattagagtggccaaggtggtgagggaggggatgttattgaaacttggttaccagggtagataagataaacttcatcactttcttggcatccacatttgtagccaagggtggaaattttgatgaaagaagtacatttggtcaaagatattaaggtgtaaagctggatattttctaactgcattctacagagtctgtctcttccccattgatgctcatctgaaatagtctgcttgattgtttcaataaacacactttctttcaatgtattgtaaacttgtaaataccagataaccaacttaaaatccccctcccatcccagtctcaagaaataacactggttatgtgcagacataactttcttgagtaagtcaccattttctgtcactttctatttgcggctggtaaaatgacagctcaggcttaacttttacataagctatttttagatttttctcagacatcctttaactatttcttttatacaggatcctaccctaaggatcatttatt

SEQ ID NO: 36041 - DNA, 591 bp, Homo Sapiens
gtcctctcatggactgtgacagcaggatgatgtcgaggttacagcagtttgctctgatcccccaggacctaagaaaactgtgagtgcttcagcatgcaaaggtagagctaccagataaggagaataacttggccatttatagcaaactgcctgactttggagtgagaaaccaagcaccttctaggtcctaggataggcgaattggaggtgcagctgctgaagttcccattctctacatacttcaggagccagggtgtttcatttggttttgtaaaactttgctgtaagtcatcacagttaattctttgaatggacattttagagtgtaactttttttcaaaattagcagaacagatatctctgctcatcctctttatacatttagttttttaaagttcccctagtatacctgttaggcactctaaataggacacagttaaagctaaaagaaggaccagttgctccctagagcctacagttcagaactatcttgttgtcatgtcctggtttggtttggtttgtttttaactcaacaagttggaaaccatgagtttaaagcaaactatttccttttcttaagcttaaagagaa

SEQ ID NO: 36042 - DNA, 630 bp, Homo Sapiens
tctgattaatgatggtacatcttttcacatgcttattggccatttatataccttctttggagatatatccattcagatcctttaattatctttatattattgagttgaagagatttttttatatattcccgttcagatatgatttccaaacatttgttcccattctatgtctttccacttcttagtattatcctttccagcaaaaaaagttttgactaagtccaatttatctattctttcttttgttgcttatgcttttgttattaatctaagaaaacacagtctaatccctggtcatgtagatttatgcctatgtttacttctaagagttatatagtgtgagatcttacattttggaatttcatccattttgaattaatttttgtttctgatgtgggtagggatgcaacaccattccttcacaagtggatatccagctgtgccagctttatttgttagaaatactattctttcctccattggattgttttggcatccttgtcaaaatctattgactataaaggtaagggcttatttctggactcctcatcctgttccactgatctaaattctattcttatgccaccaccacactgtcttgattattgtagcttaatagtatagtttaaa

SEQ ID NO: 36043 - DNA, 539 bp, Homo Sapiens
ttccttaccccaaaatactccctcctgctgttcctttgcagtcaaactttccctaatccccagcccctggaaacctgattggttctccattcctgtggtgttaccttttccagaatgtcataaaagtagaatcatactacactatataaccctttgagactgacttcttttgctgagcataatactttggagatttaaccatgttgttgtatttttcaattgttcttttttattgctgagtagtattgtatgtaactgttccaatgcatatacattgtatataacagtttgtcaacctgttcgtctgttgaagaacatttggaatatgtccagtttctggtgattatgaatagtacttctgcaaacattcatgtacaggtttttgtgtgaccctaccttcatatttctcaaagctgatccctaagagtaggattgctgggtaatatagtaagtgtatgtttacctttataagcaactaacaactgtttttcagaatggttgtaccatttcgcattcccaacagcagtgtatgagagttc

SEQ ID NO: 36044 - DNA, 559 bp, Homo Sapiens
gacatttatcacagtgggattcctattttgggttgatgacgcctttgaagtccttgttgcactttgtctaactattattcttgttcttactgagaatttcacggtaaaaaagacagttgccactgaacactaacgtaatgcagagtacgaccatatgaaactgaacagtgctgacttctatattttactatttggcggggttattcaatgaatatgggaatgggtgcctagccaggagacgtatgtgtagaaaagagctaccagaagtcattctgattaaaatatctctactcttataaatatttgagcacttagaaattaatctggactaggaaactcctccttttaaaagcaaatatcctgggaagatcaaatctctaagtcatagtgacaattattttaataatcacatgaatatcaagctgaaaataagtaattcaggaaatgggagttttgctgggcagaggaagaagagatcatttgagagcattgaggatattaagcaccagtggtaagggaagaactttgtacagctagaaagcattagaagggctctgaa

SEQ ID NO: 36045 - DNA, 635 bp, Homo Sapiens
gacatgacacagttatgagggggcactgattcctctctctttatccctgcagaagaacagagggagcacagaacatctttggttaggccaaagataaggcagggctaaatccaattagtcagggcagtagctttagcaggaagagaataaatgcaccaccctcttctctcccttgggttccccttccttgcttctgcttgagtggtaacgtctagaggaccctgaaagaaggttagaaagagggatcccgtaactcacaactcacatggctcaactcaacatgccagggccaggggtcccagaagggtctggggacaaagccccagccagaaatacagtaggcttttgttgagcatgtaatcttactggggcccttttaggggttgcttcagcagggctagacctagagatcctgtaacacctgtcactaataacaaactgcggttccttacctcaacctccaaactaccattctgggctttagcttgcactggagttgggagactgggcttggacagatggaagaaagagggagggcttaggacttaaggaagactatgtagagcttttaaataatttctaagtagaacttcaattttagcactatcatgggtcattccccctctatcctattc

SEQ ID NO: 36046 - DNA, 357 bp, Homo Sapiens
gagttatttatttatttatttttttcctacacatgggatctttaaggaaatgatatttgtctctgggaagacaaagttacttttagtgtttaaagatagttctattagctgaggtgtactgtgaggttgtggtgctcctttctatttgagaccaccagagaattgaggagtattaccctttttcattattttgtttgattttcaggatacttaatgttgtaatctgcaggtctcattttgtggcatctaaagaaacttttatgaagaatgctagagttcttgctagagctgatctactctcttaaaaactctaaaatcagtggctctagttcacttgcagtgagagaagcatgagat

SEQ ID NO: 36047 - DNA, 383 bp, Homo Sapiens
caagatagggcaggaatgggatgaaaggggactggcctgttggctaggtcagcaaatttgtctgtgatttacagcactaagctcaggatttgacttgattagaatttgattgcctttcatttgattcaagttggagccactgctccgggctgttctatctagtggatggaccatagaagcagggatctcatgacttagcaatattaaaacctcaggcaggtggcttgttggtctgagcagcctctaaatttgtacaaaagcctggtggcctggcctgggttggtaaaaatggcagctgtcctgcatgctgacattgggagttactctgcactgctgcaggctgtcctggcacactgcaggccgggcatcatttcatggtggag

SEQ ID NO: 36048 - DNA, 386 bp, Homo Sapiens
attcagtattgccaccatatctaagcttatgattagtggtctcttcttgttgaagaagctgtgggtcagtttgagtgacaaactcaaatggcaaatcacatctggtgggagttgtgttgcacattagtcctgtgaagtaaggtcacatatcagtttgcaggagtttggaaatctaaaaaaacgagtcctttaccatgggtagtttgagatgcactgctctggagaatgacattagagagctctctaaggttggcttaaaatgtgggattttgttggatgctcttccattaactggtcctgctactaagtgctgtattagcactggtgcacattgaactacagaagcattgttgctcttcactagtcaatgcaaacttgtaagtagt

SEQ ID NO: 36049 - DNA, 411 bp, Homo Sapiens
ggggggctaataactagtctcgtaattcattaattacaattgcaggaagaggtacataagagaagtacaaggtactatgaggccctgtaagattgggtggtctgacattagcctgggtcagggaaggcttctttaaggaaaagacacttgaacttagttctgaaggaggagcagaaatggggtcctcggggagagagcattccatatagtgggaagaccgcacacagtagaaacagaatacagtaggagggtagatccctcagagaaggccagagatactgttgcaggcaggcatgcagagcctagcaggtagagtaaggagtctgaatcgtgctctaagtatgaacggagctactagggattcttagctagaaactaacttaatgtatgtttcaaaaagagtcagcctag

SEQ ID NO: 36050 - DNA, 354 bp, Homo Sapiens
aaaatgtcctcctagtacatacttgcaatgttagttggccacagtgcaatcacactgctatttcaaggtgtgtgtacttgacatgttaacaccccatcagatgccagacttgtggtgaagggccaagagcttctgtgctactcccttcctgtcctgtttatgttggactgcagcttcaactccaacgtgtggctttggcaatagaacttacaaagttgaacattatcccatccttcaacctctactagttagggttcaagatctcactatattactgtttgacattagtatacaaatggtttcttaaggttctgttcttgtataaaccttacctggttgattgaaaagcaaagc

SEQ ID NO: 36051 - DNA, 422 bp, Homo Sapiens
gcagttgaggggtggggttgtccatcctattttctcgtctcaagcaagatggcacagtatcgattcagcagtatttactagaacccactctgtgctggtcggaggttactaagacagggtcctgggatgttcattctctaagtctttcctccgctctgtgacccaccctccttccccttttgagatctggtatttgatgcccaacacattgtccacgctgtgacgtgaccatcatcataagcaggcaagagggcgcctctgctgctgaaggcctgtgattttgttggggaagggcctgttctaagcaactgggaaaggcactgccacctgccgttggatgccaggactcaagaagctggccccagtcactgtgcgcagaagctgtctgagaatgtgtgaagtggactggggtcctttcggca

SEQ ID NO: 36052 - DNA, 430 bp, Homo Sapiens
gaactcctaggcctcccaaagtgctggattaaaggcatgagcaccgttcccggccagtaatttcttgaataaagtcccttaaaaatctaaaaatgtcctacaaatgtaagataagcttaatattttatgattacctccttttgcattattcagagctacaacagacactaacttcttaaagtatcctttagcataattgaggaagaaaaagcctttacctttcaatttgtgtgtgtgcaattatctttaattaaaggaaatcctgcagcaccgtatcccgtgggtcctactgaagtcatcaacttatatgttttcttccttgtgcttgtagggcctggtcactgtagaagatgagcaggcgtggatggcatcttataaatatgtaggtgctaccactaatatccatcctatttgtccacaatgatcaact

SEQ ID NO: 36053 - DNA, 409 bp, Homo Sapiens
ggtgaggtttcagatgtgtatgttaatctactcaatctaattagtttattgaattgctacaatgtattcagtattgtgctttataatatggaggatgatgtctctgtgcttttgctcattcttatccttgacttcaaattatttcctattattctagcctcatctgttaaaatcctaccctcctttccctcaagagccatctaaagatgacacctttgtcacaaagcctttcattgatctcacagccacgaatttagaacttcctcctatagcattttctatcttttttatggcatttattttattctatcttgttatgattacataatctgtttaatccccaattatatattggaaataccttgaaggaaaggagtctttattatctttggtgcctggtgtttagttt

SEQ ID NO: 36054 - DNA, 424 bp, Homo Sapiens
tcaaattttatcttaactttatagactcaatgtggcacatttattacttaatcagagataggagagagagaagaaaggtttcctaaagctaagaaccctggaatccatgagccctcttaaatagcatctttaattttattttgtattgtggccatttttcagaagcattgagggtaggaaatgatctattaagctatttcacttttatagctaattctacactatcaaatgcttgccagattctcccctttatttgagtatatggcaaattacataggtattgaaccattttgattacaagggtagggtgtcaatttggtctgtaaacattgttgttcgcacttttatttattttacatttaaaaatctggcttgtcagtgcatcctccccaactaaatttgtttgtgtcataaattattagga

SEQ ID NO: 36055 - DNA, 396 bp, Homo Sapiens
ctaattgtacactctgacatgtattgctggtcaccttctaggaagccaaagaatatgactgcaggcatgggcattgtagacaaacttaatgcatctgttttctattgctatataacaaattaccaccaacttagtggcttagaataacacatattcatgatcacatggtgctgtaggtcagaaggctgggggaggctcagctcttctccctgttagtgtctcccacgcaaggtgtcaggggcaggctgaactccatctgcaggctctggggaggaatctgcctcccagctcatctggggcatttacagaatcccagtccttgtggctgtgggactgagacccccattttcttgctggttggaggctgggagtacagaaacaaggtcatgcccataa

SEQ ID NO: 36056 - DNA, 424 bp, Homo Sapiens
atttaaaatgttttagatatttgttgaggaccatctacaggtaaagcagttttaggaatggaggattttgtagaaagacacccaaagtccgtcttctcagaatgttctgttctacagaggatatatgataaacaagtacaaaacgaaggacacgaatgatggacggaagttctgtgatagaaatacaaccatgcgcaaagtgatagaggaggggtgggcaggaaacccaatttagatgaggtggtcacttagacttctttgggaaggtggtatttcagctgagtcagaagggtggatggagcaagcaattgcacagatgggccaggctggcaggtaagagcatttaaaatggttcaaaggtcctcaggccgggggtaatggggtaaagcagagactaggtaacatttacttcatgaatcctttt

SEQ ID NO: 36057 - DNA, 422 bp, Homo Sapiens
ttcagagtttcttcaatacctgtacagtagtgtggtcattggaattacatggcattggctggtcaaatgcagaagaccgatattgagacccttcaagacacagctgctataggggaaactgagctcatataaccaggagaaggggaaagatgggtttctgaaaaaaggcttcaagctacatagaatcctctcaggatgctgagaaactcccagggcaggtagttatcagcctggtgagcaagtgcaagaaataactggattatgagaggcatgcctcacaagttggccccttcaatatagaagcatcagtgctcccagatgctggacaatggatgggcagacaaaggctgcagctggagtcccccaactgggcagctgcccttggggtgaagaagcctgcctcatgcaaggtcacacccctt

SEQ ID NO: 36058 - DNA, 422 bp, Homo Sapiens
tttccgaatcagatcctaatctggcaaccataaaaatttccaactcttcctttttactattttactaaaatttacttctactgtttgtgtttcaacacaacaaccaaattctaagagaaatccatcatagcctagtcttcataattctcttcacattaaaaacaaaaatggttcagctacttgagttggtcagcagtcaaccgcccctcccaatttctcattgttatcttcttacaaatgttcaatagccctaaaggttgaaagggaacacaaaaatgaacatattagcttcacacacttttttagagaaagacagcacttgcaactaaccatgaacagcctgctaccttggtaaagcatcatcaatagcaagaagactgaaaggcccaaatgatgctgtgctcaagtccaattactatgaa

SEQ ID NO: 36059 - DNA, 417 bp, Homo Sapiens
gtgacctttgatagaccttttctgtaatatgggagaaagaataaaattaaattgttttaaatgagataggaagtgaaaaataacctggtacatcccttttgcctcttaaaacctttttatattcaagtaatgtttctatacttgtggatattctgttagacatggttatctcattcacatttaaatgcctagaagccttttttatagctgttgtaaaagtttgtctttattagccatatgtattacaatggtggttggtttatacacatttttaaccttataataatagctacacacagacctactgaaggagcaaaagaaatattaaaattttaccgtctaaaaaataagttttattagtgaatatcaagttttgatttgtttatgaaaggcattcagagacctgtggcaataatt

SEQ ID NO: 36060 - DNA, 383 bp, Homo Sapiens
aggaaccttagcttgtgagaaggaagttgtacctggaaggatttgccatctatcaataagaagtaactttgtaaattcagtcaaggatctaataatctattatatctgaaatctgggagctaaattggactgattatggaggttagttggatatttttccacttttgactagtcagtagaaattccactttgaattaacttcttgggactgagtacaagttgagttgcccacagtgttttgttccggaaaaataaaattatgttgttatttattttatttttttgacaggggtcttaccccagccttggacctagtggggttcacctccagccttcccaagtaagctggggacctacaaaagtgtgccaccatgcttggttaa

SEQ ID NO: 36061 - DNA, 400 bp, Homo Sapiens
agaaaagcgcagtattagggtgggagtgacccgattttccaggtgccatccgtcatccctaggaaagggaactccccaaccccttgcacttcctgggtgaggcaatgcctcgccctgcttcaggctcacgctcggtgcgctggacccactgtcctgcacccactgtccgacaatccccagtgagatacacccggtacctcagttggaactgcagaaatcgttcgtcttctgcgtcgctcatgcagggagctgtagactggagctgttcctattctgccatcttggttccacccccaactctccagtttttgaaaggagagatgattaccctttctgcagtatagttgaatcaaactctaggaactaaagaaaaagattcagaaaaatgtttttcgatttt

SEQ ID NO: 36062 - DNA, 430 bp, Homo Sapiens
ttttaatgtgtctttgtctggttttggtatcagggtaatactgacctcatagaatgagtttggaaataagccctgcttgtgattatagtagcattttgggtccccagggaatagcttcaaatcagagccagtgtagaatataccttgaaagctctgggtatttccctctttcttgaaatttcttccttttctctgggatacactcaggtaagtgttaggctcctctgaagagcttaaaggaaaatagtttatacttgtgacagtcacaggaacttttctcaaggagatctagccttccctacattcatgggccccagggactgaactgggtaagagattacttctgcaggacagttctctgggtgtccttgggactgatccagttctccccactttcttgtttacaattctctaaaacaacagtagaatg

SEQ ID NO: 36063 - DNA, 369 bp, Homo Sapiens
caccatgcactggctaccaacttgtctgagtccggtgggacagaacactcatattcacaagttacatgaagcagatttattacttacagataggagcaaaggacaacagaagcctggtcccccaagcctcaggaatgctgcccaaggtggataatgccttgactgtgtatgcctcacttgcactgcagcagtgggaccctggaagtagcttggcttgggttttatgacccagggcaatgtgatcactgggctaaagcacttgaaggacatcctgttccggggcgggcttttggggggatttggaacagagcccaaggaagttcttggctaagtcccttcctatgtcaagatattacattccagcacatt

SEQ ID NO: 36064 - DNA, 392 bp, Homo Sapiens
ttaaaagttgagggatttatccaaacacagcttcacaacagtagagaactgagtcataatctgtgtaaacccagagcccatttcccgtagcatcttgcctatgtagtgaaagacaggttcccctgcttggtgtgttacctagtgtgcttccttgtgctgcgtatctcctgcttgtccgtccatagctctacacttctccacctcactttctatcctggctcccttgccctcctctttcagggagagtgtgcaaaggcagacatttcaaggagatgcaaaaggtgaaatttaaaattgctaattgaagttttgggcaccatttgtcatttgataacatcttatccaggagacagggttttgagatcaaccggtctgaccaaagtttattaggt

SEQ ID NO: 36065 - DNA, 431 bp, Homo Sapiens
tttgagccgtggtatcttttgtttgctaatgagatgagtggcggctgggggccttagatggcttcagaaaaggggctggtcaccagaaagaccaaggcaggattagcggggtgggacaccatccctccagggaggagaccgaagctgaaggttaagctgatcaccaagggctggtgatgtaatcaatcatgactgcataaaaaagcttccataaaactccaaaatgacaaggttcagagagcttccagacagctgaaccgtttggaggttcctggagggtagcgtgcctggagagggcatgaaagctccgtgccccctcccacgttccttgaatctctccatctggctggttcttctgtatcctttatgatatcctttattaataaactaagcaaatgtaagttagcatttctgtgttttctgacccgccc

SEQ ID NO: 36066 - DNA, 424 bp, Homo Sapiens
ttttggtctcggagcaataggctttattgtatagtctaggtgagtggtatgctataccacctaggtttgtgtaagtacacccaatatggttctcacaatgacaaaatcacctgatgcattccacagaacatgtacccatcattaagtgacacacaactgtatttagaacatcccaattactgtcatccttctttagtcatcaagaactctatgtatgggaggtacaggtaaataagtggtgggttttatctttttggttttatgttagacaatatttctactctaattaaagtcattttcaccgcaaaacatgatgaaaaccaagaatggattaacaagcacctttcttagaagttcttaagattttgcttcaatatttttcagtgtgtggaaaaagcaaaattgtaattctatgtaccatagg

SEQ ID NO: 36067 - DNA, 376 bp, Homo Sapiens
ttctgctgggccttaacattgcagaaattgtttagaatgacataattgagaggagattttcagaaacatacttattaattttcatgagaaaatcagattgaatatcaccaactagtcagtaacaatttcaaatgaataatttcataggtgaacacacaggtcatgataaaaacaattagaataaaaggagtctgtatgattccatggaaccaaagtttaaaaacacagttttctattgcttgagataaatccagtaaatccgaatgtgaccttgacttgtcaggtcaagacaccaattaatgtttgctccccttcactccgacccatgcctccaggcaagaaagcaattaagcttttgttaaaaatcaattatctc

SEQ ID NO: 36068 - DNA, 408 bp, Homo Sapiens
ccgatactattcaaatggaactttatcactaataaacacaagggaagaccatgccccatgttagcaatgcaaattattgctacagctgcctatgataatttggtctttagttgataatatacaagagaatgtggacttctaagtccccttgccttgcatcctctgtttcaaatgatttaatgtgttgtgtaggaaagcagataataaaacttaggagaatccttcccagatttacaagggtcatgaaggagatacttctataggtataaagtgtatgaagtgttagaagatcattagcaggaacccaagtacgaaatgggttatttgaataaacattctcagatttgagttagcctgtcttgagatctggctgggagcgtaggacacgtgctcccctttgttctgctc

SEQ ID NO: 36069 - DNA, 392 bp, Homo Sapiens
tatgacttagtgccttggataatcacatgccatagatgaacatgttcaagactcagttcaaatttaactttctgtgaagccctacctgacttccctaggcaggtattttctccatgcctatagtatattgaaactttttctgttaaaataacataacatttcaattacacacacacaacctgtctcttccactgaacttctctctccccctttgtattctcagtgtctagctacacataataggactttgataaatatttttgaatgaaggtaatagaaaacccgaacttctctatatttgtgtactttcacaaacaaaggcttagaattccacatgaaagtccacatgaggtaagtgtgcattcatgagcatgtgtgcactctgggcaaac

SEQ ID NO: 36070 - DNA, 434 bp, Homo Sapiens
taacctatcatgccttctgtgtaaaaccttcctctccctaaatcttaagctatcaatgatcatttcaattgtttcacaggactttgcccccaccagattctctatactctttagcattctctggtatcactaagttttgtccttttcttgtaccacttattatatgccaagcaatagcaataaagatccctaaagtaaggttgtggtctaggagaaatatgactaaagccatgagacaaatactatggtagaagtgtttttcaaaaagtattttattagcaagtacagatgaagtatttaattttgccttaatcggtaggggaaatcaagaaagtttctaatctgtaattaggagcaacaaggcaaactcatcttcatcagttccaaaaatccttataaataaaaaacctatccaatggaaagggaagaaaatt

SEQ ID NO: 36071 - DNA, 483 bp, Homo Sapiens
ttccatctagactgatatattaaaggatacttggctgaagaaatgagttattggaaaaactaacagagttggatgttatagacttgatctccccagatcctagtcttcccacccgagacagccagactgccttttgggtcaaacttctgaagttgtgcaaacgtatggacaaattaccatgagctgacaggggcagccgtgaccatttcctcacataaagtggcttttgtgctttttactttggtgtgctattaaatgaatttgtgctataaagtccagtcaaaacagcagcactaattgaatataatctcatctttgctttgacaggatgcagttttatcaaggcagaccagtttagttctcttatgtgcattttgggttagaaatttattattgtttaagaattacagatattattcctaaaatagagtgctaaccactgagagcatgaggtggcagaccaggaagagtctggaactggga

SEQ ID NO: 36072 - DNA, 359 bp, Homo Sapiens
tgcaaaggttgtaaagtcagaaggagcttgtgttggatggagaaattgaaagacctgaggattgcaaagtggctggcaacagacgggtttggaatagacattggaagaagcttttagggcatcctagacagcgttgcgactgcttggggcaggggcaggaaaaagccactgatggactttcagggcagacctgtaatccgagttgatgtttcagatttagtcgaagggtgtgagagggcctgagacggagaaagtggtgtggcagaagaggttgcctggtggccatgggtccggggtgcagattatgagagaactctggccagtgactgctcacccggggcagcgttgagtccatcaac

SEQ ID NO: 36073 - DNA, 387 bp, Homo Sapiens
tttgctaaagttattaatacttgtggttaattcttccagagttcagagcatagaacagacatgccatttcaagaaggctgtagtcatgggataggttttgagaactgactgtgctaagctctcatttattttctgtgttttatactatcttgtcaactttgagctatccaagcattgattatcgattcagacttggagagttctttcaggagtcatgggaaaagcatcccatgtggacccgcccaaagccaacgtcaaactcttgccctagctgaggcttgtactccttttggtttctgctatggctctttctaggaagtcccaagccccatgcagtgcatttgacagggagaggctcaggagagaccagtagccccatccacactt

SEQ ID NO: 36074 - DNA, 371 bp, Homo Sapiens
tgagcatccctatttatgacctgtttggtaacatgatgtgcatgtctacctgagtttttggatttttcttcccagtcccactagcatattgaatggaaatggaggtgtttggggggtcatggctggtctgtctctttctaggcaggagaggaagagaactgatacctgctgctagggaggattaatggcaagaaatggacttgttttcaaatagtctgatattctaaactagcagttagagagtacctatctcatacaaaacaagtcttctaagctctgtggaggtacatactaagaattaaacagcaaccagctcttacataaaactatagtttacaacaggggttgacaagctatagcctacaggccaa

SEQ ID NO: 36075 - DNA, 392 bp, Homo Sapiens
ggagctctttattacccaataatttacaacacagggaagtgttctgtgacccttttaacccttcttgagcatgataacccattgcacataaaatatatctggttttggctttgctgagtaacgaaaataaaatatatctggtgattgcctgtaagtgggaagactgcagggccctgcagcagcctcctcagcttcctctcctttatgggatccttctagcccactggctaaaatagaaatagaaatgaatattcctgctaccaccttgacagtccccattttaaccattctttaagtacctcaccaagccccttgggctgacccactgcagtaatagtcctgccttcaaacttccatgttgccagctctaagaacaacagattgtaaacctc

SEQ ID NO: 36076 - DNA, 385 bp, Homo Sapiens
tctgacttattttacttagcatagtaacctcatagcatgtgtcaaaatttcctttctttttaaggctgaacaatatttctttgtatgtaccacattctgtttatctgtccacacattaatggacactttaattgcttccaccttttggctgttgttaataatgctggtatgaacatggatatacaaatatctgttcaaggccctgctttcatttcttttgggtatatgcacacaagtgaaattgctaagatcatatcataattctatatttaattttttgaggaattgacatagtgttttccacaagtcactgcaccattttacatttctaccagcaatgccagaagagttcgagtttttccacgtctttgccaatatttgttat

SEQ ID NO: 36077 - DNA, 464 bp, Homo Sapiens
ttttattagaaaaccttttatttaaaaagacagaataccaacagactagttacccagcactgcccaaactgaggtctaccactgaggtgtccctgtaagaagtaggacccattgttagcaaacataccagaatttataacttccaaacaagtctacccattctaaggatgctttaacaaaaatgctgttagatggctgattaatatctttattctttttaacaactttcagtccaaagttgatctacttttacaactgttctctcgtgtttcaattcttccttactgtcgacagaggagcagcattatgatttatgtcaaagtatttttattccatttcaatgtaaaataccatgttttataaacatttatttttaatactttagcagcttagtatttcaagttatacattatctgtatacttgctggtagccaggatttggtcttgcccagggaatactcaat

SEQ ID NO: 36078 - DNA, 404 bp, Homo Sapiens
taaatggcaggatacagggtggggctctatttccgtttatgtgaggattcaggagttcattttgcctgagttcagcttgtaagcgggcaacttttttagtgcagccatataagatgttcactttgttcatgctttgaacagcaggaaaaggttagagagggacttaacagcctctccccatcccctaatcctccttgtagcaatagatgcatcactgttatctcagggtaggaaaagtaagtggaaaaacagagggcaactggaatgaacaagggcaaggcacacagctttgcagaacagcggggggccatgctttccaaagagtgttccatggaacacccaatcctccaaaatgtgctgtgggacagaaaaggccctcctggttcttccctcctcctttcact

SEQ ID NO: 36079 - DNA, 403 bp, Homo Sapiens
tcggacgagaaaaaaattcctcctaccagtattaatggcaatatgagagactgacttattctccttggctttgattttgtggagaaaggtctctcatcatgcaggtttgagtttgaatagacataactgctctgaagggacattctctcaacctagtacgtgtagattcccacaggtaaaagcattgcttagaatgaatttacaattccacattagttaatcacttgtggattgtaatctcccctgaaccaataatgggagtaagaacaaatggagtgatcagacccttaggaacgctggataatagaacgagagtataaactaaatgattaaaggacggactgagaggcatgggcacactctccagaatggaatgatcagatatgacttgttagggatgttg

SEQ ID NO: 36080 - DNA, 402 bp, Homo Sapiens
tccctagaaattttctcaactttgtgagtttcatccaggtactttgccgttcttgaacatattttcatgtggttttataatatttattcaacattattttccattagttctctaattttaattgttggtaagcatttcgatgtgtagctattacatggtgcagaactgatttatccacggttaatgtctgaggagaccatgacccattttatctgctgcgtggtcagccctggtattcatggcaggttgtctgaatatttctgatgaagtctttaagtacatgtaattctgaaaacacattcccattcaagtaagacttatacaggatgggtaagcctaacatggcaaaaggtttctaaaaaattccataaacattaagcatatttatgtcatagcattaag

SEQ ID NO: 36081 - DNA, 444 bp, Homo Sapiens
gtttgttttgttttgttttacgtttccaagggatttctgggatcttgaagacttcagggacactgcagaaatttcttttctcattaaggtgtacctttctttttccttggatgattcagaaggtttctcacagttctgcactatagcctgtggtgctgtgtccaggctaatttctctttctacagattgggcattgacttcctcctctgggtgcttctctgaatttactccattcgtgggaagagaatcacaccaaatccaactctagggcagtgaagagggttcaagggatttgagctgttagcatggttgaccccctaactggtgaagtcatttactaaactctactcatgaatatacagattccttcttcaaagttcacttgtgaggtttccagaaaggaaacagtgctgggaagagctgtgtaactagttgaggagacat

SEQ ID NO: 36082 - DNA, 406 bp, Homo Sapiens
gcccctgccatcctgactccctaaggttttctatagtactatgctctcactcccaacttgaacacttctttaagctttccatccgtagtccttaattgggtttcagtccctccactcccattgttttttctccttacccctctttctcttttgccccctcccccaattctgtctccattcctagggttctaccaatcacatccgtgcactgtgatttagaggcatattctctgtagctgagaggggagccctgcgctcacttgccatatgtttattagttatgaactgaataaaggaaggcttgacttcctgggtcatggggagtgaaggagtctgggtgacaggaagcaagcggcctgtcatgcctaattgcctagctgccagattaaccttgccttgaaaataa

SEQ ID NO: 36083 - DNA, 454 bp, Homo Sapiens
acttctatgtattctcttctactttttacttctatgagatcgaccttttttagtttccacatgagtgagaatatgcagtatttaactttgtttcttcacttagtataatgttcttcagttccatccatgttgctgcaaatgacaggatttcattctttcttatggctgaatagtattccattgtgtatatacacatgccacatattatccattcatctgctgctggacacataggttggtaccatattttggttatcatgaatagtggtgcaagaaacattagtgtgcagatgtctcttcaatgtaatgatttcctttcctttggaatagtttccagtagtgggactgctggatcatgttgttgtattttcagttttttaaagaaacctccatactgctttccacagtggctgtactatggaaaacattcccaccaatagtggtataagacctc

SEQ ID NO: 36084 - DNA, 392 bp, Homo Sapiens
acgttcacaacacaccgacacactcacatgacatagacatgcgatacacccacgggcattcatggacacacttgtgggcacactcatacacagacactgacacactcaaacacaacaatagactcatgacacgcttatgacacacacacatccctgacacactgagatactaactcactggcacactcatactcctaacacccgcatccctggcacagttactaacacctgcacacacccgtgtagacgcctacactcacacacatgagatcctgcaggggcggctgctgtgacctgcctccctgctttccaggcaaggcaggccccacacagatacaccttggttggcccggtccccctgagttcctggcactagttgtcggtcagccctg

SEQ ID NO: 36085 - DNA, 410 bp, Homo Sapiens
aggctccatgcctcccgactgaggaagcaagcaaggctttcagatttcatgcctccctgcctgccacagcttctgtgcttgtatctgcactgcctgtttgtcccctccccaggttctatccaggagactttgtgtttggtcaaaattgttacaaagttcagctggaaatttccttctccttgtggtctttccccaatttcactggcagccctccccaaggatacctgagagacagagtcagaaatggcttccctggggatggaaagttactcacagggctcttcctgttgcttcccctacccctgtatttggctcagctctctaaatttgtctcagctcccaggcaaggtcaaattcttctgtgatctggaccttcaggttccccaatgaagatgtgtgtttgggggcaa

SEQ ID NO: 36086 - DNA, 494 bp, Homo Sapiens
gattcatctgttttaaaacttggtctcctttgaagcaatcatatccatgagacctcaggtttttattcctgtgatgcatgtcatatcatgcatcactggaatacaacgcatgttttaaactcctgtcaccacagcccagcaagctcaagggggattcctgcagggactccgggtaccagaagaaggtcagccttccacggtcaagaccatccaaagccgcagcagctgaccagtggacacagaatggaaggactgttcccagttcggttttcaatcagcagcaggcatgccttccagcaagcacacctcatctcaatacgccttcctgggcacttaagttcaggggtggaaacagctgggctgaagggggcttggtggtctactgcgaccagctccgtttcaaaggtgggaggactgaggcccaggcaggggcaggaatcccatcagatttgggaaaatacagggcggcttcctcctgctgttgctatgacccc

SEQ ID NO: 36087 - DNA, 442 bp, Homo Sapiens
atgtctttctttggcacagaacatggtccctgagatccatttgttcttgctttcccctctgttcactctctcaatgttggggtggcccaggattctcttctggctcttccatgtccgcagtgcccatgctccacgtttcacctgcctctacagcaggcatgcttgtatctatcccgtctagccatgagctgtgtccaggactccggacttgcacctaaagctgccccttggatatagtcagtccctggatgactaaccatgtggcccaaactagactcttaatttcctctgccaatcctactcctgcacacatcaagtgagggcatcccaagtcatgcagttgctcaagtcctgtgtctaaggtccttgattcctcctttccttacctcccacacctgggtcagcaacaagtcctgtccacaccatctcaaaaaacatgttc

SEQ ID NO: 36088 - DNA, 438 bp, Homo Sapiens
gtgctgtcattagtagtgagcacattaccatctgcaggacaaagactcatcaattcagaaggctgttgggtgtagaaactttgatagtgttttagtcgctattttgaaatccagccaagtgtttcctattaaattacatgactgatagctgccgcttatggttacttagtaaaaactcctgttgctaaatggctcaaatggatgtctgtgtgtttattttgccatctaatacaaagcataaatttttcttactccagtagctcatcaaacccttgaatctttcatcataagcacattgaggcaggaactatgcctgtgccatcctcacacctttgcaagtggcactcaataaatgtttctcaagtattgttcagactcagtgagggtcacatccccaggaggaaaaaggacgctggggaatgagtgatacgagatttg

SEQ ID NO: 36089 - DNA, 368 bp, Homo Sapiens
ttccttagcactccttcctttgccccctataataatcccgtcccctcacatagtattcccttaagaatggtgaaattaaatctaaatatagctctccccttttactcctattccagcatagatcattgcaagtaattaacctttgttattccatcaaatctagaatgcaaacctacatgctaatttacttaagtcagactcaataataaatctgcgtctatagcagctaaactcaatgaagatcctggatgttgttcagttatttggattactaacatcttctttttgaataatggcacttgactttttcaggcacaaaccatgttttgtattggtcttgacagccactataaagtactcccccaagt

SEQ ID NO: 36090 - DNA, 410 bp, Homo Sapiens
gctgggattacaggcatgagccaccagcccggtgacaaatactacttctaggccattttgcaagtgagaagggcattcgtgggcacatacgtagatgcagtagagcatatgaaatcagagtaaacaccttcttagatgtcttataattagtgcaaagaagtaacccttaggcaatgtggtatgggtttcaggaggctgcacgtaagtactagcctcattattattaaccagttttttctgtcatgtctctggtcctcagtttcattgtctgttagatgaggtggttggcccagatcacctaaagaacttggaacaaaaatcaatcccttagctccatgtcccagagtctgtaatctggggtgggaccgtgcattggaaattattttcaaattccccagagttcttaatga

SEQ ID NO: 36091 - DNA, 401 bp, Homo Sapiens
cctcacagacctcctggctcacctcacccccaccttatcacccctctgacctcccctgcgcttactcccttcaagccaaggctcttctttatttttcaattgctgcaggcatattcttgcctcagggcctttgcgtttgctattccctctgtctggaccatgcttatcccagatagccatatggttctttctcttactgcctttagatctttctcaacctcacttcataattacgtcacaccaagctatttaaaaatgccacccacctaacccaccactcctctccataacccccaggcattaagcacgctctattctctttttgtactacatttttctccatagcacttatcaccatagatatgccatatgttttacttatttattcctgtataatctcc

SEQ ID NO: 36092 - DNA, 394 bp, Homo Sapiens
tactacctgggcttgcttaatttctacaggctgtcttgtctttcatatgctaaccactatcttaaaatgaaagacaagtgcttttctttttcttgctgttttttaagataatttcaccctgcccaccctcaccccacttctgcatgtctttttaacttgttagcttcagtctattttctttgtcctgggatactgactacttatcaggaatgactccatttccttgtgtatagagctgactcttagaagaagggggatagtgtgtgtgtgagagagcagaatcaaagggaagcatgaaggccacagggaaaataagcttggcaatctccctaggactcagggaaatagagctctctgtccacagtgagaatcactgttaggcttgctcctcagt

SEQ ID NO: 36093 - DNA, 479 bp, Homo Sapiens
agcattccttctctgttgcttctgccttctgccttacgtgccagagaaagaactcatgacttctgtccagagtcacaaaatcttggctgatcttgatgaaggagtcttgcagcattttctcatggcatgaatcttttgaagagaggtgccagtataacatagcttcactaggaaaactcttcctagaatagaattggatttctttttttaatggtttgatgtaagtcaatgaagaaacttgagtctattttagtgtagaatgacttcaacccccatcaagtttggaagtcttctctgtgtgagatttagaaaggctgtacacaatacaattaggtcttgctttgtgaagaaattagtataaaagatgacaattaatttagaagtgatcattttaaagcatgttttgtaataaaaatatactccagtatttgtagaaaaaagccctaaactgagtcttgattttattttttaaaaaattt

SEQ ID NO: 36094 - DNA, 475 bp, Homo Sapiens
ttgtcctctttctctctcttttcctttccaactcgggactctcggtggacagtgcctaggcatggaggcaaccgcagtttgttggttggggccactctccagggaaactgaaagggttccgtgtggaagcgcctgatcaccaccacccggtttgggtgagggacctgagtccttttcttttcagtcttgcagcagctgtttcctggcagggcaaatggtcagaaataccatatgtacaggccttcacggcctacgccaaaacctaatcatctccgcaaagaaagtccaaagacaggactagatagtatagatgacccccttttataagggccacctgtctctcagggtgaacataaccgcccccacgtagccccttgccaagtgctcctgaggctaaaacccaaaccctggacaccctactaggtccccctcacgctcggaggggacactacattccactctcccttccagccct

SEQ ID NO: 36095 - DNA, 394 bp, Homo Sapiens
ctgtagattggcattatcactgtaagataaccttaattctaaaactcacagttaacaaaatggccacactttctttctcaagtcaattaaagttgattttaattttcctaatgttacatgactgaaaaaagttgagacaatggaaagagttttaatcaacgcagtaaataacctgagttttaataaaataacttggtgtgaacaaatgtttggctggcacagagcattatgcttttccagctgttaaaattaatttgagaatatttattttgctttatttggtagaaagtataaggttgttaaccgttgtatattcaagaggtcattccccttcctccccttttgaagtagtcacaaagtatttgaagtgccttttgatactagaaagtgattt

SEQ ID NO: 36096 - DNA, 492 bp, Homo Sapiens
ccaagtgactgccaaagtcagtagcaaactaaagactattccatgttgattttctaaataatggcttgaaaacagaggtcttccacatttattgcttcttagtcgtatgtgataaatttgtctcctaattttaattttgaatgatttttcccctttgacatttctaataaatttaaccatgggtagaccatcttttaaggtccctttcaattctcatttgggattttgaattttttaaatatatctccactttttaatataagcatgtatttgaggtgatatgatttatgcttttatttcttactcatccaacagatatttattgagcccatactgtccacctattactggagaactagaagtgaatatagggccatgagctccctgaaggagttcactgtctagtaggggagctgagatgtaaacagatggcaacagtatatgaggggtattttctcatcaccacttctaaatctggttttgccctatttc

SEQ ID NO: 36097 - DNA, 404 bp, Homo Sapiens
cccccttgacctcaccagtaaggcagctaagggggaaacggagcagggcattgaagccacacggggctgagtctgaccctaggttttgtgccttgtctgagccccatttcccccaccgtgtaaaatgagtatgtatgtgcctcatgaaattattgcaaggattgagtgagaacatgcagcgcttcctagcaggtccttggtctatgcagctttacggtgaaggtgatgacttggacactcccagcctagaacttggcccacagaaaggtttacatcagccctcgttgtctgggagtggaaatgctctcaacgtttcaaccaaagatctggagagtagaatacattctgtctttaaggtgctagctgttcattttccagacaaacccacaaataagtaaaagaga

SEQ ID NO: 36098 - DNA, 354 bp, Homo Sapiens
aaaagttgaatttagtatgcttttgtaagttaatataatgattgggacattttgttttcttagctatgctttataacaaaatagttctagttactttcttttaaatggttactaaagtaataacttgctttttaaaaacatagtataactatttaaggtagactatgaagagtaggctgaggtttcattttaaattatctcctctttctgccatggaagagtttaattcccctgatgtgcttatggtattgaaagcccattgttggtgttggtattgaaagaaagcttagtttttctgcgtttcctaaaaggagagggaagaaagattttttaaaagtggaaaatccattgatt

SEQ ID NO: 36099 - DNA, 417 bp, Homo Sapiens
gtgtgagccactgtgtccagcactttcttttgtttatatgtgtttacacaattgttccatcataacagtcacaggcagggatatgttggcacatgtactggcatgtctctgcacacaacccttaaccactagggagatttgaagggtggcagtgtgctcaccccaccccacccagggcctggaagtgcagaggcataccataacccactctctccttccacctgggcccaatcctatggatggacagtgaaaaggtaggtaagtggaagatacaaccaaaggggcttcgtgctgctacttgtatagggtacgagggagcaaacagccccttcctaaggtggagtagggcagtaggtcagagagagggagaaaaatggtctttcctttgggtctcagcacccagaatccttaccttgg

SEQ ID NO: 36100 - DNA, 472 bp, Homo Sapiens
ggctagtcttgagttcctagcctcaagagatcctcctacctcagcctcccaaagtggaattacaggagagagtcactgcgcccagcctatttttcaacttccatgtcagtcaccatctggtagtctgtgagttcctcagggccagggcacaaggtttatttatatctctgtagccccatactcttagcacagggtctgaccagaacaggtatttagcaaaggcagaaaagggagaaaaaggggagaatgcagggaggttttagggtggaaaggggaagctacaattacaaagtacattatagagggcaaatggccagcttccttggagacaaaaaagaggcatggcccagcttgcatcggcacaacccctacacaaaacttcaggctctcagaatctaccttggcactcagtaaccatagcccaggggcagagtaaccatgggagggtttcagggagaacagattgttggct

SEQ ID NO: 36101 - DNA, 434 bp, Homo Sapiens
tatctaatctgataaacaaatttatctttcttcgtagtgtctaggcgtcggctgttcctaggagctatcacctcatggtctttattgttaaatttatggtttctggctaattttatacctcctactgagaaaaaagcaggaatgtttttattatgcataatatcatcgctcttagaaatgtgtttttttattgaaatggtataatcttcttgctactgcaggttccctaataccatgcatttcagacctggttacatcattactcatgacccctgtatccatgtgtcacaccacctggtgaagtactgaccttttaatgactcctcctccaaaagggttggtacctatgcctcctttggttgaaggatgaccacctaacacaaggtccttaaccagagtataccaaaaaaaggggaccaatccctttggaccaa

SEQ ID NO: 36102 - DNA, 481 bp, Homo Sapiens
aacagaaaatggctaatgggcataccccatatacttaaactatcatcaacaaattataatgagtgcttacaccttttaaataatacacattattcctaagggcaaagcaaaggttgtttttaatgctttctcatctcatcacttcaaaggttgtttttaatactttctcatctcaccagtctgcaccttcctatctattgtctccttacaacctcatgctatgcttacattacataaaggagcctctatcaggcctgtcccagtcctaccatgtcccataatgccccatgttccaaaattaatccattctctcccatcatttcaagtcaagtttcccattctctcagtgggacaaaactcagctagatgttgaagggcaagaaagctctctccaaaaatctaaggacagtaccaacatatggaataactaatacgtctaatattcccaaaggttatctgcaaataaatactagtaacaaac

SEQ ID NO: 36103 - DNA, 458 bp, Homo Sapiens
tgcccaggctagtcttaaactcctgggctcaaacaatcccctgccttcggctctcaaagtgctgggattattggcttgagccaccacgtccggccaagaatcttttctcttgtgatgcactccagaacaaaacgtcactgcaaaaacacaccaatgcatgagtttcagtcctaagtcccatttatccaccaaacactatgtgtcaggcacaacgctaagtgcttctatggacgagcttcccttaatctcagcagtaacaaccccaggcaatggggcctgttgacagatccatttgccactgaagacagtaaggctcagagagggtaagtggcttgtgccatgccagccagctaaggaggggcagaaccaggatgcaaaccccagccgcctggctccagactcgtgttcccaaggtcccactacacttggtcactccactgcattctgggaatcctggt

SEQ ID NO: 36104 - DNA, 387 bp, Homo Sapiens
ctcctctagaattataactactcccattcaaccctactatgcaaccttagaggctctatacaggaaacttgagctaggatagtgttagaaccaggattccaaagcccatgttttgttcattgtttttttctgaaccatcctggctcctgcagaaattcatttatgctgaatttaacagtaatttttaaaaagcagacttgcatcatgtttactatgtaccaggcagtgatccaggtggtttgcatgcattaactcaatctgtccttacaacagacctatgaagtaactgctgttcttagccccttttaagcaaggaaactgaaggcacagacaggtaagtgactgtaagggtcacccaacaatctgatctaatttgctattatttcg

SEQ ID NO: 36105 - DNA, 463 bp, Homo Sapiens
tgaattttataagaataggatcataccatatgtactcatgtctaaattcctttagtcattgtgcttgtgagattgaaccaagtttttttgcgtgctgtagttcattcctttacaatactgtgtattgtaactatgtataccacactgtatgtattccttctattgatggacactgtgcttccatttccagctattgtgaatagtgctgcaatgaacattcttttacacatcttttggtatccatatatgtgcatttctgttagacatatacctaggattggaattggtgggccctaaggtagcggtccctaacctttttggcaccagggtctggtttcttgaaagacagttttcccacaaacaggttgcgggggtgggagtggggcatggtttctggatgaaactgttccacctcagatcactggacattagatgctcatacggagcacaacctagatccctt

SEQ ID NO: 36106 - DNA, 387 bp, Homo Sapiens
tgggttcaagcaatcctcccacctcagcctcctgagtagctgggactacaggcacatgccaccatacctggctaattttttccattttggtagagatagggtctggccatgttgtccaggctgtcaaaagctttttgaggctgaggcttaatcattaaaaacaggaagcccaggtccctcaccctcagcactcaccctggtatcctcaccacagctgctagctttatgtccccggcttcttcctagctgggagcatgcctgttcccagtgccactggtctagggagaaggagggccaaggccatgaggcagggaaaaaaagaggcttttttggggaacagagagaaggtagctgagctggcgcatcctgagccatggggctttggtc

SEQ ID NO: 36107 - DNA, 388 bp, Homo Sapiens
ccaaaaacttaaaggagttgagagagtgaaccatgtagttacttgatgagagagtattccaggcaaaggggccagccaagtactaagtatgctgggcatgttcaaggaacagcaaggagactgatgtggctaaaagagagtgagtttgggagaatgtaataatgaggtcagagagatagcaggggctcagttcctatcggctttaccactgagggagatagaaagcctttttaatctcatcagcagcatgataataacttattcatttaataagcatttaacctacctttgtatccagcatttgataattcagaagtgagtaagatacagtgtctgctctcaaagtcaaagtctgtgggggaaaaagatataacaatacagatgctcc

SEQ ID NO: 36108 - DNA, 373 bp, Homo Sapiens
tccagctggggtatcatttctttaaggttttttttccctgttaaattcagtgcttctagagaaggaaacaccttaatatgaatgagttaggtgagagttccaaaagagggtaaaaccataaagagtatgactctggaaaccggcgatgagggcacaggaaggaagacccaaaaaagaggttgctgggagttttgccttttctttttttccttgttggacctggcctaaacttgttgatatttttcagcttatatctggaatcccactaaaacacaacatttatgtctgtccccagggctggatggtacccacaggacttagtgcataggcttgagtccaaactcaagtcatgtttgggaaagaaacaggccag

SEQ ID NO: 36109 - DNA, 413 bp, Homo Sapiens
ggacaggcccactgcctcaggactccaccttggggcgttcgagcacctctgcattggagaagagtccttccatccctctgccagtgcttaggccacttccctaccaccagaccagctctgaggcctgaatggcgtgcagatggcacttagcattccagagaatgcttgtgctggtgggagagccatgtagtcacatgggcgtcttcatcagggagcacgtgagctgggatgacacagcatggggagatgaggaggatgtatcttctgggtataaaccccttaaatgggggtcatcaccacccatgactgtcagcccggcgctgcagcttgctcccaccacctccccaaaccttggctgctatacccaggaaggggtcctggcttcccttctctgtgcctgggcctgttgtctt

SEQ ID NO: 36110 - DNA, 440 bp, Homo Sapiens
aattaagccatggacccgataccttgataaatttgtagtgactacatgggcagccagcaagaccacatcagcttccatccggagtaggaggaatggcaatttccactgcaaagggagagactacaaaaataaacctgaaatgcatgctaatctccatgtctgtcaaaagcttacccatctccactccccacacccccaagccagagatgacccacaccttctcagggctccaatcagtggtgtttcctgagcatactgttcccaaggcactttccacacacaccatggtgggggagggtggtaatttgagagtttttgctttaaactggagttattattttttattagcatccaacacacttagcatacaaaggaagaacccagtaaataacagtgatctaccaaaaaaactttagaagggactcaactgaccactcaaa

SEQ ID NO: 36111 - DNA, 402 bp, Homo Sapiens
ctgtctgcttgcttctacactggcccctgcagatggagggggtggggtacaggggttcctataagaagcagacacttggggtttttcccaggccctgttgcaggagggtgcgtgggctggtttccctgaaggcgcctggggtgtttggtgttaactgatctgagatcttctgtggccctgatgtctatgagcatgccccagcttgcagggggctgagtagccgggcaccaccaggaggctgcgtgcctgtgcttgggtgtacccatgccctgtcagcatccgttggtctgttagggtcagggacttcggcttctttgtttagtaccctccatcccttccagttgatcatcagaaacattctccttaaaatgcggctgcctgaccccggtgaagggcctgcct

SEQ ID NO: 36112 - DNA, 401 bp, Homo Sapiens
ttcaattaggtcagtttctggttttggaagaacaactcaaatgtatgacctactgatgacatacagtgagtgtagtcatccttgggtaggaacaccagtacattttccagaagtagctagtacaaatgattgtataataatattgattgtaaattgccatactcttggttgctaaaggtagattaaaattcaatttgtgtatatgtaaaataatcttatatataattcttaaatagaaagtaattgattttacatagttcttcctgaactttttggaactgaaattcctgccaaacattatcaaaataagcttccttagcttaccaagtattcacaaggaaattctcttgtacctctttttggttggctaggggaagcatgctgtgaagcagctattccca

SEQ ID NO: 36113 - DNA, 406 bp, Homo Sapiens
agcttcagagtttattctggcgctctgcatcactgctgctggtgagggcttgtcagcgcttctgtgcctcatctgcccccttgagaggctggagccagctatcggttggctgcagaatggattctgatctgtgaagagcatatcttgggggtggggagcacacacctcacatggttttggagggttactctaaatgcagtcggaggcagcagaaggtggaatccagcagctgctgcctttttcaaaataatgctttttaaacactttttcctttaaagtaattcattaaacgtgtttagagctcctttcttgtgaaccttttagagtgtttctatggaaaaataaaaccaaaggtacatttaaagatattttcttaaggtattgctaaaaaatccatttttgtgga

SEQ ID NO: 36114 - DNA, 358 bp, Homo Sapiens
gtaaacatggctgagtggaagaaaggaagcaacaaagtcctagagctccagtgttaggaagactttacaaagcacccagtaatttccacagtgacttgagatataaaaaatggtgaggagccagcttcactcccacctcaagctaagcatctactgtctactccattctaaccaatgcccagtgttttggagaatgaccatatgaacctatgggaatgcatcaggtttccaaagggttaaaacattcattagcattctcaatgctccaccactgtagttgctattttaattagtacattcaatctggagtatctggaggaagactttaaaacctaaacctcaatagactgtctactta

SEQ ID NO: 36115 - DNA, 457 bp, Homo Sapiens
tttttgtaaagactgaaaggagtatttctgggctggtaaactgatgagatgaatgacagagtgagaaacaggcttatcagtttaccaactgctgaaaaaaccaagccaggttcacaaggtaacaacaatacagaggtgatagaaataaatttttccttaatgcatgggattcctggattactcgtatacctgcattcattcagttagtgcttcaataaaccaagcagtttgcctctggttttctaatatcccgtctctctattagcttcccaaataaaaactcaagccaagagacaatataacaacaaataaaacaagataacaaacttttattacacatttgttgaattgtttaaaaacttttcatgtttcctgaacactcatccaggaaagtactgtcaagatgatgacgaaactcagtttattcctgggacaaaagagctttgacacatctgct

SEQ ID NO: 36116 - DNA, 355 bp, Homo Sapiens
tgtcctcctttggctttccaaagtgctggtattacaagcatgagccacggtgtccggctgctttatagtaagtcttgaagtcagatagtgaaaatcacatgacttagttcttttactgttttgattattcttgctccttttgcatttccacatagatcttagaaacactttctcagtttccttgcccggattttcactgggatggtgtttaatctatagattagtttggagttgaactgctctaatccatgaacatggtatcactttgcattgcatttgcttaggtcttcttttctgttacaggttttgcacattttgtcaaaattatctttaggtagcttattttaaaaaaatg

SEQ ID NO: 36117 - DNA, 443 bp, Homo Sapiens
tatagtcatatctcacttttactgatgtttttagtttatgaaaaatgatattatccagttttattacccaccataatcatatttagtttcaaatagcccttaattaactctttctcaacataattgaaaaataatttaaaaatcacaatggtaacaataagtgcatgggctgtgctggggattgttccaagcactttacaaggattcattcatttaatctttacaaccatacaaacacgcattacaattatggtcatttcacaagtgaggactgtgacaaagagaagcaaagtaacttcccacggaggtaaagtaactagtttgcaggtagttacttgatccaggattcaaactcaggcattgggattcccaagtccatgctcataaccactgtttcagcatttagagttttcaaaaaggatgtgttttcagtactttaagaa

SEQ ID NO: 36118 - DNA, 351 bp, Homo Sapiens
tggtggtttctcagaaggttaataacttgccttctgactaatgcattctacattgtgatttaaaaataagagctcttgagagtctactttgtgataggagcacttcttaataagtctgtcctgtcccaacttaaatacatttttcatctccaaaaaagttttatgccccatgttggccaacacattacgtgattattttggtttatacatcagtatatgttgttgttgttttgagacagtgtctcaccttgtcacccaggaatgcaatagcacaaacatgggctcactgcagccttgacctcccaggctccaagttatcctcttgcatcagccctgcaagtagctgggact

SEQ ID NO: 36119 - DNA, 409 bp, Homo Sapiens
gctagctaaatatgatgctagtattagtgcaactgagtgaaagatggagcatcttactagtttagaaaagactttacaagaaagagctttggtggagaaattgagtttggttaagtttgagatgcctattaagcatctaagtgacaaaatggagcatgcagtggggtgtattccagtctcctctctttcagagaaagaggagaaggtatgaaaaataatgatctggaagagtgaatggaataaggaaatccaactgaaatattggacagttctgaagataacacatgaggtttgctgtcaaatttaagagtgagagcaaataccgttgtatgttttcccctaagtttataatgagctgtgtgggtacaggtatggagtaggtggagagctgggtttaactgaaacctga

SEQ ID NO: 36120 - DNA, 407 bp, Homo Sapiens
cttccttcatcataacccattcattcagaccctgtctgtgagtatttcagggcaggaggaatggatggcagtctcgtcaataccccttaaaatttctgaacataggggccattgaagtgcctgtgtgccattgcctgcttattaaaatgaattatgaacaaatatatttcttttaattcttatgcagttctgtgagatatgtattccagtttacaaacagaagctggacctcggagagggaaaacgattctcccaaaattgtgtagccaagtggaagaaacattggaatctaggtctgattccagactcttccgctgtcccatattagtttcacaccagataattttctctgatcagacgttaggaagatgttgaaaacacctaaggaatgggggcagggggtgatg

SEQ ID NO: 36121 - DNA, 402 bp, Homo Sapiens
gggtttagtgttccattaaggttgggaaatgctttactacaggacttcagagcctttagtggactgatgtgtgttgtaacactcaaatagcaatttttctataaagtcatcccttttatatatggcttcactttccacagtttcagttacctgtggccaactgcagtccaaaaatattaaatggaaaattcctggaaataataagttttaaattgtacaccataaacagtcttcttttcatttaacttagagtacttgtatgagtttggtagatttctagaagtagaattacctatattggcagcctaagaaaaagacactagagaaaattatctccaaatatgatgagtttattagggaataagaaagaagtatggtaatttggaatgcactggcaaaccc

SEQ ID NO: 36122 - DNA, 368 bp, Homo Sapiens
ttgttctctcattggctcggtcctctcttcatgcagtgttcagcctcctcgtcaactttgttccctgccatccaaacctgcacttgctttttgacaggccagaagaagcggtacatgaagactccaggtaaaatctcggatgatgaccaatctgttcccgtttatccaaagctggccagggacaacagggggctgcccctgctctcctgtggttccatcctaagagaccagagctaaaagggaccatttgcatgaatcagcatggcatttttcacacccttttcaaccctgactcaagtttctgaattaacctctctggtgcctagagttaggggaaggagcacctcctgaaccagactctggttttg

SEQ ID NO: 36123 - DNA, 380 bp, Homo Sapiens
tctaaggttataaaattagaggttggcagagaactcactatgtggaatgctgttagcagttttatttaatcttcacatagatgaataaatgaaacctaagaggttgaagaatttctctaaagttagtaagtggtactgggattcacacttagtttttgctaggccaaatttctgctttcaactacatcataatggttttccgtgctttgcaatgtctcagaatgggaatgcaaagaaaagcaagatattgtgatttttcattagtgccttggcatatagtaggcatttacatcagtgaagtgttagcaatatccatgggtgtgcagtggaaggacttgagctagaccctgaaaggaagggcctggtataattttgattcc

SEQ ID NO: 36124 - DNA, 363 bp, Homo Sapiens
gattgtactagttttttaattaatgtcatttttcttttccaggatccaatctaggataccacactgaattagtcgtcatgcctaattagcctctggtctgtgatagttccacagtctttctttttcataacccttgacagttttgaggagtactggtcaggtgttttgtagaatattcctcaatttgggtttgtctgatgttttcctcatggttagagtggggttatagatttttaaggaagaataccaagaggtgaaaggtccttctcacttgcatcatgtccaggagttacatgctatcagctttgatggtgtattaactttggacacttggttaaggtagtgtgtgttggttttttgccg

SEQ ID NO: 36125 - DNA, 403 bp, Homo Sapiens
tattttcttcccacttccccatggatggtctagtcatgcctctcattttggaaagtactgtttctgaaacattaggcaatatattcccaacctggctagtttacagcaatcacctgtggatgctaattaaaacgcaaatcccactgtcacatgcattactccatttgatcataatggaaagtatgttctgtcccatttgccatagtcctcacctatccctgttgtattttatcgggtccaactcaaccatttaaggtatttgccagctcttgtatgcatttaggttttgtttctttgttttttagctcatgaaattaggtacaaagtcagagaggggtctggcatataaaacctcagcagaaataaagaggttttgttgtttggtaagaacataccttgggtt

SEQ ID NO: 36126 - DNA, 435 bp, Homo Sapiens
gtcttattcttagtttgtgctttgatgacatcattccctctgcctggaatttcctccctatcttccagtgccagcttcctgtcttcctgactttcccaagcagaatccattgctccctcgttttgtctctggaatgggtgcacatttgttccttcgttgtccattcctccagttgtatacagaatttatggccagggcccatgcatagccccttggagctgctatggccatggctcacctctgtgtcctcagcaccatgggcagggcacagccagcaaaaacactcagaagctgttgaggtctcagatgggcctgggaggtgacaggttcccatggcaagtggatgtctggccaccggggcaggacaggaaaggctgctgggctcaggtcagaagcttcgtcctcattctagttctgcctcctatttgctttgtg

SEQ ID NO: 36127 - DNA, 376 bp, Homo Sapiens
tataaacatgtttgtgaatataaacatgcaatcagtttttaaaaaatttttacaggcatgagcaccgcgcctggccaataaagcaatcatattcatccagcatcctttgagagggtagagaaaatcattattcacagactgtcacctgggtttggcgtgcattcctacagattttacctatttaagagatccttaaagtttttctgattcactgttaaggtaagcctagggatcttgcagtgtatatgtgaaggaaatgggtaacggactgttgagtgaatacagtgtatagattgtagcacatatggtgatctgtgaaacgggggtgtcatgacacaccccttcctgcatcccaaaattgtgggggtcagggtgg

SEQ ID NO: 36128 - DNA, 359 bp, Homo Sapiens
agcatgagggttacaacccaactgtatggagacaagttgtcctgaacaatacacattcttattagcaacagttataagtaggttttcaaagaaaaagaagaggcagttcctaagttatttaccacgaatttacattgaaacagcataagctatcaattggctataaattgctctctgtatcaaattccaggaaaatgaagataatgtgcaaggcagctagtcgggaacaaaatgactttaaacaattgcccccagctatggttgtggaggggcagtgtggcacacaggaagcaagactaaaggaacatacttatgtctctctgggcctgcatacctcatagaactcaaactgctctatt

SEQ ID NO: 36129 - DNA, 504 bp, Homo Sapiens
caaagatcttaggtgctggtcctgtccctcacttatgggaggaactagtggacagctactgaatgtagttatgggaaagatgagtggttgtgtaccacggcattcattcattctctagattgggcacttgctatgcaccagcacacgctaggtaccagctgaacagcaagacatggcgtctcctccctggagcccacctcctgtgctctccagcaagtgccagggaggggaagtcagaagtccaaatgtagagcagttctcagtaggaagccccacctgaaggaggctgaactccgcatggagaaggggtgtggcactggttgacctcctggaactggtcacacaggctgtggttaggttgggtgccatggtgctggctagaatgggagccagaggacttagacctcatatttgcacctgtccaacatggaccgcagtgggtatggcacgtggcaggcaggaaccataccagtgggtggtggctgcatctgggcatgtccccct

SEQ ID NO: 36130 - DNA, 517 bp, Homo Sapiens
ataccactgagtgaggaaaataagccacagtaccatgaaactgtagaacaccaaggacaaagagaagctgcaaaaactgaaaaatcaactcttcaatcagaaaattgaggcttcagggcaaaccattctcccaaaaactggagggaatggtgcatactgagaatcacagattacctccagaaacctcaccagattctcagggtaaagagaaaaatctcctcaagctttaggtagggagaaggggaaatcatcatcttgaaataaagcccgtagcactccttagcaatggttttgctcttcaaagtaaactggtttaatcaagcctaatttgacatgtgctttaccagagcctaacagacctgggaggaagatgtgttagtccatctttgcattgctaaaaaagaatacctgagactggtaatttataaagaaagaggggtttatttggctcacattttctggcagactgtacaagaagccatggcaccagcatctatctgcttagcttctggtgagg

SEQ ID NO: 36131 - DNA, 365 bp, Homo Sapiens
tttaaagggaaaaagagtaagaaattcagatgatgagaattccagggacactgaaagtatcccaaattggcagaaatactgtgtaaactacagaaaatgcttctcagggcccacactttcttttgaaacaaatattacacaatttcattataaactctttcgcgcatgattttgagaaatctttccaccaatgctttcaaaaagcacaatctgtcttaataaaaaactactacctggtactattatttttacattttaaaattgtgaaacagtattaagcctacagaaaagttgcaagtatagtcccaaagaacttccttcttgaactatttggagagtcagttttcccacgtggacctttgcat

SEQ ID NO: 36132 - DNA, 437 bp, Homo Sapiens
gagaaacatattgcttttgtgttttttaataaaaaatatttcaacttttcatttagaaacagtgggtaaatgtgcaagtttgttacaagggtatattgtgtgatgctgaggtttgaggtacagatcccatcacccaggtagtgagcatagtacccaataggtagtttttcaacctatccttctgccctcctcacccacagtgttccagtctgcagtgtctgttgttcccacctttgcatcctgaggtactcaatatttagctcccatttgttagaacatgcagtacttggttttctgttcttaatttgcttagattatggcttccagctgcatccatgtggctggctgcaaaggacatgattttgttctttttatggctgcctaatactccatgatttatatgtaccacattttctttatccagtccactgttgatg

SEQ ID NO: 36133 - DNA, 378 bp, Homo Sapiens
ccttgtggatctcgaaggattgtactctacccatggggtgagccagctccacagtggagccagtaaccaagctctgtgctatgcttggcaggtagtcctcttgacttactcttctccctgacttgaacttcacctctcctttgagttcctttgggtattgttttatttctttctaatttgccacagtctcatctcctctgggctgccactttcctcctaccatctcctctccacttgaaggatttccctttgtctgagagagatcctctgactcttcattggaaattattcgacttttgctgccttctgcttcccttggtttggtgattaattacactgtttgaaaaaggtgggctgacagagtttacttctccaatc

SEQ ID NO: 36134 - DNA, 438 bp, Homo Sapiens
gtctgtgcatttattcatatcttattccatgtcaggggactcagtacaaaggtgaaaaagacaaagttgctgttctcaaggagtatactttagacacataagctagcaataaacaaacaggatgattttagctcatgacagggctacacagacagtaacagtgatgagatagagtgatggggaagaggtgcttaaaatggggttgtcaggaaaggcctctgctaaccaccagatctcatgggctcatcttgagatttaacccagcaaacctcttctgagccagttggcaccactgatctccctcccctcctttaaactgttgccttccttgatttctgtgacaagatactggtgtcactatctccttgtctcctcctacttccagctccctctttcagccttctatgcaggcacatcttcttttgaccacccattaaa

SEQ ID NO: 36135 - DNA, 458 bp, Homo Sapiens
ttttttttagaataagaaaaccaaaacagacgaatgtgggaatttatttatggaaacaggaatgttgttttttgagtaattcgtcacctactttttttgagtgaattaacatgtttttactgtttctcaaaccagtaaccatttttctctgttggattcacattagcaatttccttctaaataatgaaacttttttgaagaaaaaagtctaaaccatagttttccagttgatgtgaaaattcctcagattttcattggtgggagcagtacctaaactactggttcaaaagagtagagatagagtggcaagaatgagcaaggcagtctcattcagcacagcacattggtggaaaagatttttaagttctttttcattgctagagactgctttagaatatcagagaaagagttgccagtcttaagggagacaaacctgtgagcagattcttacagataat

SEQ ID NO: 36136 - DNA, 405 bp, Homo Sapiens
atgagtaaaactttatcaaaacttggcctgaaaaagagataactcatgatccattgctatctttattactcaaaggctgttcattcccataataccagatccataatagttgtagtttttttgatgttgttgcccttaccttaattatttgtagttttagtaggccttgctcagtttttcccacagaattccataattttaatgttgaactaacccatctatataggacttctaaaaactaccgtcaggaatgtaaggttaaatgagaggtagaacttgtagtgtaataggtataatggtagctttcaaagttttatcttctcaaaacattgtcttagccagtgtatttctgagaactcagactgaagcacagaagtcacagtatgcttcctttatttaagcaca

SEQ ID NO: 36137 - DNA, 376 bp, Homo Sapiens
gagaccatttagacatttaattaagcagggactctagctctcaggtttcctgctttggaggaggagggaaacctgcctctactgggcaccagcctccccttccaggcccattcccatcttgtatgctttaatgaggctcccagctttgtggacatctacccagtttctctgatccacagtacctcttcagagggccacagggcagttactgtcatcccttgacaccagccatagtttggcaggagatggagaatacacttctcaatgcttaggccctgggcgccgcttgaaccttgtccattcacaagcctatggggctccggtagaggaggacagcatagggagaagctaacatcaaccaaagggttataactga

SEQ ID NO: 36138 - DNA, 455 bp, Homo Sapiens
gctgaaatatctatttgtgtgaacagccactgtgagtttgattatcgtagaacgtaaggtgtttgatgattaccaaccacttttaattctataaagtctatagggggcaaatgagtaaaacccaactaagtagcaacatatagcagcttttgagacaattgagaacctggtaacagctttttaaatgctgatctatacatcccactctaggcaaatgcccgtctgagtaccttacaacatgatagcatatggtctgctacaagccaccaggcaccactctcatctatatgcttgtttacagagtgcagtggcattgacacttcaaagcaactgtaatcctttctccttataatctcagtcacactgaatctacagttttggtacctagaatgcactctggcaaacactggacacaatgccttcaataggcatatgcacacaagctttcagtgtcc

SEQ ID NO: 36139 - DNA, 447 bp, Homo Sapiens
ttttttatttctctaagtcattttaattctaacacatgtcaacatttacttttataaacagcataaaatcactcatgttataaaagaatcattccttcattagaatgggagagaaatgtagacactgcaagcaggaaacaggaaatgggaatacctcagggtttgcctctgatggtttgcaatgaccaagacacactactatagcctccagagcatctttgtgcgagtgctgatgtgtgtatgggcacctgtacatgttgtggactgagaggacatcttcaggcactagtcctcacctcctaacttggacagtttcttgtttgctgctgaaggccatcaagctagctgggtcccatggtcaggttttccttctggtcataaaaattttacagcagcaataggataaattgtagttgacagcttatttagatacactgtggtagagca

SEQ ID NO: 36140 - DNA, 406 bp, Homo Sapiens
caaagcacttcagcttcctgtttctgagaatttgttcacaggcagaattatgtcacggtccatgtactaggaccggttcccctctgccacagtgatttgatgtgaaagtgtgccgtcttttagggaaaactgtcagtacttacaccgtggctctgcatagctcatcctgaaactggttatagaaatctatttagcacgctcagctgctatttcccttctttgacatagactctattaggggccacaatttccctcaagggtgagtactctttaaatatattttcagtttctgatttagagacattgttcaccactggactaagactaaccttggatgccggtcagtgacgactttgtcacactaaataagatggctgttctaggcctaagacactgtcttgagggg

SEQ ID NO: 36141 - DNA, 444 bp, Homo Sapiens
cattttatttgtaccttatacgtaaattgttaatttctatctctgttcaggtctgtcccttctatctctcctcaaagtgtccagaggcgaggatgagagggatttgatcttcactaaagtagccacagtcttctcagcaagcccttttcccactacctatcccccagcttcccgccccctccccaaagccgttttcaaggccatagcaacagcaaggatgctcatctgaccacacttcgaccacagggaaagcaggaacttatcactgggcagaactgattttgtgaggtgaacaagatgttaggtggtgggcaacgaagggcgacagaggcaaggtggactgagcccgccccacacacctgccctggtaggctgtttctggggtcctcagaggcgagaaggggttcctcccccactactacggtctctccattgatgtaactg

SEQ ID NO: 36142 - DNA, 401 bp, Homo Sapiens
tgaggttcctgatcctgttcctagccctgtccctaggagggattgatgctgcacctcctgtccagtctcgaattgttggaggatttaactgtgagaagaattcccagccctggcaagtggctgtgtaccgcttcaccaaatatcaatgtgggggtatcctgctgaacgccaactgggttctcacagctgcccactgccataatgacaagtaccaggtgtggctgggcaaaaacaactttttggaggatgaaccctctgcccaacaccgggcttgtcagcaaagccatccctcaccctgacttcaacatgagcctcctgaatgagcacacccccacaacctgaggatgactacagcaatgacctggatgctgctccgcctcaaaaagcctgctgacatcaca

SEQ ID NO: 36143 - DNA, 395 bp, Homo Sapiens
ctctgtgaaatcatggtacagtcactgcccagaggtactgaggaaaatgtactatgggattggcaaacggtggcggtaaataatcagcagttgttggcaatgcgagctcggcttctgtggcgccactgtgtgaagtgcagctgcagaagaagcaggagcgccaggaacgtttgtttaatgtcactctctgcttccagatgataatatatactagatggcaagaaatgagtcctggagaagtaatgtatgggagagtttaaaaaacacactaaggaaaggatgacaatgtgaaacttgtttcagtgtgtaaggctggagccccttaagagcctactgccccgtggccacatttctctcagaagcagaaacccgaggacgtgccatagagtggtggc

SEQ ID NO: 36144 - DNA, 358 bp, Homo Sapiens
cagttacatacttttaaacagggctgtgtttcagtattcagacattcaggcaatgttgatttcattagtgttgacagaaaagaagcatagaaatgcaaaacattgttggcttaacctggacatacctgcatcacctattactgaccagtctgtgtgccaaagacttcttctccagcacgaaaacggagcacttaaaaatattgctaaaaagcaaatgtctacacactggcctttgcagcaaataagggtattcatacttttaaaatatttaagtccataattgggattaatatacacaccttcttatgtataaggagttcagatcatataaacactgtacagtccaaaaaccctactg

SEQ ID NO: 36145 - DNA, 396 bp, Homo Sapiens
tgtgtttaaactgctcacatagatcaccaagtgcccatagctgtgtagcgcttggcattgccacgcccgtcttccactgcagcaggcaggaaacttcgctgcagtctgacctcaaattgggttttgtcctccagttgttgagtcttcaaatcacctctgagaatccattaatcctgtcagcagggaagaccacagagctaatgcccgacatctgactcagcactgaacataacatgctacgtgattacaagcatcatgaagaccatggggtggggaagactccctccaattgtggggctcactcacaggtgtcccctagagcagccttgtactattgacctctgtgcttctttctctgtggtattcaagcccaagtgtgagcagagagcataggcc

SEQ ID NO: 36146 - DNA, 380 bp, Homo Sapiens
acgctggaaaaatgtgggcacaacaagggttacaaaggactggataattgccggttctgccccggctctcagtgctgcgtggaggatggtcccgagagcatcgactccatcatcgacatggacgccgtgtgcaaaagggtgaccacactgggactggacgtgtctgttaccatctcccaggatgctggcaggtatctgtgtgacttcacgtattatacatcgctctaccaagggccgcggcgctccgcttttgtccacgtgcccccacttgggtaaaagccctacaacgccgaccaagctaaggccgggcgctacgaagctatcatccgaggagatgctgggtgtccttggagcaagccgaagggagacatcagctgttg

SEQ ID NO: 36147 - DNA, 386 bp, Homo Sapiens
ggcacgagtgggatgacagcgggaacaaagcggcgtggaaaagaaacagcgtgattcaagatgctgcggcgaccagaagcgttggggactgatgggtctctctgctccagttcaaatcctcctgaaacccttttcattgtcctgattcagtgggtttttaaaaatctcccctctgttttgccaacctaattttcaagtagcaatttatcttatgaccttgacaaagttgtgtgactttacatttaagataataattagaacagctccctttagagatcacagtttgctactgcctgtctcttaaagactgctcaagtctgtttctgattcatcatttagaattttgtttcaaatgtttctttttggggtctgttaccttctggggg

SEQ ID NO: 36148 - DNA, 395 bp, Homo Sapiens
ctgtgggaggggtaggagtgacactgtctgccttatcccatttggaagtggatctggctccgtgtctctgcaggcccttggtcttctcctgacttctggctctagggggcgctcatagaggggcctagacacttcccatgatagtgtctggctctgcgaggcccacctctgttctgggacaggatccgagatttgaagccttcaagattgggacctaggccaatatatggcaagaatgacaaggcaagacaaaagctggaagtgaggtcacgcagaaagcattggaaggggggtctccggcaccattgccctagtccatcctccggcgagttgctaagaactccatcaagggtaaagcagctatgagatttgcccagggccaaagcaaatattag

SEQ ID NO: 36149 - DNA, 398 bp, Homo Sapiens
agaaagaccatcaaaatttttcctgtacttatggatctcaaaaattcttcattaaaaataatttttaagctgactgtctcaagtttctgtagggacagctattatgtaaagaaatctccttctgactctattttagcccacctaataaaatctgatggcagcacatggattgcttcagggaaaatagtttcggggttaaaaaaagacttagaattaaactttatatcttgctccaaaaggactctgtctctgagagtatatggaaaccgatgtttttggccatgaattaaagaactgttttatgaagatggttcagatctaagatttgaagaggccattactttaactagaagcttgtaatatgtactcataagtaactgtgaagaccccctcctcca

SEQ ID NO: 36150 - DNA, 358 bp, Homo Sapiens
atgtttgagaagagtatttactgttacatgccacagttgcttttcttccagctgagataattaaatggtagagtataagaaatatagttgaaattacaatatagtacattttaattgactgaatacatacttaagtttcaaatgtttgattttataagaaaattttcttctggtaaataatatgcataaccgttgcccaaaaatgtatacagcttgccctcccccaatttatatacatagtagtccacttaagaccagccctcttataacttattgaatataatgtgctcttaatttataaatgggttactctcagcatataaaatatataggcatgtatgttatacatacagaataa

SEQ ID NO: 36151 - DNA, 397 bp, Homo Sapiens
tttttcccatttttcagaggctataaatttatcagtcaatacaattatttaacatttgaaaattatttaattctataatgtcttagtccacttatttcctaatattaaagatgacattagctctgctcaattcttactttagcaggaagatataacagaacaaagcagagcacattaagctatgtttaagtgcagaagtagaaagaaggggtatagtacttccaaatccatttaacatgagatccatttttgatatgtaagatatttgtattcaaaaggcatctcatgagctaatgatataatagaaagagcctgttcagtctcgaactcctgggtctcaaagctcaacgttttcagaggcaagccttcagagactataccagcaacatatcagggg

SEQ ID NO: 36152 - DNA, 463 bp, Homo Sapiens
aagccagcataaagcacttttattgcaaataataaaacttgaaccgcatatgtagtgcagagggcaggggacaaaagctttctctcaccaaatcactacacaaggacagcagagggtgagaaggaactgaaggaggaaaagccaggaagccaagatcagcaaagagccaagcatcaaaacccaggagatgctgaagctgtgatgaccagcatcgtattcttagagaacactcaaggatttgccgtggtggctgggcgtccgttgggtggtgagtctacaaacagcaccttcaatttaaactttccacttgaagttcttaaaatttagaaagtggagcttgaatagttacaagattacaaaagtccagaaaatccattagaaaaaccataggatgaaaaacaaattaagccaggtcacaaaggctttcaagtctctgccaacccagggacagatactgtagtgt

SEQ ID NO: 36153 - DNA, 442 bp, Homo Sapiens
gccaaccttgaccactgtgcctgggccggctctgggagcgcaccctccccaggggccctgctgcttccactggctgtgctctccctacgcaccctgttctgagggtgcaggtcccacaagcccgcaatggacagccagctcccctccttttgtggcccaccaccgggcagcccacactcaagggagaggtccaggcaacttccagcaggaacagaagttcgctatctgccttgcctgtatctggaatcctccatgggccagattcctggctctgctttattccctagttattgccctttggccagcaggtttctctcttgggcaggcaagacacagactgcacagattcccaaagcaccttatttttctaccaaatatattctccagaccctgcaaacctccaatggaacaattccagaatctgaccttctctcctccaatc

SEQ ID NO: 36154 - DNA, 378 bp, Homo Sapiens
aatcataacgctaggtagcgaggctgggttgagaatcggcacgaggatcgtctaattgtcataagaatgaaaagaagttaacaggaaatagtaggctagggtttagttttaaaggcatgactgttatttacaaaggtgttaaatctgaggaaatgacaaatacagattgtccattctagtggccaaacagtaacagtctaaaatgcagtcatttgaccctcccaagcaatttagtcatatgtgttgttcttctcttttctgtttttacttcttagatttttaactaggttactgttggttcccattctgtcttttttgccagacttacatctggtgccagatacaatcagttggttaaattttgcttgcagttctgtg

SEQ ID NO: 36155 - DNA, 563 bp, Homo Sapiens
ttaggtacgaggctgggtggtgaatcggccgaggtgagagcggcagtgtgcatttggaaagcacctggggccgcgcccgggcgcagtgcccccatgtggcctcccaccccgggcgggcaggacgattcctgcccatctggaagaccaggaacctgcgcgttcacagggttcggaagcccgggctgcgccttcccgcggggccggctgccgggctgggggctcttcccgcctctgcatgcacagagcccgcggtgcacgaacctgctccccgccagccccgcggactggcagggccgctctggagtcacccgcgcccgctccgcagtgcgcaaactcacttcgcagcgggctctccgggggccagcccttccctcctgggcgggcattttcacctccaggtacaagggggtggtccccagaggaggactcaggggcttaaggagaagctgaggcccggtcctctggcctcaacgactgcacattctcgccgcctgcttcacttcttagagccttggaggtgaattggtctcaccacctcaccccacccccaggagatagaacct

SEQ ID NO: 36156 - DNA, 384 bp, Homo Sapiens
acataggctaggtagaggctgggtggttaatcggccgaggcaggagctgagcaattgagctcaaccacgagatccagaggacggagaacagcctggccaactgagaaccagcagcccatcaatgtcggagcctgagagcggatgggcgatggagcccaatgcggcccccgtggcatctgcgagctgtccccacctgcttcagcaaggtggctcaactgtgcacccccccggggatgcttgccggcaccaagcttggggtgcccagcactgcgcaggccctgccccgctgtcaatcatcgccgtgcggcgacatagagacgaacagataggtacacagaactacgaaacgtgaaataaccgcaagtgagaagacagacagactga

SEQ ID NO: 36157 - DNA, 792 bp, Homo Sapiens
gccaacaagcaaacaattaggctaggtacgaggcctgggtggttaatcggcacgagggcgcggcccgaatggttggccgacaaggtgcccggcggctggacctcgtgtcgcgagctgccatggcccagtggagtgaagaagaaaggtgctccggaagcgcctgaggctgctggcctccctagtgccctgctgtgcatgcatgactctgtgatgtgactgtgctgatgttttgatgatcctagtgctgtgatagatttgagctgccctgtgtgccctggatatgcattgtgtgatcctgtgtaatgaaccccgtgaccctaccgtttcccacagcctctgtgataattgcatccgtctgtgtatttgttgtgactgcctgtgatctacgcctgtgtgagtgaattgtgttgcgtgttgtccgcatgatgacagatgatagtgagacgatagacagtgtccttgtgatgtgtcgttccgatgttccgattggtgaccttgatcggctgtacctcgcgtgtgcttgtctctgcatgcttgttgcgtgttcgagttggagactcgcagactgtggtggtgtatctatcactgtgggtttgcctccacatccttccccctcctatgtacccgattggagtgtggatattgatccccatgttcgctccttgttgtttcgacgctccgttcttgctgcactttgtggcgcctactgggcaccgttgttgtgggtttgtggcccgagcttgtggcgcctccttgtggatcctcgtggggtccacggctgcgtggccgtcg

SEQ ID NO: 36158 - DNA, 517 bp, Homo Sapiens
tatatacggctaggtagcgaggctgggtgtgtaattcggcacgaggctttgttggccaaagccattgctaatgaatgccaggacaacttcatctccatcaagggtcctgagctgctcaccatgtggattaggggagtcttgaggccaatgtcatgagaaatctttgacaatggccctgccaagcatgcccccatgtgttgctattacttttgactgagcatggattactgatttgccaatggcatcagtggagtgtacacatttgtgagcataggtaggtagagagtgcttgcttgcacctgcagtacatccacacccagcatccttgcaccagcaacattgtgattgtgccattgtcccacgacaaacaacaacatttggttgtatcattcacatattgtggctgctaacacaaacactgtggcacttgaaacatacactcttgaatctcttgtcacaatacactaccagaacccatgtgacctggttctttgaatccagggctacaatactaaac

SEQ ID NO: 36159 - DNA, 555 bp, Homo Sapiens
gggcacggaggagctgaggtcagagagttccacaggaggtctgctagggactggggccttttccttacatggatagggggagggttctgagcagaggaaggacatgatctgacccatagattaatagagtccctctggctgtgtgtggcagcaggagccagagccaggaaattggggcagaagctcctgctgtggtccatggtcctgcctgtgggggtgtgaaggaggggtgagcccatttatatcttgaaggtggagctgacagtgagtactgatggcctggatgtaggggtgagagaaagagagggggctaggatgaccctgaggtttgggcctggacaccagctgaggggtgaagatactgcattgagggaccccagggtcggggtttgcagggagtggccagaaggccttgtgaagaatcagagacgtggctgagtctgttcggtgctgggtgcccgtcagacagctgcgtgagatggcaaggagacagttggatacgcatacctgaagttgagagaggtccaggtgggagagggaaagtgggtccccagc

SEQ ID NO: 36160 - DNA, 756 bp, Homo Sapiens
cacaaaaaaaacaagcaagacatacggctaggtacgaggcctgcgtgttaaatcggcacgaggagcagccgcaaatactcaccgtggaaaaagagcctatccccaaggattttcccaaactatgaagtcctacaggccgctatcttaccgaggactgcgtgcggaggctaggtgcatagcttgcatgtggatgcctgtgctgcctgtgtgcctgatggcttctggcttgcatgtgcctgtccattgtgctgtgtggcccttgccttgctttgccatccatgtgaatttgccatgtggtgtgctgttgctttgtgatcttcatgtctttgtgtgtaccttcatccatttttgatttgtgtgtgatttgtgtgcatgtgaagcattagacagccatcacttgtgaccttgtgattcgtgtgcaatctgtgctgttcatttatcttatgtgctgaccaaaatgatgtgacaacatgtgaatgttacatgtggctacacatgggtcatgtctttgcccatatggcttccttcaaatatgccaactggggaatctacaagtgggtatttaaattgtgacccctttcctagtttttctccaatgctgccttccagaatttatgtggctatattatcccccccgagagtggctctcctattgttggtcccattgttgccccatggcctttggaattgccgcccccttggctgggtctatcttggcctttggtttgaatggcttttggccctttgtgcccctta

SEQ ID NO: 36161 - DNA, 691 bp, Homo Sapiens
cgactagcgtcaggtacgatgctgtgtttaaatacggcacgagggaatcggtgcccctagatcccatgctccgggagaagatggagtacagtgccagctgcagtgcgtgcctgtgccctgcatccccaacaatgcccccgcctgagtacccctggtccaatggaagagtgtgatgcaatggggctctgagtgcagtgaccaatgccagccttcctccctgccatgtgccatgagccagggtgcttgagtgcatgtgtgccagccaatggccatcagcatgtctctggactgaccctgccgtgctgtcaactggtggtgcctctctcgtgcccatccatctctggtgaaccctgacctgactagtgtgaatgtgagctgggtcaaaaaatgatgcctgtgaaggagatgacctgtgtcttgaaatgttttccctgtgaagacagcattatagatgagacgatgatgatgatcagtgaatctagcagaatgcagaatgatgtgcatggcctggatgtgcacagaatgagtgcctgctgatgttggcagcattgaatgtggctctcggtggctcgagtctcagcggcgtgtgaagacgaatcgagttgatgccacccgggttcccatgtgacgataggttcaagaaccctgaagaatgaaactagaagacgggactggtgtcacagaatatgac

SEQ ID NO: 36162 - DNA, 485 bp, Homo Sapiens
taagccaaggcacctggcctctgattagtatactacatatgtggcactgcttgtataatatgtgtttgttcaaatctttcatatctttactaacttttgtctgacctattaataattgataaaggtatttagaattctcctactgtaatggtagatttgacaatttcccctcttttatcagcttattaactttatacattctattgagtgaataaagtgtgcaattcttgtagtatgtcctggtgagttgaactcttcttgttatgtatgtgacttccttattgctaatgcttttatgccttagcaaataaaaatctgttattctgtgactctcaataatagcttaggctatggtaatatacgctgtatattctatcaaatcccttttaacctaccatacactgctagataggatataaacaaaagatactacttgtaacgtcacaataaaccttggattaagacttatcatctggccatctctg

SEQ ID NO: 36163 - DNA, 754 bp, Homo Sapiens
aatgctatgtatgagtgctgtgttcaaatcaggcagaggctttgagctggataagctgaagaggcaggatgcagattgcctgtgactctctataagatcctagacagctgcaaacagctgactctgtgcccagtgtggcaggtgagtgaggatccgatgtggcatgtgtgaccatcatcacatggccttccactggacaaccccatgctgtgctttcatgtgccgccatgcatggcatgccctgcatggcctgcgtgcccacgccatgtgtggacatcaatgaattgttctggacttcgtacaagcagttggaaggaaattaggtttgatagcttgagccaccgcaagtgcgcctgcatgttgggtgcttgacatccatgatctctccgtgcccgtccgcgtggcaagccatgggaaccaggtacagccgtgttaggtcaagcacccaagacaatcacctggccatggagctttcaattgtcaagctgcagacagccatgtggatagttgcacgtggccttaagaccttgagctcaatgcaatgaggccgttggcaccggtgtgcaaggtgtgtgccccacaaagagggtaaggcccccggggtacaatgcgagagacagaggcggcttgcagtgagggatcacacccatttataggcgagtagagccccaagagagaaaacgggcttacaacgatggacaacaacgtgcctgagaagcgggaacaaaaagtgtttggccacatatgtgggagc

SEQ ID NO: 36164 - DNA, 791 bp, Homo Sapiens
ggagagagaaaacttaggctaggtacgaggctgggttcgaattcggcacgaggggcggcctgcgtctggaccgggcacgcgggggctcttctgcgtccccagccctgggccgctgggcctggcctcgccgcggggtggaggaggcccaactacaatgatggagagaaaactgtatagctggaagaagaaaaaccctcctagttgaagaggggggtgaggaaaaaaacctggaccgtggtccacatgcttgactgaatgatgggctcctttcaaccagagtgtgtctcttgctttgttggaccttactgaggccgttggaaagacactcccaacatcctgacatttttctacaaatcccctaatgttccagccatggtgtctcctcccaaaaggagaaaggatggcaccagcagctctggccttctccatcagcttagaaacctgatcccaaagacaatgctttccctcagtcattccagaacagtcctggggctcactggctcaactttggtgctctatgtttaccccacgactgatttgccaggtctatgtcatatccccaagaccatgtggactgagaaagtggggaacggatggttcctatggtcaagcagggtgctgttaccaggaggaggactggatgctgggctggcaaagggacgacatccaccatactcctgtggatgcccgaggcccaacttgcggcggtccgaggggagtcaggttccggtccttaccttttgggcgccggcgcgccccgggaaaaaggggcccgggcccggaggtcttac

SEQ ID NO: 36165 - DNA, 669 bp, Homo Sapiens
tacggctaggtacgaggctgggtgtcgaattcggcacgaggcttctaagtgaggcctggctgtaggcaggaggcctcagtccttccccaggtgggccaacccacagggctgcttgagtgtcttcacaatatggcgctcggcttccccccagagcaagagattcaagggcccagggtaaaagccaacgtgttatttttatccctagcctcagaattcacacgccgttgcctccaccatgctctggtttgatacagcccagctctgattggaaggggctggggctgcccgtgctgactcttcaaaggcatcccatcctgcagatggtgttcacagggagagtttgtgggggccggcactccctcatctactggggctcattctggaagaaggtccagaagaattggagacccctgcccctcacccaaactttggaggtggcagggtgaacagcaggccaagttcaggtcccaagacaggccaaggccagtgcggtttcccttccactgcctcagtttacctgtattcagaagacagtctaggaagagttgagcagagttccctctaaaagagtagggagctgataacagtcccaagccctcctctttctctatgccaaaatcatttccgttatcctgagatgggggtgagtggatggatggtgtactgagg

SEQ ID NO: 36166 - DNA, 666 bp, Homo Sapiens
ttggctaggtagcgaggctgggtgtcgaatcggcacgagggcggacccgcgtattatctcagctttctcgagtgttggctccattttgggctgaggggcgcctttggaggtctttagcgaccggggctggggggtggttttcgagaaatcgcgccctgtttcagtgaccgcgcccttattttccagtcgggtatagtctggattcttggggcggtagggacccccgagaggccgcggtagaatggtgacctgtctccttcgaggcctgggccggccgcgacctcccaacatggcgccagttgaacgctgccttggctcataacccctcccaatggagggagttcctctttgcccctaaaactggcagcgcgggttttcgcccggcacaagaggcgctctcgttcgggctctcccagtttctgtccctcggagttgaccaagcagagctttcaaactatcggactatcgaacgtcttcacttttcgtgtgtacccgtgctaaagaggccgtctcggatttacttacgtaagcccaaacctggttaaagtgcatgtcactcttagtcattcacactcgtaagggctttccggcgcgttcctcttcaagttcacgcagcgtgtcggctgcgcacgaaccattccagtcgattctgccaaccgttcacca

SEQ ID NO: 36167 - DNA, 720 bp, Homo Sapiens
ggagaagacgacaaactacggctaggtacgaggctgggtttgaattcggccgtaggcggggcgcgcctctagccggccggacgccgactccaactggggagagttttcctgcgatgcccggacggagagcgggggcggcgccgaacctgcgccctgccctgcggaacggggacgccctgtgctcccgccaggctggggtcgcggcgcggggcttcggtgccctgcggcggggaccgggactttcgggggcgagcgcagcggataaggcggcagcgggcggggctccccgggctggcgggggctgctcagacccggagtctgctccatctgcagggtcgaggtctggggttgcgaccccgagcgcctctgcggcctgagcaggtcggggtggggctgtccattgcccggcgggccggcgggagctttggcagctgcgggggcggcatccggggccgccggggaagggggagaaggtgtccctcccgagcccaaaggccacagggccatgtaggtcggagaaactgggcggggcccattggtagcatgcaagggttgtgggtggatggcattccagcgctgttggccatggaggagtctcaagaaggcaaaaaccaagcttgccaaggaaagtggctcactcgacaattagcccaaagcaattaggccagactgggccgcttatgggtgttgtgcagcggcacgagaaaaagacggaagcga

SEQ ID NO: 36168 - DNA, 705 bp, Homo Sapiens
gtgtgagcccctgtgaccagcctaaagaatatttcaatgtatgtgaacttctaagcttgaccttccttttcccttcagcaccgcagatgtgggtgcgtgcgtggccttctggtgggaagtgagccattgttcctatcgttgcttctctatgtgaatctcctgtttccatcctagctgcctttaaggcctgtaggatgtgttcaggtacggttttctccacgtcacctccttgcagttacagagattcttggatttgtggattattttctttcactgaatttcagagagttcttagtgattcggtcttggaagtatttctctctttattctctcctgttcctgctctgggactccagttacacccagttaggccatctgactttggcccacagatcttggaccctctgtcgtcttccctcgcctctctgtgtctggagtcttctttaggtgaccaactcttcaagtttagctgatccattcctctgtgatgtccagtctgctgtttagaccccctctgacggatcatctttttacctgttattctccatttgcacgggatctcaggttctgtctttttactggacgtgtccctgggtctgctgaacattcctatctccttgggggatgtccccgccctttccacgggccctcccctcttcccgagtccttgaggccgtgcactctttaccccaggggtggcctgtc

SEQ ID NO: 36169 - DNA, 478 bp, Homo Sapiens
tgggcgctcagcccgtagcctagccccaccatggtggctatagtgaggggaggcgcatgcgtgggcccccctgctgaccctctctctgggggggtcttcctatgtgcggtgtggccctattgcttgatgtggtgtgtgagtgagccatgcaaatgagtgggtggcagtggctagccactcgtgccccagccaagcccgagggctgagaggtccctcagtgctcagagtgcccagcgtcgatggcccgataggacgaccgggcgagagcgacagacacgatactaccactgctatgagccattctaatgctgacagtcatcagccaagtgtgtcaatctatcgtatgtgcaacccgactactgttcagttaatcacatgggcgcgatctatgaggataagcaaaagaagaagagaagtagcagagagaacgaagtagaagaacccagcatcaaagtcgatggccgacacatagaccagc

SEQ ID NO: 36170 - DNA, 506 bp, Homo Sapiens
ctgcactcagcctcccacaagtgctgggacttacaggctgtgagcccctgctgagcagcctaaacgaatactttcaatgctatgctgaacttctacacgttgaccttcctttctcccttcagcaccgcagatgctgggtgcgtgcgtggccttctggctgggaagtgcagccattcgcttcctactcgttgcttctctcctgtgaatctcctgctctccactcctagcctgcctttacagcgcctgctaggcactgtgcttcacggtacgcgatcctctccacgtcacctccttgcacgcttacacgacgattctatgcagactttgctcgacaatacactaacccaatataacaactgcaactcttccaccaaaaacgtttcaataaactgaatttaaacacatttagacaataatactatcttccctattaatacaaccatcccatgatcttcaagacaatctgagaaaaatacaaaacataacaacaaccaagataaaagaac

SEQ ID NO: 36171 - DNA, 757 bp, Homo Sapiens
gatggggctagccccgtaacctagccccaccatggtgctataggaggggaggcgcatgcggtggcccccctgctgaccctctctctgcggggtcttcctattgcgtgggccctattgcttgagtggtgtgtgagtgagccatgcaaatgagtggggcgcagggcagccactcggccccagcgcagcccgagagcatggacgactcctacgaagagtgcacgtagcggcagaggcccacaggacctacgctgaatccaaattcaaatactataagaaaagccgtaacgacagactgcaacatcgcacagatccataacaaaatactcaagaacaccagcacatactgagactacacatgcagcaagtagagatagcaaaatcgataacaacaactgatgaagagggaccacagacggtagcgcactccgaagcaacagaatcgaaatataaagtacacgacacattgggttctaaagccagtaacagttgactagccagtgagatcagataggcaagcatccggccgaggttcaccgggacaaacagcagagcatgaagaaactaagcagaagactcgagaagaggctcaaacccggataaaagaccaccaattaacaaaaatgatggcacaaaagcgcaaaaaatcaccaaagtgataataccaaagaaaaagaatcgatgaaagcagagatgggccagtagaaagccggggcaaacaacgagggcaaaaaagcaacaaatcgcatcagatagaggg

SEQ ID NO: 36172 - DNA, 1384 bp, Homo Sapiens
aataacggctaggtacaggctgtgtgttaatcggcacgaggcaatgacgaggatgttccagttgtacagtgagatcgactgtgtactaatggccaagagtctggcggaaaagctgtatctatttcatgtacccatgtgctgtccatgcctcgatgacctactgactgacattcctgcacctctcagccaatgatcaatgcccaatgcatgcagaatggtagatgcttgatgatggccatctgacacccttgaaccccaactatttgcctgcatgcaaatgggtgatgcatgatttgctgcttgaactgttgtgactgtgtgtgcctgctgcctgactgatgaccatgcactgtattcctctgaatgcttgattgtgacaatgcatgacgctatcttgctcttacccatgaccaccatgtaacacataccctgttaattgcctgcttgcagctactacatgtgcaatggtagatgctaccaccgtgacgaccttatacaattggacatcactgacacgcactgctgtgcaccaatgctatcataccgtaacccatgtggataacgtgcttgactgccatatgcgacctgtgtgatgacgtgtgatgtggctgtgaccaaactgatgtgacatgtggtgacatactatcagcatgtgattgcatgggcgtgggaaatggacctgacttgctctacactgcatggactacacctgtgtgcttgatggattctccactgtgcacttgtggaggctccacaggacgcccaatgtggcccctgccccatgcctgcccttgttgattgcactgtccccgtaactcggaaggtttcactatgcaagaaaacgcaaaggccaacatgccaatggaatgtagaaggagcccccaattggagagaatcccaaaccctatggtcaaagttttagacctaaaattggggcgcccttggaagtcggtggaaccacatggtatcatgacgatacccttatgcaagcgccaattggaaaggctagaatccaaggataacacccctttgggcactagagttggaccccccccgagattggcgtcaaaacacgactggcggcggcatttggcgaatggcaaaacccaaccatcgggaacgggcatccccaggcttccagatggtttccatgaccccacaaacggttggaaagagtaaactcctatgaattcggacttcggccttggaattgggcccacaccgccaatggaccaacgtgggatctgcgcagcggagatgataaaggatgcacaacaggacattgttcgtgagctcccgccaaagacgaaagcggtgccgctctgtgcctgcgaaatgtacgtcaccccaaaggcataagctgcgcaaacatgcctttgggcca

SEQ ID NO: 36173 - DNA, 957 bp, Homo Sapiens
aataggctagtagagaccggtggatgaatcggcacgaggcaggacacagggtcataggttggtacctggggcgttgccagagtccttctcatcagtatctggatggcctatccctccctggaataggagctggggccggtgggagaagggaaacaactatttgggttaatatatgtggtcaaggcgtgtgatgggggctttatgagaaggggcaggtcttgaaaggggagggaatcccagcatcccgtgtgacgtggtggctcagcacagtccagacctcaagtcctactcagtttactcctccattgacaaatcctagccctgagagacggtctcgccttctctcttgattcagaaggaatggttgcgatacaccatctcttggtcacagttgctctgtcccagttcagctcacctactctgccagagcagtgaatgaccctcctgatgtcctctggcctaagaaccactgggagcagagagaaaaccttaggaatatgtgaaccctcacatggtatctgcatccatctggggaacctttactgagtgcacactccatcccggatgcagtacatacggtgctgaacagggcaggccgggaggctgggcccttgcgatctccaggaccagatgtgtcctccctgcctgatgcagcttcttccccctccaacagggacacaagggctatacctggacctgcagggcaccccggagaacaggggcagcaggactgagggcagccaggggccaaggttaccctggcaggcagggtacctggaccggtaggagatccggccccaaggagcagggtacatgcgctccaggctctcggctgcaggccgatgaaaagagcgcctgcgtcgcagaggcaaaggtccaccaaatcgagcaagggacccagctcgaaggccggtgacacggcccacggatccgatagggcggggaaaggccggacac

SEQ ID NO: 36174 - DNA, 856 bp, Homo Sapiens
atcgctaggtgggccgggtgttaatcggcacgaggccccttctccagcaaagacaggccacttcctgagaaatggagcatcggacaaacaccagcggggtgggaatggcaagtgctcaaggtaagcacgatgcagctgcgacctgtagactggctgcaatggggagcctggccaggagaagccagagacggacaccaaggtcagatcctgaagcacagaagaccctcagtggggatagggacctggctgcagggagcaaggtggccagtgtggacccatcaggaaggcaggggcctggtctggggaccccacagctccagctgggcagagctaccccatgctgtgctgtgccatggaataccagccaagagaccaggagcagggagcgttctgataggaacatccagctttcaggtctgacgtggcccattttaccagaagaaggggacctgctctgagcatagcagccccctctgcctggaacctcacagggctcacctccaggctagcaccctgcccctgcggctgaccctggccaggaagacacatgttagacagctggctggacttggtgcctgctgtggctgcaactcccctgggaagacagctgagtgttctgacgttggctaaactgcatctttacaacagctggggccccagcgccaccttggccctgtgcccaggcaaggcccttgctggtcccagcatccttctctcccacagatcttaccccggctcccaacccagcactctgggcagcaacgctccctgtttcatagtccatcaaccctcaacatgctcccaggtgatgccacaacttgaactgctcggatagcccctgcattacctttggcta

SEQ ID NO: 36175 - DNA, 1030 bp, Homo Sapiens
aacacttacggctaggtcgaggccgagtgtttaatcggcacgagggtggaacattgggtgatctcatgttgaggctgttgcccagtcccattaactcccttgttccccccacagaaggaagagacattgcccagctaagcatcaggaagctgtgttaaaagcccttctatgggtttggttttgtgatgtttttccctaatgggaaaaacgttatagcttgtttcttactgccctgtctgggaagcagggcaaaccatccaggtttttaaatgagctagatgcccctcttcctcttctctggtcactgaacctggaccaaagcactattgatattccaggtgtgattaactctgtcatggggatttgctccactgcatgagccccatcattttcacagcgtaagccaacagagtgagaacctagggctaccctagctgatggatgtgagagctgctgtctacaggagctcatcccagccctgttaactggcagtggcaaggatactcgtcatcggccattgcactggggaactccctcaccccatggcttcccaacttgaaacccagatatacctcacagggagaggtgagaaaaaaattgtaaatacgacttgctcaagagcaactcagggtatgagagatgtagtttacatctccatgatcacttgaaataatctgtaggctgagtgcatatggggagtgagagggagaaaggatagactcccaagggatcctatccaatatatagtgaagcttctgagagaatgaagaagttgggcatcctaaggccctatgatggcaactacaatagaagctagactagcccattcaaggaaacacaaagctggaaaatcaacagtgagaaatacaaagttcttcacacattccaagtgtacacggatcttatacatattccccccattggacaatctcaaagacccccgtttgcccatgtgtggtgacaaacgtgggcaattacacggattaacggactttcccatattaaatctacgggcaatatcacaagatcg

SEQ ID NO: 36176 - DNA, 1378 bp, Homo Sapiens
ggccgcggtgtttaatacggcacgagggtgcatgtcctggtgcttgatggtcgaggccatctcctgtgtgcctgtcatggctggccatcgtggctaaacatgtgtactgctgggccggaattgtggtggtctgtacgctgtgaatgtgcatcaacatttcttgtgcaattatctacatgaaacaatgttgaatgtaccttggctttcctcctgcaagctggatgaacaccaacccttccctgaggcccctaccacttcctgggcccccagcctgcatcttcttggctgtgacctgtgcgatggtattgcttgccccacaaaaccaatgctgatgtgccatgtgccgctctgtgacctgtctcaatgtgtgttttgactggcactcccacctgcccctactgatcaagtgaaaacagcggactggttgtgttccatgcctgccctcaatggctctgtgctgctcttgaagcgctacaatgcaaagctttgcctattcttggtgtgctgcctgtgcctcacctgcaggcttggctgcgcaaggtaccagtgcatgctgacaagccacgacccttgggcagcgccgcacatgacggacacacatgacgacacaggccacgagcagtccacctagccgggacacgaacgaccaccaggccatcaatgacgctgcctccgggacacccagggcccgagcacaggacacgatggatgaacgacaattctgacccaataacacagagaggtcctcaaatgacccactgagaactccatgcgtctgagacccagcttatgcaggactaggtacacacttcctccacacactccacatataccccatccataccctcagacgtggctcataccacatcgccctcctcgcgatttgccgcgtcaccacaaccgccctgtcataagttgacaacgtggcgctccacttggggcacgcatccggttgtagtctatactctttggacacccaggcactctatcatctgtatctcccacaccgtcgtgtcatgaaaatattccccgtgttactaccccaataatagcgtgtgtgccggttcatcaactttctgcacaacacaccacgagtaaccccttgccatattctcaccctcaccacgcacgcaatccttatcacagtctctctccctcgctctacagcaccgtccgacaccagcgttcgccctcgtctccttacacttctctctcgctccctccccggctcgcgccccccctcaggcatagcccctgacccctctcaccatactacaggcctcaccaatcaccagctgatctcactactcccaactcctctcatacataacacatatacctccctcgtagacatcacccatcaatcctcactacccca

SEQ ID NO: 36177 - DNA, 1436 bp, Homo Sapiens
tgtcttatgtacagaggactctgtgttaaattcggcacgagggtatgggaggtgatcagcgatgagcacggcatcgaccccacgtggcacctaccacgtgggcacagctgacctgcagctggaagcgcagtcaacgtgtactacaatgagtgccaccggctggcaatgtactgtgcccctgctgcctgtgctctgtggatcttggatgccctgtgcaccagtgtgactcctgttgctgctctgtgtggccctttctggtgcatgatcattcctgtgcctgtgatcatacttctgttattcgtgtccatgatggttgtgttgcttgtgtgcaaccaatctttgtgtgccacaatgtgtgtgcgacataacaacaatgtatatgtgcttgcctgtgcacgccttgtgttgtgaaacttctgttgttggcattggggacttgttttgtttgcacgacaacatcgcgcacgtggcctcagcgacgcaaggccatttcgttacgcactattgcccgcattgccacaatgatgtgcctttgctaccccaaatgacttttgccactacacagacatacacacaattagttgtggcttaggtgaaggtggcgtaagaaccctctagcgagcaggatacccatttatggtgtctcgcaaatttgcgggtgagttaaaccaccacagaatcccaccatttcccatagcttcacgagtggtccacgacaagagcaaacttccaccgatcggacggcggcccactcgggccgccacatctgcttcacagctacccctgcgcacaagtcaggcaaacctccaaacctcgtggagaagatttccacgcacttgttggctcaagtcacagcccccacaaaacgcgtgacgactctggcacacgctacaacggagcagatttgggtcactttggtgcacggacacttgggtgcccacaccacagattaagatacacacggtcaccgccagctcgaccacaaacacacactacgtcggtccacagtagtgatattaccactaaaacgaggcgccaaaacccataatatgctccacgaaatagggtgacagtagtgtgatcggcaaacatcatggtgctcgctgcaacagactggaacacccactcccgaccgccgaataattacaaggcgcagcgacgaacaacagcgccggtgggtcgacgtagctacggaatgacaagccaggcacacgtattaccccaatgattcaccctcgaaagcgaggagcacttaccaccgacgcaagagacagccgccgccccgcacaacggtagaacgtcacgacttatccccacgcaggcgacgagataagaacgcaggcaggcaaacacgaaccaacgtgacagcaacaaacgccacccacaaagcagccgtacacgcgcggtcaacgaccccgcgctgtgccaaaaacgtc

SEQ ID NO: 36178 - DNA, 827 bp, Homo Sapiens
tatgtggaactagaagtgcacctgttgttaatgatgtggaatctgaaggggtgttctctttcccagctctcctgcctgtctgccatgttttcatgtgcctgggtctgggtgtgtgtcttcccccgtaatggaaatggcctgtgggatgctccagtgtgacccagtgctgcctgtctgcttctgtgtgtgagccgtggtgcttgaccatgccatgtgacatgctgtgtggtaaagccctgaagcaagttcttgctgctgagtgtagtggatgtgccatggctgtcctgggcagtaacttggctctccgtgtggtgaatgtcgtgcttggtgattggcctactgtggagcctggtgttttgtacttgctatttatttttttgttgaagagtgcaaatcattgcgcttttgcaattgaaaatctcgaagggtgacctcatgtccctgtgggacacaattgcccccaaaggacttgaaagagggagattgatattcgagctctccagggttcagtgatatcaaggtatgatgccccagctccttggatgatgattgattgctagactacgtacaacttggaaacccagggggaaatcagcgatggatcccatttcatttacttgaaggtggcctggacattcccctgttccctataagtgcggccgaggaattttccaggcttcactaaccttggcttggggttcttgccgagaaacacttaggttacggccactttccagaggtgggttgttacgggcacaaagcagcttcatctttgattagccccgttttgtgggattggcctaattgaagcatccaggcgcgcccgt

SEQ ID NO: 36179 - DNA, 1359 bp, Homo Sapiens
tggctagtacgaggctgcgtggtttaattcggccgaggctcgctctgcccgtgtaccagacatggctgacatcctcgtgccgcgctgccccgaatactcgtgtcgcggtgtgccctgggccccgggcgctgctggttgggctttctcgtgtgaatgtgcgaccccctggcctgctctgtgcctgagcctgcaggactgcttgtgaatgctgcgactgtgccctatcatgatcctgctgagtctggagtgacatgcacctgattatcaactgcacaagatttttgaatagagccctctcaatgcactcttgacttcattcacatgtcaatggaacttgtatttacctgtgcagaagcctcttctgatgcccgatgtaccatactggtgacacaaatgctggctgtctgtgcacatgtgtttatgtgacgcctgtacatctatatgaggatgcctgcctgtgcaccaccgacatcatctgacactgcgaacatgaccagccacagcaccatcacagctgtgactatgaactatcacctgcccacaatggcctaccagcacatggggccactcacttcttgctctctcattacccccctgcaacccctggcacgccttcctctgtaaccttcgcctttgccgacccactgtgcccggtgaccttgctgtgccgccgtacctgccccaccacctccgcctaactcttcacggtctctgctcgtggcattcccttgcccaacacccgcagcatgccctcactcctttcttgggccccccaccctgtgtccctcgcccttgcctggaccccatcaactccacttcttccctttggcaacccactgtgcttccagaccaaccgacttcatatcttgcatgcccaccacctggctagtgccgcgtgttgcactgtcactggaccagccatcgcccatctgtggcacttggcgcacctgtcccctccaacccgcttgggcggccctccgactggcaccatcccaccctttggcatcccccccttggcgctccactacacccttaacgcgctggcttaccccgggccaccttcgccgcagcttcctcccgaacttgtccccttctgccgccccctccctccccctggtctgtgccttcctatccctacgccacgggtgcgctactcaacacttgtgtgccactcatggctcctccactgccgtgtccccgctcatgcactttcatacggcgatccccctcactccgccccctgccccagttctccactccagcgcacccccgcgagtcatcctccaccggctccccgcccatcgcttgtgtcgtgtcgcctcccttgatatctgccacgtgcccgtctcgtcacatcta

SEQ ID NO: 36180 - DNA, 865 bp, Homo Sapiens
aaaaactaataaaggggcccataaaagggtacgaggctgggtttgaatcggagagggctgcgtcctgctgcagcaaccggagctggagtccggatcccgaactgcaccctcgccatggactcgtgccctcagcgatcctgcataacggcagtgccggaggcaggcgtgcccaccaacagcactacgcggcctgccttccactgccccgagggcatcgctgctgtgcctacggacaggcctccatgcgtcataggctgcatgccttgcccagttcccattattcccccccaactacaggatttttttatccggggaggacctgccctgctgctccggatactggctttgctgccctgcgggccaaaggaagttgcttcatggacaattgccttgaaaccaatccagccaaggccgggggatgccggcgccgtgcattcccccatgtcgagttccggccaaggcctttgcacaccacgtcttttggagtggcttcttaacgcgtcgttttttgtccaacaaaattaagtttcagttcccagtggggaaggttcaccgattcaagacccttcgcgtgcttgtcccagatgggtagtttctcttttctgattgccttgggggaaagttccttgggggccccgtggtcccccaaggcagcgccattcaaggtcgcgcgctttcaagtgacactagagcttgttatttccaagggcccaagagcattttcccccagagcactccgaagcaaggttttagccccaaggggtcccttgggcccgttcggttttccgaaccaccccaagggtgccattattcccttggggggggcgcgcaagtgagaacccaaagggggaaccacggtaacgca

SEQ ID NO: 36181 - DNA, 1819 bp, Homo Sapiens
accccacccagcaagtcacagttgtacacaaaagcggtgttataaacgacggcagtaactataacggtcctaaggtagcgagacctggcatggctaaattcggcacgaggcgcatgcgtcagctgcttccacgatgaagctgaacatctccttcccagccacctgcgctgccagaacactcattgcaagtggactgatgaacgcaaacttcgtactctctatgagaagcgtatggccacagcaagcttgctgctgcacgctctggcgtgcaacgcacatggaaacgggctcactctgctgcgtcctgcacactcacgctggctggcgaagcgcacacacaccacaggcctatcccccactgcaacgaccagggctgctcctctagaccccaatgcgcctgtgctcccgccctgccctaactgacgactacacgcggcgcattacctggccgcccacggcaccgcaaagcgcagcacacatggcaccgaaccgcaacacgacgacacacctcccacgccatcgccgcgcatccgccacctcgcccggcactcgccaacactccctgacgcccgatcccgtcaacaccctccgcccacccactcgccaaccaccccagcggacgaccgacagcgggaaatacttcccacattcgcgacccattggacccattgacataacatcacacaacgctcggcccctccggcccaggccattagggggccccacccaaacacagagacgccttaccgccagcgaacactttccacggcaaaagaacacctcctctaccaacacagtccgctctgtcgtacaacagacgcaaccagcaccatcgacgtggcgtcacccagcaggcaaggacagcttcggccagggataaaaccggaaacacgagccccgcctataaaaaagctaaacacaacgaacacctgcggctcaaggcaaacgatcccaccaagcgaggacgccccaagacatcgcccacccccccagacggaacctttaccacaggcccggagccattccggctgcaacacatcccacagcccggcttagatctcccctcggccagagtcgcgacaactaaaaccccgcgcccggcgccctccaaccatagcgcgcctacctcgcgcgcacgacaacacagcatcgaccgatcaacccccgaagccgcgacacacccaacactcacgccacggcacacgcgacaccgccccttgcaccagcacgacctacctcggcccgaaaaccagcctcacacagcggctcccaacccgcgctccgccacacctggcacacgcggcacgggcaccatcaccgcgcaacgcacacatcgccgcccccaaccgaccaccccaccaactctcgcccgccacaccggcaagccacgcggcacgccaccgaccatcgtccaccacactccctggccggaccgacgctcgcatactacccactcatcacgcggtcatctgaagcgtctagccggcactcagccagaacagacagtagcacacaactaccagaggagagctacgacaacacccagacaacgaccagacacccaaggcacgcgcctgaacaagacagacaccggagcacagacagcaagaacagaacacccacaggcggcaccacaaagcagcgcggggccagcgcaagagcaagaccggacactagaagacgcgcagaagacaaggcaagcaagcaggaagccgccacaccacacgccgcgtcgctagggccaagcgcgaggaaaccggtcagagcgccccccacgcgacggcgcgtacacacaccccacccgaaccgcagcccatcg

SEQ ID NO: 36182 - DNA, 900 bp, Homo Sapiens
acgctacagcctgctcacaaaagcaggcttttaaagacggccagtaactatacggtctaaggtagcgaggcctggcgctggcgaattcggcacgaggcaggaaccagcccgaggccaccagggctgctccctgcagtgctgggctgccgggcggcacgccactcaaccagcacccacgagcacatgcacctgcacgctggccgctgcacgacgggcttccctggcacggctggctgcgtggcctctgctgctgacgcgccggcctgctgacagatccaaccctggcccggacgccctcacctcggcaccacctgcccccttgccagcctcgcgttccactcctcgcgccgcgtgccccctggcagcctcagccggccacttgcctccgcacggctccctcaccgcgcagcgctgcccacaaccactcgcactgtttacccgccctaccaaccacgccacgggctcttcacctcatgccctgccagccactgcccctccccttcacacggcgttcactcgccccctgctgacgcctgcttggcgcgctgcgcgcaccacaagtcctgccacgcccgcgcccttcattgacctggctgcctggccttgcgcgcgcgccaggcttccccacgcgcctccccacgcaccccaaatcccctcccccttgccatcaccacaaagcaagccctgcgtgcacgaaacacgcactctcgctgcggcctccgcgtggcctgccgcgccagcccctgtgctgcggcaccgcccccatacgcaacacgcggcacgcgaacccggggcccttctccacgccgagacccgcccgttgcgcactttcattggcggccttgccacccctccaaatgccaaaacccaagcgcggtcgcacagggcctgggccccaca

SEQ ID NO: 36183 - DNA, 1120 bp, Homo Sapiens
aagtcactataagcgggccattattgtagcgagtgactgggtggcgaattcggcacgagggcgcgggctgtggagcccagagccagagagcgcgctggtgcgcgtgctgtggcacccgacggagtggaactggggctggtgtgaatgcacatgggtctgcagctgcttgggccaccctcggtcagagtggcgccgtgtccagcagagcaaactgggctgcccctggagccttgcttgagaggccagttctggtgctttcccagctccgaagtcaatacttgagatcccagatgtgtccagcagacatcctgaacgaggctcggcgggctggacggacgccttcgctgtgtccacaacacgggactcctgaaactgactgatagccacgtggatttgccagcagctctgagccttctaccgcagctcttccccccaactcaactccctgctagctactggacgactacccaatgcgaaccggcacgacctgcctactgagcagcctgccgctgcccggtgctgacaggcctctccccctgcccacctctctcacccgcccactcagtgcctcatgcgcgggccaattgtccatggagcctgcaggcccatgagcaccccagcacctgcaacgactatcgccggcgaccagcgcctacacctgcgcccgtcgacctgcccaacctccgtcacactgtccccttcctcctcatcggacaactgtactcctcgctcaggcccgatacacttcgacacgccatgctcctcgcatacgcttggagaacaggaccatcaggataccctgccaccagcctgtcaccaacagccgttacattcgacccccctaatcactgtctgtatactacaaagaaaccggtggtgctctacagaccctcacgcccagaccagggcagcgcaagtctgagcaatacagccacgacacgacactcgcgggcacattgagacacctgacggcacgctcccgcgaaacccgccatgctagatctcacgtcacgcactcacaagccccgcactccgcgaagcactaccacccacgcaaccggcccctccacagctccccccaccgctgccgcccacactcgaccagccaaacagcgacccg

SEQ ID NO: 36184 - DNA, 1326 bp, Homo Sapiens
aactatagcggttttcaggtagcgaggcctgggtggcgaattcggcacgagggagtgatgacatcaccagcgccgagatcggagagcagctgaggatgtgaggagggggagcagggcgacccccagaactgcaatcctggcagcagcatgctggacgtgggatgacatccacgcctcagctactgaccctgtgccccacagtaccaatgggtccacgatgtacaaagtcatttcgtgccagataggtgtgcagaacaccatcacaccgaccacgatcgtcgacatgctgcattggatgatgtaggacccataggccatcccacgcaccagcacatcatgccctggatcagaagcaatcttcagaataaccaacgacggcacgcatgacaacagatccatcatcatggccactgaacgatcacgagctcattactgccaaccaagaggatgaacacaattcccaccaaagacaggcaccataccaaaagacacacaacagaaggtatatatggatcgtcactcgggcacagattcttaccacacactctggggtcgagacgacatgggaaccaacattggagccccaccattcggacaaccgtactcaaaacaacatctaggcgcccccagttgaaccccaacgccattgagcggcctattcacgttactgaacgagaaacagtctgatcatacaacacacacaaaatagtacgttctagcagtaatccagcacgcgcccccggggtttacaataccacctctacccaagccagctacaattacatatatgtccatacaaccaagccaacaagggattcctcatacacacgatagtgactagcaacacccacacgaacccttacccattgacccaaattgcattcatataaaacactctcacccatgtgcgccaccgtccaacatgcgagaggcagagctaacccgctgccagacataacacacaatgacacaacatacaccgcacgacaaactaatataacgaccaagcacaataatctacaaagtgtgacaacaataacacagctacacacgcgcaactaagacccacacgacaaggaacgcacaagcaacgcaccacaacacacagcatcgctacaccaccccagcagctacaacccggcggagaacaacagaaaaaagccagcaggcacacgcacgacagcgagaaagcccaccacgcgaagccaaacacagagcacgcaacagacaaccccccgcgaacgagacagagaaagccacacagaccacacgaccacgtcaaaccacaacaagcaggcaacaacactagacacaaaaaaccgaaga

SEQ ID NO: 36185 - DNA, 1149 bp, Homo Sapiens
ttgacggccagtaactataacggtcctaatggtagctgaggcctggtgtggcgaattcggcacgaggccgggccgtgctggtgcctgtctgctgctgtgcgccgtccgtgtgtgcaggctgtgtgtgagcccatcatgcctgggactggccctggcctgcgcgtccctcacctgtgctacactctaccctgcgtctctactgcctcttctgccgacgtgcctgccgcggcacgacaccctgtgcagcactactagcccctggggcagtgccacctagcccagcacagggattcctagggaccgaaccaaacctaacttacgggaaccaggccattctctagccaaaagcgaaacaaactccacttcatattaacacctggcccggctggctaattgggctttctccagctacacatccaaaagccctccaaacgaggtcccccaaacgcaaacaccattcctacaccgctacgttcacgtgcaaacggcggcctgggaccaggggcacccgcgcccaaacaccacttgtcagctcaagccaaaggaatccgactccgccagcagccaagtactaataccagaagtgcgcttgcgctcctgcaaacacaaccatgaacctaaatggttccccagaccctggatcacaggcatgagccccaaaccaattttggcgaaccgtacaatcccgaaacacttcggccactaccaaaaagccaacatcaagcacctttggctaacccaacaacgggcagtcaaaggctcgcacccacaggctaggttgagaagttttcccccagccgggccacaaagccaggattggcactgcttggccccaatgcgataggcggagggggatccccgagttccttttccaatatatttcatacgaccttgacacactatgggcacttaacgaaccgactaggcaactttggcacagcagcacctaccaataatagaagatggccccaaaaatcaaaaaggagcccactattccccctcctgacaccctattaagtcacagttcggaaaacccaattgggaatggaggactagtcctcggcgatctctcacccataagcagcgcacgacagccgacgccccgcagaaggatcaccagcatcacctatattccgtacacgccccaca

SEQ ID NO: 36186 - DNA, 2144 bp, Homo Sapiens
ccaagagaccatacggactacacgctttctcacacaaagcaggcggataaacgacggcagtaactataacggtcctaatggtatgcgaggcctggtgtggctgaattctggcacgaggacgcagcctacacctacttctacaagggcaccaaatactggaaattcgacaatgagctgcctgctggatggatgccctgtgctaccccaatgtccatccatgcgtggacttcatgtgtgctgccagtgatgcactgtgtgagccagtgcccccgcactggccctgactgtgtgacctgtgccgcccattcaacctcccactggcggcgtgacatgaatgaccctgtgggactgggcacagactgtcacggatgtgtgcttgacacggtcgtggtgtgggacttgcgcggaacttggcgagcaacatatctgctgtgcgcccagtagtggactccaacccacaactgtgacacgttatctctggcccatagactacgaccgcttgggaacagagcttgcaaagaacttgctccacgtgaacgccgcttgtggccacggcgtcacctggctgcagaccggctgcgctggcacttgagcctgacttcgcgcatggcgtcagcgtgcccttcgcccttgtctcttgccctctacttgcccgcctacgccctgacgcgacgccatccgacccactaccggcacgctcgctgcgccttcgccctcgcgactgcccacgccgcccaccagccgcgcattgccgtaccctacagtctcgctctcacctagtaccttcactcaccacctaggcaaaacacgacggcacctcctgccctcggcacacagaacgaaacggcttgccgcgaatccagtggaagaccgagaactcccacacggcaaaaccgctacccattcgcgagtaaagcaccgcgcgatcgaccaatccacgccggagctagcagaggtgcaccattgtataggtacatcagtccttcgcacagccaacttgaagactattccaccaaggcgggagtgaacattcagccacatatcaatagcagacacacaacaaacaagagactaacgcagtagagactataccacctacttaactgtaccaggcacccacaattcctaataccactactagaacacccaactgtcgatcacattggaacacatcaccgtgaaatacactacttccacaatttacagcagttccagcacacttgtgattcaccagatgccgacatggccttacacgcgcgaagcacacgtgactacatcgcacggagcctaacctatatcggtcaccataagcactacaatcagaatacgtaaccactcaccatacaatgactatccgaactcagacggtgtccccaccaactccgaccactatcgtgccacaacactcgactcctcatatcctacaagaacacgttaatagcctaacaaacctcgacttgactcacctaacaatacaacagacaatagtagtccacatttaacgataaccctcgcaatctcatcacataccctcctactcttctagcccacaacacccacatccccaatacctaccccatcagcacacactcaccctccctacatcttcacatccacacactccagctccacctcccaccacctcctaccccaccgactgagacagcctgcacaccgctacccataacacgccacacactatccagtcacagcgccgtgtccccgccgacacccacatcccttctccaccgactacacctaccacgcgcaacttccagacagccataccacagacgcggaactgcaccccgcacacggacagcataataaaccattaccaccccacatacatactccaacactacagctcgaactctccacctacagactacaagccacacaacacactccagtcaccaacgctcactacacacaacatcatatcacgcttctcccagtcaccatctccctcagactctacaacatcgatcacaaacctaacatttcaataagaacaccaaataacatactatcttagcacatccgtccaaaaacttcacaactaccatacaaccctcacatccaccacacactcatcatactccccacctccaacacacaaaccaagccaccacaccacaata

SEQ ID NO: 36187 - DNA, 538 bp, Homo Sapiens
ccgacgtatactataacggtcgttatggtagcgaggcctgggtggcgaattcggcacgagggaagagagagttaactttgacaacggcaataacagaacaaagaatgtactttatgtatgttttcttgttcttgtttaccccattctagcaatgcagaaacagttagaagacactcaccgagccccacctggcttcccacctgtgaccaggtgaggcaacagtgtgggggaggatgaggcagctgccctcggcattgcctgtggcaaggccagcaacacaacccaggaaaggggaccgttttcagtgtctagtgggataataatatctagcatttactgggcatactcaatcttgctaccaccctggttttgaaaacacaaatctgttcaaatgcagttgatacatgggggagcactttgtgcatgatgtaatttcgcattctcctatgaatgatgaatgacgggttgctagtctggttgaacagttacagatggatttgtaagctagacagtgtccctcaggaccatggaatgtgtg

SEQ ID NO: 36188 - DNA, 1024 bp, Homo Sapiens
aagtaaatataacgggttattgtagcgaggcctgggtggcgaattcggcacgaggggtcctgtaaaatatgagaacccagtgctttgaggcctgtccagcctctcgtgagcccaagagaaatgtctgtcgattctactgccaccaacgccacacatccaagtccacagtgcaattcttagccacagaccaaggcatctgagagtgttttctttgatttctgactccggcctccatggctggtgatggatggacattccctctggaccatgactgaaccagcccctcttgagtctgggtgtgagtcgcagatccctggtcagcaccctggaatccggctgcaccgggcccctcccagcccacacagtgcgttcacctcaggctcccgcacgtgcccagcaggcctgggtccaggtatcccttgagactgggagccccaggggctggaccacctctcctagagcacctccagtccccacttggggacttacctcctcccaaattatctccagcccaggatctgcacagggccctctctccccagtctccaggacgtgattagcaacttcagttcctcaagctggagaaacaagaacagaaagggaagtggcctgtccacaaattccactttcagccccaggacataaattcccccagaacaaggaagaaccaggaggaaaagccacagattcatctcacggacttgacctcaacgtggacgtgttccgggaatcctcgtactatgtaggaaggtgctcccactctgcagatgagacaccaagatccgagggctatgtggcgtcaggacacgaagtgcaagcagagtgatcccagacaactccaaccaaagcggattcgacaggtgctcaggttccggcaaatggacccaacggccaacacacaaactgggaaggaaaaagggacaagacacaaaagcacaagagaggaacaaacaagagagaaggaagcgagacacccaatggcagagaaagggcaaagggaaaaaggagaggcacacgacagatt

SEQ ID NO: 36189 - DNA, 1115 bp, Homo Sapiens
ccagtcactataaggggccattttgtagcgaggctgggtggcgaattcggcacgaggtttgaatggaaggagccaagaggccagcacaggagcggattcgtcagcatttcacggaacatcgagccgaacctctcgcaagtcctgtgagccgttaaggaggcccccagtcccgacccttcgccccaagcccctcggggtccccgggcctggatactccttgccacacgggaggggcgcggaacgccggggcggaggaggagccaacacccggagctgggctgagacccgcagaggaatacgctctagggattaagtcccggactagcgagatggcaaggctgagagacgggaggctgattgagaggcgaagagtgatcgatgaaaactaccccataaaagaccaaaatgggacaaggaaaagacgtcaatatcaacacttgtacgatcattggacacagatagattcgaggcaaagtccacacactactggccatcatgaatctatccacatgcggtgagccattcgacaaaaagaaaccattgacaaatttgagaacggaggcctgctgagtatgggaacaagggcatccctgtcaagtattgccatgagtcttggattccactgacaaagcactgacgcggtgaaccgatggaaatacaccaattgatattcgtcactttgatgcgacaaaaattatcgaagaaggccagggacaggttgcaatactcgttgcacttacatccgactatgaatggaccccgcaaagagtaccaaacaagaaagggcaaacttttagtgttacagagagcacaacacctatgaaaattatcacacagagggacaccaaattcgtacacagggggcattaccaaccttgactagccaatgcgatcacccagtgagaaactaggatagtgaactagaccagagggagtgcaattggggccgcgacaaatattgatcacaaagagcaaggaggatgagatacgctccacacaacagaaaactgggcagagacagaacacaccagaagacagagcatattagaccccgaattacacaaggaggcagatagtacaacacacaactgcgtgtagtgtacgaagacagccaa

SEQ ID NO: 36190 - DNA, 1070 bp, Homo Sapiens
acggcagtactactcacggtactaggtagcgaggcctgggtggcgaatcggcacgaggtcacttcggataatggcctccagctgcaaccatgatttcattctttcttatggctgcataatactccatggtgtagatataccacactttctttatccagttcacactgatgggcacttaagtgattccatgacttgctatgtgaatcgtactgcgataaacatacgagtgccggtgtctttgatagaatgatttctttacctttgggtagataccgagtagtgggattgctgggttgaatggacattctacttttagttatttgaaaagtcccatgaggcatgttttctatcattcccatcttacagatgagacaaaggctcagagaggtgaggtcacttgctcaaggacatcagctaacaagtggtggaaatggaattcaagctcagtggactctaaagccagtgctcatgtcactgtgctaaacagcctgccttgtcacatccccacctctcatctgaccaatgggagactctgagcagctgagtgacttgggttgtcacacagctaaacaggggcaaaggacccagtcttggatctttccacctccaagcaggaatctgtctgattccaggagattgatgatgttgcagatggctaggaagcagactccaggatggaatctcagtatgcaggatgtctggggggagagccaactgaaccagacactcagcgaaaaggcggggaagaacgggataaggcaggaagcactgaaagagaaataggggagaaggtgaaccgggatgacagagcgaatgacaggtatacaagccaaatacaaggaggaggccctggacgctggaagggacataaagaaggctggcccatggtgacagaggggggcacggcatcaataccccatagaggaatcacacacatgtgatgagcccatggggcaaggggaggtgtgaagcaaacaggcctacgacagatgaaggaacccttaaaggggacggagaagagcagtgtgtgaccatggcacacagagggagtgacagcctctcaaggggca

SEQ ID NO: 36191 - DNA, 832 bp, Homo Sapiens
cagtactatacggtccttattgtagcgaggcctgggttgcgaattcggcacgaggccatgatggagctagtgagagtgagaacggtggccgcgtgtggtgctggcctgactccggggcccgatggaggaggagtgagtgccgcctcggaagacctgagaacggggcgacgatcagggttttccagtgaagggtgaagatgagctcggggacgaatgaggaagtgcgctgggcgacgatgaacgggcacgggtggagcacgcatgcctcaaccgccgagctgactgcaagcagcaacatgccccaacaagcatgctgcggggccgccaaggagggccgcggggaacgagcaggcggccccacctcgctagttcgcaggtgacggttaggcagccagacccagagggcagaatggcaagggcccatggcagcagtgcgagcgaaggttaagaaacaagcgcgcgaatggctgagcggaagagcgagaggggtacagccacacttgtggcttcccatgtcggtcgggggtgacttggcaaagacaggaaacaagaaaaaggccgggagatcaaacacaggaaggggggttggttaaagaaagaagccaacgaaggaagggattcaagtgggtggacggatgtgagtaattaagtggaagataacgattggaatgagaaagcaaggtagtaggcggaggaagtagcaaaagatcataggataagggagatagcagtgggtagaagagaacagcaaggatagaagagaatatagggaatagaaagggaagaagggtagaaggtatagaaaaagataatataaaattagaatgaaagc

SEQ ID NO: 36192 - DNA, 743 bp, Homo Sapiens
gcagtactacaacggtttaaggtagcgaggctgggtggcgaattcggcacgaggagcggatgcttgcttgagatgcagagtgccatgaacctggcaacaaccagttgagcagccagtgcccgctggagacttcacccacccagcaccccaacccaggccccatgggcccctctttcccccctggtacggtcgcccatcagcaccactggtgagcgcttcatcccgagctttccacagacgacgaagatttttatagcagcagactcccacaagggcctcgaacccacacggtaggaggactgtgatatcacacgctggcccggacaccatcgagagatcatacaactacgccacattgcaacacacgctgcctaaaaccattcacccataggacacacctatcaaatagccaaccacactacaatcaaagctagacccttccaatgccaaacatacactcactattcactactcgaacaccctcacgtgttgacaaacatttctacccacatagacatacacaaaacatttagatatagcaccagaggaggatcacctacaacagacgagtcaactcaacagatgagctccttagagatcaaggcaatacaaaatccgtacagcaatcactcaggaaggaagtgggcgcgctccgtgtggacccattgcggacaacacggaagaaaagacaaaccaatagaaacaaagacagaaacgaacggcagaaaagaggatccaaatag

SEQ ID NO: 36193 - DNA, 1058 bp, Homo Sapiens
ataggctcagttgtacaaagcagggttatttatgactggcagtaactatacggtcctaatgggtagcgaggcctgggtggcgaattcggcacgaggctggcgctgaggaggcggcgggtggctcccggggcgtttgatcggtgctcacccgagcccgtcgggccatcgcggatccaggccctgattgtcgtgacctgccccggattccccgcgggccttcctagccgccatggacggacggtgtctatgaacccccagatctgactccgtgagtgagcggatggcagctggctgaacatcctgtgcggctggtcgcatgagctgttggttggatgattcagtgcctgcgaggatcgagctcagtgaagccatgatgctgaagtgtacggggacctggagtgccaactgaccgtccagaaaagaaccattgatgatggtacacctcgacatggaattggccattggaacacgcgaacgaaactctacacacgagctgagaccaccaaggacaagagagggatccactctcgcagcgacgattttacaaacgtgcaccctgcgttgatgtgtaaacaacaacatcccacgtgagcgtaagcagtgggtacctagcagaaacccttggttagcacatatgctcaggaccgcggaccctcaataaacgagagaaagaacgacaatgcgaagaaccaccgaaacaatgggtaagaacaccgagaaagaacacataaacacattggaactgaatgcaacgaataagacgtttatgactggaaatactgtacatcgaagcttcaatacgatcccattaacacgtaatgaacgcgagaagggaccactcacaactggcagtcaatgatcaaaactgcaacccatcgcagtcggcaagcgacagagaacaagaggacccacacaaaagggagatagaacacatgaggagatagacaggcgcaaggaacaagatacagaagcaaacaaggacaaagacgagcacagaaagcagtaacaccaagagaaagtataagaaaagaaagtgcaaagagcacagaaaagcgagt

SEQ ID NO: 36194 - DNA, 834 bp, Homo Sapiens
tcagtaactataagcggtcctattgtagcgaggactgggtggctgaattctggcacgaggggactggccaggcccccaaacctccaagacccatcgtgctggatgcctgtggataagcgaggggagagctgactagtgccctgtctgcggggtaccttcggcgaggagaggcgacgaaggtctgcaccagacgatggcactggacatgtgcatgcacgggtgcatacatgaaaactgctgtaaaacgaacgaacgtttgtcgggtagttattatttatgttgatcttgtgttgtcttgggacggacttgtgggagaccccacaagaatctacattaggggaagcaaggaggacgcgagcgtctctcagccagaacgagatggctcataggggggtgaaatccacgtggatcgtgcgggaaaaaatgtcagagcgttcctcgagtagagagcggggctctatgtggcgcgatacaggtgtgaaatgctggggatagccacaggaaaagagggagtgtaatatagcgcgtgggaggacaggaaggacaacagctgtgcgcagagtcaccgtgtggctcgcacgcaagtgggggacggtgtattacgaagagtgttgggttgggacagatgatgtgggagagctgcatgcgggaaggggagtgtctacaagaagtaatgtaagggggcgcatgttggagcaggttgttgtaatgaaattaccgcaccgcgtggggactatatgtggggggagaagcgccgatattttacagagtcgttgcttagcagaggttgtgtggtgatgtagaaagagagacaatgtaggatgttgttcgagt

SEQ ID NO: 36195 - DNA, 716 bp, Homo Sapiens
actataacggtcctaaggtagcgaggcctgggtggcgaatcgcacgagggagagatgcttctacggacaacacaagtatggtttcatcgacttagaagatgaggctaccatatggctgtttggggctccttgtaccactgcagcaatgtgcagaggagggggtgaccttgctggcagaagggactgatcctgattaccaaggggaaagtgggatgctgcacagggaggcaagcaggactatgtctagagcccaggagattctcgggagggcttaagtgccaccatgtccagtggtaaaggcaaggggaagtacagcaaccaaaaacactgctaactccaagaaaatgacagcactgtggaaaattcagacccttcaggaactgaagcgcttgggtcactctagtcaacaggttctggctgagggcaaaggaagtaaggaatgggtgctagaagggaatgtaacacgatgtccacatatgggttcagtgaccaaatctacacgaaaagaacagacgcaaaggcatgccatggttatgaggggcagagacattgcggggctactgagcggggatcgggactgttcgggctgctagcggagtttccgtgaaaacaaagagatctcacagctcaagttcgcacatgagacccacatttgaacgctggccgctgaccgcccagcctaagcatcaacactggcaccctcccccatcccgctc

SEQ ID NO: 36196 - DNA, 1185 bp, Homo Sapiens
tcctagggtaggcgaatacggcacgaggggcctaacgccaggcgtataaaagccggtacggaactagctaccggagggcacggcgctaccgtaaggccacccaactagcaaggacccctaccccctacgggcgctacccataggcacagtatacgcgtatcgagagtagacctagcactacgctagctatacagctaggatagcacccatacccaatagcaccccctagcgcgctaggcagcgcaaagccaaggaagccgcaggcccggccccctacacccatagccgggccgccaaccgatacccacagcgccggcaggactaccgggcccgaactacctaggcaaataccagtatccaaggtatacagaccactacctaagcaacacctaggcggtgaccgctatatacccccatacgccagtagctagcccacgataggcagtaggcccagctaacctacctagagcacaggcagaaccaggcctagaaaacagcccagcacgccccacccaaccaccggaccccatacagaacagcctaggccctatcgcaaccctagaacccggcctaccggactagtacccacggacagcccaccaataccctaacacgcgcctaccagcgggcccaaccacccaccaacatcgatagccggcccacaaagtcgcgcttactacaagcacaccaggaacctggccaacagtaacctaccttacacaggcccctatcatcgcactgggcctcacctttacccttaggctcattacgccattgccccgggcacattgaacccctagccccggtcatcacccacttacaccccttataccccctatgcccccaagaaacatccggctaaattaccccttaagggcaactaagccgacccccttatagcaccttctttcctcccgcgcacactcctttggaaccttaaccttatcaacctccttatgcacacaccccttatagctaaggggactctccggccgcatcggttaatccttaataggggtgccactacttatcgtaaacaccttagcgccctcctgttttagagcccccacctcaagagtcaatcataaaatctctccgtctaggcacaggtcaagcccccctatgcatgatctgtaacatgttatagctcctcgtgccttcaaccaccgcagttcttggacacca

SEQ ID NO: 36197 - DNA, 1208 bp, Homo Sapiens
tgaaccaagataaaactaatacggcggttttaaggtagcgaggcctgggtggcgaatttggcactgaggcctggccggtgagcaactggctctgctggccatgtgctgagctgtgcgagcattcccccgtgcagctggctgcggcccgtgctgtgcctgctgcactccgacgcagtgctgtggacgtggcctcggccatccaacttcctggtgcctttgacgctgctgcacttgcacctgtgacctgcggtgctgagttctgggcctccagtggcccggcgcagggacgccgtgggtgctgagcggcacctgctggtcctggacctgcgctgcctggagcccgagggcgccgccgagctgcgggctgtgactcgcaaccctgtgcctggcaggtgacgtgctggctgtgctgctgctggctggggagctggccctggctcggacggagcccggcctgcgggacgccctgttgacgcttcctacactgcagccgcttctctgcccctaatggccatggcccttgatgcgatgtcctatcccgataggaccgtgccgccgtccgaccgagcggccatccagggatgcttgggtcaccttaaccggcgatcgggggaggggaccccagggggattttgcatggtatggcttcccgaggcagacccagcacgggaaacgacagaagcccataccgatgtacaccccaaggggggccaagggctagatccgtaaaacctgggccgttacattcccccgttgacgtatcggagcagccgccactgcattgttcagagtaccaacagtaattacaggctcggttattaggagggttcccaagactggcgcctatcaccagggccgtgggtacatgaaagggtggctaaggccaacccatgggggaaggcacacgacgacgggtgtcccacaaataagaggttaccctatacatatcccacagcactgggtgatcaaggaccccgaattccccccgatacgcgataaattcgttggaaattaggccaatttggggggaccaaattcggaggaagaaaatcagtggggagattaacagaggaggttgaaaacgattagggagacccccaaggggaagagcccataaggagttgattaggagcatagtagaggacccattgggacatttgacttttggattgcgtgtgccaaaggggagtggaagtaacaaacagtgg

SEQ ID NO: 36198 - DNA, 1205 bp, Homo Sapiens
tggctcagttgtcaaaaagcgggtttttatgacggcagtactataacggtcctaatgtgtagcgaggcctgggtgtgctgaattcggcacgaggggctgcagcccgggtagtggccaggagagccggtccacgtttgcaaacgcagcgaacgcccagtgcctgacccgtgcctgcccgagcgccgctgctgcgtcctgctgccactcttctcgcctgcccctgatggcgttcctggggctggaggcccccgctgccaccagctgctcctgctgctgctctgggtgacctgggcatggcagctgccctgtgtgctgggcctgtggctccgacgctggagcttgcagactctgagctgtgccgcttctgtgccctgactgacgtgccctgcgccacctgtgctgcatgctggcgactttctgtgctgctacccatctactgtgtggcgacgttctcccgaccggcccagaagttcagacctccagcttatgaccacgacggactccaccttctcaccctgtcgtcctcgctgcgcgacaacaggacatgcgtgactccaccagggcattgtgaccccaccggcatctttggtccggcgacttgtcgcccgttcaaccacccgcacgcacgacgctctctccgtcgacgcgcattgtcgcaccgccacaaacatgcctctgccccctaaccgcgcacaccttgcacacggcacgttttccactggggttgcttgagtaccccccgccccatactctcaacggtgggcttccacttctctgcagtggtaccttatctgcactgcgcactaattcgcgggaaactttaccttcgaccaggtaccgaagggggcttccaaagaatttgccactcgactccctattactcacacagcgcacgccacgcgcacgttcatgcccccctaccggcgcaaccccaattccccccatggggtggctccttgcgactctctctgcgcagcgcaaccggttaaaccccaccgtctaccccacaccacgccgtggcacacccgctctctcgccgctgctgtaccccgcgtcaacccctctcttggctcccctgtgactagcctgtgacggcctttcacgccaaaccttcccgcgcacggttcctcacgccacgccacttgattgcaacccaccacgcctacacttgttggacggcggacaactcttggcgtcgcgtgcag

SEQ ID NO: 36199 - DNA, 431 bp, Homo Sapiens
taaattcgcggccgcgtcgacttgaaatggaagaaggaaatgaggtaagtgaggaaatcaagaatgagatggcattggcacaggcagagcagccaaatcctgagggtttgggggaagagtgtaaatttttgattagggaaactatttgctgagtttagtgctggtcagagaagtcagctaaaaatctctggcacttagaacctaccagtttttaacaggataggtctggcaacatcttctagaaacatggaaatttttcaaaatttgaatgcccagttgattaggaaccagattgagagtacctagctcattagcaacaagaactgaacagctgacaattttctggatttccactagtggcttcagtaatgaaaggctctggaacttactgctattttgccattgctgaaggcctcacaaaagggtcgacg

SEQ ID NO: 36200 - DNA, 396 bp, Homo Sapiens
taaattcgcggccgcgtcgactgtttcgggagtcctccagatcagaggcaattgggatgaccagaaatgttctctgtttagtgagtcctccagatcagaggcagtagggatgaccagggatgttctctgttttgtgattcctccagatcagaggcagtagggatgaccaggaatgttctctgtttagtgagtcctccagatcagaggcagtaggtatgaccagggatattctctgtttagtgagtcctccagatcaaaggcagtagggatgaccagggatgttctctgtttagtgagtactccagatcaggggcagtagatgaccagggatgttctctgtttagtgagtcctccagatcagaggcagtagggatgaccagggatgatctgtcgacg

SEQ ID NO: 36201 - DNA, 399 bp, Homo Sapiens
taaattcgcggccgcgtcgaccctcggtcataatggggatggttgtgacgttttccgtcgtgatcgatgcgtcgatcgccgatttgttgcggccgatcggcatcgtgccccgcaacgacgacctacttggtgagatcctgaccgtgcccgtggcacgtattggcgcgctgctgccgttgctgatgatggtgttgatcctgttcttccgcccgcgtggcctgctcggcacgcgcgacacatgaggcgacggtctgttatcgtttggctcgcgctgctcggcatcgcgatattgttgccctgggtgttctacgatttcgctcaccatcgccaggctggttttgtcatctccatgctaagccagatggggatgatgatcatcctcgcgctctcgtgtcgacg

SEQ ID NO: 36202 - DNA, 427 bp, Homo Sapiens
tactaaattcgcggccgcgtcgacctcggagaatgtgttggtaccattctttattcatggctgtgttcttaggcaaaattgtgagtcagcccactctcttggttgagaagtttttttcacacatgaatggtctcatgatgctttactgttggcatgacacaggactgatggtagcgctcaccttatcttctccggacaagttttttccagatgccccaaacaatcggaaaggggattcatcagagaaaatgactttacctcagtcctcagcagtccaatccctgtaccttttgcagaataccagtctgtccctgatgtttttcctggacagaagtggcttctttgctgcccttcttgacaccaggccatcctgcaaaagtcttcacctgactttgcatgcagatgcactcacacctgccgtcgacgc

SEQ ID NO: 36203 - DNA, 400 bp, Homo Sapiens
gcacctttggcagtgattttagcatcaagccttcttgggtatgacgctacaagcttggcatacctgtattttgagagttcattctttttcttctctgcagatcctctcaagcgctatcaagttggatggggagcgttgctgcacagctattttcaggtctctccagagatgtttgttcaggttcaagtccgggctctggctgggccactcaatgacattcagagacttgtcttggctgtgtgcttagggttgttgtcctgttggaaggtgaaccttggacctagtctgaggtcttgagcgctctggaacaggtttttatcaaggatctcaggctcccagtccctgctgctggaaagcatcaccacagcatgactctgccaccaccatgcttgaccgtagg

SEQ ID NO: 36204 - DNA, 419 bp, Homo Sapiens
gcggccgcctactactactaaattcgcggccgcgtcgacctgaaactcgcctttgcacgataacgtggtgtgctgcccccacttcgatagcaaacgcaattttgtcgtcattgaccgattcgagagtagtaggcatggctatcatgtgaggcatcactacgactccattcgctggtaccagagcttatcaagacaattgcttttgagcagcagtcaattggaaatagtgagtcgaccctaaattttggagaccgcacagaatggctgtttttgccgaaagcgtgtcttcagggaaaatcaaccgtccagctaaagccccaacgctagctttagcaccccacgacctgggggccgtcttcattgatccacgtcataaagtgctggcgaatcatatttccgttggtatgcctatgtcgacg

SEQ ID NO: 36205 - DNA, 983 bp, Homo Sapiens
gcccttgcgacaccatgaacagctgtacaaacaagcaggctggctaccggctcggaactcccgggcatatcgctcgacccacgtcgtacgagtaggcgggttagcgaagagtaggagactagctgcacggactctaggaaccatagaacatatttagatcgaaagatcaagctattgatgcgcttttaaaattttactacataataaccccgtacaacgcagcagcacctagaagaaggtactatagcaatgttttagccctatatgtatagtatatgtaggctggctagcagggtgctctatgtaccataatggtacactacatattacatatacacggctaggcctagctagtactagcctatggggtctaccctagataattagatagatatataggctagataggccaacacctacataagccatagaaactatgaatcagataaagactaggagactatctatagctaggatttatgcatatccttataacatggagtatgggcctaggtgccccctagccccctagcgcacgctctctccgctcctctcgcctagtccaaccccccagccataccctactccccaccttgtccttcctcattagggggtcatctggtgagagttggaatctttttatctcttggcttttcattccctcatgtgtggcagcttcttatttgctcttggggtctggctcgggtagtcttaatctcttccttttccttagtgtgcaaggtgttattactttgtggcattgtcctatggcgtctctttggtatgtccttttggttatggcttattcctggttccttttccccccttgggtgtgtacatttggtatctttccgtatccttggggaattacccgatatataggggccttccttttcccagggggcggtaagacccgtgggtaatttggttggggggaccttagggctagtggtcctaattggttaggtgggggcctttcctgg

SEQ ID NO: 36206 - DNA, 873 bp, Homo Sapiens
gaagtcacatgtctttaagtgtggtcatttcgcatgcataatttaaaatgcatactgaaagcatttcataaatcgatagctctccgtataaagtatgatcaaccaagagggcagcttatgcttgcttaggactaaagtagaaataacattcatacgagattaactctgtgttcctgctctctgaagagtgtagaggcgacaggggagagccgccttttccagggtattgcaaaacagcgtccatgtgggaccaccatggagcccgtctccctgggcgttcaacttcccctctccatgatggtgtgctgggaggggcttcttctgtgacctgggactggtgactggtgctacactagatgagaagccctgcagggcagcctcattcctagcccaggttggccctgcccatgacctggtcagtgaatgaggagtcttccatacagctgcccactccctgatgttgtcgcccatcttccctgaatgccactgggcacctgcctggtagctcccaatattctcactagagggctacagtggcaaggacggtgatgttggcactgttaggatctggctacaaactgatgctggccccaggtgactgtcgacattctgtcgtggaatgccccatgtacttgaaatctgttcacttacaaccagcaaatgtcctgacaagctaatcatcttaatactacctgcaagttagaaatcccctgcaaactctacattttatcccaaaattacccaaaaacaccaagcaattatacctcactcagcaaccctatatcatacatgtaacactcacaaacgtaatgcaatatactaaatctagattaatcaacaaacctcgcacacaacaattactacacaaccacc

SEQ ID NO: 36207 - DNA, 850 bp, Homo Sapiens
attatacggtttgagatattttgacacatgtatacatcccttgaaacctttgacccaaacaagattatgaacatatcacctccaagtttccttatctgtatctgtaggctcatttctttttattactgagtagcaacattgtatgaacatatcacaacttgtgtttaccactcacctgctgatgaacatttggattgtttctaattttggctattacatatagagttgcattcatttacgagtctttgggtacacacatgctttcaggctgtcttgggtaaatacctactagtgggatgtctaggttgtaatgtgagtgtagatctttacgagaaactacctggcaccagatgtggccatcagtagtgcgggactgccctggcagacgaatgagagggtggaggtcagagtcaggggtctcctacaccctctccttaccttctcaggctcgatggtcaatctcctagaggtctacggctggcatctcaatagggcctattccttcttaaagacgccctcctccccaatggcaggagttcccgatatcccagttgggcatcaaaatgtcctgtagagccttctatttattcattttgagatggagtctctgtcttgctctgttgcccaggctggtacgttcagtggtcgcgtatcttggttcactgtggaccttcggcctccccaggttcccatgccattcttgtgcctcaagtctccctagtagctgggatccacaggtgcaatgccacccattgcccagctttttgctctctgtattattcggtaaagaaggggtttcaccaatgtttgcaagctggtcttgaattcctgagcccggggtttccgccta

SEQ ID NO: 36208 - DNA, 1509 bp, Homo Sapiens
acttgcagtgaagatgatggcacaaaatattttcaaactgaatacacccagccgtcagctagttgtggatactgtcgagagcaaaaaccaccagtgccagtcagctatctggctaataggaggttttccagctcgcgtccacatcccttcagttttcttgcgcaagttaacgatggctgtctccccacttattgttcaggcgaaccattttcactcatttgtcctcactctcgttctcttcaaatgcagccgagcgaagacgggcagctgttttagtcatatttctccattgaattactataataccatacatgctggacactgagcagtgacttgtccagcagagtagcaacacttgagctacttactgaccagagaacctgcttcaccaagagcctctgactaaaagctctagcgtttacaaattgtaccccaagagtcactgggcacgtgtgaccccgatctccagtggtcaaagtcactctagctttacgccacactgactacacacgacaacactacaccctctcctgcaaacactcttcgatactagcactcgacgaaacactagagacgtactgttccttcggtgcgcacacgaccctcagttcgtctgtaaagcttagtctgaaaaagcgcttacctagtctcccgcctgtgtcctctggagacttttcaggtcactctcgccacgactgttacaggactgctgaggaaattacaactcctggcctcataactcatcccctgaccaaaacggttttaacacaggctcacgcaacgcaacttcgccataagcgcggctccaaacggttagctgcagtggagaacttcagcagccccctggcttagaactccgcccaaagagcaaccgttatgaggagggcaaggggagcatgagaacgcggctaagacggccgagataaattccaaccccctacgaaacgggatatcaagacgaaagcctttcgtgcaacgcaacctcaaaaagacccatgggcatcgctgacaacacacttggcacttacaaaaaccggcccccggggtcctttcccttagcctcactcgacattcgccccgctcagagctgtagcgcttccacgcggcccgcttggacctggggcccgcggtctggccctttgccagattcccccggtccttgacttagtcggaagtgccttacggccgcggtcgcccgttggcggcttcgaccggagctgatcctcccgggggacattctccgcggatccggcgttgctaccccctcgcgacacccacaacagacacacaaactacggtacgccctcaggcgtgctacgccctacaatgtagggccacaagtgggactatagacggtacccggcgttaaacatgtaaccacgtcaccgcgacccttgagccaaaatcccgaaggacgatcggaccggagctccaccaggaggttaacacgaacgaataacatcccaggcaatcgcgatcacacacaagacaagcactaagatgccagca

SEQ ID NO: 36209 - DNA, 479 bp, Homo Sapiens
ttaaaagagtgttttgagaaacctgttgtagaaaaaggaaacagcacattctggggacaaattacaatgaggctaaaaaacataacaggattttagaagcaaaacatttcaacatccaataataagcacaattttttctaagacttcttataaccttgaggtatatgtatacgatatgttgctgaacatagaacacaattaacatacttataaagcatagtacttccctccctttaaatatacagataacagggctataacaatttaaacatagattttatctttctttccctaagcccagaaactctctccacgaccaacctaaccccccttaacacccgctgacacactgtcctctctcatcacccaaccttctaaacaaactgcttcaaccgcaccatgccgtctctactcgctcccactcaccaaacctccaactcccaacacacccaacaacccacacccactacttgccaggc

SEQ ID NO: 36210 - DNA, 1219 bp, Homo Sapiens
tgtgatttctctttctcccaatcggccccaaagagaccacataaaaggagatgtacattttaacgccaattaagctgcagtgatgtacacctaactagacgctcctagcaaagccttaccagaaaatggggactgggtagggaaggaagactttaaacacgatccacgcaaacttgccagccctactggactgcacgaggctgtcacagccagatggggctggccatgggctgccatcaagatcctcaagagcataatgtttcgcaaaattagataatatacagagttataaacaacggttctctgatacactaagactagttcaagcgatttctccagcatcttgatcttgactacaaaggccacatagttgagaatggcgagcttcttaggagactagtcgagcgttcgatagacccgaggaaatagggtcgcatgaagcatgaagttatcaactatcggcatcaacatcaagtgggcacaaaaactacaagctcgttcattatcttcttcgtttgctttcgaagagaggctagagaacagacaattaaaagtgtgttcaccatcaaacattaagggtggtgacgatgtagtcacgattcatggtacagccagattgctgcagagggcgtagcagactggcacaaggaattatagagctcatcagcacgggttctttacactatcgtttcaatgtgtagggtcaaacctttctcaccctcgacaacaagatattggcacgcaagtaagcacacagtaacgacttaatccaaaaggatcagtctctacaaagacttggaaaaataccgtttgaaacaagcaccaacttcttcgctagctcacactgcatcaggatgccgatacatggggccgtaaagcttcacgtaccgttgtggcacagttcagccctttaacccagcgaatcactaaagcctacacataacactctccagacttccaccgaacaaaccacaacatcctgaacaacgattttctcccacacagccaacgaccaggcacggcttctataccccattgcgagcggaccttcgctggcacactcaggcgacataccccagagctaaacagggggccccggggctcgtcgaccgcgcctacatgacggcccgatcccttcccatccataactttcggaccaaaagctcagcgaacactctcattaccccgtgttcaagggtgtaaaaagtgtctcccgttt

SEQ ID NO: 36211 - DNA, 1285 bp, Homo Sapiens
cctgtaagatgatcgggatatagtatgaagtattcttctctacgcaccaaagaaaacaaacaaagcaaacttcaagtcagtgaattagttaccacagcttaaaatgctatttgacttttgtccgttttcctttttcacaagaacgacagctgaactactcttgtcatgctgaatgccgtgatagttcttgtcctttttcttatttctcctcttattcttgagacagcggctctttacagaactgggggtctcgccctctgattgtcccaggcttggagatgcaagtgcgtgcaaatctgtggcctcacttgccaaccgtcaggcctcgctgctctttcaacgctgacttcttacatgactcatgcctcccacggctagctaggagattactagcgtcatgctgcccaccgaactgcctcgtgcttaacattcttatgatacttcttctaggtacggagagatgtggcggcttctccaccctactgctttcgcgccaacgcgcactgagatcctccggaagcatcgctgagacccttggacacgctgagttcgcaccactcagtcgctacgagaaccataccactacagaagctgacctgaggcaattagcgcagggctcgttggaatgctcaacatgtctgacccatgagccatcctggcatgatctgcactacctctgatcctcctcggtctacccaggatcgcgtttagggccccaaggagccactacccatggtgtaagaccacctcctgcgtgatcctcgcatggagcatctactctacagacattgtcagggacacacgccacatggaacctgagaaccgggacccggaagtcctggcttccccaacagtttagttcaaggcgcaacatccgcaagtttctacaccctattctaagcatcccataccttgcagtcggattggctacagtcgcgtacacccggtcgctggagcctcaattatccccgtcaactgcagtgtggcccatttcactgatagatttcaccacgagaataagccaagcgacaagccgattaccaggtctgagaaccagttggaacttattccaggtaccttccccatgttcgattcgtccgaagccccaactgccgagattaagtcccccgtaaactataggttaaacccagcgaatataacgcctagtaaaatggggagaaacacgccttgaacatatgggatacccgatctaaacctttcccacacacgggggcaccgaaataaattggttagctaagagccaccagaccatatagtccacgca

SEQ ID NO: 36212 - DNA, 766 bp, Homo Sapiens
ttcctccctgggcgggattggctcactctctacctgaccacgggctggggattgcggatggcttgggggtacctgggaaccaaggataggcagtgagagctggacaagcagtcggaaaatgcgccacggcccacagtccccgtggccggaccagtgcgctggtccccatcccgctgaggccatgtcccgccgactccggggtagctgatcacttcccggcatccttacaggggacggactcaggccccggggctgggcggtgcgagcgcgagccagtgcatgggtacgtggtctgcgcaggggccgtggagtgctcactggcctccgatcccagtcccagccctggcgcgggcaggagtgggtgtagggacgtgccctggctcgctggcctcgcgattgggcttccgccgagggaggttggaaccaaaacccgtgtgggggcgttgctggccgggggcgcgctttgagcgagcattgcaaagctcagaaagtccaccaaaatgcatccggtgacccccgttttgcgcctggaggggggaaccggtgaggcaagcggccgtcccccaggggctggcggagagcgcccgtccaggtgaaccggggtgtcttaggaacgacccagggggcaaaggggggaataggcacggagcgctgttgccccaccgctatcaacccaaagggacggggataccccattccccagggaaaggggggatggtcccatcggggattgggcaatagaggatccggagcaccaaggaaaccc

SEQ ID NO: 36213 - DNA, 996 bp, Homo Sapiens
acaccgtttgtacaaaaagcaggcttggtacggtccggtatcccgggatatcgtcgacccacgcgtccgaaaaaagacaaaatacacgttgaccatggactttatttctggttaatgaaaatgttgtcctgggcacacatgaagttttgcatgtgggttgccaaagtaataaccccaaggggcacccctcgcatgtatgatctgaatggcacccgtgggggtcatgccatgcatggccctgtgaagctggaggtaagtattatctctttggaagttggcatcaaaactgtgagcttcaaccaattctctgtaatcaaccaaagagaaaaatcagaaaaaagtgagagctctaattctccataacctataattaggttgtcatccttcaaatttggaagttaattctatagtgagcaggaaaaagtagtagagttgtaattctgtcaccaacacctatcccccaggaacacagggagaaacatgtaacaacctcatttatgccgtctttctactcatattttacatggaccaacaaatatagcttgctttactagcatatggctactgaatcattggcagtaatattctaggagtattctatagaagagagcctaacctaggattcttaaatcctagtagttgctacagatgcaatactagatttaataattcctggactgtgaaaacacatttttctgatgatctatctcctttcacttgcctggaaagatgatttgcttatgatttgtagaaaacacctgatcatggatctctcgtaaccactttcttacataacgttcctgtgggtaccccagtctaacaattctcacagaattcggtggcagtcccgcaaagaaccgtcgctgaccgagcttcaccggtctccccacagaaccggcggtctcttaagggggaacaaggtaccgaccctatactcggagctgtccactatcagcaatcagatcatactctcccctacgaattttcccccctata

SEQ ID NO: 36214 - DNA, 608 bp, Homo Sapiens
caggctgtacgcgtcggatttccgggatatcgtcgaccacgcgtcgctaaaatgtattttattgcaatgcccccttcactaaagcttcattttttgcctatttaaggaaataattcaaaaatgaaaactaaaaagaaggggaaaagtacaccaaaggaaagacttaccacagggttgaggattgtgcagttttaggaaactaggtgaaaatgggtatcttttcatcttcattgcattgctcccaaaactttactagacttttaactagagtttaaaatgctttatgtatttatgaaattactcagtatctttttagtaatttataaaattactcaatatctttttctgttaaaagtcaaaggtctgttttaggccatatataaattcatgttgcttaggcggcatctgtctttgaaaactgtgatataaattatttctgttttagagatcaaaaggcaaataacagatttgatataaacccaattgcttaaaatatcttttcattctttggtataaaacaaacctgctaccagcactaacattgtatttgatttaaagtatatctctgtagtcttaaaaatgcaaataaatatggcttaaatttgcaa

SEQ ID NO: 36215 - DNA, 1259 bp, Homo Sapiens
taacaacacacaacacacgaccattagtacctatcagaacagaggttttaaagaaagcaggctgctccggtccggaataccgggatatcgtcgacccacgcgatcgaacgcacagacaggtgcacttcaggacacacctggaggagaagccgcacgtgtgccagttctgcatgcctgtggcttccgagatgaagggctcactggatgcggacacagtgcagactaccacacatgtgcgacgaatgccgttcaagtgctacaagtgcggcctgtggcttcgccgagcacggcacgctgaacctggcacctgctgcaccaaagggcggctgcctgcttgtgagagtgcgcaggcagttgctaggtgtctgaggacagccccgcggcagtcatctacgtcctcacgcgaagacccagccaccacagtgttggtcggagttctcgtccgtggtagctgacacccaggagtatatcatcgaggccactgcgagacgatcgcggcagaccagatgaggcccacggagatcatcgcagggcacccagacagaggtggcaccagccacatcatgaagtgtggtgacagcagatctgtgcaccaggctagacgccggcccaccagtatcatcgttgcaccaacgtcaccatggaccgaggagacggcgctaggagcccccagatggctggcatgccagaccgacacccatcacccatcaggcccaccccgagacagcctgacaagagcagcgtggcacacttgacgcttggcctcggccatcagcgcagggcacatgctgcttggccgcccagggcaggtacaaagtgccaaatgaagcagggccaactgtgaccatgatgtcaatccagagcgcactcgaacatcctgcagcatgccagcgacactggcacatagacgtgccggcagggccgacgatagactgttgtataacggtcatactgcatagacattaaagctacgcgagagaaccttgggcaaggaaaggacaagagcacgataggcgcctctcgaagacgcccagagctattgcctaggcttaggcctggcgatacaagaaacattcaaagaggcatttgcagggcccgcagtaaggaaacggtaactaccgacatcatagcggcgctgaacagaagcaattacaacaaggcaatcaacaacactagatagcagtatgaagcactcgaaagggcaaacgactagaacagagttgcacaagtggcacttacagggatatgcaagaccagta

SEQ ID NO: 36216 - DNA, 1177 bp, Homo Sapiens
tgctcccctctgacccccctccaaccaccgcactgcacatatagaaccgctggttaacacaagcaggctggtaccggtccggaattcccgcggatatcgtcgacccacgcgctccgcatcttactcaactaataataatattgaccatttcctatctgccaggcactttttctaagcacactgaagaaacttagatcctaacaacactactgagatggactataacttgcccaaattctttctttctctttttctgtgagaacgtgtagttctcacctcgtgctcgccgtgggccgtggagtatcacacggtgaggtgcagaactcttccagccttcactgtgcccaaactttcacactcctctccacgcgtctctcaccgccgtacttctttattgcgcttcaagtatcctccctgtgagccacgctgtgcggcacttacctcgcgtaatacacccgctcactacgaacgccaccaccagcgctagcaaacttttatatcatatctattcctgtattagcgtgcgtatctctcttttctagcactggacagatatcaccacggtgtcgtatctcgacacctccagttgtgttgtgcgctccacacgcgtgcgacgtcgctcctgtcaatatcacatcgaagttgagcgcccccagttgcgtagtaacatcccaacacactcatcggacaactctcgtagagccctcccacctccacacacgacagcgacgcagtctacgcggcgcatatattttctcacacaagcactcgactagctgtacaacgcccctaacgtattggttcccactcgcacgggaggtctaaaaacctcatcctcgtcgccccacccaaaacattaacaaacaaagtaactacgtcactatcccaaccacctataccgcttgtcaaccatcctctctactttactctaccctcctccacatacatcacaccatatctacagcctacccatccacccccctaactctctactaacattcttgttactcatccctttatcacactcaactgtatctacctccacaataatcacacaatcacacatacaaccctatcacctctatcactacctaacaaacctactcaacatctccacttacttcattctcctttctattagcacactcataactacaatccttacaccactctcacc

SEQ ID NO: 36217 - DNA, 911 bp, Homo Sapiens
aacgatagtacatatagaaccatgttttgttcaaaaagcaggctggtactggtccggaattcccgggatatcgtctgacccacgctgtctgcccacgcgctctgctggactgcgatggctccacatcctgtgtccctggccctggctgctggggagcccctgcttcatctgcctgtgtggctactgtgtgactgacactgcagtatctgtgcagtgttctgacaatgctgactgcctgcagatgccagcagtgatgtgacgcctgctgtgtgctgcctgttggcatagatgcagtgatggtgtgcctgtgatgtatatgcggacgacggcgacagtggcacaagttgaatgtgcccacatcacgagactcgaccctgagcagaaccatgctggatctgctgcttcctgcatactaacaaccaatgagctgatggcctgtgttctacacacgcctccgagatcgattgttttggctagccgaaacagttagcggcgatcctgtgactgtggtgtcgctaatcccttccctgctgtgggataacccaacccatgatactgcacttatctggaaccgtcgcacacaggtgaattatcaactagtactggacgccattggcacagcagacgtgcaaccattgaacagactccttttggcgaaacctcgccatgatgaccgctgcacgccacttgggcccggctggccgttcaaggcacttcaatcacgaacgggccgacaacatgattgtgtgcacgtggaccggggcccacaaattgagtttgacgccgagaggaatgacccatgactgacggacagacatgccccatcaccccagttggagaatggtgtcgaccacacagggatgggcaggtatggcgaacgtttgaggcattcccctgcgcaacggacaatc

SEQ ID NO: 36218 - DNA, 960 bp, Homo Sapiens
aggcaatgtgacatatagaacagtgcttataaaagcaggctggtccgccctccggattccgggatatcgtcgaccacgcgtcgcacacaccccaggcaagcaagggccccactcctgagcctacctctgatcctacagttccaagagacagaagccaaccttgcccctcccttctggaccccagagtgccctgtgggcactattactgctaacgtttgagtgccagctctgtgccgggtgccattctgggcagtcgcaccagctaccactaccacctgtagcagtcctgcccccgttcacagaagacattcaggagcccagcctgtgggggcagttcacatctgggatctcaagtcctaacacaaccaagcaatcctcgctttacagatgatgaaattgagccgccatggtggggaagcccaacccaaatgtgtcatctctgctgtgagctagacagcacagtggctgtgggcctggagggcagggctgcctgatgggcagccatcctgggaatgtctgcaagggtctggtgcttggtacagaccagtgagtctggggaatcggggtctccaccaagatctgtgggtgcacttggcatgtttgctgcagaaaaggccccagaatgggctggcttgaactggaaaaacacactttctcatccctttggaccacgagcttcttgagagcaaaagcatgtgttggatattccttttgctcaccctcaggccttgttcggcaaattgcctgggatacagaaccataaggaccaaggtctgcgtgtaagtggttatgcctgtaaatcccaggcacttgggtgacaaggcaggaggatctctgaggcaggagttgtacccgcccggtaacatatgagacctgtctcttggaccaattaggattaccacctggtggtcccacggaaccacattggaggagcgaaaagaaataggccgaataagggcg

SEQ ID NO: 36219 - DNA, 647 bp, Homo Sapiens
aggctggtacggtcggattccgggatatcgtcgacccacgcgtcgcccacgcgtcgccacgcgtcgcccacgcgtccgggtaagagcagagctgccctgactggagctaatggggccagtcccagtcccataaccccccacccctgcctcacccccgacatgcttccaggcggtctgatgacaccttcacaggacactgagagcttagtgtgaaaactgtcacagaagggatgcagggacacaaacagaacatatttggatctttgaaacactctatgatctttccaggtagttagggcccagataccgtctgtctttgtctggttgggagaaaacggggtccgggggaaccttgggtttatatctctccaagtatggcatgtgcgcatatattcacaagagcaagcaatggaggataacagtggctttgacctaggaatctggttggcaatgctgagagttcctggaggtcacttggtagaagctccccagcatgaccactacctggataagtcacatgaaaggttgtcaggaagtgtaatagtgcaattcttgatgatgtcgggtttcctctagaggacccagggcagcctgcaggactgtctgaccatgcgctcactcccataaccacagacccactcactcac

SEQ ID NO: 36220 - DNA, 924 bp, Homo Sapiens
cctgtgctaccggctccggaattcccgggatatagtcgaccacggcgtcggggtttcttttgacaatctggacttgaggtaaaaccaaggaggatgtggccggattgtcagatcccaaagccagcctccatcttaggccttgcctcatgtgccttttaggttttcttacccaccgtctcctggttgtcttttatctcttttctcctacccctatctgggacatcagaaactgcctgggtggtttgagaagagacaacccagttcgatctgcaatacaaggatccattcgtaatctctctctcactgatgttattcccccatctgccgtctggttcatctcaccacagaagggcatttagtcctacccaggccatcggctgcgtatgacagcaggatggccacttcccatttctctgtggttaggctcgagtgaaaacctctttcagctgagtcctctgaggttctgctgtatgagctcctgggtggctgatggacatgattgaggaggtctggtcaccctcaagcgcgtcatcgccttgtttccatgggcttctgtcacacaaaatgaggacagaaatgttaggacttaagcagaatgttggaatgcacagctcttgcagtcctttcaaggctgtgctctgttgtgtgtccatgcatgtgaaacggtagagatgcgactggcctgcgggacgctgcagggaagagggggggagaaattggagcggcaagaccacgaactgattgacgggccgatgcgggtgtcacaactcttacggcaggcaccactttactttactacctatccttgggaacgggctcctatttcgccgatgggcgcgacccggctcatctggccacacaaccacaggaccccgccgccagaaccgacaagcggctaggaccgcaaggcagccaaacaaacca

SEQ ID NO: 36221 - DNA, 865 bp, Homo Sapiens
gcaggctggtactggtcggattcccgggatatcgttgacccacgcgtcgggggccacggtgtcagccaggagggactgtggttgggtgtggaggggaggagcggggggctgtggtgtgtgagacccctcccggctgactgggtgctgtgtggcactgccggccgcatgccagggttcctgcctcgtggggactccggcctgggcgagtgcaggtctcagagcgcaggtgcggcagtgaccccaggcctcagtcctctcccctcctgggggtgggaagggaggggagagaggcccggaaggccggggactcctgccaggggactgagggaggcctcggaggggtgggtggcctgtctgggaagctgctctggatccggcgtctggcctgtgccggtccccgtctgcacagcacacaccacggaggagaaggaggaatcgcccggaagccccgagaggcaggcgcggcccacaggctgtagagcccctcgaggtgcgcacaggcgagtgtccccggcaggcaggccccgggccaggtgccgtatgctgggggcctgtggctggcggctcggctgatgcaaccaggctccaggaaaggctgtcgtatgggctgtttcctggcaggaggggagcgctggggcctgggctcctgttggcagaggctgaccagatgggcaggtgtgggcaggtttctccaggccctgagctgcgggagagtctgcaggcgccctgcctggccagtgggtaggtcctttccccttactcgacgcgagcaaagtaatgaagcactgggctctgcgggtaattggctcaaaggcgaaatgtacaaaaagctgccggaaaagaaaaacgcacgcttacaacgggc

SEQ ID NO: 36222 - DNA, 1287 bp, Homo Sapiens
tcctatctcactcccgaaccaactagtaatatagaaccagggtgttaaaaaagcaggctggtaccggctcggatattcccggtgatatctgtcgatccacgcgtcaggagggtttgtgccagaaaccaccaaggcctgagccagaagttcctccacagtgatgggctgtgccatgccctggctgcccgctggttgttatggacacctgcacgggcatgtgctgggctgtgccatgctggcttccagccctgagatctcccatgccgcatgaagggcctggaatgcccctggtgacctatgatgcattccactacatgccctgagctctgctagtgtgtggcctgtggaacccggaactggacccccaggatctgggaacgtggctcctgtgcctcccagggctccgggagccatggcagcctagacccacaatcccatagctttccgtacggcaagtaccgtatggacccccagtgatgctagcgtcgacgacccgatgcatactgcttgcgcttccttaggcatttacactatcgttgggcatgcgacccattgcaggtacccaacttgccggaccccacggctaaggacccagggacccacagaactcctacacatatccccagatacatacccaatcacccaggctgggacaaggcagcacccaagtgctgccacccacttcacccccatcttcctaactacaacgaccgacttgcacactggcgccaacatcaatccgcaccaccccaacagactagggctctgacctccctacccaccacgagggcaccacccccgaaggaaaaaggcgccaattgaaccttaccattagccccacaccaaaacccaacaccaaatccacaacacccccaccgtttccaataggaagaaagcttccaacacttccccatatactcactcgcccttacctccctttcccacgtgcccacaggtcccaattccctccacgcagcaccaaccacccacttactcatacacaaccgtccacaaacgcaaccttccaagcatgccgccccccttggaccttcggcatgcagctgtgacgcgaattgctgatgatgacactcccacccctgtgaatcacaacactaccaataacctaacacctaaccccacacagtcacccatcaaacccctaccttccaacatcaaacttccttccccttcaccacacccctcatcacacaaccctaccacctcacgcccatatcccccaaacacaacacatacttacccatcaccatacatcctcatccctatgct

SEQ ID NO: 36223 - DNA, 1251 bp, Homo Sapiens
gaaagcgaaccacaagactctaaccacacacggagccaatagtgacactatagaacccgtgcttaaacaagcaggctggtacgcgtacggattacccggtgcatatcgtcgaaccacgcgtcgagcgcgcggagacatgtagtgagaacctacgcgaggtctgagagtcactggagctaccagaagcatcatggggccctgtggtgagagccagagctcctggtgtggacgccccgaggcggatagcttcagagcctccagtgcctgtaggggctaggaggtagaagtatgggggccctggtagcttgctagctaggtagctcaaccacatcctacatgctgccgtggtagcccaatactagtgtagctagcgcacggaccagtgaagactaaaccattgtacacgggctacagtgctatcacacgggcgcaaggaacagcgcgctagtagccgcttaggtaaagcgctagttatactgactgtgtgtgtgtgcatggtctataatatagtgacccagctgtgagtgctacacctgggaaccctagacctggccccatagcaactaaccctagcggctagccccattagcataggcagaggccctaggggccaggcacatatcggcaactggttgaaccggcctaccgcaaggtatccaccaactaggcaaaacgcaaggtttacacgtcgacattggtgacaccaatttgcggcggcctttacttataccctgagggtacacatagtggtaggactacggaaccggcaaccggacttcaccaaacttggaggcctatcacccacactgggaacagcccacggtaccaagggcgacccccggatcaagcgcagtacccatggccgcaacggcgggacacaccaccaccacatgggcggcacctatcatgtgagcacatcgggcgcaaaacccagcgctcggaaacaattaggagctatggcgaggacccaccggcccaaacggcaccccacaatttagcggtgaccaacggtatggccaccctttggcggcgggcacccaccaccagtcggggcaggaactcacccaccaaaacgccactaggggcaccacgaaaacgcccctaggcgagaaagagagccccgccgcccgaaagtgtgccaagaagaccccaccagcgccagattccacaagcgaccgcctattaaggaccactggcattgcgcaccaccatggtcgacgtcggataacccacaggggcggagtgggatgc

SEQ ID NO: 36224 - DNA, 1584 bp, Homo Sapiens
acacaaaagaaaaaagaagcatagtgaatatagaaccggtttaacacaagcaggctggtacggacggtatcccgggatatcgtcgacccacgacgtacgacaggcatgccagactgtcagacgtgaagcgtgatctagctcttccaagccctgggccgcacctcacactgacgcacagcaatttgcatgcacactcatgttttgcacatttggtctggcagcttgcatgcaaattcacatctgcagcacaggcaacatcaatcaagtcaacagcacaccaaggtcaatgtcacacaggccagccaggcagcctcgtgatgttgttcctttcaccacaacattcgcacagtacccatgccccaatcagcatcatgcatctacctggtgctctggcacagcgcattaggtatcgcagggcacttccaggatcttcaaaagcaacaggcatcaaaggcttccagatggtataaacaccgggctcaattgccgttgcatgggcacacacagatcccagcagacatgtgcatatcatcggaccagcacagcagcaccagctccaagcatcaccggtccctgtataagcaagggtcagcacagcccaagtcttctcgcggtacaagtcatcacaaacgtttttcagctcacaaagcaatccggacatacgtggaacgaggcgttgcaagtatgacaaccatttcaaggaagaaaaagattacaagttcaagaaacttatttatcgcaagggaaaaaaaggaagacacatgagattatgaccaattttggattaaaccaagtggaatatatgggaaaaacattacggttcgggggacccaagttttagctattaattaccgtggcaacacagccggttcccttaccaaggaattaatcgcacattagcaaaggcccctctacaaattacaaggaccgcaacagagcagatcatacacaggccctggtgaaccctggagtggcacacgcatacttaccacggacacctgggcccacacatcaccctggaccaccattcgattataccagtaatccattcggaaaacaccaaatcgccccaggtaagtcgcaagtataacagacttgaactcggccacaggggtgatacgagcacctagacaacgtgccgtacccaatcacatacaacgggggggacatcagcatcccagaaataaacgaggacaaataagatcgcagaccactacaacaaggacacggcccgcgagaaccaggaagcaaccaccaggaaaacaaaggggaggaacaataaaaggacccaaggacagaggacacaatgggagggcacctacaataatgacgacacacagcacgaccagccaccaaagggaaaagcatgaccagacgaataacgacatcaacgacagagcagcagccacacaccacaacggaaacagaaaaccaccatgacaccagacgagacgactcacaacgatgaggaccaagcgccacaccaacccaccaagcaacgaagcaagagaaccacaagaccaccaacgacactggcagcgagcggacgatggagtccgtggcgcagacaagggaaagagcaag

SEQ ID NO: 36225 - DNA, 1210 bp, Homo Sapiens
accacctctggcccatagcaacccccgggttaccacacgacagcgctggctacagcagctcggaactacccggcgcatatcgtcgacccacgcgtccgactacggtgtggtagtatcttcaacactttgcctatttactatatgaagaatatggaagtcgaaaagtgatcaagatactacggtgctggctagtacgttgaaaacttattgccgtcattatttacactacttaagacatattagcaagcttgactccaacaactggcgaggccttactagactgtgcttgggcggaaaatgacacggggagaaagtagccaatacaggagttcaaagaaattccatgccctgtcagcacttagcccaagttaccagaaacatcatgaaagatagtacttaaaaactaagttatttactacagctgtactttcaccttgctctcgatgtgtctgaacaccacagaagctaacttagcaacgttattgaacgaacgtattctaaacaactcttactacggattgaccactttactctctgaacttctgtataaaataggcttactaggtgcagaagctacgtgttgctcacaattgtaaccattctgttaccattgggcaaaattctgtacatattcactcaacgcatttaagctctaccaacagaaccacacgtgcatgtacacacgactgtcttacacactctccaacagccccagtacacacagcaaatctctgcttccactgtgcacctgctacaacgtaacgagtttaggctgctggtagacaccattctgactctgatgtctataagatacctaccaatcaacgacgccaccatgctaaaggtccccgggtcaccaacaggaagcatacaggcgccccctggagaccacgcacgtacacagaacactgaccaactggcaacaccaaacagaaagacaacacacacacaaacggagaggcaccaaagcagaacatgccacccagagagagcacacaactaaacgaggacgcagaagctaggaaaaaacagagcacaccacaggaaaccccaaataagaaacagaccagggaaggaagactaacgagacgcggacggaaaacaggcaaccgagaaaaaagagcgcaccagaccacagcagcacaaatggaaaacccgacaaagaccagccagccccacaaacaaacactccgcaccaaccaaacccacg

SEQ ID NO: 36226 - DNA, 645 bp, Homo Sapiens
cagccaccaccccctcccagactctctgtccccaccccagaccagggtcaccttcttcctgcactgggggtggggtgcggtaggtttcgcaatccagactgtggggtgggggtgggagcaggtgtgtgtaaatgagcagtcgtcaggagtcactgagaaggaggcagatggagctggtacccagcaggtctcctctcataagcgtcaaccctcgcctgggcgggctggaggggatcctcagcaccccagctctgagccagggtgtctgcaacccgggcaccagcgatgggccctcatgcacacagggcgccgagcggggccggaggccaagagtgactatcaagacaggaacccgacgccacagccggtgacgcggaccctgggtcagccatcacgacgggccgctgggtcagaggcgggctggcaggccagacgcgttgtcacgtgtgccgacccttcatcagcctcatcctccacgacagcgttctgctacacgtggcttccatctccaacgtccacaatggccgagcggggctctcacgatcctcataaccaggatccacacaccttgcttaccacccacgcaggtctctggacagccagcccaacgcacgcggactcgtaaccaacagtaccttctgcgcc

SEQ ID NO: 36227 - DNA, 670 bp, Homo Sapiens
aagcaggctggtacggtcggtattcccgggatatcgtcgaccacgcgtcggaagctataaccatgaaatgaaccactttgatctggaaaaatacatccaacacagcaaaaactgacaggcacctgctcatgaacagcagtagcagtgctgtggatctgcttgctagctgtttcatctgctgagggaattgttttaattttagcaggctgtggcagacctggggaaacatactataatatgcaaagcacagaccccgattaatatttcacccatatgcatgtggcttgatggcgttcctgacttgttgcaatcataagtgtgaaactctgggggttacagttaaattatttcataacatgtagcctaatatctctagtgccctaacctacaccttctattaaaataattcttcagggtatacgcttgtaataacagctgacaactatacatattatataaactgatgtcatatatacaaaaggttcaacaaaagtgtaaaagacatacccataccatgtacagcacgtggacgatacgctagacagcagactcaaaaaacaagattaaggataaacatacacacaaaataaggcccccaacagcaacactagataatacacggaacagatatagcacaactaatgacacaacacaatacacggacaacggg

SEQ ID NO: 36228 - DNA, 805 bp, Homo Sapiens
aatagctattagtgacatatagaacatgtttttacacaaaaagcaggctggtaccaggtccggaattcccgggatatcagtcgacccacgcgtctgcccacgcgtccggtgacatcgtctttacaaccctgcgtgtgcaatccctgacgcaccgactgtgcatgccccagggcaagcaccagggcgaccgtggcaagtccaacatcacttccattcaagcatccatccaaactcatttggcatgcattcatcctgacacattgtttccatatgttgggcagccagcacacattgtaggtgctcccacagccaggaatgccagccatgcatcactgcccattgtctcctaatctgcagagtgcacaggccatgttgagtatgcttgcattgagtgccaatgcacaccacccattgcattgcatgctacatggcactcatcacctgaatgtgtggcacaccattagtgacacaccagacgcacaacacaccaagcctacctagtgacaagccacacacgttatgcattggcaacgtcccattcattcccggggagtgggacaacaataggtaggggtgctatcttgtatgctttatcgcaccccacaccatgtgccaaggcgcaccctcattcaaaccgtgcacgcaacgtcaacgagggaaccacagtagatttggcatcttggccaccacacattacactgtggattgccccacaggaccttgaccgatgtccccactggattggcctctgggggttggcccccacttattggcaacacccccactggcatctgacacgggatca

SEQ ID NO: 36229 - DNA, 969 bp, Homo Sapiens
agacattagatgaatatagacccagttttacaaaaagcaggctggtacggtcaggaattcccggagatatcgtaagaccacgcgtcgggcataatttgacttagccacgttgtggaaaagaataggaaatcttcaagcgaagtcattaaactctgaagctcccaggggatcagctttagcgccctctgtaaagtatctgggagggagaatatgcaaacaataagaaaaataattaaacttcagtacagtacttatagtattcaaagtactgttctacatatttcaggtccataaaacattatgtaaacaaatagtttgggtaccacccacctcccttctcgggtaccactttcaacaaaacccaacctctccccaaagtcttcctcctgttcagaggcgttacttgacagtcagataaatgagtgatcctgaaatcggattcatattttaggaaactgatctcagactcagtattctactccctatcaaacgtgtggttatgctagactgtaccattattacctcttccaaccgaacactcccagatggggtcttgctccgtctccaaggctgagtgcaagaggcagggatctcgactcacatgaatctctgactcctaggttcaagacaattctcctgcctcagactcctgaatagaatgggattacaggcactagaccaacacgacctgggattaagtgtgtgtcgtgtagtcgtagatataaccagtcgagaacaggagtatcacaccatgttcggaccaggcatggtcttgatcttcctgaactacggtgcataagcccgactcagcctccccaacgtgctgggattacaggcgttgaagccacaagcaccggcccaatctacctctatagaaacgtagtcttagcttatacgcgcaaattgactacaaaagaaaataaaaacagccaggattgaaggtaacgaaacagcagaaatttatgaaga

SEQ ID NO: 36230 - DNA, 1097 bp, Homo Sapiens
tataaacagtatgtacaaaaaagcaggctggtacaggtccggaatcccggtgatatcgtcgaccacgcgtcggtagcgggatgcggagagcggatcccagagagccctgagcagacccacctgtactgcctgcactgtgcctagttaccatcgacaccccgggaggagcctgcagctgccgcagccggccccagtcaccatcaccgcaaccatgatgcagctgaggcctgagacccagcagcctgaccctgactgaccaaaccaccagaccgaccctacccaacaacactacatcacactcaccccactcacaccacatcctcaacacaagaccaaccacccaactactacaatcccaccacaccctcacaactacctacacataccacacacacccatactcctcccaactcatatccacactccccgcatcaccctactacccatcacccctccgtccgacacgacagggtatactatttctaatccgaagatccacaacagcctactatctacgggtcttggttatctgcttcataatctcgtggcacccccgctcaacctgggcacactcatagaccttatgacccttacaccgccctcgtactccagctcactcgcctcgcgcgatcagatgaggctaagcacccgcacaagccgggcgccaatggacgcggcccttgggtcccgagcaccgctgaaactacgagaggaccgctacaagaggtcatcgacagagcagccaacccgcggccgctccgcgcgcaccgcctgacgagcaccagcaggccagcgcatgagtcagaactcacttcgacagctaccgcccacaccgacacaatgaccccgtagaaggcgcatccggagacactacaacacaccatagaacaaacaccaactacaaaacctccttaatttctctactcacccactcctacactctaccaaaccactacccacacctcaccactcaacatcctaccctaacaccacctcacccacctaccacctacatctataccatttcatacacccttcactcctacaaccactaccactacactaccgccgccatacgcatttaatccaatactata

SEQ ID NO: 36231 - DNA, 1308 bp, Homo Sapiens
gtacctggtccggattacccgggatatcgtcgacccacgcgtcgggaagcagtaacatctacccttatcttcttctacttcaaatggcacagactaccacccaaacatctggttggcaagtatgatactcagtgttcactggcaggcagtcgcgaattgcagcatgggcgcattggccaggaagctctggcgccatgcagcaacacggcgcatcgttcttcattcattggcaatacaccacaacacacatcgacacgtgactatggcgacgttaccccacatatcttgccacacaggtacagcggattcacagcatctaccacgccccagttctagtgcccaggtgctcgaacacctcacgctctcccgttgcgctacaatcacacgcacaccactactttctacacggcacgcaaaaccgcaatattcatgatactctcccagcctaccgtcaaacacgctgcgaccccagctcccatcaggcccaacagcctgacagaaacgcttccacaaagcgtcacagcgtcaaccatgccacagggcacactacccacgagtccttcttccttcctcacattcagctcgacaggcgacagcgcagcacagcaaaaagtgcgaggtagggccccagcttatctggcaattgccctcatgccttccctttatacaaatcggaccgtggccagcgcgccaaattcaccacaaccccgaaccgcaccagacacccccagcccgccaatcgcgcccgccaacggcacaacgacgttcaacccccccgcccaacacggcaggagcacgcacccaagcacaccccccagcaccagcctccacccaccggaacactaccacaaagctatacacaacaccacgactaacgatccccaccacgccaaacctacactccaaactaccctaccacctaaccccacccccccgccacaccacctttacattcgctctacgggagcacaaacaacattaattatagcataataaatcccactactacatcacacgcagcgaaagacgcgacatcccctccactgcggaccaaccgcgacgtgcctcctgggatacagcacaaaaactaacaatgggaaacacgaacacaccggatatgaccaacgacaacacgacaacacgccagcgaggccacaccaacaacggcaactaccgcccgcaatacggaaaacgccattggacagcaatgccaaccaggccctgtcgacgcagacgaacacacagcgacaactcacaaccacaaagagccgcacgacacacgaatcatgcgacgcccacaacgccaca

SEQ ID NO: 36232 - DNA, 900 bp, Homo Sapiens
aaatatagaaccagctggttacccagcaggctggtacggctccggaataccgggatatcagtcgcaccacgcagtcgttggctaatccagcaagctggcggaggccagcggcaaggaacagttgtgctgggcagacccatcaagttcggcttaggagacgttcaagctgaaaggaatggagacagaaatcaccggtcagtctgggcaggggtagggctgaagctcaagacgttttaccggtgtcactggcacacagtttgcagatgtcaaggcttgaaggatcctctcaaaacgaacatttccaacagaagtatcccagcaggctcagggctggacaaccttgtattctaatgaggactcagtcctaggtcagctcccatacttcccctttcagccaaacaacttccagaagtatcccaccaggctcagagctggacaaccttgtattctaatgaggactcagtcctaggtcagctcccatacttcccctttcagccaaacaacttccagaagtatcccaccaggctcagggctggacaaccttgtattctaatgaagattcagtcctggctagctcccatacttccccttacagccaaacaacttccaacaacttcctgcccaatgtgccacacccgctagttcacatccacttcgccaagtactcccagctcacattcactctgcgcaactgcaattagtctagaggccccaatgctagctgtatctagctggggcccatttgaaccaaaggcttcatcacaaaaatagtatggccacgaggtcccagagacgctatctgcctgagagcggtcccagacaccaccgacgcccgccccagctaaggcccctgatctccaccggctctctgtgtcctcttctactcaccacgcactcaag

SEQ ID NO: 36233 - DNA, 1708 bp, Homo Sapiens
tggtacccgccggatttcccgggatatcagtcgaaccacgcgtcggaagtccagtgccatcaagcacttcctccgcatcagcgctatatgtgtgcagccactattgctttctgtccccaagcacaagttaacccttgcagtctttgtaccatggctgttttgtgcatcgtatcagccagctcatgtgcaacaccagcctttcacctgcatgcagtttggccagctcacccattggcagccgaggggccatgcaattgtgctccagtgcacaccagctgtgcacggagcaagatgcagtgcacagcacacatggcagcatcaggcaagcacaggccacacagcagccagctcttcagcaaaccaggaaggccagtcggggcaagcatgagcccagtgacacatgccccccacagtagcagaaccaccccaccacagcaagcatccaacaggcccagcacctagacctccaacacaaggcttctaataaccttacagatcttcgtgaacactcctcattggcacaacaggcttgaccataaccattacactttgaccagccttgcatgaggaacacactcacttcaacacctccacactcctccgcatccctcacacacctcggacacccattgcggcatttgcgggcaccaactcgcaacacacctcctggggcagcaactttatcacttcatcgcaatgcaagcgacatgcacatcctggcaggcccttcaccggcagcacagccaatggttgcagcccatggttaggccgagcaccatccaaggcacaagcacaggcaaacgccaggaccaacgaggttgctagccccattcgcaagcaagacacattggcactcgtaaatgacttccaatatcaacacaaacacaaacttgagtacagaccacccttttgaggcggaagaccagatgaaacacgccagttgggttatacttggtccacccaaccacttgatcacatcaaacacccactcccaaccgatggtcacacaccccaaacaagagagttgtacgcacccagataattgtcgtcactattggacccgactaggacactaccagtggaaggcgacaccacaccaactccacaaacggacagcctaacgtgtccacacacacgggaacgtcagcttgggaaaggagcgcacactcaaccgaccccgcgaaacagaacaagagccgacgatacgaagacgtctaccccccagaccaccgagcagggcgacgcgacgaaccagtcgcacgacaagatagtcgtcgcgtgcgacaacgccagtcacaagacaagaggacccacaacacctgatgccacgccacaccgccaccgaccaccggagctccccagcaacacacaactcgagacgacaaagctgcggagacagaccgcacacaccagccgcacgggacacacaacaaacactgaaagagacaccagagaccaaacgacgagccgcacaccaggtcacggcgcgagcgagcgacaaacagcgaacgaccgcaaccagacgagccgacaagagcccagacgagaatacagaccagcgagagcgacgagacacacgagagacaactgacacggagacgtaacgaggacacacaacacagcgcgacagaacaaggacacgccaccgcagacgcacaagtgacgagcaccagcgagacaggcaggaccagacaagaaggagcaagac

SEQ ID NO: 36234 - DNA, 804 bp, Homo Sapiens
tggataccgcgtccggattcccggtgatatagtcgaccacgcgtcgagccgcagccccaggaccatcatctgctgctggtggtcgccccaccacgcggtgccagtgcccagtgtccccacagtgcctgtctgtccactccatgccacctttctcagcatcagtgacggggttgccctgatgttcacacacgacgtgttggcatgcatggactcaagtggcacgcctgtgggacgtgtggccatggccacgatggccatgtgccctgatggagacaactccctcaggactagggacatgggcatgtagccagagccatgtggcccacgggacccacaggcaacccagacagcatcaagggccgcccttgccacacagtctagtcatgccagagcggatgcagccgacgggggcagatcccatccgctgtcatcttacacctagaacaataatgcagaatgcacattttgccgacttcccaatatatcatctttggctaagtgacgaccacagcccatgagagttgggcagcttgcatccccaagaaaagcctgataggtgatccccaaggacccctatgacagatacccatcttactggtacccttgttcctggttagattcacaggcacccacggggaacccccaacactgctccagcgggtggccccggaagggcacaaccccaaagacccaagaccatgacggggggccagataccccagactgaccttgggattaccctggccttgacaggtcctgagcgcaacgggcaggggattccaggtggttgggggaccgtggccc

SEQ ID NO: 36235 - DNA, 1552 bp, Homo Sapiens
acaaaggacaaaaaagcgaatagtcaacatagacccagtgggtacaacacagcaggctggtacaggtccggaatacccgggatatcgtcgaccacgcgtacgcgcgcggctgctccgctctccccgctccaagcgccgaatctagggcaccgcgcacaccagcatggcacgctcgccgcgtgccgcagaaagcatctccagcagtaacagcaagcaacttcaacagcaacattccagcatcatgtgcacagtagcatttcccatggcacacaccgtcggtcatccctctgcatgaccacgttgtgcacagcattggccttctagcatacatattattgcacacacaccaccgcaggctagccagtaccagttccgtggcaagcgctagtcaggcaccccgccagccacgtcgccaggccacctcttgcggcaccctctaccagggctgtgctgcatcgcacagttctcccagcagccggcagctcaacccagggcgcagcccaaccagaaccagacaacacagccagcagtacccgcacagcccctcacagcagcacatatctacgtggcacctgcatatcccacacctcccgcatatccagcacagcatgcacacagtcggcacatcgcacatctctcgtcttgggccacgcacactatgtgggctttctacacacatcccatcacacaggccacaccacaccagacaagccccaatgcgtatggcccagaaaaaataccatggtcctcgcacattctcagcacacacgctataccccttggcctacaggtatacccgctgcgcacaagcaacatcccccacgtcaccccaaggggccttcctgaacgtcacacgacagtgcaacgcgaaggaaccctcgcagcgaacagcggccgtgtcaccatcacccccgggaatcggcacggcgtacccaagcggcacgcacacacgcccctacgcacaccggcgccagctcagcctccggtacgctcactataccccacggtcccaacggggctcccaccgggaactacaccctccgcgacgtatccccattcggcaacaggccttccgtaacccccactcagagcaacgcgcacgcgacagcgaacggaggaacagcacgcggcactacagggataccccatcgctacgcccgacgacagggaacgaccggccgcggaaaggaccagcgcaggcaaatcgccaccacacaccgccacccggcaacgcactggcaccctggccaccgccacacgcaccgcaccacactcacaagaaacagcaactccccgacggaaccacttcaccgcgacgaaatatacaaatacgggcaccacgcgacgcacagcccaacaatcaccgcacgcggcagggcgagcgcacccaacgcgacctgaagcacacaaacgacggaaaaaagaacacacaaacaggatccgtccagcaaacacaaccagcacacccactaccccccgacaaaatatatggacaaccagaacacaccggcacaaaccaccacacccgcgcggaggcacgaaggcaagaact

SEQ ID NO: 36236 - DNA, 968 bp, Homo Sapiens
aaaagcaggctggtacggtcggaatcccgggatatcgtcgaaccacgcgtcgacacagttgacctagaccagttccagtatttccagttgaccgtgttgacctacactgagcttcggtgcctcagtggtcataattttagcaagtggacctataggaagcaaccctgggagggaccgtccttctgcagaggcctgcgggcatgaggctatcaatccccagggcttggggagcaggaggggagggcaccaagtgctcttactctcctgagctccttttgatgcgtaagcttgttttggccctctttgaaggcagggccaaacttttcttagtgcctctcaccttagggtggccctccagggaaggtgctccttgaatggctggattggccctgcccaccgtcaaactgctacatgtaggaatagctgatgaggaaatacacaaggcctcagtgccccttggcctctttacaaaaggagaagttggaaggggattgtgggaggagcccctgggggcctggtctgtcctccaccagaacttggagttgctgccagcagaggatctgtgcctcagctgaagactagctccggaatgtcataggggtgtgactgtgtaggccttctcctcctcctcgtttctgtggcatggcacaggttgctggttgctcgagccttccccatgttgacatcctccacaagctgcctttgctctgtctacagcttagtacccattctggaggcactttctggtgcttggaaggggagaagaaagcaaaggcacaggctgggatggcaagccagagacgattcacctgtgcgagaggagagtcaaggggccagcagggtttgggggcacatgctcgaacctgtggcaagatggggccggcaaggtcaagggcggcggttgggatgggggaaggcggaggcaactccttgcgcccgggggaacccacctgggcgaggccctggca

SEQ ID NO: 36237 - DNA, 1340 bp, Homo Sapiens
caagcatagtactatagacccgggttaaaaaagaggctggtaccggctccggatttcccgggatatcgtcgaccacgcgtccggtgatggggagctaatgaactagggagaaaaactttccatgtgtgcggtatcgtctttcagaatgtctcctggcatcctcacaccatgtacatcatgcacacattgggggtggggttgcacacatcagccccataacgcacctgatctatcacacacacttgcattgtcagagcaaaggcttctatatcatcctatttccaatcagcactgccgctggctctatttccatagagaccattccacataccatccatatatctatatctacacacacatattactagagactcattttattcatgtacacagtacacacatctcagccagagcacacgtcagggcttgacatccacgagactgatagacaggttaccagtcagccatcgacccagccattgaggcggtcccaagcagccatcaatattatcattaccactcatccgttaccaagtcccttgggtcagccagcacagggttagccatcagcatctccagattttgatccacaacacaagcacaggcttcagcaattcttcgccagtttccagctcgcaggttttaaactaaacacacacatgttcaccattgggtcaagtgggttaatgaggtcccagaagctcaggctcttctctcatttatgtccttcctgttcggcaatagaaaacattgtcgcattttccttccatcctgttgactggtgccatcagaccaccaggtctcatcagtattgcaacttacagtcatagtttgcaaattacctagataacttgtcaacacctgagcactactccttgctgacagttcaccactgcaacctaccagcagtacctggacctcctacacccaagcgcaatacctcaccaggcgcacaactgccggccgccaccacaggcacatacgccgcaggcgacacccacacaaaacggcaaaagacagccggcacgccacgcagccacaacaggacacacccctgccaggccgggaaagtccagaccgcacacaatggagagccagcgcctccagcgacccccgcgcaagacaccggacacccctttgggaaaccgagaacagtaactacggctggtcacgacatgcaccgtggatcaaggaacagaaacagcgggagatcaccgaccacaaacaaggcacaaaccactctcaccacacaccgagcgggcagaacaccgcacaactaacacaacgagacaacacggaacagcgcacagcggctcccccgacattgctcgtggccgccc

SEQ ID NO: 36238 - DNA, 729 bp, Homo Sapiens
tgctatagtgacatataaaccagtgttaagaaagcaggctggtaccgcgtccggattcccgggatatcgtcgacccacgcgttcggagttgggaagagacaaaggcacatgcttagagggtctggagaaggcgaggaagaaggaagggagccaagtaaaacatgtgactgaccaggggctttggagaagacaagccctgcaggaaggcacgcatgtggtcattctgtctgtagcctcccattcctccctgctttccccagctgcatctacctggatcctgaatttgaaccaagtggtccaatacggtcccggtcacctgtagcaacccctctgcaggaaccgcacaataatggcatatgcaaggtgtgacaaaattgttggcatcagatgaggtaaaagatttgtacaaccacaccaagaaacagcacaataaatctggatagcagctctggcagtcctgtcaagcacggagcaatggactgaactaacgcggaactactctgatttgtgcgcctacctttgactggaatagttacctctgcgactcaacaaggacacagactgagcactgatacactgcagcactggcatgagctcttcaggcacattcgtgtcaacgtaacgagaagctcagattcaacacgatgaacgtcctttcctgagcacttactacatgccagacaccataccaggcaggatgacgcaaaacacggtgatcgtgacatggac

SEQ ID NO: 36239 - DNA, 857 bp, Homo Sapiens
cgatagtaatatagaccagtgtgtaaaaaagagggtggtacggtcggaatcccgggatatgtcgaccacgcgtcgctgaaatcagaaagtgtctttactgggttttggtgttagaaacataaaataataatgtatgttaaaattgatggcattttgactcgatgatatatttttatattcagatatcctttataagaattaaacattttatccttgtaattagaacaattattttatggattttgataaaccagtttttaaattttcaatgaattttgaaacattgtgtacttgtgtggctacattaagtcaagataaagaacatttctgtcacctcagaaagaccctttttgttcttttgtggccatactccacccatggtcctgggcatccatgacctgctttctgtccctgtagattagttttgcctgttctagaattttatgtatgtaagtggaatgatgtactatgtatgtttgtgtttggcttatttttaccagcaagttttgaggttcatgttattgtgtgtatcagaagttagtttctatttattgctcagtagtatttcattctgtgaatttaccatggtctgtttaatatattcatctattgatgatgaacatttagattacttttagtttttgcctattaaaaataaagttagtatgaatatgcatgtacaagttgtattgtggatatacttgtgataataactagaaccaggagtggttcaaaatttaatttacacatctactccctgtgttatttgctgctcttagtgtgccaaatgtcattagtacattcgaacggatgaatctcagctagactgagttggcttggggtcccaagttacactt

SEQ ID NO: 36240 - DNA, 1683 bp, Homo Sapiens
taggaaggacaggaaggcaatagtgaactatagaccaggttataaaaagcaggctggtaccgcgtccggttattcccgggatatcgtcgacccacgcgtccgcccacgcgtccggaaaccggcagttacactaagtaagtggagggaatgaaagtgtttcgaggtgcaatgtggcatcatacatttccctcttctgcattatttattcttcatttggttcctcaacagcaacactgggcaagcagcatagacattcatctcatcactttcttttttcttgtgagcagaaccgtttaaaacaattacacagcatcatcatttcaacaacagtcaacccagcatcaaaagtcagcaccatgtgcatttggttcaaacaatcacacaagttcaaaacagttaaacagttacaccacaatgcacagttcacaacagtttccatccagcacaactttcaccatcatcttttagaccaaatcatcatattgcataatgtggtcatgcgccattcatcacatcggcacaacatcaattcttgtgcagccaaccagcaagctcattatatcaactcacgtagcaaagcgtcaaagccgcagcattcacaaaacatgccctcattcagagtgttttcacaaacatgcggcgtctttgcagcaaaaaaaagacacaggcaacaccacagcaagaatttcaatttcaaaacatccaaaccgaaaacaaaacatcgaggtcatcccttggtgtactctgcatcagcaaccaacagcaagatttcaccttcaaaatcattaattagggattccctcggtaaaacttaaggcacgttccttcctccgcactaattgttcaccctcacatctttaaattacagtacaacgtatccaacgaggcttctaaacagtttcacggcttcgcagcgggcaacatggcaaaacaacacaaccaacacactaattcaacgcttggataatttacccttaacaagaagagtatcgccttttacaagttaaagagccagagtacctttaaggatctcaaccaacgaaacatcacaccaaggagcacgtacacagaacagtatgaccacgggattgcccgctggcgagggagcaaacagggacagtcccaacaagcgtgacgaacgacaaaggttagacacactaaagttgaggagaaccacgaagaataaggcaaacacggaaaatagcagcagcaaagccaaaacaacggagtcggcaccaaacatagcaggaaaaaccccatgacaatgggcgacaagcgacaggagcaaaagacaagtacgaccaaacaacatacgagatgaacacgaagagactaatagaagcagacgaagaagctcgcaccgagacagtatcgagacaccaagaggtaatgacagacagctactgcagcaccgtgagcacgacgtccacgcattagcgcacacggaacaacagtctcacactgtggaggagcaaacaaactgacaggagctggaccacgaccacacgaactgccaatacacaccaagagggaatacgacacaacgtggaaagagcagaaaaaacaacgagaaacaacgacgggacagaacaacacaggggcgagcaagacgaaaacaaatgaatagatccgtgaacgcaatgaaagacacacacacagagcgaagatcgggtcacaacgaga

SEQ ID NO: 36241 - DNA, 1152 bp, Homo Sapiens
ccgcctccgacaggacgcgcctggcgaaaacgctacacgcttacaagaactatggacgacatgggcaacttacctggtcggcactgtagctcagtggccatgatctatgtgactgtttacactcgttgcttggcaactgcagacggccgacctcctgggactaccaatgcagcacgaggctgcctttctctactgctatattattattcacattctttgaacagatagctgagaggggacagtccaaagatagaatctgaccaacaaaagtaaacgttaaagaaatggagaatgggaacttacctggttggcactgtagcttagtggccatgatcttgctgctgtattacacatcgttgcttggtaactgcagaaggccgacctcctgggactaccaatgagcagaggctagctttctcttctgcttattcattattcacttccttggctcacacatgccccatatgttactctggaacttagatccatattatattttacacgacgcggaaagagtagagtaactgtgagaacaataagctgcctagcccctacgttactcactggcataacctacccctgcttacaccgaacttccacgggcccatatctgatatgagggtatctaaacaacttcacacaaaccatgtaaccctgagagctatgcttgctccgggacaccatgagtgtaaagtaccaaaggctagtagaggcacatactggaaactagaaccctttattcccacattgcgcaccataaggaagctaaacatggacacattacacccaactctgctgtcggctctccccaacacattcatatcctacatcacttggaatagtcgagcgctagctcgagacctccttctacaagggctacgccacaaaacactgacatcagtattaagacaacaatgactagatatcgaaaggttatcaatccctgacataattctccataaataaggacacataacgtgcaaacatcgccgaaaagcaagagagacgattgccgccttcctcatcctttgtcgtaccgagatgaaatcactactgagcctaccacgcacggctcgtaaagaacataaggaagtgagacaggaaataggagcgagactgaacactatagataatcaatcaatcaaggcacca

SEQ ID NO: 36242 - DNA, 432 bp, Homo Sapiens
tatgttattgctgactttgttcagagataccggcacacggtggtaataagcaaactgacttctagtcagttatgattcctaaattcgccacagaatagtgcaccccctactgcctgcacctggtactggctgctcccaccctcgcacgcaccctcaatacccacggtcaccctggaagccgctacattctggctggtacgacgtcgtggaccctcttctccttgcgatcagatgcttgttctcgatgtcggcttgttgcggaccaatcgtgagaagatgagcttcctggcgaattcattcgatacagcttgtgcgcactaactctaatcccttacgcgacaatatcgcacgcacctgaacttcactctcatgtccctgccgcgtgaccgcgcagtcactcactcccgcctgcacatcccacccgaaacctga

SEQ ID NO: 36243 - DNA, 875 bp, Homo Sapiens
gctgttaaaacacccacacgcatgcgctggtctaccgagctccgcgcaactcccggcgcactactctgatccgagccccactgctgatcctgggccgctggtcgcaggctgctggactacaatcttcgcatgaaatggaagagagggtggtgcggatagcttgaggaagttccgtttccctccagagcataagcctcctcccgcccaggggcctcctgctttcctaagctgctgtggaatcggctgaggtcccagacgctgtccattgtgctgctgctctctgctttctccagccagagtgccagttcatccgctttgggagaactccgcgcctggcctgcccgcggaaaaggtcacagctttgcagggggtgacatgggctatggttcctggaaatgtcaccctcactagcgccttttagatagatgtgaatatttgagacatgagggagagtaacttattggtttacccaggagatgctaagagcagaggagaaaacctaaatttccaggcatgtgtcctgagccagggacaggctggccagaccctaagctcccagtgctgcagagagcagcctactgcctgattgtgtggaatccccattcgtgctgctgggccttaggcgtcagggacagacccagtcaggtgacggtggggatgaccacatgtgacttctggaagtgggtatggtggtcctggggaggtgccagccacatcccccttggaagaagtttctttgtgctgaaggatgaccacagaggcctgggtacaggaaacatggtctagcaaggtgcttatttacagattggatgaaggaaggaaaatggtagttttcacacagcattggactaagggtgtccatgacttggtttgaa

SEQ ID NO: 36244 - DNA, 1214 bp, Homo Sapiens
cccaattttaaaatagtttttatttaaaacattggcttttcccacttacaatacagggtttataaaggtgcaaggttgatttcttctccccgggtgcattatgtgtttccagtatttcaagttatgtaaaaagtgcccgagataacttactagtagcagctttaacgttttaaaaagcgtgccacgagaattgtgctagcgaatttagaggctccttcaaagtggttttaaatggtggtgggcacacataggctaagctattctaacatctgggttgggtcttaatatcaaccttcttgcatatgggtgggggccctggaggaagagcaccaccagagagggagaggagtctccaaccaccgaggaatatcccccgagggactattcctctcctctgggatatggcctcccgggcatctccgggtaacagttagggtggatcgatggggtgttggaaaatttttctccagtcttctttccggtgggattgttacaaatgttcttcctttctccagccagctctgtattcttaatcagagcccaagtggtataatttcgattaactactttgttccagaaaatctcctggtgttggtccctcaatcggttaagatctttggcctttgaaaagtttcccaatctttcgaacagaggtggctttttcatggtttgaagggcgtgtagggacctccaaggtgaacttctggggattgacccgcttggggtccctcttggcttctccatctccaggctttggtcacttctcaggttccgtgggcccatatcgtccaagtgtttcctggggccaaagggggcctgtgtccatatagggaaaaagaaaatcctggagcacttttgccccgggaatccttgttgcaccagaaaaaaacatttgcgttatcaccaaggggctcaaggttgacaaaggggttccactctgggagaaacctccggggggaggaaggaaaacccggggagataaaaactttccacccagggtggttgaacctgggggagggagagcgcctaaaaagaataaacccgcgggttgcacaaagagagacgtctctgacacaggggagtacctataaggagaactcactctcatgcgaaggagacacagacaaagtctccagggaggcaacaaagggtcgtgcaatatacagggagcaagaggaatggtcaccgtccagtaattcaccttgtcactctag

SEQ ID NO: 36245 - DNA, 1199 bp, Homo Sapiens
gacgcgcttagctagtagcctctcgagggatactctagagcaggcgtcctatttttcatattatatataagaggttaagcagtcagtcttaaaggctgctcgcgacttcatggactattcacagcacttgggtctcaggtgggcgggggcaccttacaaggagtctctaaaggtcgtgagcacgtgggagcgtggccgtctcagggaaacagacattgtgttccaactccccttccctccccaaggatttcttcagaaatttccattagtggccctatacagagagcacgtggcgtgccggggacaggtttggagtgtgtacaccaacatattactgtggtaatttattaaaaactttattttccagaacgtttccacaggtgcctccgtggtaactcagaaagcaaagacccttttatactcaaaagggatgtgtatcatagggcgtggtgcaagaattctcaaagaggactcagaatcccttggaacagagtccataggtccagtgaaaagcaaaagaatttaccgtgggccacgtggttaagccccagcggtgtgtgccaagaatggcctatacaagaaatgtgtaaagagttgtgacccaacaaaggtgaggactttcagcttcacgtggagccagaggctcaggaaggccccttgcttgaggccaggctcccagaccatcagggagagggtggctgcactgtgcgggaggtcactcatcgtgaaggcgtggcccctagggtcctgctgacacgaacaggaactggctggtgggaccgcacaacccagggcagttctgcaggaataagcaaaggtcaccaattgcgcaacgggcccaaagagaaagacagaattccccagtgacaaagaacaaaactggggacgaccaatacgcaataaagccacacgggatcacacaccgaacaggggcgatggacgggccgggatcaaaggcgtggacataacaccgcccgaacaaaacacggggaccagcaaccgggggctgcccaaccgggcgggacggaagcgagaatgggccaacggagaggagccaacacggggaaagagaaagcacggagaccacaaggccacaacaccaagcatgacgcgaacagaacatggacaacaagaaaacggcgctgagcaagaggagacaaacagacaacagacaacagtaaacaatcacagactcagaa

SEQ ID NO: 36246 - DNA, 1013 bp, Homo Sapiens
tccggggggaccaaaaaaaacccccagagaggggcaaaaacaaaagggggtgtccacaaccaaagaggaaagtacagcccccacccgaaaggcgcggatctacaaacttaatctcgcgggctctcccagcgcctccgagggcgtggaacccagagggggtcccagggcgctgtgagcacgggccacactcggagatgtgaccgcgcaaacgcgccttttcgtgaacggtgtttttgaccaatctcgggtgtcccgcggtgaatgtggtgcttggagaagagttgtgtggcacaaggggccagaatatataccaacccttattagaacccgtgggggaagagggaacagtgggggacaccgcaagaagaggggcgccaaaacaagaaaatctccgcggggggggaaagaaggccggggacctcctcgagagagaagccaaaggaggacaacaggtcgcccggggggaacaccccactatgtgcagcgcacggagggaaagagaggagggaaggcgcgcccttgacacttctctccctgcttctgtgtgtgtcccaggggggacaccccttccacatgtgtgcggccccccgtgacacacttgtggggaaggtgcgcccccctcacaggaaaagcgggggggagaggacaccccccccgggggaggagaggggcgcccatacaaaagagagtgtgtatctcccgagagatagtggtgccaacgaaacacccggtgggtttacacagagctatactcttctctaaaagatatggcgggacaataaagaggtaggcgggcgcccagaactgcgcgccatataaagagatttcttgggaaggattcacagcccattaaggggacccccgggaattctcctttccccaccaaaattctcccctaaaagaatcccccgagaaaaccacaattgtggcccggcggacaaaaaggagaggcccccctaatatagggaggagggagcaaccccccccggaggaaaccatgagaggggggccgc

SEQ ID NO: 36247 - DNA, 1060 bp, Homo Sapiens
aagggtgtagaaaggcagggatggattttattggattaccctgatttttacaattggaggtaaaataaaagcaacacataaaagggcctatttctggcgtaccatggtcatataattctccattggtggaattattggtggataaagctactggagaaactatggccgtgcacagagcctagcttctggtagagctgggtattttacaactcgcattgtgctggtgtgaaattctcaacacatgtgttaagattctcctaggaaggcgcaaaacgtcagaggtgtgcatccttagcccccgtggaccccttcctacagatccccgggcgggcacctcaggggtctacaagaaagaaacgtaggaaaataatgccggccacggggaccccgggcagaagggggccggctagaaacgaggggtcctaagaaatccgggcccaaagcgaggtcccgcgatgtgggggccttagggtcatcgagctagccccaatcctaaaccgcgattcttcaactttcgggtcacaccagtgcatttgattgggaccgaaaggtaaagggggaagaggtgctctcgtggtattgcctctataattcacacgctgagatacggacctcgtgactggtaggggatccagagtggttaggctttaaattttgatatgaaaaccttaggaacccttgagagatagcttaggacaggcgtttagtcaattttccggatagggaacggtcactcaggcattaaggaagccgtgaaccaggtcctttccaaggagttcagtttcaaattggaaagctaagactggctatcggggaattttcctacagggggaaacgggaaggtccctaggaaaaagcggggaaaactctccggaggggaacaaaaaccgggaacaagggggcgggggagaaccaaacaacggggggagcaccccgcggaatatccggaatccccggtggtgggaacccacagggaatccccaaacagggtgcagaaccgacgcacgtgttatacaacaggtgcgagaacacactctcagaagaagaagaagagatcagc

SEQ ID NO: 36248 - DNA, 1325 bp, Homo Sapiens
ggccaattttaaatagttttatttaaaacttggcttttcccatcttacaatacagggtttataaagtgcaatgttatttccttccccggggcattattgtttccattattcaagttattgtgaaaatgtgcccagataactttacttattagcagctttaactttttataaaactgtgccacgagaaatttgtgctacgaaattttaggctcctttcaaagtgttttataaatgtggtggtggcacaaaatgtgcttacattcttacccttggggtgtggctttaactcaacctctctttcaagtgggtgggcccgtggaggaaagccaccacccgagaagggaaggagctctccaccacaccagaggaaatatcccccagagcatattcctctccgtggcttatgccttccgtggcaactcgtggttcacgagcgtgtgggtgaagtgacagtggggtgtgccaaactttctcctccaagacttctttctctgtggtggaatgtgttctcacagattttcttctcctttcttacagaagaggctcgtgaattttcttatatttcagagccccagatttgtaaataaattttctcattatacccactgttgttgtcccagaaaattcttctcgtggtgtggggtcctctcatttcgggttaaaactctgtgggccccttttgagaaaagttttccctcaaatctttttcaaacacagagtgttggcgttttctccattgtttgtggcacgagggcctatcgaggacatgtcccagaggtgaaaattccttgtgggatattggaccccctttttgtttcccccttcgtggggtttcctcaaattctttccaaggtttttgtgttgacgtttctttcaaggtttctccctgggggagccccatttaggtgttttccaacgtggtgcttctcccttgggcgcccaaaaccgggggccctctgtgtccactttcacggggagttcagggtacaatcctcgtgggtgtccctccctttttttccccccggataactctctttgtgtccccaccagggctgcaagcacacactttgtggaggtttattactcccatggggccgcttcaaagttgtgccacacaggtgagacctccctactcgtgggggaaacaaccttgctgggggttgtccaccggggagatctttgcccccgctgggattttccacaagcttgtgtcccacagccgggctgtgggtgtttcaccctgggtcgtctgggagacggccgcggcgtcttaataaaaaccgtgtaattttgccccccgggtgcgtgtgctgtgcgcagtatgc

SEQ ID NO: 36249 - DNA, 1057 bp, Homo Sapiens
atcattcatataccaagcattatattttacattcagtaaactatcaaatgtcctttaatttcacagacaacaattaggatcgccatactggtggtaaaacgcacacaatagttttggcagtcacaattttaaaactggtttccaaatattgggaattatagattgttaacaccgctggtggtactggacagtatttttggaattttagaataaacgtggcttacaaaatttacaagtgcaaattattagcccaatctggaaaagcgtcccataattataaaaagtgataacttgggagaatgcacaattttactaaacttatttataacattttaaaattaactcatttaaaaacttcaacatttaagaatttataaagactcacgctattaaaaattttttgggcagctcacttttctcttattaagggtaccattccactactattcacaaattaagtctctaaactattaaaattggcctttaataaactatatacttatttataagaaatctggtattaaaccttactatttattaaattgggatttataaatatcttcttggggaaaaaactttgggtatggttatctctcgagaaaggtgtttttcaacaattataatctattttagagggcctgtaaacactattccattctatattaagagccacagcagaaatagagtacagggggattatctcaaccgtggctttaacagaacttatctgaattcaaaaaaacaattttacatcagtgtaattgcggtgggaaaaaactccatttaccagaagttaaggcacaaaaaaccccaaacgttaatttcacaacacggttatccaaaaacttttttcaaaaccagagctatcccttttttattcctcacattttcttgtgatattatcaaaatatgtgtgtatatcaaacctcaccccaattatgtcccaatttgcattggttacccttatataaaaatggcccattttaggggaatgtagagccttcgaaaaaatatattgaccccgatagtttttaacaaaatcccctatctaaaagcc

SEQ ID NO: 36250 - DNA, 879 bp, Homo Sapiens
aaaagagcggaatacaagaggggatcttggggcccaccccacacacccgctgagagagagcgccgcgggggcgacgaaaacagtgggggtagacacaaactctcttctccccgagagaaacacaaagaggggcaaacacacccgggcgctcttcataaagagggtggggccctgggcccgctggccccgcgaacacccacaaagaggggtggtggggttagaagagagtatctctcgcggcgatatgtgtggagacacaccacgagggtctccagagggaggcggaacacaagaggtgcacagaagtaggggggagagaacaaagagagtgtctcccacgagagagcaagagggcgtggaagagaggtggagaacacacagaggtctctctcctcgcgagagaaacaccccgttgttgtacaccccacaagagagggggaatcctcccaggggtctctagaggagaaccaagcgtgccccccacaggagggcgcacacacacctctcgatatactccccccccacggtgttgttttcccccccacaaaaaacggggtgtgaaaatatgtgtaggaaagagattcctcccgctctcacccaaaaggggggggacatcattcttaacacccccccacagacgaacaaaaaagaggggcgcgatataaccccaggtgtggggaccaccagcccccccacaaaagaaaagtaaccacccccgcagggggtgcctcacaaaaaagaataggtgacgactactacaaacacacaaaaaagggggggaactcacaacccaacggcattaatagacggcaacccttgccccagcaggcattaaccacccaagaatagatgcagaccccgaacgcccccccagaatac

SEQ ID NO: 36251 - DNA, 812 bp, Homo Sapiens
ataacagcttaatggaaatataatggacatacaataagcagcaggtatttaaataatacggttggatatgtttggacacatgtatacatccctgaaaccttggacccaaacaaaattatgaacatatcacctccaagtttccttatctggtatctggtgagctcattcctttgttattactggagtagcaactatggtaatgaacatatcacaactggttttaccactcaccggctgatgaacattgggatggtgcgctaaatttgggctataacatatagagtggcatctcattaacgagtcttggggtcacacacatgcttccaggtgtctggggtaaatacctactagggggatgtcaaggtggtaagggtgagtgtagatctttacgagaaactaccgggcaccagatgtggccatcagagggggcgggactgcccgtggagaggaatgagcagggttggaaggctcagagtcagggggtctcctacaccctctccttaccttctcaggctcgagggtcaactcctaaagggtctacggcggggatctcaaatagggctattccttcttaaaagacgcctctcctccccaatgggagagagttcccattattcccaagggggcatcaaaaggtcctggaaagccttctattaattaattcgaaacggagctcctggcttggctactgttggccccagggctgggacataacgtgcgggcgaatctggttccacggaacctttcgctccccggtcaagcccattgtggcccaagctcccaagaagtggccccgtgttgcccaggccagt

SEQ ID NO: 36252 - DNA, 1271 bp, Homo Sapiens
ggaaaaagtcatggaggccaggggagtgggctatgaaaccagtttgggggggttcgaattcctttccttttttgtgtcatagaattttaagtgatatatacgggtttctgcgaagtggtggtggataggggtggggggcattccaatattagttcacctccgaggtttaagtggagggtttcttcatacatatataggactttttcgctttcgaagagggaagaggctttcttcacaactcgagtgaaaaattatataatattacgtgggtggttagaagaaaaagtgaaagtgcacccttacgagaagtgaatagggagtgttccagtggtgggtgttagtgccatctgcgggggttaagtctccggagattaagcgtgtgcgggggacatattccgtgaaataggggccgaagaaaagttggtttggtgggataagaaaagtttttagaatttatagcgccgcgaatgtgaaatttatgtaatagtgtgaaaagtggcatttgtagggggaataaggtttggggctcttaagggggtgttagcctgtgaaaaataggggagaaacttcaggtgaaagtagaagccttccattagtagagtgggcaaaattaacagggctccatatttgggaaaaggagacaataagtgggggaacacggttggagccttaaacaagcgtatacacatcaccggtgtctccggaggtctactatccccagaacaggtccataacagtggactgaaaagctctggcgctacattaccaacagtgccccgagcccaaggggccccaccccttagcggggtgtcacaagagaaaggagaattggacatcccataaggggccctacaggaagccacctgttggcgcccaaaactacattttccaataaatgggcatatccgggtgaaagggttatgggcagaaagttcagggcatacaataccctttgaccgccccggtggggggcgaaaatcgcggggacgacaaagcggcgacccgagagggcagtaaacactctgctccggggggatacacagccatatacccaacggggcaaataatggggggggccaccacagagaaaacccctaaggaggcccagggacacacagcccaaagcaaacctatgtccccagagggccccttacggggaaaacaggcacaagtgcggaaacacacgaccgggggggaaaaaaataacaacgggccaaaacacaacgtggtgacaggaggctccgacgggagaaaaaaggcgaaaagacaaa

SEQ ID NO: 36253 - DNA, 721 bp, Homo Sapiens
cttttctggaagttcctgctgccctgaggcctgctgctccttgctggcgggttgcccctggcgctcctgaccctctgcagtctctccaggtgcagcgtcctcaaatcaggctggtctgggccacgctgctccctgggaggctgctctgtctgcgcagggcgtatgggggcactgggctggagatggggctgggccaccggtccctgctgggtggtcccagggctagctcggggtcgcggggccctcttgtctcacagtgatgaacctcctcttcctcttccccggaatctgtcgtgcctcagcccgtgctcctcggctatttgggtggacccgcagcctgtctggggagaattagagggaaggagagaaactcccaactggcattcttctatgctgggccatgaatctcccatctatacatgggcccggaatggtgggtccacgccattctgggctctgccattcaccctctgggctgcctccgttgaggctgggtctgaagatggacgcttcagaggccagagatttcccagcgggttttcttccagccctgttctggcaggtgctgcagcctccgtgggctccctcctgccgttgagcattccggtcctggtggcactgtagcaggtccctggggcttggtggcagcgtggctggaccctgggagtactcatgggaatagtttttctgggcacaatatcgtccagatatcaaaggccgg

SEQ ID NO: 36254 - DNA, 691 bp, Homo Sapiens
cctcaaaacatatttttacccctcctctcagtacattcttggagcacctttcccaaaatctcaggaatgtttataacccccgccccaacatcgttcaatacccgcccataggccttgggtgattgaggccccttcacagtctgtgtgtgcaagtggaattcccgtgttcgaataccaaacattctctcagcagcctcagccggctttcccactttcttgtggatcacccgggtataactgtgccagtggtgggtgtgacaggtgagtgcccaggctctcgccccacatactgtgcactgtggacacagccttcaccaagtgccacactttacaataaaataagtgggctccttccaagcgcgtgtgagaaggaataccgtggcccttgtgtgtgtggcacaacgaagcgcgccgttgttcgagagaaagtggagtattatcagcgtggtccccagggggggtcttgaaagtgggtgcaaaggggggtctccaagggacaagcgggcagagaaaagtgttgtgcgaaacgtcatataatcacagtatctcctttgtccgagccacagggactgcggggacaaagcgggggacacaaaagggggccactcgaggtgcacggggggggtccaccccccaaagagccccgccgagaataaaggcgggcacacacccggtggggagtcaaaataca

SEQ ID NO: 36255 - DNA, 1127 bp, Homo Sapiens
ggaaaagcaacttttattggaaaaattgggagggaaggtcccatattattttataatagtaaaaatactaacgtggaatgtgttgtgtaaaaaaaccccggtggatgcagcggcagcggaagcgttctgtggccaggaggcgttgaaggggcccagggtagtgtgccacccccacagggaagctcaggaagggccgtggggcaacagcggaagaggtaaagcgttcaaaagggctcaaggtgcataccggggcaaaggactcatcgtgagggggaggcccccggggggacagctccaccaagaaacgtggtgacccaaaaggggaagggggagggcattccgtgttcccaaagatttaaaaacccccaaaagtgcatttggaacaacttattacacaatataccaaattttaaacctgtggctcctttgtgttcccagtgtgggttaaaccgtgtggcccattccccaattcccgtggatccacatatccacaggggcccacgcctcgcgatgtgaacggtccttcaaaagacagggcctttaggtgcatggggcggctgcgtggtgtgtgccgtggccacacaccacaggaaaaaggggtatgctggcccagacaattacacaataggtgaaggtgtgcaatctgggggtgccaacccgaggtttagaactttggagcgcccccagggcccccacaaaaaaatgatataaccggcttaccacttgtgtggactacgaacaagaccccagggggcacgggattgagacttagcaacacaattcgaaggggggcaacccttggtggcacagggaaccttcgtctttgtgccccccccgaatgtgggcccactattggccacattacacttgagcacgaaatgtcctataagaaattgtaccacaaaagatgaaaaaccgggacattgagccaagaaggggctagtggaggggccacaccccgggggagacacacaagcggggactagcataccatcactaagaaaaccccgggaggagcaaagatcatctagccataaaccaccgatgtgacggggaagagggtagcagcccacacacagcgaaacaaaacgaggatgtgccacacacagaggccacaaaagaaagct

SEQ ID NO: 36256 - DNA, 1111 bp, Homo Sapiens
gggaaaaacagaagccaagtttctcttctcaaagggttcagcattcccaatcaaaaatggggtcgtggtgggtaccctaaggtattggtggcttgttggacgccatttaattttcctcaccttccggatatcggattcttcttctggctattttggtgaaccactcaacaaatttcttcatctgggtcaaaaaaaacatctttggcctttgagccaacttggtggcttccttatataaccatattcagtaattggctttctatcgctccagaaactatcagtcttttataaaaagaaaaccacaatcttctggaaagggctttacatagaaatgggatgtgttggtccggtacgcatgttattcctggaacctttctgggagggagagatccagctctggactgggccttgggagagctgagaacacgggccacgcaggggacgcatattgtggcgtataaccagggtgggcttacagaaacgcctggcttctggcaaaacaagtgttccttcccttttctgtggtgccccatctccaaaacagggggtttccacttttatacctattgtgccaacagagaagagaccaatacactggcgggtagttcctggggaaagatactattcccctcctatacatatttctctctcttgtggactataaaaagggcacacactctcctctttgatccggggggcatatcctggaagaaaagagaggtccctgggaagctcccttttctggggaattacccttccccggggggccccagggaccgtggggtgggactcggaagagaagtcgggaaagcctcttttaagaacctggggtccagtgaagtattttaggcaaaattgatcccaactttcgttctgttaccgtggaaagagttcaagcaggcttcttgtcaagtgtgggttttcttcaaaggacggagggtaacccacatgtgggagttacttatgtgggctccatgggtttgagaagtttagacggcaatagggggcgaaaggcttctttgaggaacgggcgggaaaaactgggtagagaatttgggagagaggggcttggcaaaaaaccccacagaccccaattgtggtgtgtcaaagg

SEQ ID NO: 36257 - DNA, 1432 bp, Homo Sapiens
ggtggcactgggacaataacttttaattttttatagtaagaagtcgatgtaattaacattctccatttaaagtgaatttcaagttattattcaacattaaacattattgccaagacaatagcttggatgtcaaataccaatacgtttcgtggttcacacattgtgttcatattattgtgacccaaaaaacgtgaaatacgactccaatgtggcagactccgcctgtgcaaggaagggtgatctcagttttctcacgtgattataagctttatagtgttctcactcagattataattgtgcctcgcaaatagaaggacacccttaacaaaaaattatttctccttatatcctttgcggtcttgggtctttgtggcaaacgaggacacttctcgagaacacgagaaagcgccccaagaagagttattctcggaaacgaggtatcaccctctctccttaaagagagaggagcgtggcttgaagagaaaattgggctcacttaaaacgtgtgcttctcgagtgtgtatatatctctgtgggagcagaagctctctctccacgccctataacgagaaacacaagagagcttcacttgtggagtgggtgagacaccactcttggggtcccactttagagtgtggtgcaatactttgtgcgcacaaaactttcggaagctccgaagataacttgtgggagaaacaaagcccctctcgtggggggggcattggccaccacttttttcttcttctgtgccacgtcaatataccgggctttccaccaaaaattaccttcaaagcgggtaggaagaaccacactgtgggtgcccaacccctttttccaggggaagcacgccggtgtaataagaaagaaaaattcccggcggaagcaacagagggttttggtgggaacctgggagtggcccccaacccaggggacgacaaggggtcccaagccgaaaccgaggtgaatccgccttgaaggacccaactgtggtgtcccctcccgggggacccgcattgtggcacgacaaccgcgggggcacaacaacgttctaaccctgaagaagggccgggggactgtcttggctaaaggggggaccccagtctggtgggcgcttgtagaatgcgccagagatttaggggctaaaatcaaccggggaaccgtgggggctcgcagaatccccggggagatacggagacggataccacccggggttttttgggcaccatcggccacaaggtggccccaaaacagggcatacgggaaactggcccctaggagaaagagtatcagcccgggccataaaaaacagagggaggagaccggtcttcaatgagagaaccaggagggggctcggacgtgacaattatcacacacgacaacactaagcgcgagtcgccgggggctgcgagccgagagcaacgacgcagaggtg

SEQ ID NO: 36258 - DNA, 1693 bp, Homo Sapiens
ggagaagatggggcaaaccataatttttcacaagtggtggaacgcagtctgaaacgccactacaggtgagggcataatttaaaagaaaaaggcgcgtggtcttttaacaaagggggggtgggctttgttttctaaatatggagagagaagggagggctctccgcctcatggtgtggtcgcacacacaggggtggaggagtgcaagggtgtggtgagattctcgcgcgccgcccacatacacaaccctccgcgccctgtggggggtgtcacagcggagcagatatcccctcgctgcgtcgccacacgccccctcgtgaggaaagtacgggtgagggaatattatagcgcgggggcgcacgaccgcgacacaaaaatagccgccgcgcggcgggttatataatatttttttataatatttttaagagtacaacagagaggagggggcgtgctctcactaccagagtgggtcgtgccgcaggagcgggtgtctctctacgaaactctcccctatctcgcctcgagtgtgtatatctcgcccgcgcgccggcgtgggtagtcatcacccaacagagggggaggcgggggagaaaataaaaacgagcgggcgtgagagaccaccacagggagggcgcgcgcgggcgcccatatatggactaactattttggctcacaaaaacaagaaggagaagagaacgaggccagaactaatccatcgttccgacagaggggggggagaccacaagacgagatcagacggcggaaaataacgacgagggtggtgccccgcacactacgagagaggagcacacccacccgtgccgatcacgacgggggcgagaggcaccaacgcagcacagacacgaaggattctcagcccaataagaagcaagtccgcggtgcgcccgcagcagagcaccgcaccaatgcgccctcccatgggcaaaaacagacgggggcgggcagaacagaacgccacaaccatggcgggagggaggacacccacaaacccctactgtaggacacccagcctactgcgcgagggggaaagaaacataccatccaccaccgcgcaggagggagaacagacaccacccagcgaggaaaagaaaacccacacgcgctgggggcggcatcaaccttactcgggggagagcaacactccaccgcgctggctggtggagtttgatggacgcaccacccaacgcggggatacacaagaagggcgggagcaaccggctggtcggtgcgacaaccaacactattgttcagtcgagggggcgacgcagaacacccacagggggcggcggccacaacaaacacacgagggcgaggcattctcgagtgcatacgaggaggcccccgttgagtccaagtgtggtggggacaaaccacacaacgcctttgatgatcaatccaccaccgctttgtgtgtaggggcgccgcaaatgcgtgctaccatcaaatattcaactgagcgccacggagtagtcgccccacgtagcgtctaccagcaaaacaactgaatcgtcgtccacacataggcttctcacaacaaaaagtactaaagacgccgatgggtggcgaaaaaacgcacatcgctcggctggtaaagagcacacacactgctgtatggtgtaatggatctcggcggctctcgtgtctccgccgcgcttctgtccgtcgttcgtctgtg

SEQ ID NO: 36259 - DNA, 362 bp, Homo Sapiens
cactgtagtttccttgctgctgttgctgcttagtctccatgggctttcttgtctcctttttccttgtggatggtccttggggttctggtggtactgcctctgtctttgtgggttacacaccgtcactgggacgtctcactctcccacgtctttggttaacagccgtgagaagctcattctcaaacctatgtctagatcccagagactacctgctggttggagtgtttttcttggttgactggtaaaggctcagactcggcctgtctgtattcttcttcaccttcccccactttttccccaaaaatattccccttccttggtgcctgtctgtctcaggcaaaggcaccctcatgccaaccgtt

SEQ ID NO: 36260 - DNA, 399 bp, Homo Sapiens
cccttgataaaagtttcttggatagataggcagaaactaactagggacaggtataaaatggaagcgttcataacccaaagttcctaaaattagaagtcagatcttaaattggttagtgaatcaagattccatttgatcccaagttttgtacctcacatctagaagctctgaaatatttcactaagtttcctcgtttggaagagttgtgagatgaacgaaatttctttctttactgttgaagttttctcaaggaatttcatgaaataaagggagaaagaaaatgtaagactaaagactaaatactacctggacagattaaaggaggaagttacaggcacatttgcactcatctgggctttacaaagtgatattaagtgcattttaatgtaaaaatataca

SEQ ID NO: 36261 - DNA, 443 bp, Homo Sapiens
tatatcagcaatcaaaggctctagaggtaattctgcagtgcctggagtgggtgatgcagaacagctctggctaataaatgtgccgcgtttcccagacaggagacgacgtggcctagtgcataaataagacaagcctttttaaaaaagaaatctgtatttaaggatgtgtttggctgtgttcttctcctcccgtaaaggtcacccagatagatttttccttctttagcattgcaggctgcgaagaactgggcatttctattctccctccatccagtgaacctgggggactaaattagattctgaaattgagtgtgcagtagagtcggtgagttgccgtaatgggagggtactgcttctcaccttgcaaggagcgaggtcatgataatatgaagcgaagtggattaaacataaaaccaaaggtatttatttatgacctgctcaga

SEQ ID NO: 36262 - DNA, 371 bp, Homo Sapiens
ggctgttcgggggccccacattcttaactgctacagacacaaccaaagcctgcccatcccttcccccacccctgccggcaatcgcgtacaggagtgagcgtgtgacttcttgtccacatttttgtccacaagtttggcgagtttgcatccgtgtctaataaagaaactaccgtttctcacgcaggcacgttctgaacgcccgagtgcgggagccacgtaagacccggctcagggaccccgggtgaggccagctgcacatgcaggatgcaggtcctcaccactgcctccgctcggctgccagggctcttcctagaagacacgggcctctcctaggctctcctgactgaggccctacccctgcccccgagcag

SEQ ID NO: 36263 - DNA, 354 bp, Homo Sapiens
accacggcaccccctgctcccaaagggttccaagggagagttatttagtactgagcagataggggaaagaagagaacacgaaaagaaaaatagaacatatctgacagatgtgtaaaccaagttaccagcatggtgtggaatcgtagttccaagtcatataataccagacattcaagaaaactagtgccctgttaactgggggaagcaaatttatatccttttggaagaaagtcaccttattctgtgtatcagaaatctctttcaaataacctttcagaactatagagcatcatacaaagatgaccaagcatacaagaaaacaaggcacagtgaggaaaacacagcagggggtgg

SEQ ID NO: 36264 - DNA, 452 bp, Homo Sapiens
tgctggggtactctagaggattaaccacggcacccctgctgaactgagtgtggatgtgggcatcatagtggtcgttgaacatggacacctgagagccttcacacaggacggagggtggatgtggcacctactgaaccgagggtggatgtgggcatcatcatggttgttgcgcgtggacaccgatgagccttcacacaggagtggtgggtggatgtggcacctgctgaacagagggtggatgtgggcatcatcgtggtcattgagtgtggatgccctccagaccctttggctttgctgggacagagaagtcttgcacaggtgaggagatgaagttgatgtttgggctgtgggggcccaagggctcataaaaatgaaagaacacatatttgggggcaccccattgccacacaaataagcacattttgggtaatgggttgaggtgtattaaaact

SEQ ID NO: 36265 - DNA, 437 bp, Homo Sapiens
gagtgactctacaggatcttacacggcacccctgctacacggcacctcctgctccaggctgctccattattctgagctactgtgatagtgcccaagtccttgagaaacagcccaaggagtcttcctcaattcctgctgccctgtgcttcccacagctcctggcattggtagtttccagcctgaggccaggagaagctggagaatgcaagcaccaaagattcctgcatctcactgtgctgagatcattgtcatgaatgaactcaaaatattattcaacaacggagaaaaacaacagtccaaactgaaaggcttacctgacaccagctcgtagaaacttgagaaccaaaatgagcacaaaagccatggatattcctgtgggttgatctccacactatgaaaacagatgacagcaggggggtggccgtggtgtgtaccga

SEQ ID NO: 36266 - DNA, 360 bp, Homo Sapiens
aaggactctgagctttgcgcctttggtcgagttcccgggattatgagctgacacagacccccaagcaaccacagtgattccagcctgggagtgtggccttggcgggagggtcaatgcccagtcatggttcagcggctgtgcacacccctgcttacctgcatcccacgctttccatgcaaactcacgtggcggcgctttgcgcttgaaggatggtctacccccagccaaaggtgctgacaccgtggtgagtaaagttactgacactgacactgaacgcagctcaaggggctgttcactgaagggtattagagggcggtttccttgatgtaaatctcagttggggctgcttcgttctctcct

SEQ ID NO: 36267 - DNA, 400 bp, Homo Sapiens
taaggtgggcactcaactatatgagaccagacccatcctctgcagctgtgactgcggaactttctgctgccacccacaggaacaagcatctctcctcccatccccagcccttctgccttcacctgtagaaggaggcgctgcaggtgtgtgctccttctcagttttgcacactgagcaaatgataagacttctaggatacaatgtcatctgggtccaagcttaaccgctggttgaagctttggggaaaagacattccatctctagttgaggctctgctgcaccccttggacctgggttgaaaccttcacagccccctgaacctcggggtgatagcgaggtgacatggtggggctttcatgtagctccatgatattataagccattaaatagtaaacttaaa

SEQ ID NO: 36268 - DNA, 463 bp, Homo Sapiens
cggcaggtcagataaactgcccaaaccaaatccaggcccagccagaatctcagctccagccttttgcgccttctgataaaacccagcatcgcttgaatttccagtacacgctgccaagtcttcgttaagcaataaataaccacacaaccctactgtcatgccaagttccatatggccatccagaaagagacacatggagctggttcctctcacctttatgaccagtgaaaagcgcaccaacacgaagacacgcgtgaaaggacctcatctcctacccagactgacaagcaaggcatttttttcactcaccgtcagtgggatggttctaagcaccgaggccaacccatttcacacgaattatttcacaaaaagaaaccttctgtgggacgtgcctgggcgactgaaaagacagccagcaaaactgagaaccttgtctcacatctataccctctcccaaggcagc

SEQ ID NO: 36269 - DNA, 364 bp, Homo Sapiens
agtgggagagaagaggggcataaaaaggcagaggcatggatgcatggatagtgtggcaagtttaggaactgtaaaaaaatgggatgcctggaaaagagtgtggatcagaaatgcatggagtagagactggagctctgagtgagaactaatcctgaggttaggaggaaaatttcagagacacagtacatgcatccttgaacctagggttcttaccaggcatcaggagaaagtctggactccaggtatgatcagatatgtgaattgagtccttgcagaccttcagccaataagcaagtgaagccatcttcacagggttaacaagaattatgaacagaaatatggttataattaaacatcaatcatg

SEQ ID NO: 36270 - DNA, 428 bp, Homo Sapiens
ccctattcgcaatggggatcacaggagctgagggtggtctgggctccaggtgaggcaccaggctctggaggcaggctctgaggctggagtggcaaggaatttctgcgagcaaagccctccataaggtctccagagggcagcttcatggaaagttggtgcctctgtggcaaaggagccagcagggacactccagccattctggggagatgggaggagaaggtgtgctcggtgaaagaagtgacagcgactaggctctgtcacctccctgctggccagcctcaccagggagaaactaagtgtgaccttccacctgcagtggaaacatgactccaataactggatgccaattttatagcctaacccagaggctacagttgctatgtctgctcctcttgggtatgattggcttgttgctggctgcccattgc

SEQ ID NO: 36271 - DNA, 417 bp, Homo Sapiens
ggagtaggaacgggctctgggactcaagacaaaatccaaggctccactggacactaggagatacagaatctgttcaaacacccatgtcctcacctccttccctctttccccttttagctatccaatcttccagtctccttctctcaagcatgcacttgcttcctccacatcctccacctgccacgtgcttcctgccacgtgcctgtgcgccggctgtccctccagcaacacgctctcttggacttgctgcctgtacatctgcatgcaagacatccaaagatgcagccacagatgcagtgaagagttggcgcactggctctacttcttcactggcttctcacaccttcctccctggcttggcctctttcctaacagtgttctctgctcctacctctgggcctttgtctctgctcagtc

SEQ ID NO: 36272 - DNA, 436 bp, Homo Sapiens
ttgtgaggcgatctgaggatccccctatatcgcagtggggtcttactatgtaatgttatggagcaaggcaaggggagggcgggatggccgtcatctcatgagcctcaccttgcaggatgtgcagcaggaagaagctgcatcttgccgtttgaccatgcgagcatctagcgtgatcagcactgtgctcactgccatcatcaatgctaacagaaacgtgcagacaacacaaaacctcagaactcccatctcaatcaactgctcggaaacttcaatctgagagtaaactgtcatgtttttcccactctaaaacaggatgactaatgacagaggaacctcaacacaatccatggggctcaagccagatccctctcaacagagcacaaaagccacccagtcccaaaaaatgtgagccgacgccgggcccctcaacggattc

SEQ ID NO: 36273 - DNA, 374 bp, Homo Sapiens
tatttcgcaatgggatcccagtatgggtcctagctatcgtgtgtcaggattattagagtcactttcgtgggttattttattttaactagggctttttacagcttagttatatttaactctattgtgattttttttcttaaacactctttacgccgtggatctattaatttgggttaatcgtatgaccgcggtggctggcacgagatttaccaactctaattaatataacttagtcaaactttcgttcatggcttaatttttatcactgctgtttcccgtgggggtgtggttgagcaaggcgttatgagctaccgttataggtgtgcttgatacctgctccttttgatctttaagatctggagggcattctcacc

SEQ ID NO: 36274 - DNA, 371 bp, Homo Sapiens
tactcggagggggtcattaggacttgaaaaggaggcatggtttctgagtcttggctcaaggcaaggatggtgtagacccctatatgttataatgacattcacattgataataatagcagttaagataatggtgaaatacgtactggatccattcaaggcattgtacacaatgaggcaccatagagtttagatactcctgttaatttcaggtactgatagtggatagagctgatctgagagccaggaacatatagaatcttctaagaaaataattaatagtctataaatgtgagccaggctactgaaagttaggaagtcgaaagtagtcatgcataaggcaagaccaaaatcagattactggcttagtactg

SEQ ID NO: 36275 - DNA, 381 bp, Homo Sapiens
aacatgcgatgggtcagactgtatctccaaagtcaaatgtatcttattaaagttgaattaaaaaatggcatttatgttctatatgttctaaataccagatttgttactgtgtcattttaggaggtgtatatcaaattacctaaggggaaggaagggtctggaaaacagttttaggatgaacaatgaattcttactgcacctggacacaaaaacccacctaagaaaaaaagtgtgaatgccatacgagttttttcaatgcaagtagggaacactgtacatcattgaaaaacagggaaaaataaaagggaacaaagaggagaaccatggaagaaagcataaaatagcagctagcttacttatgtgtgctggaattgtgtcttt

SEQ ID NO: 36276 - DNA, 422 bp, Homo Sapiens
attgggctagatccagcggatgaagatgaagaaagatgctaggcaaaacagtttccaaaatgctacagatgttatatcaactgagactagggaatcaacaactgcgactatagaaatgcaaaagtgaatatgtataccttggataagctgaagaataacttccaggggacaataataatagatttcctgctaaacaaatcatgacacctttgtacatagcattgaaaagtgtaccgtgaaaggcaaaaaaaggaaatctcacaggtcaagaaatccttgtatagagaaaaagtaactgccttagctaacagtgagcaaaggagtcactaataataacacgatagcatgactactaatatattagtcattatttgacagcccatgggggccacacctatttctccaaacacaatatacatagt

SEQ ID NO: 36277 - DNA, 416 bp, Homo Sapiens
atgggactggagtcaggtgatgagtgtcaatcggactgatgagacacacacgtaggctcaggagagggatcaggttacacacacagactacgaagcattagtctgcacacaagtgacaggtgaagccacagaaggtgagagggcagagagagaagttaggaaacaaaactgtgggaagacccatctctaagggtttggaggagccagtgaaggagagaaacaggagagtttacatatgctagggaagagcaaaggaagtgtcatgtcacaggccatcagggaggagagaattacaggaaggtgtttaacagtggcagatgctgcagcaagactgaggggaaaagacaacaaaccacagaagggctagagacctccaagagcattcaaagcagaggtgaaggcaaattgtaaacaag

SEQ ID NO: 36278 - DNA, 457 bp, Homo Sapiens
tcaccagcggcaggaagggtagaagggggtgtctgagaggagggaaaacaatgctaggaaggacaggaaagagttcgagaggaggaagagaagaagagaggaaacaagggtgaaaagctgcagccgaaaagaagtaggggatacacacaccctggtttgctgagactgtagagtgctgaccttagaaaacagctcgcccagggggagcctctagaggtgggaccaccccaaggtacaacttgttccagccacccaccccaccattctccaattgtggattgtggtggtaggtgcagggatcttatacaatcattgaaagtgccaaggacactgctcagaggccaccagcaccagggctggacactcactcagcctcagcaggctgctccccgtggcgtcaggctggcagatggtgggaggagatttggcagcctctccattgggcgtggctcctgaa

SEQ ID NO: 36279 - DNA, 396 bp, Homo Sapiens
tatgaataccagcgaccgatatctgatgtacaacttagggtccttgagatatagcaggatctgtatgtactggcataaacccattatttgagctctcttaattgcttttgggatttctttcttgtttcttccccacaaaggacctgtaattgtgcctttccataacatgcatccaggtaaatggagaaacaaacgtgggacaaaacgctgttaccattctttataatctaacatggctttcccacacaaagatacattttcttaaggaggttcctatataaaggattttcccattgaaaatggcgcaggtcctacatatgctgggataacctgtatgtgaacaaaccttcttctccaaaggcaccgcggtgattccccgcgctgggtgtattccgg

SEQ ID NO: 36280 - DNA, 399 bp, Homo Sapiens
acataaaagtcatctatgttaggtgggcctgtgggcaccagtttgcaaacttagtttcatctggggaacatccagaaccatcttctgcccagtgtggcatactataggcatgaaggagaggtaagattagtattttaagtttaggtaggtaagcatctctataacaaggtttagagagggaagtggtggacaagagatgttaacattgtttttagactatctgtggatttccaatattccatccatggccccagactgaaagtcaagagcagttgtatgtgtataccttccttaagccaccattcaatcttttgtgctgcacaaaagaatcagcctggtgagcacttgacacacgacttcagctttcttcaaactgattgttcgctgtgtataccggtc

SEQ ID NO: 36281 - DNA, 376 bp, Homo Sapiens
atcaccagcgctggatacacttgctaatgaaattcagaaatgaactcaagattcatttcagtctactttggattcacttcatccaattctaattctcatccggtcagaaggcccgaatttactccaatctggagaaattagattacattctgttgatactgagcctaagaacccagtaaagttttaaatgtataatattatccattatagaatcctatctggaagcaaaatctcgaagaccaaattcaatgaagttaactgggattattaatgagaaggctagactaattcaccctgaccttggggtgctaggtaggggactataggaaatcctgcaacgaccaacattccagatgtcaaatcgcggtgtattccg

SEQ ID NO: 36282 - DNA, 361 bp, Homo Sapiens
gatctgcggagttaagtaaatgaccgatgggagaggaggcgaggcaaaaggaaaggaaggaagtccaaatcactggcaaaatttccctggaagtaagtattgacgccaaggcctatttctaccatggtggcatggccagggatctggtctgagaatctgaacagactcggttcaggagaagacgacacaggggttagtgacctcaacagaccgtgggaagaaaccctggttcaaaaccatggccgtgagggtgggaaggagaaggaggtgaaaacaggtgggtgacttggttaactgggaacaaattacagaagcgacaatgtgatgtaaccagaaaggaaactggacgctggttattccg

SEQ ID NO: 36283 - DNA, 447 bp, Homo Sapiens
atacaccagcgcctgtgggaacttacatttttgcatcagtttcctcattgataaattggaagaaaggtacatggtagagaaggttacattagtcgatatttgtaacaagtcagggcacataacaggccctcactcaagagaagacacttttgttctcacatctcccttcttaaattaaggagcatctgccctgtatacaatcctgcacaaaaataaatccacgtaaacaaaatttcacagtaactacaaaagcctaatgatcattaaaaattcctgggagaaacagatgaccgttcactaattaatcgggtttagataaatcaagcaccacttaaagaatcactgctccttaaagaggtaaatgcaacgattgtcacatggccaatttctaatttttcatttctctggggagacctaaatgatacaatcttagtaataaatttctcc

SEQ ID NO: 36284 - DNA, 352 bp, Homo Sapiens
ctcgaggacttcggatacacagcggcttatgtgacaagtcgcttcccaggctgaaatatatttcagtctatctctgtatccatcagacaagctcctaaacccattcccactctggcactccaaccaagtctcatccagccattccagttccccatagtgtatgagtgaagactttgcacttgtgaaaacgtgcatgggtatgtatgtgtaacctaattaaagtgtcttctgagtatctgcacctcccaaaaatgatctgccaatctgccttgagaaacgttggaagtagctcatgagatctcccagaatcctaaggaaagagatgtgttccttctccacgtggtgtattccg

SEQ ID NO: 36285 - DNA, 471 bp, Homo Sapiens
tccgtagtctcttttcccccattgttcagttgtggagtgatgagaatcagagtgagtggtagccgtttccaggtttgtgacctttctaattagcgttaacttccaaacttggattgttcaagccacagcatgtgttctatggctctgggcagggttgatagacaccccactccaggaaggctgtggacagacagatttgtaagtcttctattaaacaagttgcaacatttaatagtactaactgtttaattcatttcttctgattgttcttctgaatattgctattattaaaggaatcattgctagtaaggatcttgccttacttggtaggtatgttaactgtgcaattatctggtacgctatgtgcgctaattacaggagcagaaacattctcaattgtacttgggtgtgattatgttcttgtgctttcctgcaggaagcttattttcgatacatggcagaaaacccaac

SEQ ID NO: 36286 - DNA, 389 bp, Homo Sapiens
ggtgacctagaggatctccggaatacaccgcgactcctatctggactgttttcttatggttttggaatctctggcaggtagaagtaattatttctgtaactcttaggcagggcttaggaattatctcccttaggtttgacttctttctttcttgagaataagcgctgtgtttcgcaagagtaaagaagtggcatttattctgttgtcacagcattactgagctcgagtggatggctctttatttccttctcgtcttttcttttctagtctttgtcaggacccattcctttacccctctttgcttttacggttttcacattttaataatgtaaaaccatgttccccaaacttccgccttttttgtcccatttgctccgctgtgtattccg

SEQ ID NO: 36287 - DNA, 394 bp, Homo Sapiens
gaatacacagcggaagggcatggcatttttacagtgaagtttggcaatctcatagcgtcgcttctgtcctactttatttattggtcagggcaatcacaaagatgtgcataggctcaaggaaaagagacataaccccgaccacgcgatggaagaagtgacacggtcatgttatgagaggagtgtgtgggatgggagatagggctgtggccacctgcagaaaacagcatctgctacaggctgtcatggaagcgcaggatggggatttagcctacctgaggggtcagtcagcaaaggcctctgggaggaagtgagatcttcggctgaggatgtgaagggctaaaaggagaatgaggaagagtttcagggagaggaatcaatgaaacgagtccagagg

SEQ ID NO: 36288 - DNA, 410 bp, Homo Sapiens
agaaagccgtgcatggccgcagccgcacctccgaggaaaggagcagccacgggcgctgacggaggaaacagccaggtccaccttgggatgaagggggttgcgtaagctttcctactttagtcacaatacatttaacgccattgtcaattttttaacaagataaaaatgggtcacgtacagaaatacagatgctgctcaggtacaaaacatcaaacactgaaagttggcctggccagatgcgcggagggaccccacggccatataacgggctctggccttgcctcctcgatcctgcctcacccgtgcccaggtgcctgaactccgcagaagagaggagcaccagcacgtgggggaggcacccagtctttggtgcttggcctctgctgcgaagccagaggcacgtggctggt

SEQ ID NO: 36289 - DNA, 356 bp, Homo Sapiens
cccaacaatccgaagactgggtggccactggtcagagcgtaatcacaggacacatcaggctgcaagggaggctggaaattgtctttaaaaatggggagggggcttctgtctaattaaaattcaggcattctatagccaaaagaagtggagaatggatattaggggacaatgacaaggttctggcacaacgctatttgaagaaaaatgttcggaacaaaaggaaggtagtcaggcctaggaaaggaaaattttgaaagttataaattggcagccccatcctagcaccagcaaggataaaaggtatcctgtctggttgatgtatctgtctgcctggcaggtaggtcttcgggtcgttt

SEQ ID NO: 36290 - DNA, 411 bp, Homo Sapiens
cggagttcgtagatcagcaaagtaactgattacagtaattgtatcttttaactaagtgcacatcatagtatatgatcctagttgagtaatctgattcaatttgtgtgaaattgtttgaaatactactcagtaaaactgatctggaaaagagataaagttgtgtttgggtaccggagacatgatcagaagcactgagtagattaacctaatttacctttaatctttagtgttatgagtagtctaaggtcctgtaaatacagaagggtcttcttaaaagtgtactttttttggtttaactttacaagggataaattagcaacctttcttgatctcatataacatatcatgttggttctccaaaaacagttatcgatgaattatttttctcatataatttattcttagttgaca

SEQ ID NO: 36291 - DNA, 517 bp, Homo Sapiens
ataacataggtatgggatgcatgtgggagtatatactgaaaaaactctgcttaaaaccacggctacgattttacagtgcatacagcttatgatacatctcatgaacagatgcaaaggtgtttatcattatctttgtgccacacagtttctaattttacatatgaaaaccaaggcatcattcagtataaagtacattatttgcatgatatatttgcatttgtaaaacacccacatttacttttactgcttaatgggccctgatttaaatgggccactctatataaatggagcacactggttctccactcaatgtgttgataagaaaactactccttttagatgcaaatgagcctactaatcacaattagaatggtggagttaagggaggcagagcagctgggccaagagctcccagtctagtagggccagtttggttctagcttcatctctgaagcagcaacttgggacttccccagaggacatctgcccaggggccccaggtataaacccagcattt

SEQ ID NO: 36292 - DNA, 526 bp, Homo Sapiens
cattgggaggcagagtctatgggtacacggagcaaacagagagagcagagtggagtaagcacacactatacacagtacagcattcttgtattgctgtgtaaggctatcctagtatagtttgtgtttaggcttcatcacaaaatagtaacatgcagggaaaaatcaatgaaccaacgtgattccatgttatattgatgccattcccctatttactaatttcacatgagctcaatcacatcgcagaaacacatcctttcacaaaataaactgtatacttggatctacttattttttttctatatgaatgtagcatgtcagttctgtgttaatgaacaactatgtcttaaatttggtattttagaaaatgtaatgagcaacttattcatatctgtgataccttgccttcccagggtggggcttcagtggctgcttttagattcaactaagcagtcaaacccacaggacctaatcaggccatatcgaggatagattcccttagagacggatgttagaagggacacacagt

SEQ ID NO: 36293 - DNA, 482 bp, Homo Sapiens
tcagattcaagcagacaaagatcagagaaagtgtcttatgttataaagaagttaaaggaagatgccacacagagagaaatacaaggaagtttctgtatgaacttatgtggtgagtatgctgatcatggtaatggaattgccatcgagaatagtattaacttgacaatatttataactgaacatgtgagaggagaaatgtttaaaaattcaacagtctttaatacattaaagacactttatagcaaatatagtttttcctacatgatcataaaactggtttcttaaacttgagattcaactgtgatttccccaaaaaccaggatcatcttttaaaagaaaataaaaagttctgtttgtgctgggcttaacagttcagatacaacttctcttcctgtctcaaatatttagacaactcttaagataccagagaggctccataacatgaaagcaaactaaagagaactaacttggccattgttaga

SEQ ID NO: 36294 - DNA, 400 bp, Homo Sapiens
ttggttcttaggagatctgagcatcccctcttccattagaaggtatagaaatccagtggaccagtttctccaagatgtctcttgaaagtaaaactcgcttaaaatctgttttttccagggctctaatcactactctgttaaattcctcaaacttgtaatgccccaaggcttgattttttccagataatggctctatcgttgcacataccctgattctgtcaggatgtgtcattggcaaaagtagctttctctgccaaagctttctgaccgttggctccatcttagcgttgttagcaggaaaggcctgctacccagagtcagagtcaatcagagaatagttcatgtggtccttagaactttactccttacccttttatcttttctttaaactttcgcctct

SEQ ID NO: 36295 - DNA, 361 bp, Homo Sapiens
cgctagtgtgacgtgttaactaacctgtgatggtcagtttggcggtgtttaggctgtatgacgtgtaaactaacctcgtgatcgtcagtttgacgtgttaacttggctgtgtgacacgttaactaacctgtgatggtcagtttgacgtgttttggctgtgtgacgtgttaactaacctgtgatggtcagtgggacgtgttaacttggctgtgtgacgtgttaactaacctgcgacggtcagtttgacgtgttaacttggctgtgtgacgtgttaacttggctgtgtgacgtgttaactaacctgtgacggtcagtttgacgtgttaacttacttagtgtgtgacgtgttaactaacctgtg

SEQ ID NO: 36296 - DNA, 408 bp, Homo Sapiens
tgtatatccgggacgatctgaaaggcttgtcacgctggtcgactagagttgtattcttcatttgtttcccaatgctccttcctgacgtgagatatgtacacatctctctgcatgaacaggcggtcacactcccaacatgtccatcctaggagtggccacttgcttggtttccactgattttcttcaatggagatggagatttcttttccaatttctctttcccattcatggatttgctgtcctctttgttctgatatgctgaattataagttgcaggcttaatgctcaaaggcgagtttacacccaagttggcccttcaatgcttagcgatgtcccatgcataagactgatatggtccaccataagttgcttctgtgcatataaaagagaacagtctggacacctgag

SEQ ID NO: 36297 - DNA, 456 bp, Homo Sapiens
ccgtttataggggaggggacggaggacccctgcataacctgccacagccctgaaacacagtctataagtcctgcctcaatcaagagctttactcacctcttgctatgtaaagcagggacagccatcaaaatgactttgataacagaagagtaattaggagctgccatcaggcagaggttgctttttcttgctgtcctgtgcagcagcccacgcagcctccagttcggggctggtcattgagtggatgctgttggctgattgatgactattgatgaatgcactcagagggagctgagcttggctctcacctgcgagactgccccacctactccccctccctctctagggtcttaccctcattgacgaagagttgccaggccattcatctgctctggagtacatcctcgggatctgagatgcacagcctgaagacatctcatcagccatcaggggatc

SEQ ID NO: 36298 - DNA, 390 bp, Homo Sapiens
gcttcgcccagtgtaattatgaactcattaaatattaggatagactaacaaagaatgaaccattactgtctcccttctgagccttaacttaattctttcattgaacagaggtaacagcttatgtaaaaaggggcctagaaaaagtttaggttgctcaatatggcgagaacctaaagacctacagggagccagtgatgaaaaatgggtctaaaaactatacataggcctgaactcatattcaaatgccttcttagctcaggaagctttaagctctcttggggcttgttatctgagtgctctttctggcctgcttcagggtgaggacttctaatcaagaagccccattacctccttgttatctgtagtatatttaggtctcttggccttggg

SEQ ID NO: 36299 - DNA, 541 bp, Homo Sapiens
tctagaggatcccagatgctaggggagatgacaatatatggtgttcacgtagtaacaggtagatgacaacatatggcgcgctcgtacaccagcttccttcttccattagccaaggcggacatttctaactcgctcggggctccttcctggctggtgcaggtccagcctcaccatcctcaatgcagagcttcagtatctgccgatagtcggcgctgcccctagaggtgaaacctatcagccttgaagccctcaccttgctgccttaagacaaaaatgcttgctttgaaattcccacagagaatagcagaaatgactgagggaggactcagtcacttacaagagtcacttggtaggtgcatccctctgtgtgggaggtggatagtatgccttcatggtcttagacattctgtcaacagccaatgagaggggtaacccagggccacctctatctgttctctataccaccttgtctgctcatcaaaattacaactgaaaagcagacggggaactcccaggactcggaaatgacagcccgagagca

SEQ ID NO: 36300 - DNA, 532 bp, Homo Sapiens
atatcgcagggaggttcatgaaggtgtggatgattgtgcctaaatcagcctggctagtaaccaagtcccaggtccacagtcctttcccacgcgcaaggcactgtcggccaaagcgtgtaggagtaagcttggctgtaggttttccaggccataggcacgcagaccagacacaggtgggcactcagaaattagttacgtgagtaaatacccaacaactaggagaaagctaggcaaattgtggttgaccaacaagacactgcaagacttttcaggaggaagatgtggaattccacttatcaacattagatgaaaatgcagaacctcacataacagccacaaatctccctagatctcagaggcgggtctccatccgctcggcctcaattatccagagctgagtcaccaactatcctccctccagtctctcccctctaggggagttagaccattgtgtgcatatatccctaggccataattttctccatgtacttaattcagtacagaattccaggtactgatcattaatgatatc

SEQ ID NO: 36301 - DNA, 552 bp, Homo Sapiens
atctttaggggagattcccttaccccactgatctgaccattcctgcacctgcatcatctgtaatgtctgtggccatggggactggaagggggctgcgagcctgtgccggccagaaggcagtccagcccagcgcagctcagccagctgtcccaggcctctgcaagtcctgtgtgaaaatgaagctgtaaatatcttcctcaagagtcgtatgaggatcaagatcatgtactgaagtgcctggcacaggatcagtccttgactggtgccctgacttttggcagccaccaggtgacctcaagggccttacaagaggttgaagcctgctagtatctctcctgactgggaatttaggataatggctgaggggtgtgtctgtgaaagcctcgtggggaaggccatgagcttgggtgtgattgcagctgctaaggacccttctgtcccccttcagtagcttcctcttggcattgacttcaaaaacccagcaacctggatgttctgccactgtggtattctgccattggcagctgtgcagacttcgataaggctgtgccc

SEQ ID NO: 36302 - DNA, 369 bp, Homo Sapiens
ggcccaggttagggagtcggctcagcacagaacctgagtgaagaagctgtccaaatgggtttctcctttccctacctgcaggcttacccttcatctgacccatcctgtaaactgatactaagacagcaattcttaaatacctcttccaatgtgtcaggtacctaccaggacttcccagatcctaccccactccgtcacttcttcctctgtcccagctcctcatagccaaagtcacttcccctaccccagtcatctaccctctgtttgctcagtccatggggaatggcctcctacacctcatcctagactttggctctgcacccttcccacatctctgcccttccaaaccctcctcctcccctagcgatg

SEQ ID NO: 36303 - DNA, 440 bp, Homo Sapiens
cccccgattataggggagaccaaacagcttcgtggacacgacagaggagcatgtagtggtctgcgttggttcctggacccttcacatccactgccaactaagttcagcccacgagtgaactcctgctgcttctctgggaaggtaggagtggatgaagttgaaaagcagcccattggaggctctagttactccagcccaggcgtcttgctgagccccaagaggtctccaaatgagaggaagaggtcctcacaatcccaagatcaagatgcccccagagagcttccctgggggggagaggtgttcccccaaacactccttcctcccaagttttaacaagcgggtgcaggggcacggctcctcaaatccaagcccaatccctcttccccttcagaatgttaaggctcagacaacttcagtgacttctaacacagctttcctcc

SEQ ID NO: 36304 - DNA, 397 bp, Homo Sapiens
cgagcatatacagtcattctctcacacctatgcactctagatgctgaccctgggttcataattcacattctgttctgccttcctgccagctctcagattttcagaaacgtcagtgacatcctgtttcctaccgacacatgtttaaaattcttcttcctagcttacatagcactctagagttttatgtcatcctgcccaaccgaatcatacctcccacctccctcaacacgtttccccttgtagaatgagtcagactctgccggcccctgaacgtcccatgcttgctttcactttggtgccttggttggaattctgccttattcttctaatctagtttgtcttcccgtgttcatttatctcttctagttctacccacagccaaagtccaggttccacc

SEQ ID NO: 36305 - DNA, 384 bp, Homo Sapiens
ctaccttctatctgtactaaaatacataaaagcctttagtggggcaaaatgacagcttccatgtttatcttagaatgattggtgacgtagatcgagaattctagtttccttctctacctcatcttcattccatctaccggcaattcatgctaatccacagttgtatgcagggttgacagagaaggtgactatagcagaatcaggcttgctaatgggtgtattctaccacttgtgctgtcacctgttactggtgtaatccacgtatacatctgtgcttcccattcactttgcaggtatatccgagaccatgtggtgaaaggggaaccgtatgctggttatgatagacacaatgcagaggtagcagcctttcacttggacaggtgc

SEQ ID NO: 36306 - DNA, 606 bp, Homo Sapiens
tgctccccaggtctcctggctgggactctggggccaactgtgccagtcacataacactggaagaagaaatagccagaatgttggagctggactcagagtggaagatatgcagagcacagagtgccaggaggttcagcaggattgggagccccaaaggaggtctatccggagctcaagttagggggctgtatgcttggggccaaaatgtaacttgaccttgagataagatgaagggaattacagtgtacccctctccataaccccatttccccagtgaccagattgctatggcgtagggtaggaaggcaccatctgtagtggaaatgggagggagaggaaagtagggccccctctctagtctcatgagtccagatgctggccagtctacccaccagcctggggacctctgcattctctgagtctgcccttcaggactcaccccatcccaagcaactctgcttgcatgtcctctatctctacctagccttcagccttgaggtccaacttgctcatgtaggaggttcccagatgccaagcacctgacccacatgcccccttgttgaaactgcatctgctttggccctgagaagagtcccacccagtact

SEQ ID NO: 36307 - DNA, 511 bp, Homo Sapiens
ctacaactagatacgagcattctccccatgatgcaatcagaaggacatacttcacagtctcttcgtagagtcatacagacttgaggaatgcatgcaaccaccctgtagacgtgtacactatggaacctgcatcaccctcggggagactcagtccttctcaagaataattcaaaataatttatactattcttttgaaaaatctaccataagcttgccacataaatgcacagaaggcactggtcaactacagtcactttgaaagttgtcttgcttgttattctgggagctaggtttcgtcacttgtagtggcatgcattaggtagcctttaattgtgagtccagagaggtctccacattcacaacagggatggactggttgctgcctgcacttgctccctgtaaactacaactacatagaaatgcaagattacctgtgacaagcaaacaggagtatattcaacatcaagcagaaacaggaagtcctacgtgtcaacatgctagacaatagaca

SEQ ID NO: 36308 - DNA, 556 bp, Homo Sapiens
taggactcgatcatactccattgtctcgagccggctaatacacgtgcaggagataatccatcagattgctaataagcacagattcagacgccaacactctacactttctgaacatctatattctatcaagtagggagtatttccaaaagatgtatctgtacagagtttatctaatagactggaatggctcttatttctgttctgccaaataaagagaaatttcttggactgcaaatgtgattgcttgaactcccaaactgcaatttttctaggcatttcttcttcatgcttcctggcaggccaatctaccatcaaattcttcaggtttaccaaagccttaacaacagccccaatttacaaagtacccatgacttggtcagcattcaaggcaaaaagttaaaacatacacaaaaataacagtagattttgaaaacaggcaaggatttgaaaacgaccattatctctagggcaatactaaaatatagcctcaacttataaatgtgtagaaagtagtgatatttggaaggtacattaaaatgagtaagtaagggaacaa

SEQ ID NO: 36309 - DNA, 408 bp, Homo Sapiens
gagaaggatgtgctaatatggtacagtttgtcacctggttgtttgcttgtttcagagaatgagagtagatggatttgctttccctgacctgctgctacttaaattccagtaagccaatcagggactaaggcagcaggggcaggtaggtgtagcttagcagcaactaagtcaaatgagactgaatatagaaactgtcatgtgagctgactgtgtgaaaacagtctgcctaattttctggtcttagtttccccatcgtaaagtgggagaaattcctgtaaggcggtcttgttttgatgaaaagaagggagtcaaaataaatgatccatacgtttactttcttcttttttaggctctgcctctacagctgtgggaaggtagagtaaaaagcactagttccataaaggaaaa

SEQ ID NO: 36310 - DNA, 499 bp, Homo Sapiens
ctttttttcttactcccaattaataataaaaacttagattttgtgtatggcagcttagaagatgaatctcttagcaaacactgtcaccagtttgccctctactaccgcaatctttaggtctttgatcacggattaattataccatgggcttcaagtaggcattcctaggttcctagaacctgcttggtgcacttcctcacttcaaccacgtgatggcagtggaagccatgatttctgctaaggggcttcagtgtagagctatttctgcattcccttagcacacaagaccaagaacagccatttatccggaggtaaagataaacgtgtctaaactgtgaaaattagtaaagcggggtcatcagtctcttctttctgcttcccttttctcttgactgacacttcattgctcctttactcattctcaaaattgggacacatctgatacctcaatgtattatgtagtttgaaattctttcataccaattctttattctgctag

SEQ ID NO: 36311 - DNA, 497 bp, Homo Sapiens
gcgtatacagtgaataggcccatattttatctccctacaaaatagctatttaaatatccctcaagtatgcactttctgaatcattaaagcttcagggtgcatacaattacactaatttgggaaagtgatcaaattcatgcagggctgttatttttaaagaaaagacattttagtgtattgatgggatattggtgtccagagtatatagatttccagttatctcctgtcatggcaagagtccatcggtttcctttaagagacagagaacacattatgcctggtattaacaaagatcaatttcagtaaaggaagacattcaacacaagggaattgaactgagctgggaataaatgatgtaatgtttgaagcaataagggataagtcatgctgggactccaagttcttgtataaatgatgattaaatggaatttttgtccctgctttttgctaggggtgatttttctttactgtaaagtataatgtatctatttcagcct

SEQ ID NO: 36312 - DNA, 435 bp, Homo Sapiens
caatactgttttcaggatgggtcttaatatgtagtggagaggggttggtgaaacagtacttttcatctctatgttggggtagagacttgctgactgagtgtagggctgattgcaaatgaagatttccctgcccactaaggttttagggaagggctttggccaatctgctttatctcaggtgtgtgataactaggcctaaggcaataatccttgagcaaaagactcttgctctggcacctggatacctatcttatggagttattctaaggattaagagataatagatataaagcacctaatacagttagagtacatcttaaacatgtaatgtatcgagctattacacagagttaactgattacaggaacgtggagtggtaagttaaacaaacctggccacctgcttataaagcaatataatggtatgctcagcgct

SEQ ID NO: 36313 - DNA, 367 bp, Homo Sapiens
gagcataccagatgcagtcacaacaccaacgactgaaaagcaaaaaggaatggagatgagaaaaggcacgtcgcgttcaacaggtccaaggtccaagagtacctgaaacttgtcactcttccactgtttcttggctcagggaatggtaccactgccaagttttgctggttagaaatatagaaggtattcatgatatctgcctcccttatgttcattatccaaatcatcacataggcaacagccaaaggaaaaagcacgtcaagtagagagaatcacatatgcaatgtttctatgttgaaagacaacatggtgggttctggcgattaaagacctgttagtttgaaatagaagaaggggatagttcatg

SEQ ID NO: 36314 - DNA, 361 bp, Homo Sapiens
ccaggcgtccgcccggcgctcaacccccgccaggactcggaatgccttgcttttggttcttttcgtgagttccgaccaaatgtttaagtggactgggtttggcagaagctcatttgtaagcactgacggaaatgggttgtgggcatttgatttcctttgattccaacgttttgaaataatgtttctcggatttgctattcgaagcaattttctaaaaactcatatcttatttgctaaaaataaactctttggctcagtttgtgtccaggctgtgtacggcctccaaccctgagccccgaggagatcgagccctggcgcgagcctgatctctgtcctgtgtgtttctttgtatttgcaagta

SEQ ID NO: 36315 - DNA, 540 bp, Homo Sapiens
aaggggcttagccctgaggtcttgggttcctatgaagacccagactgtcccggaagcccagattgttttgcgtatagaactccccaagttcagagatgaggtccggcttcatcgttcattctgcagaggaccagagaggatggtcaggatgcgggggtgggtcgcaggggcatcaggtggtgggattcccatggggcaaggttcccactcttctccccattcagcatctgccctgggggtgtccagagaacgtggctgcactcaggaaggacagggtaaagggcttcaagacttcctctctaaaaagggcttcagatggggctggagatgtgttaaaacagtactgctctatttacaaatacaatacacattcatttggaaaatatggaagatcacaaagaagtaactaagaaatacagtctcacccctcctccccttagtgtgatcagtgtatgtatttccttcagtgttttttttcccctcacttagcactagagggtgagcgattttccacgtccttaaatactttccgcaccatca

SEQ ID NO: 36316 - DNA, 450 bp, Homo Sapiens
agtacagtcttacaaacatggccctgtctaaagattgtagcatcaggcctagctatgttaactctcaggtaaagctcctatgcctctttcccagttacaggctaccatattgccattctgtatttttgactctctgaaatgccatcttaacctttattatagcttaggtttcactggatcttaagatttttactttcctttctgattgtggcctcaatgaaggtcctcaaatgttagagatagagaaaagtagatgtgcttttatataggtagtctttaaggaatggaatggcttctctctggacgtagaataaaaagaagccagagattctcttcctctgcccagtttaatgacagtcacagagcagtggcatttttcaaatgttttctttttctgtgacttttatatttacagttatttgtatatttctgcatatgtcttacagttaa

SEQ ID NO: 36317 - DNA, 466 bp, Homo Sapiens
gtagaatgggtgtcgtgctagcagacacacttcccactgattcttcctcctcctgacagtgtcatccttcctgcagcccaccctctccctcagcagaaacctggagtatgtcttcagaggaaaagagaatattccactgcctacatgtttccatcctgcctggtgcctctaagtcagatccagggctcacccagaggccacgcttccagcctccagcactcctaactctgttcctcttccctgccactgtgggccaagctcaccaaggatcctcgggccaacattctgattccccaccctctcctgacagcagccactctcctggtggcatgagtggaggctggctctgcctgttttggggctttgtatcatgatatctggcttcttttgctctgaggctcatccgctgctgtgtatggctcgttgctgtgcagtggcactcggtgtgaatacaccacgctttatg

SEQ ID NO: 36318 - DNA, 356 bp, Homo Sapiens
agcactcagggcttatattagaacatcgtctacttttaacacactacagcaggataatttatgttataaaaaataattcagatacaatcagtatctcttacaaggctatggacacagaagccctattgtacatggaatattttgaccaactagtaatatactacctagaattcataggtttccttgaaataaatacaagatgacatattttgtcaataatgagatgtattaaacatatacaatcaaatacaatgacttcaagtagccttcccattttcagttttcaatacctctactgtatgaaaattagtgtgttttccctgcttcgatacctctttttatatcgcgtcagttag

SEQ ID NO: 36319 - DNA, 455 bp, Homo Sapiens
agactgcatgatgtaatcaagatatcaccagcagttaagaccgtatgtgtataaggaaaacaatttaacaactctggtttctagccttggggggaagttagcttactgccgatcaatctgtgagctctcttttccaggaggagcgctgcccagatgaagggaaggcggcttccgctacaagggggagaagccccacaatgacagcagatgccagggctccgagggggatgtgtaacggggaatacatccatcatgtggtatccagatgatccagaaacatgaagaggagggcagagtcctccttgtggcaacagccaccgctcaggaaacggcttcaggtggctgtgactctccccatcagggcccccggagcgcggggaaacggcttcaggtggctgtgactctccccatcggggcccccggagcgggctctttctgcacctatcgcgtcagtt

SEQ ID NO: 36320 - DNA, 526 bp, Homo Sapiens
tgcggtctcacaggtctaacttgaggaaaaaaggaaaaaggaagaagagaaacggttaagagaagaagagaaggtagagtgtttcccacagtagcttccccgtcccagcccgttggagaagcagatgcccaaagtggaattcttgccacagccgtcacctaatattctcttggtttggggaaaccaaatggcgcccgcagggagggcgagtctgtctagatgcgttcttgttgcttctccaacgggctgggcaggtagctggctgtgggaagaagaatggacccaggaccccaataatccactgtccttggccccagccccttgctcggtgttccatatactgtttcttctcttctccacctcccacaggccatactcttctccctcctttctgcctgtccctctccttcctttctttcccaaacccactgcccctctatcataatcataataatgctagttaccatgtagtgagtgcgtaccatgtaccagacactgtggtaacactttttattttattttatct

SEQ ID NO: 36321 - DNA, 506 bp, Homo Sapiens
ctctaatctaataattagtctttaatgtactttatatggaggacaacatgtcacagaaaaaaaattggtttaatagtgtaaatatatgtaacactgaagaaggtgttactttaagaaaatggatgaactttagacagttgaattcattacgtgcatatttcttaaaccttggtaaaattgatcccacatttgtggctaaccttgtaagtattatggggaaggagaccctccaattcattttaaattgtgattatacagcatttgcataggcctgagatgttttccttaagttcgactattgtgtatatgatattctaatgtgttacttaaaatatgctttcaaacactgggtataatgaatttgaagtgaaacatattttaatgagtagtcttactaaaaataataaacatgtacttaaaggaaacttaaccattttcccatgtggcataatgtctttctgatgtcttagattattgagcctcaacaggcttgctctctgtgaagg

SEQ ID NO: 36322 - DNA, 484 bp, Homo Sapiens
gggatgctatacacaacccactcgaaacatggaaccagcgtaatcaaataatgagcatggataaagacttccaagttaaatgtagtggagacttcaagactgaatcacactgaaaaattaaaccaggtgagagataagaatttggagatataaatatacgatgtttttaaattcagtggtgttaacactttgatctgatggaaaagttgaccttttaaaaactgaagtcattcacttatttcaaatttgactaagcatttcctatggttctgtagataagtaagaagtgagaagtggagtgaaagaagagtacaattttatcaactccacagtttccactattttctgcaaatgactcccaactcccaaatctgtatctctagttccagttcctcaccaaagttacagaagcatatttgcaatttacctcacaaatatcttctgaatggctgtccctgagcataataatcctggtatttttctg

SEQ ID NO: 36323 - DNA, 508 bp, Homo Sapiens
cgagtgtacagggacggaggagaaggcgaacggagagcgtaatcagcaggcgggtagtactgggacaggttaaaaaatcataatgagcaagtaaggtctttcggcaaaactgcccaagttctataacatcaaaactcttaaggagcagaacttgatacgagaatccaaactagtaccctttctctatgagaatataaaaacacaacaggacttctaccacactctatctgtagaacccaatttagaatgccaagggcttgtaattactaactagaagataatttagtggagaacacaataaaacagccttacatttttatgtgaattaaacctttctggtcaaccaaattttccgtgatggtgtatctcaaacaccatctatttaactatcagaaatctcaagccacttcacatttctgattatttactacgaacgtatatagggcagaagagaggggaacccaggctttataatcattgacctaaattggacataggctctgccact

SEQ ID NO: 36324 - DNA, 411 bp, Homo Sapiens
aaaaccatatgtaaggttaactcgggaatggaaaagccaagtactaaagatcacaaagctgtttggcctttggtggttctgggaatgcctgggaagaggtgggcttctgaaatgaagaaagatcagaaaatgaaggtgtagtgatacctgttaatgagtaatttaacttttctgtctgtgctaccttgaggaatgtagtcatatttggagaaacctgaggcaacattagtttctggggattcttggatttagctaatttcagttatgatagactgcctttttacctactatatttcatttatctctgaaaaatagaaatttttttcttgactttattatggggcacatgatacttctagtagtattttcatttaaaatatgtctaatttctttgattatgtgtcttttaag

SEQ ID NO: 36325 - DNA, 360 bp, Homo Sapiens
cagtgcccagattcagggctctaggaactttacagaactgtaacattagcatgtcgtggtaagaaatctgtctgatttaaacaaatgatgtaaattttacattttgtaagtaagcactacttcaagtgtgctatctttaatgaagactttaattcttgtttttacacatatgtagaaaacagaagttgagttcttcaaacatttgttatcaaaaatataggatatataagcactgaattggaagatttttttcccccttggataatctagaaaagaatatagctctattctgaaatcccttctcattcaagagttatccaagcaaatagtgttgaccaaggtgttgaatgcaccagtaat

SEQ ID NO: 36326 - DNA, 374 bp, Homo Sapiens
ctactttagtatgactataaagagctataaagtagttgacatccatactcataccactagctagagcttagtcatatgcccacatctaactgcaagagaggctaggaaatgacatttatctgtacggccatgaagtgagaacatggatttagatgtctagctggctgtcattgcttacttgagtgcccccctccctcccaaattcctaagtggttaccaaaaaataaattagctgacacaattatgcttctaatagaaaaagttaatagtgaaacaaagggacttttatttaagaattaacctctatcgtttacctcctttaggcagaattgttacttttgcataccactagtcaactggcaactgaaatctca

SEQ ID NO: 36327 - DNA, 364 bp, Homo Sapiens
ctggcatacgtatgtcataaagtaacatttaaattcctgaactaaaaggaaatgcctgtgtgcttaaaattaggggagatacgaagtgaatgtgtaaatctaactttgaggttcagtaagttaagtagtatagacctagagatcactgctttaccattttactttcaaatgaatgagagcgactgctagtggcagaacgcagaaaaggggaaaaacaagccatgaaatgaagttgctttcctgacctgggtttaggtcatcattttaaaatcaaagatgtgtaggagatgaatcaacttatagacccatattttccttctaaaagtttcccaaagaaatgttatagattttgaataacatgcca

SEQ ID NO: 36328 - DNA, 394 bp, Homo Sapiens
ggtgaaagaattataacacgcgagaacgcttacacgaccgatagtgcagatatgacaacgacacatctttgaagaacggcatatcttctttggataaatggtccaaagaaagtaaatgttttagaaatgagctccttgaaaacagtgccagcatctaacacaggtatactttccacaaaaatggaatgaatgaacattccttgcagtatattaagtatggtaatgattagtgtagaagccatggggctatatagttgtcaatacttatcttatgagttgcattttcaaaactgtgcaagtgaggctatgtctgagcaaatggtagcactctagcctccacagcgcacttacttttatttttgacctttctctcactaatcctaactgccaggta

SEQ ID NO: 36329 - DNA, 381 bp, Homo Sapiens
tccaatggtgataaaagttagatagctattctccagaattcctgtacacaactgctcccactagttgagctatccactttcaagaatcatttatattagtacaatgacctatttaagtacttgtatttttttaaactaataacgtatatatttataatgaatttatcacagtaaaatactatataaatggtaacatattagtctgaaacctgtctatagaagttgaatactttggaatggcacaataaatatgagcagcaaaaaactgtcaaactaattaatcaattataaagattcaaaatgtattaaaaatgtacaattctgcacttacattacttcacaattgtttttaagcactggttccttaaatcattcaaaatg

SEQ ID NO: 36330 - DNA, 457 bp, Homo Sapiens
cgccaaagataacataggtgtcccaatgtacggttatcctggctactacgggcgaagagggctgattgggagccccactgacaataagcaagctcaaggaaccagttcctttccctaacaggcctgagactccccttacccatatgagacacacaaggtgactaggtggcattaacagggttgtcccatcaaaataagcagccctgcctgggacgtgctcataccctgcaggactcttttgccctaacctagattagccaggtggtttggcctagggaaaactcctcacacccctcaggcagcatcagcagaagcaagttggggccccagaagcaacagataaattaagcagactgaaatcgcagcataaagatcctaaggaaaattaaattgtcattggaaccacggcccacaaaagtagaccaggacctgcctcctaacataaacaagatgactc

SEQ ID NO: 36331 - DNA, 452 bp, Homo Sapiens
aagggtatcaacgcggtgccaagcacaatgcgagagtctgtgagaaaccatcagagggcaaaggctgcagaaagatccctaccctttgggcatcttataaaactaatacatggaaataacgataacatacacatgtatctctgcgtctccctatgagacaaaaaagatccaaactaaagagaaacaaagtaatagcctgccttccataaacattcccatataactaaatcccacttacgtggacaaaccaccttgtgtctgtctccttcttcattcaatacacaagataatgcctatccagtgagaaaccctaagctaggattcgtgaaaaggaggtacgaaacaacagtgatgtgagtgaacagatggcaagaaaccatctactatccataacagtcgtaaagattggaaaccaccaagggtaaaaacagatcgaaaaaatacacacacac

SEQ ID NO: 36332 - DNA, 354 bp, Homo Sapiens
agtagtgagcaatagggatctagttaccttcttctgcatatagatatctagtattcccagcaatatttgttaaagagactgtcctttcctcaatgtctgttcctaccacctatgtcacaaataagttcgttgtatatgtatggatttatttctgggttctctattgtgttccattggtctctgtgtcttattttaatgccactgacatgctgtttggctactatagctctagtataatttgaagtcagataatgtgattcttccagttttgttttagctcagaatagctttgactattctgggtcttttgtggctccacataaattttaggatttatttttctattactgtgga

SEQ ID NO: 36333 - DNA, 409 bp, Homo Sapiens
aaggccgagtttgtagggtgagtctagattcttgatataagtgcggggttatgcatggtggagagaataaacataagatgagtgttctagtctatagtagagcatactgacaggctgcttatgattgtggttcgtctaattactggtcatgttgttttagaacactatcaacttcagttttttctctttgtacattaatagtaaatttgtggggagatctgtcaatacactgttcattgtcgcagtttaccctcaagttttaagacccatcgatgagttaagcctgaatcggttgtaacagtgaatactccaaagtggttatattctaacttcatcattgtactgtcattgcatcatatgtatcattgctccctcattgcgtcatatgtatcattgcatatgactgtct

SEQ ID NO: 36334 - DNA, 407 bp, Homo Sapiens
cttgaatgagctgctgtatggatttattcgaatatcggcagaattccattcctcccaaggtggcaaaattagctctactgatgtaattatcattttcctcggtctgaattccctcacacacactcttgtcctacatcattgtatgacatgatagattgacggaccggcttcgtggtcctacacttgtactgatggagagaggccctagactgtgatagctaggtgggggctgcgcatcatgtgggctctggcagatcatggtgacggagtttgagtttcataaggattaaagcaatgcagggctactgtcacttttgcctttttggaatttcctggctgctcatgtcattcattgtgtaccgtgctcgatctccgtatctctgtcttagctctttcctgtgttgaaa

SEQ ID NO: 36335 - DNA, 381 bp, Homo Sapiens
cactagtcagtctctctagagtaactagtgttagtataaatccggtgagaacatgctcactccgcataaggcctgcgtcagataaaaacactgcactgacaattaacagcccaatatctacgatcaagcaacaagtcatcattaccctcatgtcataccatttgtagtgacatgagagggggagaggagtacgtataaatttgtcatccttggtctcgcataaatgtcttccttgctgtcaaatttccttccaaaatctcagaactctaagtagagcccacatagaggtgagcccacttacagcagtatcatccggacgataccctgtctcaagaatggcttgataaatatcagccccttcattttaaatcatctcaagag

SEQ ID NO: 36336 - DNA, 350 bp, Homo Sapiens
ctgttactcgtctctacagtatccccctctgtatccctgagcacctgtgccacggagggttgctcgatagccattattccagaatcttgcgactggtggtggtgtctgtcagacacacacaggtcgccagtgatctctcacacccacctcatgctccagaaccatcgcctttgtgtactgctgtcctagtctcagtacccggtacacacctctcctacgttttgtccatgaggatttacctttcaccctcgactgatccgtgaaagcaccgcttcaagttctctcagcattatggatctgttttcactgttttctataactgacggatgtcaggtgcgcgtttcctgata

SEQ ID NO: 36337 - DNA, 461 bp, Homo Sapiens
actaaaattagagaagaacatgagaaagagacgaaattccagtcccagtttgcagcctgaagaaaatcccttaactttcaaatgtgtgcgtcaatcacagattctgtgtggagacgtgagaaatctgagcagcagtggccctgaaagatccttttaccatgctatagatggaatcagtgtgtcaggcagaaaggtcaggacagaagatctctcgggtctcttttaaatgtgagcttctgggattctccttataaaagagttagattgttgttatgctcaaacaaaattacagagaatccctcaactataagatattaggtatgtacaatggtgtgctgaatggagctggcttgtaccagctcactagagaccactgttaaatttacaggaattttataagccagctgtcaaacacaataacgagagaatgttcaggtcagtggaactcctctgtaaactac

SEQ ID NO: 36338 - DNA, 367 bp, Homo Sapiens
ctcttgtattacattccattattaaattctggccctattcccaattgttagcatctggctgatattaaggtctttgatgtgtcacaatattctcaataaatgagacattctgaactgcctggtgatattttcaaaaagagcaattaaaatgtgtattccctctaatacagctgatagaactgttgtgttaaagcaagttggaaatttgcatgatagtgtggaaaccaatggaggtccaaaatattaatcatatctaaaatatcagaaaatatcaatactagtcttctttatgcatatttttgactttttaagagggcttatgaattcaatgtttcttctgaggcaatccttttaatgtatatacaag

SEQ ID NO: 36339 - DNA, 414 bp, Homo Sapiens
tatatacatttattcctacaagtgaaagtacagtatcaaaaaccattagtgcaacgtcactctgattctttattctagtaacacaccatagggttaattttagctttttcttcatataagtaactccctatttgcacagtgtgaaacttagctccatcacccttcatatatttatatagtctgatcaatttccctgttcataaccaacatgccatctctgttgtcaccttcttctgtgtaggtccccttataactggagttctgattccctgtgctctgcctcccagctgtgtgaaaactctcacgatgcttgtgttctgccgttctagtctacttatctttggcaactccctccccattcctcccactgttcggtgtacagagaaattatttatatatatgtatatacaagag

SEQ ID NO: 36340 - DNA, 389 bp, Homo Sapiens
gacatcattattgatattgactgccaagagcttacaagctgtaccccttatcatcagggcaagctaataagaaagcccaagtgagacatcctttggaacaggtgggaagttcaaaccaagacctggctgaaggggcatataaggaccttcactccagactcagcaacttatcaccataaaaggagagccagtatccttttcctgctttctcaagccattcttgtacctgcatgggaagcctgccctgctctccccaaaaagcctcagtaagtgagtcataaacccttttcgtaccgtcctggtgcacatatggtatcatcagtttccacatcttaaccaaattttgcagtggggggagaagtagtggatccatccgcctctgcggagta

SEQ ID NO: 36341 - DNA, 360 bp, Homo Sapiens
tcttgtatatacatttgagaatctaattggaaaaacaaaactcaaatattaaaatgaaaacaggccgggcgtggtggctcaacaaatgccggtattgcctaagttgaattcagctttaactggcatttgttgagcccctactaatagctcattgtctaggaagtattggtttcctcctgctctataagtaaagaaccagaaactcatttaccaaacattactcactagcaggaaacagattggatatttgcaatttcagtatcacatattcttaattaatgaaatttatgaatgaaatttcctgttgtacatcatctatgataagtatgcagaattttgcgcttaaaacctatgtatata

SEQ ID NO: 36342 - DNA, 357 bp, Homo Sapiens
catctgtatatcatgattatatttctatgtgaatcgtgagaatctatgaaccagagtagtccgctggcctgttttactacataccaatgagtaaaatgtgatcatacagaaatcacaaagttgaaatctataaaatgaaaagatctctgtattataaggtgagagtgccaaggattgaacattcatctttgtcagactttgatgtagaatctcctaaaataatgatgagctaaagcgtctgggagacagcatcagcctgtccaggtgctctcaggtgcaggcatttccaccacattcattcgttattgacacgttcatgcattatcagtctttttcctacccatgtatatacaagag

SEQ ID NO: 36343 - DNA, 357 bp, Homo Sapiens
gacagacagcgtacataacatgagtgtatgcccgtatgttatgttacccgtcgttgactgagaaaatcctgacgccacacagtacttttattttaaaaataaaagtagaaagctcttagtaagggaggctttgtttggcaatgaaattgtttatgtgttaaacattaaactgcattccatggtatttgctgattggcacaactactgccattgaaattgattccctaatcatgatgataatgactgggattagcccagttcaatgggtgcgtgctttccccagggctcacaaaagccttctctagagatccaggcttccgtggtaatgaactaacaaggctgctgtattctctatgg

SEQ ID NO: 36344 - DNA, 435 bp, Homo Sapiens
tatttatgtttgacggtaaagtatctcgaggtccgttagtctatgtttttgttcttatttatcactgtgtatgtctttgggcttctcttcactttgtatggcagattattttgaaaaagtttacccttgtgtttgtctcagctgttttaaaggggatctgccgtctagggagttccccttgaaaatcggacctttgagcagtgacttctgttttgccacctgggagcaacgtgtaaggaagtggacttaagcttctctctccccaggggaaggagcacagtggaaaaatcacaagtgacttctggcctgaaaagcccttaatttacctgcttctacaattactgccctttctgacccaattctttccctgcagatataggcgaggttcaaagaagcagatggtggaggtcaaacaataaatagggtaccgagctc

SEQ ID NO: 36345 - DNA, 453 bp, Homo Sapiens
gctcctgttagtcatttgtagctgagaaaatctgataggacacttatcaaaaaaaagtactttacaagatcactgttaatggctggtaagcatcccgtgatatgcacacctttacatacttttcaagtcttcctctattataggacacttagattctttaaagacgccctgcaccataaataatgctgtgataaacatccttattcataaaatattgtgcacctctctgactgtcccattagacttgctgctaagaccacatgcactttgaaagcttttgagaccttatgatcaaatttccctgccaaacagttgcatttcatgtatatatctgacagtcattcatgaaagaaagcgtctattttttcacgttgttgccacatattagatattatcactatatttctttaacatgtttctcgatgttataggccaaaagggccacctcattgt

SEQ ID NO: 36346 - DNA, 363 bp, Homo Sapiens
tgactcccctcttgtatatacatatagcatatagcctctggaggtcagaggtggccggaaaggggtaaactacctgagcagaggtgaccattcagtgaggaggggcaggatccctgtcaagggaaagcacagggcctgggccaacttgtctgtggcactgctcagatgctacagctgacatccttaacagtgagcctgcgtcctacaggagaggtcacgcgaatcactaaattcaatggtgccggctggaagtaagttccttcccgagtgctcctcctctccccgacctctgcagcttggtaaaggcaacttacggactgctgccaacatgtccctccagccttgtatcataaccttcccctg

SEQ ID NO: 36347 - DNA, 359 bp, Homo Sapiens
ctcttgtattacatctgtaagtgagcaactgacttacctctctctcataattatatttctattgtgaatttggaatactttaaaaaaagtaagggctttattaaatatgcaattaaaggattccaatcctgaaaatcattaatatctggacagaaaatgaagatgctccaaaaagaggcttatatttcatgaccaacagaagtgaagtttactaatgaatatgacatttggtataataccagtggagcttgtaactgagttgggatgtcagatagagaatatcagtgaacacaggtcacctttataatcaagaaatatgcttttaagatagaacaatcaagtagtttgaagttcccaaa

SEQ ID NO: 36348 - DNA, 388 bp, Homo Sapiens
atgttgacacgttggctgaaaacaggccggaagatgagaattagaaggaacgtgtcccacctgcggtcatatttccccaaggacattttccccacttctctcctttcccatcggttccagttttcctaggatgaacgtgtattgatttcatatttaacaaattaaagcaaaagttaaacttccagtgtttttgtaacctacagaatgaatagtcaatgtttaaagaataggacaaatttacagaaaaggatggaatgcaatttaagatgtaaaaaaatgggcttcttctccctcatatactcaaagtgttcaaaacactctgttatactttatattttgaacataaggaaataaagtaaaataattttaaagagtcaaacaataaata

SEQ ID NO: 36349 - DNA, 459 bp, Homo Sapiens
gagtccatttcaataaattcctactgaccctctatcaggtcctctgaaattccatctcaccagttctacctcaaatttattttctatcatttttttcctgtcccagttcatggattcttcaatctcaataggcttgactaggcttttctcttcctctctgtcctacagttctttcttttcattacagaaagtaaaaagtgagagtcactcattagctcaccaaatcccactccaccacacagatatcactgttaatcaaccacattttcccctttaaaaagcccttttaaatctttaaatctgcacttggtgtaataatttcatttgtctccatttggagggctacttcctcttgtggaataaatcattctccctcatcctttcaggattccaaattaacattggccctgggaagtcctgccctgtggaccctgtcaccactgccctcatcaaataata

SEQ ID NO: 36350 - DNA, 532 bp, Homo Sapiens
tcggtcccctcttgtatatacatgcaaaaaggcataaagtgactagttagaaaaagcatgtgaaaaagtaaaatcattattagtatatgtaaaaaaataattttacttgccttgggtaggtgtctaatttttttctttcctttgtgagaacaccgactaaactagaatgaccagaggttcatttccagaatatattattcacgacgttatttatatgtgtgtttgcatatgtggcatgaaatgtcatatatataaaggatatatgtttaaccaaaaggaagaaaaacaccatacctttgttatttagaaatcgactcacaattgcatagtcaaacctaatcattgttgttttgatataaattttcttgctttattagtgagttggctttgaggaaatgtgtatttccacaggtaaaacaagtatgtgttaatttcttgagcaagtaggattccagtatcagaatacattcttaaatgaattattcctaaataacgcatagcacattacttaatcctataaggaacttattat

SEQ ID NO: 36351 - DNA, 437 bp, Homo Sapiens
tatcttagttgacatgggagttttggtaaattttcatgaattaaaacatgaatattcaggttaccacaagatggcgtcagatcatttcaagtaatgccaggtagggggagcctcagttcaataaatctttaaagaggttgaaatatgtgcctttcatagtatggtagttagctattgcaaataaactcctactttcttctactgttcttctatggaaacttgaggctcttggctattcaactccaaaaattatgtaagtgtgaagtatttgagtttataatgtttaagaatttctctgatagcttagtgaagtaatcagaacttgaaaaatttgatcatcatgtctccctggtgtttacattttcaacgtcttttatagtttagttatctttctacaacttatgttgaatttgtaatattcagtcaaacaataaata

SEQ ID NO: 36352 - DNA, 564 bp, Homo Sapiens
cctatttatgttgacctatattttcttttcttttctctctctctttgcttatctgtattttctaatcattctacaatgaacagattacttgagtaataaaaatgtctaagactgataaaacacacaaataaaaccattcaaaaaagacactgaaaacgcacattttatagagttccatttcaacatttctacagtataaaatttaacactaccatttcatgcagttgcactcaactaagtcctttgaaaaccaagctgtaaatttctgataaaagtcaaagctcatgacttaaaatcagaacagccagccatacaggcacttatcttataaaaaggggcagccatctgatgggcaaggtgccagagtattagaaaggacaaggacacaagcttaataagtaaggtgccatatatggatgaaacatatgttctcagttcagctgtggtaagaaaagatgctctgcatctctcttctggtggcaaaaacttccagagcggctgacaggagctatggtacactccgcggtgatagaacgggtttctttcttggtggggttgattggt

SEQ ID NO: 36353 - DNA, 552 bp, Homo Sapiens
gataaggcgcataaagtaactaatgtggttttagtggcatgctatgtattaaggtatgaaatttaaatacacacttcatcaagatttttttgcagttacagtgaattagaaagattcagatattggaactccctccaactcctgtgttagggagaggcaggaattttataattgagattattatagaagagtgtcctgacataactgattgactttagtgatgtgccttgaaagttcaaattcaaggtgtgcacttatttcagtcagcttgtcctgaatgtttaaataagaaatactctttctgggtattctgaataactcgttgtacatttattcctaatagtgagcatttggactaatgatggattactaatgagcatgtaaacgtaccacctgattacattaatatatgatcttccatgacgaggtctgaaatgaacatttctaatatgtatttcttttccccaaatggcactgtggtgtatactgagcgggactgagatgagggtgtttttaagagccactgatttagtcaattatcacaaatcaggc

SEQ ID NO: 36354 - DNA, 380 bp, Homo Sapiens
cctattttagtttgaccatcacaatctggaatacatggacaaagagggaaaatacttcatgtccacgttaactcgtcaattcttctcctggagaacaggccttcaatgtgctctacacgttgagtaatgagagcctgcactgcccaccttccgtctctctacaccttccttacttgcgtggttgacactgcttttctcccgaccaactgttaaaaatgagaattgcaaacatttaaaatgtctataatataagtgttattcacatgatatttgctagttttctttgaatgttctgtatagggttatactagtttcttgaaggaaatgtaaataaaggataggtagatacatggttgaatttctccgtcaaacaataaata

SEQ ID NO: 36355 - DNA, 374 bp, Homo Sapiens
ttgtttgcatatgtttgaccatctgataggacagaatgctttggtgagaaactacggaacagaatcttagcaccaagagtttggagtaaaacaaagttacccagaattaggatttttaccattccttcagaaaatgcataaatgtctctggaagacttctgaagtcttttaaagccagaatcagcaaaggatgaagagaatataaaggggataatgtccttgaaattttctgcctcgtttcccatcaaattaaatctataataatacctcccattgaattttccttcctgaattgaaatttctcaaagtcaagtcccggtcttgcacatttaaggagtgattgtgtgtatgtgtgtgtggtcaaacaataaata

SEQ ID NO: 36356 - DNA, 453 bp, Homo Sapiens
ttcaagagggctggctgacaggatgctgggagagggcatcagcattccacagaggcaggctaacactaaggagatgggcactcagctgcacaactgcgcggcaggtccccgcacctatctccatggggttcacccacagcctggagcctgttaaaaaagcatgcaaagagggcaacaggcaacagaataccttgagatggtacctccagatacatttacttatggttttgttcttcctcaaaatgcctttgttgcttaaaacatctcagaccagtacactgcctagaatgatcccttcaggaactaccaaaaagctgagtagacagggggaagtaagcaccatcaatacttcctgccccaccaaatgctctccagttgcacctacccaggttgattataacaggacagatgacacttgatataacctttctgttagaggtcaaacaataaata

SEQ ID NO: 36357 - DNA, 473 bp, Homo Sapiens
gtcccctcttatatatacatattttcctatagctataaatgtgattctaggttttattctggacctgattttcatctaattcagtttcttttatgcagagattaactggttttatccttattcccctgtggcaaagactcctaaatggtcaacaaactaattttctcttcttcttagacacattgttagtctacatttgttaattccccctgtagttaaatgtagcaaataggacgtgagaaaaaagaatgtgcatctcctccagccaggtcaatgaaaattactcatgtttgtcctccatattcttttctgatagctagataactatgcctagtgtggctcaggaagccacacataagatggcaaaccttccatatgctgggataccttaacaaccctgtagggcagaactccctgccacgaagactgaccttgaacttccttggactattaacaccaggaaagaagcttcc

SEQ ID NO: 36358 - DNA, 452 bp, Homo Sapiens
tatggattatgtacgtacaacggtcaagaatattaacaaacattcatatccaaagttctgactagaaagacaacccaagatagtggcttacaaatgaatcagaggtccgtgatgctcatgtcatcacgcttgattcattccatcactttgggaggccgcattctacgtggcattggatcacgtgctaccgatcattgaaatatgctagaatgtgacttgtggccttaaagataacccacaaatcattacagttcattgtgataagcataatgtggcacataggatcttgtcaggctcatgtgtccttctccccaaggaggtataaaactgttttttacttgatactgaagattctaagatagttgtatgactttcaattaattatttcacttaatgtggtaacatgcattcttttcttgaaaagccaccattgaattgatgtatatacaaga

SEQ ID NO: 36359 - DNA, 464 bp, Homo Sapiens
cccctgattagtcatttgtggcacacagaggctggaattgacatccaaaatgtgaaacgtcatttgagcccttgccattttctttagtcatacaagatgggctttatgttttccaaagcaaagatgtctgttctagttttcccaaaacaagttcatggaaagctgtctgggacctgtgagtgtgctgataatccctaatccaaaggcatacctttgttcctacctatcaccccagttcccctgcaagtaggaaccatgttatagatcaagatgtataactacggaccttagactagatgacttaaaataacaaaccagtacatgcagccccaccttctcaagctatttcccaaggattagggatgctgctttggttttaatgttatgatttctgccagatacagtagctgtacacttgggagcatgatgctttttaaagttgctattattttttaaaaattaga

SEQ ID NO: 36360 - DNA, 419 bp, Homo Sapiens
aaaaatgtactaaattatatgatgcacaatgtccacatgaatattctaggtaacactaaattaaaatattcaatttatacttcagaaaagtaaaacaactttctttctctaagtaactttgctatctttaaaaatcagctttaatctgtatcactgttcaaacatgggtcataattattagtggatcataattaacatatcataactaactttctattatgaattggaattaaaaaaccttacaaagtaccaaagtgtttaatacatggtaatagcattgttccatgaaggattttttttctttcatgaagcctttgctttagaaacatgcagatagggacgaggtagaaatgagatatagctagggacagacatacagatgtgtgtgcacatgctcatctggggggtcaaacaataaa

SEQ ID NO: 36361 - DNA, 380 bp, Homo Sapiens
tttctagtcattgtcaatgtatcatcctaggactttctaggggatttgaatcaattggcacatgaatattttgtattcagctactgccatgctctaaccagtatcttgtcccattcttccatattttttaattactacgaacaatagatttctaatagcctagttaatgcaatgttttactcagcaatggatgtggcgtgagatattttgaaattttaaatcatttataaagagaagatttttatgtttatcagagatgggcacagattttttaaaagatggacaaacaggactagaacctagagactggatagaattattcacatttttgacaatttgtagaggtttcttccagtattattgaaacaaatgactagaaa

SEQ ID NO: 36362 - DNA, 362 bp, Homo Sapiens
tgatagaccgacaacatacgttaggacttacgtattattaatgcaaatactgaaataatatatctgtagctttatttctctgctctagggagtataccacagcaaaatttaatagctagccatccatgaagatcataaaaaatagcttttctaattctataattcaccagaactgtacatttgtcatttttaggaacctatggatttttgtttccaagtttacagaatttgatgctcgaaaactgcataagttatacaagatggctcatacgaaaaggtctcacgaagaagaggtcaagtacaaattcagtcctaattcatacaaacaaataccaattccacagaaaaatctcttaatatcg

SEQ ID NO: 36363 - DNA, 540 bp, Homo Sapiens
ttgacctgttctggaagtttcaggactaaagtagtttgctgtggagaaagccaattgggatttcaagtgcgatatttcaaaggacagtattaaataccttgaagtggctttttattatatgcaagacaaagtctagaatcgacccacagttctctttaaaatatcctattgtactaatctgcagaatggaacctctgctttaccacttctgggcttttgttcatgttttttctgccttggtatgtaattcctctttatggtaattgtgcaaacatcaggagattttatatagttttagtttcagtactgttactgattggatgtgaaaacttaggtaggtcttaaaactatttcagacctgtttcttcatctgtaaagtaagagatcccttggagctgtaaaattccaattacttgttttcccagtttatgatgctattgtttcttgctcactaatgataaaatgtttaaatttgctttctaaaattaaggtaatacatgtgaatagttaaaaatgttaattgattatacaaggcttaca

SEQ ID NO: 36364 - DNA, 384 bp, Homo Sapiens
cgggaacttaataaaaggaggaagatgggacagagatagggcttagggggtggaaagtgggttcaagaatttcatgacattccatgagaaggtgtttaaggtatatgtgtcttgggaagatttaattatggatgttcttggaacatttgggttgcagtactccaagttggggttctttcagtggttcctgtgggaatgtaggtaaattacctttaggggtacaggaacagtactagcccttacatttactagaaaattttaagttagacatctaacaaacttgaagaatcttttttgagcattgtatgtttaatatgtaaaaggttgtggagttgattagaaaaatcttccatccttcttcagtgatgggggtttcacccatgt

SEQ ID NO: 36365 - DNA, 361 bp, Homo Sapiens
gccaggtcatataagcgtggggctatgtcaggatgcagagtgcatcaagaaatccaggaatgacgcaatgtgcccaggcatgatacatttcagtgaacaggtgaagggacaaccttgacctggcatcgatgtttacaatgtgtaggatggatatctggtagcgtcctaggactgaggacacatgaccaccttcatgtcatcagcccttgggagctcaatcccaataatcaggatgctccccaaacatcttaggcctgtccttcagaaatctacaaccggcaactgtcacctgcttgttctcttcatttacacttccagcttgtaactatcccctgggcatgacaagggctagaggtcagta

SEQ ID NO: 36366 - DNA, 391 bp, Homo Sapiens
agtcatataagcgaactgcagtaaaataaggtatgcctgtatattttttaaatgcacttgagcctttctaacccctttgagaattaagaagcagttgcacaccctctgcaatctaaaatggatcccacatctatgcacacacatgcaggactaggttcatgtattgtataacccacacagtcaagtcctgcaagattcaataaaaacctgtagtcaggttcattctatttcagatgcagaaattgtttgtaatgaatgaaaaatgaacactattagccacgtgcttttataattcactagataacatatgaaaccactaatgttgtccactaacgatgactaccatcatgaccaacacaacaaaaccagaaacagtatttcctcctttttt

SEQ ID NO: 36367 - DNA, 372 bp, Homo Sapiens
agtcatataagcggacagctaaggagcggctaatgtcaacattatatagagaaacgcaacgtcctccttcttaatcattcttttcccctcaccctccaggcaagtagagtgagccagtttatatggaattctgtaagaactaactttctagtttagggccctttatattttaatatgagaaacgatagtggtccagagaaaaaaacgcctgaacaaacatacacacgaatgtggatgtactgctctgtgtgggtatgttatgttgggaaaacgggtaggggcaggagagtgacatgagccattactaacccttaacatagtgttttgagttatatcctttcaatctctaacagtagtaaataatgcaggagc

SEQ ID NO: 36368 - DNA, 370 bp, Homo Sapiens
aacgtctataagcggcagagaggggaaatgaccaggagaatgtatctgattgggccttggaggataagtaggagttgctggatggaggagagaaacttaggcaaagagaaaagcaataaaaatgcaaggaaagggtgcttggaaagggtggcttgtccagaggctgaagcaggtacactggggccagatcaaaagcaaactcattcctgcaggcaggtcctcacctcctccaagagcctcagcagggccttcgtctgggatctgtttcccctgccctacattcagcaggacacaggggttgatggagcttctgcaagaccaccttggcagggggtctggcctgctccttgcacacggatacctggagcaa

SEQ ID NO: 36369 - DNA, 411 bp, Homo Sapiens
ctattagcgacaggagggtgacctaagggcagaggcacaaggaatgaagtctctcccaagggccgaatatctgttgcatagtagcctggttcctctagaagtgccagtcccttaccagacaccattctgttacgtcagagtgtttacaggactatgtgccatccctttggtgaaaaatctgaattgacatagttcacaaaaatagacaactgactctattcttctggcttcatgtaagttaagttatagtatctcatattgagcttaccgagtttgaatatagcaacaaattgattttgtttaatgacatgctgttacgattatggaatacctagccaaaggctttccagtgcattcagaacatctcattgatcccatgattgctaaaacctgctcattaatatatggacc

SEQ ID NO: 36370 - DNA, 450 bp, Homo Sapiens
atgagccggcccacgtatataagcgcaaataagggatgtgatttggaaggtgaataatcatttccaaagcaaatgttgtcccatctgaatcacatagcccatcctattggccatcaaattcttctcaaccttctttccctcttctgcactctaacaaagagactacggtggagtttatagaagcttctacaacgtggttatgttgtatatagatgtgtatgtatgactatgaatatgtctcccccctatctagttttagaaaccggtattcctaagttatggctttattttcttcactattgatgttcttggaagagtaaaattgctagttcattctcattagtcactgttttttcatttctctttcaattctctgaagctcttctgaacgtcaaaaacatgagggctccattttagtatccctagttgttgattgcctgtgtctcgtga

SEQ ID NO: 36371 - DNA, 381 bp, Homo Sapiens
catccccttcagtatcccaacgtaggaaatgtggactcgtcccactcagccccacacctccgagtcgcgccagcattctgccacctgaaatgggttctaatctaggaggtttttagccactattgggtctcatgtttccagacacgtggttaatccatgcctcctgcagcagcgggggacttttctggtcaagacgacagatggtttcagttcccagattcctgtttccccaagtccaatcatgctcaaagcccatcctcccgcttccaccatgtccacacccacctggtctggtgtttgcacatcattgaaaatgactcactattatacacttaaatagactttattgaaaatgtaattttaggcgggagacaatgagta

SEQ ID NO: 36372 - DNA, 435 bp, Homo Sapiens
caggtgtttatctctcggcagcagccaattaccaccttgcactcatgcagggcccagagtgcagatgggcttctccaggtaatcctgctccaccctcaacccttggcatgtcctgcatggctatgttaccatggggcctctctcaggccctgtcccactccacatcattctcatgagcatccagtggaggactgtaggaagaaactgagggtacaggttacccttgtgtctggggctcccagtaaactgccactctagataatgctcagccattaaagatttcattaagatactagtcatttttctccttatctacttttttgcgggcaactacctattcctctgtggtctggtcaaaacatgaaacagttcatgtgtttcatccatcaaaggttatgtggttctagttacctccagaaaccagtttgcttggtg

SEQ ID NO: 36373 - DNA, 423 bp, Homo Sapiens
agaagacagcaagaaaaacaatgataacacccaaaaataatccttggcttattaaaatattggcataataaaatggggacagggaaattttcataaaataaagagaaatatcaaggaaataaagagcatgctagaaagcaaggttttaatttattcttttaatttattattttccagctttattgaggtgtaattgacaaataattgtatctattcaaggtgtacaacttgatgatttgatatatgtgtactgtgtaatgattaccacaatcaatcaacatatccatcacctcagatagttacccttttgtgtgtgtgtggtgaggacacttaagatctgctctctcagctgactccggaggcttacggttggggaggatctctttgagaccggggggatttaggctgcagttagccatggtt

SEQ ID NO: 36374 - DNA, 402 bp, Homo Sapiens
aaatgtgtgctatactgatatttgctctttaatatggactttaaatcagcctaactccaaccaaaaccagacagaggtaaagagaccagagctcccttatttccaccgtgtaaggcacacatatcatctttcttctgagccatttcagagtaagccacatagattatgcccttggcttcttatgcttagtgtttatttccaaagaactagtatatggtcttccatagtgcagctataaattctggcaatttaacactgatttaattccaacattccagtttggccaattgagtaaaaaatgtcctttagaccatgtgattgctctgcacaggatgcagttcaggatcacgtagtacatttagctgtcacatctctttagtctccttcatcctggaacagttt

SEQ ID NO: 36375 - DNA, 468 bp, Homo Sapiens
tcccaaggatgagaaactgaaagtgttggaaagcatctctcaaatctattaacaagaaagtcaaatgaactcaactaccagcttagaagagtccagctaaagaaataggaaaggaagaaaaggcatgaagtgtagcactaaaaacacagctctcaattgcactaagtaaaaaagaaaagcagggtagggagggaaacatgattagctgatataatgtagaaccgccagactgaaattagagcttcatgggcttggtatagctgaatcttactaattcatcaatggggtttggtaacttctgcaaaccccgtcaatggcttccagaagtttgagaaacagttctagaccacacaagcgcccccatccttcaagtccttcaggtgttggaggcgtgtgtgtgagggctgcgcagtaaaacaacatctgggaaggtctgtgaagctctgtactgactctcttcttcaattc

SEQ ID NO: 36376 - DNA, 372 bp, Homo Sapiens
gggtgtctagaggaccccctcccaacgataaggatatggaacacgaccatgcaacttcagagtcctagtacttaaggcattcagtctttgctgcctataaccacgactccacagtaagaaccagggtcagagagaaaaggaggtgacccaggaggatgatccatcatagtcttgtggaaggtaggggcctgggaatgaacccagtccaaagggagtaaaactcctagtccaaactgtgcccccaaagcttctgcatttgaacgaaggcctgaaacagacatttacaatagagtgagccagtttggactgttgaagaggctctgagtagggagttagctaccctgaagaataaggccagaaatttgccagttt

SEQ ID NO: 36377 - DNA, 383 bp, Homo Sapiens
tctagatgatccccctcccaacggataaggaattgactgacatgtcgcgaaccaaccgatgttggacgcaattctcccttcagagagtatcaagaaacctagacgtgtgatgactggtgagagcgggctgactgcaatggagtgtgcattacatttggacaacaattgttcttcagtcactagtggaactgctcaatcgggccattgtccaaaatgacccccaatgagtgtgagttcattgatgacacattaccgtgaatgcgcatggtaaagccatcaaagaattggttgaccagggttaccaagttttgcgctacatggtagcgcccgaagtctggcttgggggaaaaatctcttattacgatatctcagtccttgggagt

SEQ ID NO: 36378 - DNA, 398 bp, Homo Sapiens
gaatgtgaaattaatatatctgagacaggtttcagtaaatttagaaagtttattttgccgatgttgagggcacacacccatcacacagcctcaggaggtcctgacaacatgtgcccaaggtggctggggcacagcttggttttagacattttagggagacatgagacatgagacatcaatcaatatatgtaagataaacattggttctgtctggaaaggtgggacaactcaagcagggagggggcttccaagtcacaggtaagtgagagacaaatgattgcattcttttgagtttccgattagtctttccaaaggagacaatcagatatgcatttatctcattgtgcataaggatgactttgcatagaatgaaaggcaggtttgccaataagcagttt

SEQ ID NO: 36379 - DNA, 388 bp, Homo Sapiens
tcccaagggatgagaaactgttatttaatagctcttattcttcctctccacaaaggaggtggctgaaagtcacaaaccaaacatttcaaatacccagaactcaaggatctgtttgaaaggaaattaagttttaaaaactctcccagaatatgagagttttgctccatcaaatgcttgtggctactcattccaatcactctactatacaaactaacacaacacttgaaatgggctaactctagaaagtgtaaattccctgtttctgagagaaggagtggggagtctggatcatcagtatccaaaatgagtaaacaagaggtcccttgagatgtggagaaaatattaaaaacactatatttagtttgggcacatccttctgagccaattc

SEQ ID NO: 36380 - DNA, 365 bp, Homo Sapiens
tcccaagaatgaggaattgtaaacaactcaccctaatgcaacgtagtaatacaatggctaacaagctttctgaatatatacatagaggaagaataagccaattgtacatcagatatgagcatctgtatcctccctaaacttgaatcctccatgatgcctcttgaagtaacccaaacagatgtgcatcagcaaagcaagctgacgatcaacagctgtaactgtattatacccaagaaccaacagtacattccacgttgatgtaagtcagcctgtagcagatctaatgaagcttagctattcagtggggtatcagtttgaattagggattgcccttgaaaaaatatcagcagcagtgtagtcagttt

SEQ ID NO: 36381 - DNA, 464 bp, Homo Sapiens
atatgacctgactctagacttaaatatttaaagattaacattatagatattaaaaactatcagagcacaacatatacatattactgtgtgtacatgtacccatgtaatgtctttcccttctttggacactcccctgcttttgggaagggagtacttccatcaattctttcaaagaaggtgtgaaaaaatcagagaaggttcaaaattgttttaatttaccactcacactaaatagatggtttgactgatttagaattatgagttcaaaatgtaatttcccacaactccacaactactgcattctatcttctatcatttattttttatcaataataggactgttgtccaatctcatccttgggctcccaaggaatgaaaaatagtcaaacatttagtattccatcccctcctgaaccctgtggtctgacagaaatgtaccgaatgtcacagcaccacaataggat

SEQ ID NO: 36382 - DNA, 356 bp, Homo Sapiens
cgacctagaggatcccctcccaagaatgaggaagtgtgtagtaattaaagatggctgatgtgtggaaactgataggggtcatcatttgtgggggtcatcttttcttccctggattattatagtaaattcctaactcttctcatatttccaatcatgcttttaggccagattccaaagtccttaatgtcatctaaagttcctctttggtgtcaagtcttgccactcccaaaatgacttcttttctggcagaagcaaaccatttgcattgcagttccctttatacacctgcttctttcacctctgtgttaacttaaacctgcttttatttattgcctggaacaatttctcatccttgg

SEQ ID NO: 36383 - DNA, 494 bp, Homo Sapiens
atccccgtcccaaggatgaggaagtgaacactgctagcatggcctataaaatcaagaaccaagttaattacttctaagatacaatgaaggtacaggcgttggatgaggatgctcccattctatataggagaactggacaaaacaaaggggctaaaggccccatgcaagtccagaatccagcagggtagtcattgaattttaaagctccaaaataatctcctttgaccctgtgtctcacattcaggtcacactggtgcaagaagtaggctctcatggtcttgggcagctctgcccctgtgcctttgcagggtacagccccattcaaagctgctttcataggctgccatagagtgtctgcagctattccagatgtacaatgcaagctgttggttgatctaccattctgggatttggagaatagtggctctcttctcacagctccactaggcagtgcctcagtggggactgtgtgtgaaggctctgacctcacattt

SEQ ID NO: 36384 - DNA, 370 bp, Homo Sapiens
gaattgtatgagggtgctcagatatcaggaacccagaagacggaaggagtgggagggaagggcccaagcgggaaagacaagcccctcaacctctaagtcctgaggaaggccagggatgtgggcggtgacaggtatttcaaggtgggagttgaaggcactctggccagatgggtcaggcctccatcagggcaggatcaggagaacagagaaggcctggagcagctgtcaggtgggtttgggaatccctctgggatcacaaaatgtgtgctccactgtgggtccccagcatgagctcctagcaggcgttctccactttaacttcacagagcactttctgtgcggggcaaagaggaagaggcattgttgcagt

SEQ ID NO: 36385 - DNA, 556 bp, Homo Sapiens
aggaatcgtatgtaataggtctattcatccttttagtcacatgccactactcaatgcaaagatgagagatgtatctttcatttcagttggccatgacatcaattagaaattagtggtgtgtttggaggaaaattccatagggaagacagctggcagtctctgcatagatttcttcattgttctttaaatctgccgtattgtacaatcattttaacaattaatgaaataaccttgatattaggaggctgtaaaaggaacttgacccacctgactttgtactttttgaaatgcatttctattttataacttttatccatcaccgcgccctgtttcttgtgatatttcatgggtctgacctcaaacgtaaggagaatattaatcaaatgatcttgattattcagttggcaaatattaaaggcagatgtaacatagattgaaaaaaatgaatttttatatgaacaaatggagactgagttatttaactagatctttgctgatgtgatgtaaaacaaagaaaacagagataaaaacaatgtttaatatacaatttaattat

SEQ ID NO: 36386 - DNA, 384 bp, Homo Sapiens
aacacagacataagaaaggtaactagtcgttattttacatttttaagatggatgttttaagggatcacaaaggtggaaacagccagtgaactgtgtcagatcttgaaagacagccagaaatctgcagtgtatcagggaatcccatctcaatagcaagcaaagaggtctctctaagtggaaaacctcccaactgttcttccaatatcatttcagtgttagcctgaaaaagaaggcatgaactggaagcagaaaacaatgttggtcacaagtcttatttggaagccaactattaatggtaaccagaattttctaaagcatgtgggatttctaacagcttcaagagccacaagacacacctaataatgtacaaatctaaccagggag

SEQ ID NO: 36387 - DNA, 504 bp, Homo Sapiens
ttcagtcacatttagttcagtttttctggttttattaagaaaaatatttttattggaataattttgtattgggttgagatagtatgatgaattcactttcacttgcgattatttaaaatgagataatgtgacaaattgagaaaagatgaatgtataaaaataggcactcaatggtccttttaagtctctagtgacaagactgtaagaattcaaatgttgattcaaagaaaagtacattttactaagtgcctattatcaggcataatgccagatgctttccatgtatttaatactttaaaatatgtgttaatttcatgtgctaaatccaaagggtcttatgaaaattgtgcaatctgaacttataataaataaccattgacctaagaataaaattgtaagacaaaagtataatgaaacttatctttacagaagtaggaaaatctttccatttgtcctgtgtgagcacaactttgtaatccttaataacacacatgcagatattca

SEQ ID NO: 36388 - DNA, 586 bp, Homo Sapiens
ttcaggcactttagttaaaaagagcatctgtcttcttcagcattttaatacagcatctgatattaggatgctaagttactatgagaaggtcagaatacaagggatttagctcattgccgaaatgcaggaacaaattcattaacaaatgaatttgagctaaattttcagagtaaatttatattttgtaaaaactaatagtttgtcctcaaaacagtaacctgcagcaaaagtagtaacaattctgtaacacgtatatctaaatactcattacagtctctcccatatctctatttctagtttcatttactctttaggcagaaaataggttcaagggtctagtaaaggaggcaaatgggcagaaaacaacctcttgtttgctatcccactgcacttgaaatggacctctataattcactaccatttataagtgtctcgcatatcaacatcacattaggtaatttactgcctccaattcctggtccataactattccatcctgaaaagtcataatacaatgttattggaacaatctattcatatggtaaatgacatggtttctaagtatttttttaagccactagggagg

SEQ ID NO: 36389 - DNA, 616 bp, Homo Sapiens
ctgacgatgagtctagaggatcccttcagcacataagtgaagtggcacctttgtgtcctgggaggtttaggattgcactggaggatgtgggagggcacaattaggaccagatgactttggaaggtcttccttcacctcagatagtaggactttaaattctgaagattcctgctgtgccataaatcctgcttcactcttcccaccaccctccttcttgagggaatctccctactcacctcggcacttaagtgggaaatgcaaccatgtaactccctccaatgttggctgattggaccctggagttgtcctctgacccagtgcggtccagctttttggtggctggaactgtaattctggctcagaaaactgagctgcatcaatgagattcttcagttcatgttggaaaacagagtcactgagagtgagccatgttaacagaaatcaaaaaaatgcgtctgtggcaggagggcgaggcggaagccttccaggagtccacatgatgaagcaggaccaatgttgacagggagagggtgctgttgagaggataatgcattcctccacaaggagaggcaccaccctgacagaattagggtgcggtggaggggctgatagagtg

SEQ ID NO: 36390 - DNA, 398 bp, Homo Sapiens
gaaaaagcctatggtaacagtacctctttatttcttggatcgttattaaaagactggatctttcacgatggagtgtttttgaaactgtctcatggggcataagaagatccagaaatttgaaaatacatgccatctcaatgtgagattattttattttgctacaactgccattgagacatttgtgagatcattttatgtactacagctgctactcaaacacttgtctacataaaggaaaaacatcagagcacccacaagcgctcaaggccagcattccaccccacggaccagccttgatccactgggtagaccaagtgtacacgctgcaaagtcaacgactctattttattgttgtaaaatgaaatgtctctggctctactcctgactaaatgtgctga

SEQ ID NO: 36391 - DNA, 430 bp, Homo Sapiens
ttcagacacattagtcctgagctttagttctcatctgtaaagcaggcagccatccttaacctgcctacagactcggtggaccacctgacatttgagatcattctaatatgagaactatgctctggtattggcaggatatagatttaagtagcagatggacatttgcatactcttgcatttgattcttaaattatccatctcggtgtttaaatgtatagaattgcctgtgctcttcccttcgctagctcccagtgtcctccatgtttctcccacgggcctcccagctggttggactcctggatgcctgccctgcgtgacccagagagaagctgagggtcagcagtcggcatcctgattcccagcagagagtgacaagcgcacctttctggaaaggccgagccacttcttaaaaagtatattatggggaggc

SEQ ID NO: 36392 - DNA, 447 bp, Homo Sapiens
tccaggacgtatagtacagaagtaccattgatactgtatatgattgatgagatctttactgaattaacatgatagttttttggtaatcagtaaataatctcatttagcatttgatctttcactggatggccttaaactaggttagctcccttatactttagccaatgatataaataatttacttaattggacttaggttgaggttgaggcttgaatttcccaggtttggcctgaggcttaaatttcttagagtatcccctgatgtactttcctgtgtgtacatagaacaaatgcatattcctatacattatgatatttagataaaataatgtttttcatgattgatttaaaccatggataactacagtcaaatcataatggaatataatcatataattgtgaagtgaaaaatagtgatcctaatctattatttactaaatgtgctga

SEQ ID NO: 36393 - DNA, 375 bp, Homo Sapiens
tttcgcctggcacattttaagggccacattgagggtcactattacctaattgctatcattatcactactactatcacaataactaaaggagaaagggaaataattttagtgttactgtttaatactcagaaggctctatgctcttagtgactgaggtcatttaccaagcaaggatatgagctatcttcaatgaaataaaatcggtcaacagtaaaacagcatataaattaaaaataatgtaaatgagagccataaggtaagcctcaactctgcctttttaactcatttaatttgtgccttacagcagactcacattctcataccttaaaattaatggaatcataaatcatagagtattcttttctgtgtatcttg

SEQ ID NO: 36394 - DNA, 545 bp, Homo Sapiens
gagtttcgtttacatgtcctcataggacccatttcctaacattttaatcattttagtcactctcctttggacgctatccaacccctgcttgctgtgcttgggttcaggtccagaagagctcttagtgtggtgataaagttctgaatggggcttcaagttgtggaagggctgtcatgggaccctcctgctccttgtttttacatcctcatgttatgtacctttaaaaataactcactacgttgctggttcatgctttgcctagatctcagattttctcttttccttagataaattcagtttcccccatctctcgagtggttagtttttactaccctccggattaaacttgtttctgtaatctttacgatagtgtcagcaattggccactatcaacaggaattgaaaaatgccaatccaaaatgcaattgctttaatacatatttgtgatcatatggatacctgatcttaaacacatatataccttgtttattacatttattttgaatattctctggccccatttggtattgtactctaactaaatg

SEQ ID NO: 36395 - DNA, 395 bp, Homo Sapiens
ttaaaagacaagcacagaagggattgaggcccacagaaagaaggaaccccatgtggtgctcatttgagttgaacaaagggacctgcactgatgaatatatatgggactggtcccgtacctaagttcccatccagaagagaagtcagaggaaaccagagaacttcagaagagcttggtgagcgccaacgggctcacacacacagggctgtgggagcctacagcccacagtccgcagctctgagaaacacattgtgttccgcctgtggggcagtgtcctcacagcaatccaggtgtgttgaaggagaacgctagcagcagctgaaataaccaaaacaggtggtaatggctgtctgggccatacagcgccattggcaagtagatgttccgcaaggctc

SEQ ID NO: 36396 - DNA, 493 bp, Homo Sapiens
ttcagcacattagtaccctgatgtccttgccgtgtctgaatcctggctcaggaaggcaccaaaaattcagagatttccatacccaactataacaccttccgtcaagatagaactgccaaagggggcggagtcgcagtctactgcagagatagcctgcaaagtaatgtcatactttccaggtccatacccaaacagtttgaactactaattttgaaaattactctctccagaaacaagtctctcactgttgccgcctgctaccgacccccgtcagctcccagctgtgcccaggacaccatttgtgaattgatcgccccccatctagcttcagagtttgtcctgttaggtgacctaaactgggatatgcttaacaccccggcagtcctacaatctaagctggatgccctcaatctcacgcaaatcatcaaggaacccaccaggtacaaccctaactctgtaaacaagggcaccctcatagacgtcatcctgacca

SEQ ID NO: 36397 - DNA, 557 bp, Homo Sapiens
tcgcccgtagcataaccaaacgttcctggttttggagctggagcctttctactgctgtctggagccctgttctgcaaagggaccctggccctgctcccagtgctcgctctctcagccaaggaactgccctctccctctggtgttgggagatgctcacatctggtctctccgaaaccgctggctgagcctggctggtcccttgcccccaccggcccctgccccggctatgcatctcctcccggtcacgtcggacagctacagggacaaagacgggcattcgacataggttgatgctacttggtcctgagggggcagcgctcggaggaggggctgcacgaggacacgtccccatggccacgcccctcaccaggagcccgcaaccgtgttggagagggctgcgcactttgtcagcacaacctgactcgacactctcagaggctcaggtgtctaggggctgcggcgcgacaggacagggcttgggtggaatcggggtgtcggccttcacttctctcagccgtgctggccttcccccgcctgcctcccggccagcgctctct

SEQ ID NO: 36398 - DNA, 609 bp, Homo Sapiens
ctgacaaagtaaggtagtaggagggagggcctggaggaagtaacacaagtttcctttctaccacagccaataagaaacagcatggtgatcacgcttcatctctcaaccaaaggaatcttgttcagggcacttttaggtaatatatagatgttgtcagttcatctattgtaatacaccagaaaaagaaaaccataatatggatgtcttgaattttgccatatgcctctttaagcagtttttacttgggtccattcctccttccctatattttcttaggcttattgggaggggaggtcagggggaggagcaatcactcaagagatccttgtctccttcctctgtaattcctattttaaagctccattcaataattacagtaattctgccacgtggatttttcaactgacttatgaagcatctatccagaaagaaagcagcagggcagaagattatgatcaggaacagtctgaacacactcgagacccataatagcaaataggtaagtggcttacaggtcactcctgcaaggcagacataaccaaccacaaacagtcctttggggtccacgtggggtcccagaatccttccaaaggcaacactcccaccagt

SEQ ID NO: 36399 - DNA, 651 bp, Homo Sapiens
tctatgttatgtactatgtagcattctaaacctacccataagagggagactgcgtatggtggcgaggccagaaacactttatagcttttaaggagatcagctgatactctggctttaaggctcttgtgagctttagagagtttgaatcagcttactcagaggctgtgacaagatcacctttctgagactgcttggttgaggacagattctggaacatagttaattctccagggaaaacactactctgtaaggacctgtctgggtaaccaactgtctttccctaggcgatacccctagtaactcctaacctccaactacacaccattgtaaatttaaaatttctacaaggtagcagctccagcatgtacacagcagacagctaactgttgatgaacactggctaggcattgtttcaagcactatgtagattatcttatgtaatccttataccaagggaggtgctatcggtattcctatgttaccattataaaaactgaggttagtcgagattacggatagagctctatccttaatctgaagagattcactgaagcgcgggtacaaggcgggagtaactatgactctcttgaggtagccaaatgctcgtcatctaatcaggacgcgcatgatggatgacgagatccactgtcc

SEQ ID NO: 36400 - DNA, 460 bp, Homo Sapiens
ccttaatctgaaatcaaagtttaggcagcatttctttgatgttaacaaagccattaaaaatgaacatatttcagtatattacatgtggtctctgtgaggacaattgctttaaaaagtctgtactattctagacaaattaatggatattttggcatactatgtacagtattaatgttgtgatgaggataaagtctcattaaaaattgaaaataaatattatgcacttgagttattttcccttcaatcttcatccaagatgaaaaagaataaaacaaggtttgagcccgtcttttaattaactgggctagtcatatctaatttcctgatgtttttcttttacagctgtttttaaggctagcttataggtgctaaaatattttaatcaatgaaaaacttccatttaaaaagtcacatgatttgaagagaggagaaagactaaaaagttgagagattcaggggt

SEQ ID NO: 36401 - DNA, 382 bp, Homo Sapiens
ctctatccttaatctatgaagaaaatggagtttaatttttttaatacaaaaaaactcaatgaagttatacttacgttaaatgggtggttattttaggtcagtggttttaaaactcaacaatgaaactgttttcaaaaagagttgttatacagaacagaaaaaagcagtcacaattttaaaaaagatatgaagacccagattctcactaactcattcagctcccttcatactccctccccacagccacctcagctcctgaggcaggttcccagggctccaaggaacatacttttaaaaaatcagtattttgaatacataataagtgatgtaacttaaaagtatggtgagaaagtcccattgcagattaaggatagaggggtac

SEQ ID NO: 36402 - DNA, 470 bp, Homo Sapiens
ctgggatcggctcacaaagattctactttataactgaatataacacagtttatggcaggcatatgtatactatacatgagtcaacacgtgggttagatgtaggccactgataggtacctaagttacaaaataattctttaatgagtaaaactactggagaggtgaacacttttacagtgtctctggctttcaaaaataagattggcatgatagctaaagcaggggttctaattgcataacttaattaacaccgagacttactctgaaaaggatctgcaaaatgttactactatggagatcctatgcgaagcctcttacatgagaaagatcggccaagaatgtagcgtccactctattaaaatttattttagccactaaagattcctattaggtaaagtaaggagaacaaacattttagcaggatgtgcagaacaaagcccctcccatcccacaatgagattacggataga

SEQ ID NO: 36403 - DNA, 428 bp, Homo Sapiens
ctctatccttatctaaaataaaaaacacacacctgtgtaatcattagaatgaatttctatctattcatggttttaagtaactcagtccctcaaactgatagcatgccttattttaatcttacctcagatttggctgagccaaattttctagtttaaactgcctaacaattctttacataagttgcaaatctatgagctgaaatgaagaaacctctcagcaaggtcttcatgtttattattgagtgtagagtatgttcatcaatgctactaaccaaaaaccacagaacatgacatacagaaaatccactggttcttgataagtttatgggtataactgccacgcaaatctaaacacactgaacgcattaaaccctaagtaatgatctttaatcatctgccccacctgagattaaggatagaggggtacc

SEQ ID NO: 36404 - DNA, 426 bp, Homo Sapiens
ctctatccttatctgcaactgtttgtggtgaatttgtcttccttgctaaattcaaggatcattgttcaacagccttctaaccaccataatgctgaatacacagaaggtacacatttcttattctaagcctcaatattttcaattcttacatcaatacgaggcccgagtttttaaaaataactcttccaaatgattgtttctcatgcattgggaggcaaagatgttagaatttttttagagaaaatgccagtgtaaataaactgtgtaaaaatatttcacacaagcctatcaatattacataaatgcatgctcctgagcacgattgcctagtctaataataacgtttcctcctacttagcaagatgtaaaggtaacagccatataggatgggagaaaagctatctagctatgagattaaggatagag

SEQ ID NO: 36405 - DNA, 539 bp, Homo Sapiens
ccctagccgtatcgaaacaaaaatcaaagatgtggcatgaaattttcatatatattaactagcgtcatgaggatctcagtgtgcatatctaagtgcgatatgcgacagttgccagccatttcccacagatctggagttgttgggcagggtccacctgaagggctgtatttgcataaaacagaggagtttcttgggaagcataaaaggtcttactggagctaatgggagagctctgatctaagacctaattggccatatgggaacaagggttacctgccaatccactcaggtctgttactgacagagaaggtgtgctcacacaattggttagagagagggatcggtaataatactcagggctccccgggagggacactgggtgccaatggatatgacaacactgtctttctcagacaagtgcctgaatgttaggaacacagctgctgaatcaagagccactgaatgaaactctctaccatcaagttcctatagaaaaccgaaaggctatcagtgaaatgctgctttgtgatctgagatta

SEQ ID NO: 36406 - DNA, 364 bp, Homo Sapiens
ctacatgctcgaaagtacttaccacccaactctgtagcagtgcacagtggacataaggtggtgttggcagtctcagtcctatttaatgatggccagagatacctcctggtcagccaaagccctggctgactgccaggcagttgcgcagtagctcttcctgtagtgaaactgttcttcttatcattgttgactaaactctgttggaagttgtctcactagccatatgagccacagctgtctctatcctgaatagcttaatgagccataggttgctgactcctggactgcaggaaccttttagttgcctctcgccacagttgaatttccttctggacctccatctctcttcatcacagttgtcgag

SEQ ID NO: 36407 - DNA, 617 bp, Homo Sapiens
cgggtctagaggagtccccatacatgctcgacagtgctcaaataagaagctatatttcatgaggttacatatgatattaaagcaatcctttttattttcagaaagacatttatattaatatatattgtgtgaaatgaaggcatttattgaaattagatcccatagtttttaaggtatcatgccttagagaggcgctggcagaaggactgaagagtgagtgtcgcatgtctttctgctgctgtgcttctgcttcctaagaattgctgtacttgtattcattaggtatgtagttagttttctctttaattattttaaatttaatgttttgaaataagtaaaattgttctcttggttcaaaattcagacaataagaaacgatatacaaagggaattttccttcctacctctatctccctaccgtgttttcttctctagagacagacattaccagtttcttgtgtattcttccagagagattttatatgtattatacaccagcaaaatgtctatgcccaccctctctaatacataattactacgcatatgctgtgcattttgcatgttttcacttatgtcttggcgtacactgcatatgaatgcacaggaactttctcctt

SEQ ID NO: 36408 - DNA, 394 bp, Homo Sapiens
taaaaaaactcaacagaggaggtaacaattggacattttagtgtctaatttgaagatgtatgccatacttgttgatagaagaaagtaaggcacagaaaacttgagtaccttatttttaaaacatgttaacacatttgcatgaattagtgcatttatttttaattttttgtaatgtacatagctggatcctcagggaatgggatctagaacaagtttcagctgaaggacaaggagttgggaaatgtcagggaacaggctcttgaatgaggcaggactaagcagtgtagactgtggggacagctgtgaagtcctggatgccaggggagtggcataactcaggaagtaaaggctgggaacctgaaaacaaactgttcatgtcacatgttttctggtc

SEQ ID NO: 36409 - DNA, 382 bp, Homo Sapiens
gtcgacgacgggaagttattatgtaattgtctagatataaaagaaatttagaagatggagttacaaatgctggaactcttctttacccttttgttagcaagaaaaatctacagacagtaataagtagctacatcgttttgtgaaagtgatactattatgggatttttcaattggaaaagctctcctgtactttcatatcaaaatgccgttaagtgattatgtgaccattcccgcagaaatatatagttactatgaatgcaaaataagtcaggaggctaatttgttcatattcaaatttgtcctttgctttctaattctacaaaggcagtttacctttcagtgtccgcaagatgtacggatatggtcgagcatgtagggctac

SEQ ID NO: 36410 - DNA, 501 bp, Homo Sapiens
gtggcttcagactgtcctacgctctaactgacaactggctccagactgtcctacgctctaactcgacaagtggcttcagactgtcctacgctctaactgacaactggcttcagactgtcttacgctctaactgacaactggcttcagactgtcctatgctctaacttgctctaactcactctgacaactggcttcagagtgccctctagtcagggaaggcccctccgccaggtctgtctgcccgcgtcacataagcagtctgggcagaggagtgctccgaaattccaatttcttactcgatacccgattcctcattcattcactaatgtttttagtgaaggaagaaattctgcttttgccctcaagtgctatctacagcttcctagctgccattgccacgtttgaggctccaactagacagataacctgggaaatgggaagagattaagaaagtacatagtgagggcatgaacggagagacggttatagctttgacactgc

SEQ ID NO: 36411 - DNA, 366 bp, Homo Sapiens
ctacatgctcgaaactagcaagctgaagccttctttaacttgcaggaactcaatcctctatgcttcctctcctcctcccaccgtgacaacaaggcatatttcactaactagatcacgaagaatccaatgatcaaaagattttagttcaagttccagctctgtcccttgaataggagtgcaacctgggccacggtttcttgaaatataaaatggaagtaacaatgctcacagcatcaattaagcctatgatgcgctcatgagggagagcagtgttttatgagcagtacaggcttgcacggatgaagtatgattatgatcattactgcttgcagtcagagtggcggctctgagcctgcttcccctgac

SEQ ID NO: 36412 - DNA, 602 bp, Homo Sapiens
tagatgctccgacaacgacacacgaacacacacacatatcattgaatccttgaagttagggaggtaagatgttattattctcatgtcaaaaagctagcaagtggcagagacaggaaaggaacctgcatctctctcacaaggaaagcacactactagacaagaaatggcgagaaaagaatgtagtctcaatgcatctaaatcccagtggtaccttctgggaatgagaatgcatagaaaccaacagaccaaacaaaataccaaaatctacgctactgccattctttgctgctttgaagcaagtctcttttggccagagttctcttacttcctaggcagtcaaattaagtagcgtacaagtcagaacatgacagatttactttaaagctatcaacaattctatactttggagtacttctagtcactattatcacagatgcttcctttccaaggatggcagaaatctctgtgatagaaagaatataaataacctgtattttacttcagattgccttggtccttttcaaaataggagaaggcatacaacaagttatattagcgcagctctttccactggctctataaatgcataaagtagcaatttc

SEQ ID NO: 36413 - DNA, 686 bp, Homo Sapiens
cctagagtgctcgacaaaagcagtgagatgaccaaggaacagtgggaatggataacaaaaaatacggagctctatccacagatgacctgttactttgatcctatttccctacatagtccaaggatctaaaatgagacctatcttgtctgccaaatcttccttacgtgtcatgagttgttccaaggtgactgttgtggaagataatgacaacccacacccctgagtacagtggaggtttaggaggtttggatctccacgtttaagtactgccaagtgtgtcctcctgtgtttcattgctacgtatctcactgtgttagaaatgggatcgaagatactttttcacacttgcttgtgaaagagaggcctttctccttgagctggtaagaagggtatgtatctaatttcaggttattaatgtaactttttggtgatgggtatccattctcccttctgacattttcctgagttcctctgacttgagggagcctagccaatgtcatgctacttcctctcatagaagctttgccagcttctgtggggtctgagccgcatcacatggggtagtgctggatacgaccttgatcagtttgactcttacctgtcagacattcctgtttgtgtccctattgagttcattttcatgcccgagtttgggatgatcccggtgaggttcttgctctacctat

SEQ ID NO: 36414 - DNA, 473 bp, Homo Sapiens
gaataaaaccaaaaacgacaataatacatggggctgggggaaggaaatgtcctccagggacagctgagagctaaggtctggggaaatgcaagaagtgatcagagacagaatgattataattcttcaaaaagaatgttgcagactattggaataaaggcagaagaggttaaatggatgtcaagaccactacctttaggcacagaacattctactaagatttccatttttgtgtaaggttaattttaatccctaggatttcaaaattctctctttcaggatcctgctcaccctatcttcactattgcatacctgaaacttcaaatcacctctctctataaaaatttaagggtggagaccacagtcattgcttcaaaggcatcaaagtagaacatatctagaagctaactgcatttcaaccaaaatattgatgaaaatttattacaaactagtctctctccagacccctgctttta

SEQ ID NO: 36415 - DNA, 635 bp, Homo Sapiens
gagtcttatagaaattttccctgatgacttgagcgactaaatcaagcttgcattcagaaaaagtccatctggagaggtcatgataaaagacttcaaaactcaaaaacttgtactttgtcaattatatcactttgtccacattttaaataatatgtgacaaaccaatcatggaactttagtgatagctagacagtttaaataatggagtccaattactatggctagtagagtcagcaaatctatgatagtcaaatagctgtaagaagagtctgggttgctgattatgctactcatttcctccaatggcttttaagaactaaatatctggcgttttctcattactacacactctttgctggcatcggttccttatttggctatcacaaggtcatgttctctcaaagtaggtaaaataggaaaatgtacagttcagaaagcttattaacctctaaatcacagctctaatgatctaaagagggatgtgaaatgagaagaaaagcagaaaagggaaagagctggtttaaggttaagctagtcctgttatttatgtatgcaaatgacacgacaataataaaagactttaaacctgctgatcatctcacaagtaaattaatgatccacagaacatctgtggg

SEQ ID NO: 36416 - DNA, 362 bp, Homo Sapiens
tactgacttcatgactcttgtggttagcctggctaggtctgttagtgctctggcggagtataagggaggcttcttagaacgactctatgcaatcaatatagatgagggtctgaaatccatgaaataagtaaataaacataattcatacctaggagtggttctgactgctgtttctgcaaacagaaaaatgctctccctgtctcggaagacacaatttaaaaactttttgacggtcacaataatgaaatatgattatcaaagtttaacaatttagtaggttgggttaaagtatcagaatggacacagctgaatacacagccagtaacctaaaagagaatgtcaagaaaatctcccagaagagt

SEQ ID NO: 36417 - DNA, 356 bp, Homo Sapiens
atagagttgaatcaataatgtaaaactgagttttcatcataggtttattttagcgcactgcagtcttttgagatgttggttacaaataagttgttttggcttaaacaacaactcttaattttttgtaatgtaataaagcattatttaaatttgtaaaaatatcacgtatacgcactggttctaacttaaattctaatttgaagtgttattaaaagtcattcatagagggaagtaagggtttcgtgtattgctttttgggtgggcacacagttgtgaatttcctcaagtgattcttattaatatttgatagatttagtgttagtgaagaatgctgtatttcattttacaaaatcatc

SEQ ID NO: 36418 - DNA, 382 bp, Homo Sapiens
cccacgtgtagtgagttagtccagccggctccactttactcccctacttgtatgcctagactaacctaccctgtcctttgaccttgtattcactgctcttgacctgttgccagttaatacaatcttactccaacaagccaccagggactagttggtttaactggctccttgccccattggctagttggacagataattctctaagcagtttgtcttcctcactgtctacaccccacgcttatgctgcatcatgccttcatttatgtctttcttctatatctttgtcctttttgacctctccaaatcccagctcaggttccactctgtcctctgagaaattggccctcctcattgtaccactactaaccttgggtaccgagct

SEQ ID NO: 36419 - DNA, 457 bp, Homo Sapiens
gatagatctagaaggatcccacgatgtagtatagtcattaaagtaattacttttactcttggagctgatttggcttgggaagctagttaaagccacaaaattgtttacctggactagattaagatgatgacttatgacttgtcttcactagcttgaagtaaaccagacgtcctcatcatttggcttttattcttgtcctaataagtctgtgtgtgggatggctaattggctcatcatagtgttaaccttctgtacatgtctgttaatatcaacatcaaacagaagcatcgggggaaagaacattaaaggcaggtacagcggaagagactgaagattgctctgcaccagacaagcaacaggaatagaaaatgcaccagaacgcaaagccagccatggcgcatggctcagaatactagaaattaggcttttccccagtctaactgtctctactggtgtg

SEQ ID NO: 36420 - DNA, 367 bp, Homo Sapiens
tcaaaatgaagagggtaggtgggtcacagaccttgcctattacacatcttttaatagcaaacaaaatttaaagtgtgtctctaagtgatgagatgaatgtagacttcagatctggttgtaagtatatggataaacatttattataacattttcactgtttctgatctttctaagattactgtgtatatgttggtcagccacatcagatcccttctggactatcactgtattctggaagcacttcacttgtttttataggacccaaggttttagttagccagtcttaatcattgtagaatgagccaagccatttccttaagcaaagccaatgagtgagaatagcatttgtatactaccgtgtagacca

SEQ ID NO: 36421 - DNA, 466 bp, Homo Sapiens
agagcaagcattggaaccaaattctcacgactacccagaccccattctggggaacctgctattactacctgctaacgataatactctcagtaatggagatagtttactgcatttggttttctgtcttatgcaaaggttattaaattcttaattactaaaatgatagatttttcagttctttattaccagcttgaatgggcaatgccgctaaagattttaaggcagatttaagtagttttcaatttgagtaatttttcttgctttggcttttcacaggtaatggtaactcgggatttgaaggacagagtcgctatgtaccatcctctggaatgtccgccaaggaactctgtgaaaatgatgacctagcaaccagttgggttcttgatccctattaggttttcaaacacacaaaatgaatactaggtaattttcagtctttatcctgaatggaacagatgattatgtt

SEQ ID NO: 36422 - DNA, 494 bp, Homo Sapiens
tcctttcacacagctgtgtgcgagcagtagtgctttcaggaaagatttaagagagttctaaccagaagcgcctgtgacttaattaccctctccagctcagctcctcatgtataatggcagttagggttaatatctactcacaggggcattgagagcaatcagtgagcgcacacatccagactgagacggcacttagctgaagtgtgctcccagccagcagaagcaactcagcatgcaaggctgcctggatggcagtctacctatcttctagatataggagaatttattgccaattaattacagaacgtgtcagtcaagttctaaggagcatttagagacccattaaagaacagtataaaaatgtgtacaccttccttactcagacttcttcagtaaaccaagaaagtggtaattctttcagggctacggcaatgattagtcatgttaataagtgagttaacacttactaagagtttgtagtggggaagtcattc

SEQ ID NO: 36423 - DNA, 384 bp, Homo Sapiens
ggaactcctttcaccattctgacttacagtatggaaacactggtttaatctgttcccttccatggtatagatctagaaaaaatgacagtaattaaaatcatgcccaaacaaaacacactgattaatgaccaagtcatgactagaatccacattcatgataaagggcctctctgcactgaacactctgaggcaggagttgaactgccttttcctttcctcttctttcctcttctcctccattcgctgaatcccacaatgtgtcagataaaagtagtgaccagaagacaagatccaatccatggaaaagtggagaagtggagaatcagagaaatctgtggtcacagacatgacacgggacggagtgactgcaaacacgtgggcaga

SEQ ID NO: 36424 - DNA, 402 bp, Homo Sapiens
aaacatagactcaccatgcccacatgcccaccacccttgtgcacctgcctctcctgagcagcgttggttctgctgaagagttcctgccatgaaaatgtatgaacatatgtcctcagcgccgcggtcaaaagggaattcaatcaagaatctggtgatgcatttgcaaattaaaattctgtaccataatgagcagagccattcaaactaataattacataaactcccgttacgggtggcccggtaattacaacaggtacttttagcaaatttaaaaagcaacttaggtttccattatcaccatgaagaataccaagggcagctgtatccttgcactgttaggtggagacacccccttaagaatgttcctggacatagtaaaaagggtgcagaaatccctaacag

SEQ ID NO: 36425 - DNA, 473 bp, Homo Sapiens
ctccgtcttcctgtgcctgtgcagtgttggtgaaactcaggagtgaagagaagatgtgaagagacacgcttgggaggaactcttctcacctgaggacacctgcccaggtgtgtcacacctactcttatggtcagctactcgtatggtcagccaggttcaggcccacacacaccagtgctgggttcctggtgcctgcttatctctctggagccagggaggctccgacctggaagcctggacccccgtctgtgtttatctcatagataccattccatattcccaggtatatgcttgtaatgttattcatgtcacacatacatgtcatgtcattgaaccaaatgcaatttgctgttaatgtaatactgctcgtgacgtggcctacttggatgtctgatatgagcttagaagcctaacaggaagttcacctgtaaaattggaccctccctattcccttgtttccacaataacctagt

SEQ ID NO: 36426 - DNA, 375 bp, Homo Sapiens
ggtctgcgttctagaggatcccggaacttcctttcaacctgcacgtcttccaaatgggggacacagcttcaagagaagacagtaaaacccacgcgcacataaagtttacagaaatgtgtgctgagtgatcctcactgcccatgaagaggtccacgctcaaatatggctaatttggggaaaataaaacagagagtgtgcaacattgctgtgcagatttgtgtattgtattcctagcatgggagttacatagaaataaaagaggtaagtagtttaagaaaaatcccagttgcatgcatcctggggactgtgaaccaaagaatggcctgagcaactctaggactcttttttgccatgaagagaacgatatttaaattg

SEQ ID NO: 36427 - DNA, 426 bp, Homo Sapiens
aggaactcttcaccattttatcatagtcgtatcaagtatcctatttactctgttaatttcttgtgcacatatgagtctatcataccagctattcaacatatatgattatcttccccaataggctgtgaatgtcttgaagctacccacagggtcctattaatctttgtgttaccaatttccatccaaaaatgggcaaatagtagttagtattcaaacattgaatggtatgcaggttttagatgttcataatgatgttattccaacatggtgctgcatcacattattaatgattattttaaaaagaaatcgattattcaatacctaaatgagttccataagtagaaaatggtatagtagttgaaaacttggtttaaaaatttcaaggaaagggtgatatttgaactttatggtacaagatttgactaa

SEQ ID NO: 36428 - DNA, 353 bp, Homo Sapiens
tgagccactgcaccaggccaattttctgtgttttcaataattaattttaggcaagtcaaaccaaacacatcgcagagtcccttccctgttggtgtgggtgtttctcagcatttatgttttagtcaaatattacagcttttagtaaaaatttatatacggtttgaagaaaaatgaagcatagaaagcagacaaggaaggctatttctctcattttgtcaccttcataatgtgggttgctaaaaataacctacttgtcaaatcatttggtactactgcgagaagtgctaatgtaagacatgttttctgaaaataactgtgatgaggcgtcttggattaagggcttgggtacagaa

SEQ ID NO: 36429 - DNA, 368 bp, Homo Sapiens
gatatcatctatgaacaaaaataatagaaaaagtgacaaagtgaaagggttgagattttaagtaggtcggttaggaaagtcactgagtaggtaattgaatgtgaaagtgtacagacaattttgtaaaggcgtacaaagaaaacggggcaggagttggagggagaagtagagccaaaatgtgtgtttgtttttagaaagggaaaataacaacatttgcagactaatgtgaatgattatctgtagaaaatatagaaccgatgatgcaggagaagggaggataattgttagagtaagatctttgagtaggtataaggaaatacactgtaaactggagcagagctggccttggataaaagatggacaatcaa

SEQ ID NO: 36430 - DNA, 396 bp, Homo Sapiens
ctgtgtcgtttaaggatcagttggcttcatggtgcacttcacatccttatctatcagctgtgggttggcatctgggagtgcactacccactccttttgagatgctctccttgctataaggggtcagccagactgttggacaggtaagggtccctacatcctgtgttcatgccctctgtctccagaaatcctgcctactggaaaattatagagaaggaaccggccactcaataaaggtgttgggacaattgagaagtttatagatgacaaaaagttaggtctccccaggtatactaatgttctacaggtgaaaaatacaactttaaaacaaacagaagacaagacagaatggttcgtgatctcaggataggggatggaactcattaagaaaaaaagg

SEQ ID NO: 36431 - DNA, 368 bp, Homo Sapiens
aggggtcctgccccctgccccctcccccacatagtttagatctgtgtcttctttgcatcctgaacagtgggtgtactcttcatctggagcaaaggagctgctgtgaggcagtttcatttcctctgaggtgattggtaggttggtatattgttaggaccatcccttgagacactgaaagatttcttcctcattatgagagacttttaattttaaaaaaatggatttggttgaggttctctgaagtggacagattaggagattacaagactcctttatatgatttgactctgatagcttagttagtgtttgtcaatgaaaactcttctccttaggccactgactgctctcaactgattctcaacacactt

SEQ ID NO: 36432 - DNA, 407 bp, Homo Sapiens
agccgggccagtaacatctatgagtacatttccttttttcttccccacggaaactcaacctatccctgcactttcccctttttttgagaatacacttcagagtcacagtaacaacactactttaaagacaaagcaaagatacatattttagaataaagaaggcaaaacaactatttgcaaacacccaagttgaagatacttctttactgcagcttaaggttttactcaaatactatacgtttaaaaatgatttatgataaaatgttattacccttaaatgtgagctctagagtagtgagtttgatcatgacttctgagggggaaatagggatgtatgatgtacctataaaactagctatgaagcaagccaagcttctagcaaagaaataaatcagcatattcctggt

SEQ ID NO: 36433 - DNA, 408 bp, Homo Sapiens
agaagaaagagtcataacggagggtaggaattggaaaactctataataagtctaagccaggcagcatagaaagatgagagatttacaacatcatttcactgacaaatgacagcatgagtcaacgcaatggattttgtaaaagtgcatagtggcctctggattttataatgtggtctatgtactttgagagggtacagtgaagcaattttccagaaatcagtgaaagcatacatctggaagagcttagggtttaggcacatttaaattctgtcctaaagctatttgtgcacagatacaaaacataggattgccttatgtgcactgtgtgcctgtggttaataggatcactctaggcacatatttcaagtatgttttaagacatgtaagcaagtatttttaaaaattccc

SEQ ID NO: 36434 - DNA, 424 bp, Homo Sapiens
gtgtatcatctatggtgggaagcttcccagacaatgaatgtggacaaagccttggagctccaagactagaacgagtccatcatcacttctatcacattctatggggcaaagcaaatcacaaggccaagcgcagagtcagtgcggaagggtcttaccaaatagcatagacactcagagatgtgaaaaatcagggacaagcaaccatagtgatggagcctgaatacaaactccagagacctcactcctagaggtcttactccacagtcatctcccaagcaaatctttaattagtatctatgtcaagttccacctagcctggcactgtgaaagagcaaggtcctgctgttaaggagtttacggcctagataaggagaggagacacccaccatgaaagtttggtaacaagaaaggtaaggcaaatgta

SEQ ID NO: 36435 - DNA, 387 bp, Homo Sapiens
tggagtattatctctctgtgcctggcttacttaacataatgtcttctaagagtcatacatgtgctgagaataacagaagttttgttttttaatggccaaatagtattccacggggtatatataccacattttatctgttcatttgctgatagacacaggtggattccaatcttgggtactgtgaatagtgctggaacgagcatggcaggtgcagatgtctccatatatggattttcttttggatatatacccagtagtgggactgctgaatcatatggtagttctagtttttagtttgttcaggaacctccatactcttctccataacggttgtacaagtctacattcccactaacagtgtttaaacgttcctttgcctctgcattc

SEQ ID NO: 36436 - DNA, 358 bp, Homo Sapiens
cgctaggatcagctcagaaagaataggctcagtagagaggagcatatttctttgtatctagcaacagagtctatcgaaattgtcgaatgatgaccatgctcaccagcgtatctggcacagagttcagaaaggaattactcttggtcccttatatcagaccgggctacatacagcaatgattatactaactaatcccatggacggtatgtgctccattgagctagttctgctccatttctggcttggaaaagtaacagtgtgtataaaatgttctttaaactatgtaataagtaacagtgttaaaaaagagtttaagctggacccggtggtgggagcctgcagtctagctagctactgt

SEQ ID NO: 36437 - DNA, 397 bp, Homo Sapiens
gatgatggtgggtggtagcgcgctctcatctgtggggggtcatcccgttttctgcgtcagtgaaaatgacaccctatcattgcacttcaagcacaaagtgctactttgtctcatttttggagttataaaaccatgtggattaatcccaaccaggtggtggggagccaaagctaagctgtgtctttcacctctgacccgcgcgattagtttgtggaagaacgctctccaaacccataggaagttcacagacagcttggattcctcagagggtcttcggtatcgattgtgtagcagaaaaagcaagcatgcctctgggtctttcctctcttctccatagtcttttttatgtctaactggtgttgggttgctttacctctccacccatagttaaagaaag

SEQ ID NO: 36438 - DNA, 446 bp, Homo Sapiens
gtgctaggtacatcagtaaagtcgaagatgaaaaaccaaagacagagaaattagtaatctcagcagaaacagattatcctttaaagaacaattatactgataacggaattttcaacataaacaatagaaactagactatagtgcagaaaataaccattaacctagacctccattaaaaatattctctaagaatgaaagtgaaataaaaaaattttcagaaaatcaacatccaatacacagatatgattgtttagctctaatgttacacatcatttgagctaaacaatcatatctattcataacaacttgagggctatgcaacgtaattatacatgtgaggtgagtatcaataggggggtgcagagactttacagggcaaatgtacaaaggcagaaagtgggcacttcagggtgaacacgcctgatggaacataggtgtttatcttc

SEQ ID NO: 36439 - DNA, 404 bp, Homo Sapiens
gtggcgattatccagataggggcagagtcttctaaacggcttccctcctttggagtcggctgcgcctgcttgccataacccagtcttgagaaccggggctcaccttccatagctcccctctccgcagtcagttgcaggttgtggccacttcgtgccctatctctcttctgtggtgtcccttgaatttcctcctttttacttcccctggcaactcctccgtatgtcgctgtcccagcctctcaagtgattctcacatcttcagttttatcctctctagactatctccctattattttccctaaaacacaaccttgatcatgctcatgctcggtcctaaattgtcaacggtttgcaggtgctaccaaaaacaggtctaaatgtcttagatcaaccagtgtcaccaa

SEQ ID NO: 36440 - DNA, 394 bp, Homo Sapiens
atccagatctatgctaacaaagatgctaattgaccgcattcctaagatgaatgaattcaccacagagggcccttgaagcagcaagtgtgtttcagctggcactacgacatagacatctccaggacgaaagggacttcagggtcctctagtctagtacccatttgcattaaatcccttcgatgaccttcctccaactagtcatctagtccaccattttccaggagagcttacaccatcagttcctgtggcttacaaacagcttcccaggctttgtgcaagacactggtatccagaaaattaacagcagctagctcagccttaaggcactcacattatagagaatttttagaaagtcttcacaaatctaccttcgtgttacctctccctatagctt

SEQ ID NO: 36441 - DNA, 397 bp, Homo Sapiens
tatggaccagcctgagtggccagtgacaggagctgacctctgacccccaggctgggaggcagtccacgtcaaactcttacagcgcgacccttttagcacgcatagtaactcggggcatcgccagctgaagctcattaaagctgtctctttggtgcgagggccattaacctcactgctcaaaacccacgcctccccttccccgcctctcccagcccaattaatgccctgcatcctccctcccttccaagcaccctcacccacacctcagagccagcctggaggtggcagggcagccctcttcattcaaagactacaaagaccaagtgtcaagaagcccagtgtcctggggagccgctggtgctggcaacagagtagggagccccttcagccccatggt

SEQ ID NO: 36442 - DNA, 364 bp, Homo Sapiens
actctagaggactccccaattgtatgacatgagtctttataaaacacatcaaagccataatgccattaggggttaaaagaggtaggtcaattctaactgagtgtgatttgggaggacttctttgagagggtatatttgagctaagctttagaatatgagtatggtctggataaggacttcttaacttgaagtccatggacctttaggtgaagtctgtgaatttgaatgggaaaaaaattacatctctattttcaccaatctctagctgacatttagtatttccttcaggtactaaggtagactacatgcacactagtattagcagaaccagtgatttttgtcaccagtacaaatcccagatatt

SEQ ID NO: 36443 - DNA, 389 bp, Homo Sapiens
ccccgccgctgtgacatgaggctacaggatctaatatttccagtgctcttgagtttagagtacacattaatcagaaagtacctccaccaaggatctttatggacctaccatcataatcagatgtgtgatgtatggagtgactgatagagattgcctaacgagctaccgatctcaggcttcgagatcgtcgtcgtttctactacctgggtggcaaccagatgcagtgatgaagaggctatgtaaagatattcagaagatttgaaggacagggttggtaatgtgtgctatatctgcaaggaataaaaagaagtcaaagacaactcctaggtttttaggctgcacagctgtttagatcgttagacagtggaatcaaaacacacattcatgtg

SEQ ID NO: 36444 - DNA, 412 bp, Homo Sapiens
tcttagaggatcccatgtatacatgagtttgcgtatagaattagcaatactgacagttaagtgttcgttagtggttgtcctaatttcttcagcgtttcacaaaaggctttttgtatataagtccactatctatttaataggccctctactggtttagtcacctttctcctgatctggttccttgtctaaccatccagagtaactagatctttgcatagacgcattagttatgtgctgacaataggagcctgaaagttcccctatctagcttgtggttatagctcttaaagcaagatctctgtgatagctaccataataaaggcatactctttataaggctgttccatcttaccatgcctctaggtatgttctccaaagtgttagacgcaaggtttttatgccatttttgttt

SEQ ID NO: 36445 - DNA, 405 bp, Homo Sapiens
ggatccccatgtagcatggaaggggtagaggagcacatgtgtcatgcacttccattcctgactggggaaggggctgtacggtatatactattcttcaggggcatggtgtgatagacaggcaagctacatcacaagtgaaatgatgtgtggttaccctttttcagtcgttttcacgtgctccaggagactctaaaatctaacgtggtggctggctcagtactacatgtgattgggaatgggccctggcctcaggctgcctgctccttagctcccacctggaccacccacagctgctcatcagaccctgcctatcccgtcccacctctcttggtcccagattcctcctatgcacaggcgtcatgggaatggcatgagggttaataacacaatacactcgaagagcac

SEQ ID NO: 36446 - DNA, 464 bp, Homo Sapiens
aagaaagtcctcatattaaaataagcatttccatatgcactttctagaagagtgtagcatccatctaccatccatcccaggaatgtttgtatcttgctcatagtattagcaaaaacttgtgatgggtgataaaaatgcacttatctatttattggaaaagtgtagagttattgacttatattctcaagtgggactccagctatcaatcaggacgtcctctgcatcccggttcaccggcgtagacttgttggtgtgatatgctgcaaacattccagggttgtttgcttcctgccacacgtggcaattcttaaaactagtttgaggtgttaggataagcacacccgacaaacacctgctgaagtgtaagcttgctcatcagggagaatactctgattgatgtggactttctaggatagcagagcccaagtggctttgtgcaattgatagtagtcatgtgtatgtta

SEQ ID NO: 36447 - DNA, 392 bp, Homo Sapiens
aatcgagctcgcccatctttcgctgacttacttatcacattgtaaatatattgttctctgaactatgcatcgtttggttaaaaccttacttagcatttacataactacattcccaaaggagtctgtcattttccattatttctatccctttcatcatgtgatctctgttctaggtcacttgttatttggctaaaaccccttcttgaattttctcagaggagttaagtgggtattatatccttgaaatttttgtatagttgtaacatgtttcccctcataggggagaaatatcttcaagggaaatagggatttgggattgtgaaatccccaatctgtaaatactcttctaccatctcctagtttccagtgttgtgaattagaattctgattcc

SEQ ID NO: 36448 - DNA, 383 bp, Homo Sapiens
ggcaccatcttgtcgctgactactggcattgtaactctgtgtatctattcctaatacaaaattacagagctactgcttaaaaggaaataaggtattgattatatctaaaacaaggtatttaaaaaccgataaaacattgacctaagcacaacaggataagaagctaccctctgcactgtctgattaggttgagaaaataggtctttccacacctcttgctaaattagtaagagacgacagcgagctcagagggaactttgggccctggatgttagtaacagggaaacagggagaaacaaaatcaccacagtgacatttggttgccaaagatgcaatattatgaaaatgaacaatgttgagggtctcagaagtgctttttcttg

SEQ ID NO: 36449 - DNA, 382 bp, Homo Sapiens
ccaaattagtgacttagagctcttctagcaataatgtttaaagagaagcttcttagagctctgtatgctgggggattcatgattattaccaacgttttgatttcatgaaggtgttctcaaatttaaagcacattttcagtaagaacaaaaatatttaatgtttttatcttagacttgatacatttgcatattactatggaagttattcaccttgtccctgtttttctttaagatattttaaaatcatagttatactacagtccttttttaaatgtatcctgatacattgtaaaatattttaatttcattgtggaaaataattgttggataaggagatatttttcactgttaactttttagcccatgcattttcataatttat

SEQ ID NO: 36450 - DNA, 400 bp, Homo Sapiens
ggtatatgctgacatcggacgcccatagtctcatgttgcttgtgatctggtagaaggtttctttgcctgtataaagctgcctgtcagtacggctctgagtcatacttttttctgtcttacgaaagacttcaaacctatgagtacccttactttctgctacttagtactctcacctctttaacttttgaacttgttacagtctcacttgtttggggaggagcacacgcataccttcattggatagttactatttcagtcatgaaagtttcttctttcaaggagatcagaatctcctgggggagaggtagataaagataatcacagttacatataaattctgtgataggtgtatttatactctgctttaggaataatagctcctttaacttaggagatggag

SEQ ID NO: 36451 - DNA, 440 bp, Homo Sapiens
atttcacggttgatagacatttacactgtttccatggttgttttgcatgggtcaagtgtttctgtaggaagcagaaattgctgggtcagaagatcatttgtaattgtgatacagtaaagctggatagccttccagagggagcgtatcgatttacctttccatgagcatgtaggagaacacgtgggaaactattaaaacgtgaatttttacaaatccaataggtgaaaaattgcattctaatgtactttttaatttgcattttcttgccgtgggtgagtagtaactgtctttatacacttaagcctggaccatcaattaaaaatttctggtttcaaaagtagcagtccctgatcattgtagaaactttgaaaaattcaggaaagtattgaagtgaattacctgtcttaccatgcagagattgaacataccgcatacacaat

SEQ ID NO: 36452 - DNA, 391 bp, Homo Sapiens
tcactcatgcagaggagtgagaactaaaaatgacaggagtggctacctgggctatgaacataattgtttttcatttttatagcaacccggtaagtaggtatgttatccttatttagtgtggaaaaattgaacctaaaggatttacggtcagctacatagccaatgtgtgagggccaaaattgcacttaacttcaaaataggtctttacaccatttaaaaatcaaactaaattggatcaagtgtagataacagtagctacagggaagcatgaggtgggtgagaattagccactctccaacgtagtccctgccaggatataatgaaagcaagtttcagactaaattctccgcacacatacttttaaactgtatttattagcaaggaggcccaa

SEQ ID NO: 36453 - DNA, 428 bp, Homo Sapiens
gaaggagaaaggttgtcactaatattggtgctttttgagctcaaggtctttggaaagtgctccagtgggcagcccacttcatccctgcaataccttctgcaaaggtgtgacaaactttacaccctgccattaactcaattcttagggtttctcttctcaacctggacttcccaattttggctctcataatcactgctttcgctacatctcctgggaatcatagaacttaattggccagtctggcttctttgtaaacactaccctctgtaagtaagttaaaggagctagtccttgaggatcactgactactggaaaagagacgttcacttggttttctgtattcaaaagaatgttgaaagttgtcttttaagaggggaaaaacattttacccttttggcactcaaaaataataacataggattttaaca

SEQ ID NO: 36454 - DNA, 402 bp, Homo Sapiens
ggattcactggttgataccataaacctggggttatggacttaaggtagtctgtgaactcttccttctctccctgataaattttggagtggttgtgtaagtgcatttatttatttttgtaacttacatacagaagaacatatgaaatttgtaaattataaagtaaaaactcttgtaactcatgctcaagtcaagaaataggatatagtcagttccttagaaatggattcccatccctcctagacttagcctcctctctcccctagatgtaaccatttttttaacctttgtggttattatttccttttcattctgtacagttttaccatacacatatgcatctctataaaatattgtttagttttacctttttaagatcatttaagtggaattgtcctgtattt

SEQ ID NO: 36455 - DNA, 473 bp, Homo Sapiens
tgatagctgtgaagcgcgctctataagtgtcattgaccttagaatccacaaagctctggggctttggagacttagaactttattttgctagatttaaagtgtactcttctcttaacgtagaattcatgtaaaactacatcataagacacacctatcaacccagcaggctaatttattcaagaatcaactgacaggcagaccagaaattttttgtcagtttggtaagtgtgaaagtaaagccaaattattattatttaagaactattacatttattcttaatagaaaagtagtatggttattttttaaaaatccaatcccaatatgtgcgagtcctttctcattccaccttatgagataacaaatgttagcagcttagtctgtatatattcttcccaagtgtctgtaattgcaataagctccattgctctattgctttatttttctgtagttctctagttatgttttgcactcc

SEQ ID NO: 36456 - DNA, 363 bp, Homo Sapiens
agaatgtgaagaagaacatataacatatatcacacaagtttatttctccctaaaactgccttatttcttcccataagtaaaattcctactttatcacaatccttgtaatgtttataatttgggttctcacatagaaaaacaaacatccttaacgtttcaagttaacatgactttaggaggtaatatgatggttgtttatctttcaggaaacatttttatgtgtttgtttttatctagggagtctacttagaaaatgtcatctattgcataatgttagatgtaaacttgcagagacttcagccacgtcacttaactgccctgaaaatgtcttctctacagtaaaataactgcagtgaacgaggt

SEQ ID NO: 36457 - DNA, 388 bp, Homo Sapiens
catgcaatatgatagaacctgagtaggcatggagggactattatacttagcattaaaaataaacttatctaggagtagaagaaagaatagcattccacttacatttgaagtaagggcatctcaaggatgatgaaggatcactatttttcaaagccagaggattccaggctaggttgcagtaattgataggatgtaatatatgaaatggacaaaacatgatcaatgtttaatttccaagtcctaattcaaagttgtgttcctggacaattcggtggctgtcttccatgtggtgattcagggatccaggcttcttccccactgtggttccactgcccctgtggccacattgactgcacctagttggcacaagtggaaagatagcatgagg

SEQ ID NO: 36458 - DNA, 398 bp, Homo Sapiens
catcaatatgatgaaccgataacctgtgattcccagcctggggttactactggagtttaggtgtcctggaaagttataataccggtcttcaaaaagtctacagaaagcatagatttccacataatgctgcacaggctaacgaattaatcaagtttcttcggtttggcctggatttatatccattcagttagtggacactactgaattatttatgtcatgttgatcaaaagttctgatatgatttgattaatgaaacattgaaaaaaatagtaaaaccaaccatttttaaccttacactactatcttgaggtatgattgacatacattaaaaccacctcttaataaatgcttcttgttaatcaaaaatttgaaaacgtatgtccactggaggaaaaaag

SEQ ID NO: 36459 - DNA, 403 bp, Homo Sapiens
actcattacctatcttccaaccataaaaccaacctaactcaaaagaaaggtattttaaatctttatagataaaaatgaatagagtgacaaaatacatcatttgttatttctttattcattatcaagatggtggctatgaagaactaaatgaatcaggtttgtaaagttaacagatgctaataatgtcatatagtgatgcaaagatgagtgctatttatcctcagttcccttgataattgtagttatcaaacacatatagtgtacaatgttttagtgtgcttaagtacacttaagagcaacgttaatatctaatatcagccaccaagataaaaggctaaaacacctgtcaaaactactacacatactgaaaattctattccctcctgtgtacatcatataagac

SEQ ID NO: 36460 - DNA, 366 bp, Homo Sapiens
tatattttaggaatattctggctaattagattagctagattaataacagctctatctgcaggtctctctttaggaaaaaagtgtatatgtactacataatttatcagggagtacagagatctctctgacccccttaagccctggttaaaaactccaaattaaagttatatcttttatgatcgtgtgtattatatcataaaatgccttacttttaacaaaattattagtagctttactttgaggattttttacaattttgctaaacataaacgtttgcatgttagtgtttttaagatatgcagattataagacacagtcaaattaagaaacatatctattgccccatgtatttaatagctttgggta

SEQ ID NO: 36461 - DNA, 369 bp, Homo Sapiens
atctgagaggatagtactgactacaaagggcaggtgcttctctgcagccagatgagcaggaactatatgaccctctggaacattgtgctaagcaactgagagtaaatgaatcaggcagcagggcaaccaggaggagtccactagtgtctttgtgatggttttgtaataacaggactcatttaataaatatttcactaggcacaatgctgtgcattaattgtcccagttatcatatttttataggtatatacttcatcaaagtaacatttttatgctccctttaaaataggattcttctattagaattgcctagtaaaggcaatcagaggaccactgcctaaggaatacactcacggagcatacatatat

SEQ ID NO: 36462 - DNA, 414 bp, Homo Sapiens
tagtgctgtaaagatggaatagaaaaacttttgtaaatctgctgcttttagctttgcaaatgtatctgttcatctgtatcatgttttaatctgtatcatcacttattcaacatatttttctagtttaacttttaaaaatcatacatttttggttcaaaattaaaatacacacactctgaaaattttctctctcactctgttcccacatttaccactatttgtctaccctttagagtttcatgcttatacagtcatgtatgacagtacaatcttatacctctcattttttacacaaaaggtcacagacaatacatgttgccttgtaccattaatttctcatttactatattgtggtgatgtttccatatcataatttttataagtcaaaattatatatgcacatcgttgaaaagt

SEQ ID NO: 36463 - DNA, 375 bp, Homo Sapiens
gggaatcagagatcgagagcacggctgcataatagctgtcggctaaccataatgggtagaacctttccatgcacactagcaccatcacaaaggggaccacagaagggaacctgattgagaaatcagaacataattttacattcaaattacagacagattgtaaataagagcaatcaagacactttgcatccaaaagtatttctgctgcttctttagttcttccttcagctaaaaatactatttgaattcaattcttttctgtgatgggtcactcatactaggacaataaaaatgtcaaaggtttatagggtgtctattcaaaagaactatgtgcttcatgtaactgagtaaataatttacacacttagccaattc

SEQ ID NO: 36464 - DNA, 449 bp, Homo Sapiens
gtagcaggtagggagatacaattctacctgtaagagacctacaccaaagaacggtctggctatgggatcttcagctaatgggggctaagaaagacttacaggccagttgctaacacatcacaaaccaacatctggtgttgctgcatcagggaaggacttgcaaaaacatggactgagctaaaatagactgcctgtggatgacacaaacattctggataacatgtaacaaggagacaatgcagccaagcttcgaggaaaggaagggtcatttctagaggttgtaaatgaagagggaactagaaatgagagtggtaaagaagtaccagaccctggcagagagatgctgggcttcccatccccaagcacggacagaggacgtacttatgagtgagctgggaagctgcaactgaaatgtctgcacaaagctagcaatggctgccctttccaca

SEQ ID NO: 36465 - DNA, 450 bp, Homo Sapiens
ttatatacgaggaatttttagaaactgttttccttgtctgcggccattgtgctgctgctacacaactaccgcaagcagcccttcacgccctcctcccagtacaaagctaattgacttgtgagaaatgttaagcttggaagagtcagcatcgctgcacttattttttattctactctgacattagaataatccttgagtgggggaaaggttaaaaacccccctggataagtgttactaattaatgatgattgttttaaacaatgtttggataatttttccttgtcccttgacataaacttgataaataactgagaagtgagaaggagattagtgggttgattaaattccattcaggtacttaaagttagctccaaaaatttagctatttgtaaattgtcatgcatcgttaatgtataagagatgtagatttcatttatctttggtggagcg

SEQ ID NO: 36466 - DNA, 566 bp, Homo Sapiens
aactttgaccaaccagtgctaaaaacaggagtgggcgttggagctggtggatgggagtggggaaaggagagaggtcagtgccctggtcatctttatttgctagtccatgatgcagagaacgagagctccccctccaagcctacgtccagggcatatggcaaacaagaaaaggggcttcagtggaaggatctcattgtaaagaaacaattacaggaaggggtagtgtctgtggtaactaacttcaggctgcccctcaaaacacctaaaaagccctcttgccacggagaatcttcctgctgcctaattatttcccttccttaactgcccctcataccactgccccacaggtcagacagaactcttatccagccaagtaatgtatgaatatatctaaattctttcctttccctgtgagttggaaatatttaaaataaggacttacatggtaactagcagaatgacccattaaaccagaccatcacacaccacttcttatgaggttgcatgcggaaaggttactggacagattttaaaaatgctttcattcttattgtaaagaacaaatc

SEQ ID NO: 36467 - DNA, 568 bp, Homo Sapiens
tgtgagtttacaaaatgacattctaaaccaataggaaagccctcaaagtctgttatatcttcaaatgtttggtgaattgtggccactgaattctcttattctataattttgctctagaattttgtccccagtctatttctaacgtggccttatttcccttttggaacagaacttcgcaggactaggcaaactccaattttccaatgaatgcttagcattataaggacacagtaccttcctaagcttctctttaaatagcagtcttatttgaagccaaatatcatatggctatattgaacttaatatgatttctatcagccaaattacattagagctctgatgggaacagggataagtaatttggcaggctttctcttttctattcacctccatttgcttaccttgtttctaagaaaagattagaagacctgacaggttggctttatctcagagagaatatataggtaggaaataacagggagttggaaaaccaatttgtcagcccgaaccaggaaaagagtttcactgatttaaggctaaagcctttaaacatcccaaggtcatctct

SEQ ID NO: 36468 - DNA, 374 bp, Homo Sapiens
tatcggttctcatgtctcagcttgagatccttgatttaaatccctgatttatttttactcgtgtccccagtgccaatgtgggagagttcagacatgttttcatattcactgagatgtcagagaaattaaagaagagacagatttttcatatcagtcagttaaagactaattacaactgtgctttccagcaaaccagtgattgtaggctaattttcggttatgaaacagaaactgaggttaatgaggctaattgtgtttaccagcatttttgaataaaagaaaagaagccaactcaattttgaagagacttctttgtcaggaacaaattggggaaaattgctacagtggtatcagcgtttcctaaaactgctaag

SEQ ID NO: 36469 - DNA, 361 bp, Homo Sapiens
cgagtccacttataggatcccctgcagtcagcgaacctttatttggttcctactcagtgccaaatgctgtgttcagcagtgggtttacatgggtgaacatgacagcacctgctctcagggagctcccacccctatcctccattgatggagaaaacagatgagactccagaccaaggaggagttggtggctcccaaagaaacagtggagcccaggggatgaataattaaaacgtaaagcacatcccagagctcagcactttgaaggtgtttatgtcccagctctgaaaaagatgttctgtatttcatctctgagtctgagattctaaaagctatggttggtacaacagtaagaacaaaaggg

SEQ ID NO: 36470 - DNA, 443 bp, Homo Sapiens
cacattgcaggctcgcctcggctcatgggcctttcctaatctggttagcgggatgaaggcatcaggtagggtctgtgtggggtggagaggaggagccaggctctggatccagaaccctcttctgcccttgccagctcagcatcccacagaggggtcttcccgctcacagccacagagggttatcagggttatagagaagagtcacctacccagtgcctgtcagggcatcaggtacatcccgggtgctgccacctcacacctgcaatgtccacacggtgaaccgggttgaacagaaggcagcctcgagaggctggagaaaatacaccaagcactgacacagatgaccctgggatgtgggactataggcgatcttcatttttttcttcatacttttcttggtttctaaatcttattcagtgagcaatgtgttcattttactgtca

SEQ ID NO: 36471 - DNA, 357 bp, Homo Sapiens
ttcatgcagttgagcatgccattaaaaacagatgagagaaatttagacaactgacaaagcagatcaatcttcaactatctcacattgcaatctgggatatgcttacctttgctaaggtcacaggctcgggatcagtgggaatgtagctagcacacagaaacctattattattcattgcagtagagctgtagcactatcattaaaagtcacccataaaatatttggtactggtcaaaacagggaaaataatgatgttagaattctatatgcttacaatatatgattcagaaagcaaacaaatgcataagccaatttacaagttaaggaatctcttgggcctcccttctctaattactt

SEQ ID NO: 36472 - DNA, 432 bp, Homo Sapiens
ctgtaacactatgttagaaatctggacttgactcagaagaaattccgtgtaactccattgtattctagtcatccgatgaaggaaaattctaaccagccaccgccttcaacatgttttttatttgtgtgtgatgtagcttcatctggtccagattaaggaccgccacatatatattgctgacttgagtttactgctgaacttggcctagcaggctggtcaccccaggtcttctctcgaaaaccaatgctatgccaaagacagcaccatgtataaaaccacctcctacgccccatcaatcaaccaaatgtgcattttcacatggaaggtgcctgcctgcaaggccagcaaatgacttaaaccttggcaggaaagcctctcctctctgtgattgtcattctcagacctccgaacttgtcaaggaggccaagcatg

SEQ ID NO: 36473 - DNA, 583 bp, Homo Sapiens
ctgtaacactattaagctattgatgttttgatagacaatctgctgttaattcttatggctaattcagaatgtgactgataagaaagagttccagtaaagtgtcttagcaagagtatttacatggaatgtcgtaatgtgccatgctatcctaggccactttaggctgctggccactctggctcctgccaaacaaaccttgagaggcattttttgaaatcttctgtccacagtcaaacaatggagagaatgtgtattctcagagcaatggtgtctattttaataccagctggcttagtgataacgggacaaactgctggctaggaaagctcttctctcccagagagaggtcttggctttaaaaggagcaatgctgatggcttagttgagaagcaatttggacagtgctctggttgaggtccacatagcccactgttggggcacagagggagagggacatctgtcagcccaataaatcagtgctttccaagagatggcgttcagcaagaaatgtcatgcattaatgaaaatgcctccctgatgcacacataccatcttggttctcactgagactaactttcccgaa

SEQ ID NO: 36474 - DNA, 472 bp, Homo Sapiens
atgatgtatcgtgtcttatctcattcttcagtaactcctggctcgctctctacacataaaatgaaactgcagtcatacaagcattgatttgagcgatcacctgactacatctgatctgtgaagactgctatcgtgagatttcagaattaagaaggctaagaagtgagttggttatgccttttattagaagcaggtggaagaaaggaattgatggagtagaagagtggcttgggaaatatggacagtttctttcctgattagccaaaggagcttggaatgaagtgggggtatttggtcattaagagatcaccagtcacttcaaagaaagtacttttcagtaaactggaagctacaaccagatttcaagaggttaaggatgcatgggtgataaagggagaaagatattataaaactaccttttgaagttctcaaggtggaaagaagggaaggaaagaattgaggggtaataggg

SEQ ID NO: 36475 - DNA, 556 bp, Homo Sapiens
cgtaaccactatgggctgttggttaaaaatagtttggagactgcaaagacagcttctacttcattctataaatgatgctttgtctttaaagcctagcatggtacctaaaaaataacatgggaggaaaatgggaaggtgagggaatccttctttctgaaatccataggcaaacccactgaacaaacagacactggtccccagttacctaaccctgcttgcttgtgctgcgctaccacagtgtgtgcaaatccagaacgtgggaaggttctgccaaggcagtgctgggtgctgagtcacagctacttacgtgactgatgtgtgttccagccagatggggggagccggaagccaagcccagatggccatcttctttcctctgggaatgctgatttcagggctcctggcagcaaggaagagctcatcttggtgagagaggggcctggggaaggctcttttgtaaaaggggaatgtcttgccctcaagagacagtcccaggccattgcatgtataaactgaaagggcagtccagcttcctgtcattctaggcagcagcctg

SEQ ID NO: 36476 - DNA, 430 bp, Homo Sapiens
tgccacatgtttaatgtcgtacacagaagaaaacgtatgaatagtgcatatggtttgtaaagtggagtaggggagattagggactctagcttgcacctcttgccctgttacacaaggactcatccttggttcccatgtcctcctcaatgccacctcctgggaggattaggtccaggtttcccaaggaaacgaccatccatggagagtgggtcaccagacatgcagacaacagatgcagaggccgaaggggtcctgatctgagaggtgagaacttgccccaaacaaggcttcaatgggttctgagaaccggcctgaggggaaggcagggagcggcggttctcagagggttctgcccaaaggctggtcccatccctacaaggaaacttacagcagggccacctgctgggccagagggctccctggcatagat

SEQ ID NO: 36477 - DNA, 450 bp, Homo Sapiens
tgttcgagtaagggcgcgatgtttgcggttacatctctatctgtcccagaatcacaggatctggtccggtcacctctggtctttcctcttagtcgcctttaggagccctggttcccgtccatcctctggggggtttgtatgaagagatctcgtgtgggtacttgtcatgaaaacaccttgggcatcatctggtgtatccagttctagtctcgagaattctggtttcccactgtgctcagcaagtggaaagttcttttcaggccagaacagctctgcaccatcacatatcgtgtagcggcttagctgtatggtctgtagttcaggttatgggacttctccaatcctggaaggctgtagagcttattagaagcactgtacgctatcttcaagatggagcttggtcacatctgttaggaatccaaaggacactatgacttatttaaatcttgt

SEQ ID NO: 36478 - DNA, 393 bp, Homo Sapiens
tgtgcgagtaagcagtggtggaaacttggtcgaattcagatgaaagaggactatatagtcggggaatcctgaaactctaataaaatatcttatttctcaaatctgcctcacacatttaactgagttttgaaaatcccagcatgactgcagaggtacagaaacaccacagagaatattttgagccttaatgaaagtggtcataaaatcagaatttaagcgttcaaagatattttaaagattacccagtctaatagaagaaaactgaaagtatcataagaacacttttaacttcaggtgaaccagaaccattcctgcttggtctactatcccttcctcagtctactcccgtctcagtggcctcgtaagtcaccacagtgaggcagcgctcctttc

SEQ ID NO: 36479 - DNA, 436 bp, Homo Sapiens
tgtttcgactacgcatttgcaggcctatacagaaaatcatgggtgagtagatttctatttttttatttgttctaacctcggtcgctgactcttaaatcactgagcctcggttaaagtgtatctgggatcgtatagcattagaccaccttttcgaaaaataacatctcgagtctgggatgactctcgggcccttgtatgggaggtgtttttgtttttgttttaaaccaaactacccagtattccttgcacttgtgaatgtgttgcactctgctggatgaaatggcagtggatttttaaactttaatttcccaaatgtctctctcagccctgatgttttctcacagtgcttccttgtccttctcttaacttctcattcctctataagaatgatttagactgacctgtccttttttatctgcgcatgcgagaacatcac

SEQ ID NO: 36480 - DNA, 376 bp, Homo Sapiens
aaccttgacggccccctgattcaccccctctgcaggcccctctttcccttcctgcctcaccccctctgcagacttctctctctcctgctgtctcacccctaagctcacccctgaccatacaccctctgcaggcgctatcttctctggcctcccactctcctcaggcacctctctcttccctgatcatgccccctccggagacccaatcttccctagccccaccctctctgcagacacctcctgcttccctgaccacaccccctctggagaacctaccttctctagccccgcctcctctgcagacagcttctgctcccctgaccacaccccatctggagactccaccttgtccagccccatgccctctgcaagcacc

SEQ ID NO: 36481 - DNA, 422 bp, Homo Sapiens
tatagcgcctaggtctagaaccaaggccaacatggaacttagaagttggagtaggggctacttagtgcaccccaccccccacagactcctccatggtggctggaacccgatctaacctgccctgggcatgctgttcatcagctttccctgtcccagtggtctgggccatctagaagactctcctgggcttagtcaggtacagggggcttctccctgcttcactccctgggcagcaggctggctggcctctgggaagacaggttcacttaaaccaaaggggattgaggcttaaattacaggccatacacacacaggtgtgtgctaatttctggtatacaggcagtcccccaacaaagaggaagggtctgaggtcctaaggatgaggaggatgaggcctgattctcctttaggcagcctctggt

SEQ ID NO: 36482 - DNA, 377 bp, Homo Sapiens
tatagcgcctaggtgagcaggagagacgttccaccaaagctgagttctaggggtggttttaagcaagggagagctgtgctttctttgtgaaagaaacagcccttagttggcaagttctccaatccataactcccccaggcatggtaatgctgtttacaagcgcaggaaacccatggtgagaacaaaacttttcaagagcaacttctctcttgcccttggagatttatttagttgctactgaggtgcctggacccaagctgagatcccttgtgaggaagttgggaacacgtcctgtgcgtttcagaaatctctgttctttactttttctacaatcaacaccagcacatggaggggagagggaaaatagtgggataggc

SEQ ID NO: 36483 - DNA, 380 bp, Homo Sapiens
tatagcgcctaggtcctgggctggccgcgggatgttgccctacagagtgaacttcaaggtgtcggcgcgcaccctcacgggggccctcaacgcccacaacaaggcggcggtggactggtgaggacgccgagcttccaggtcgccaggatcggccaggaatgtgtgagggggaagggggaaggacaagaggtttcaccccctggttagtttggcctcgctaaggcagggagccgccctcacgcaatgagcttgctttcagttggtggatttttgttgttacaaaagtgataatagccccgtgtgggaaattcccccatgcaaatacatttcccctctttctcgcgtatttctctgctgttttctctgcacctaggcgccta

SEQ ID NO: 36484 - DNA, 418 bp, Homo Sapiens
aaagctgaatgcatctatcagagtgttttctaaaatcccaagtcgattatgtcccattcctgcttaaaatgatctcctgattcgcattgccttttggataaaatccaatcctgagtatcaacaagggtcttgtgatttggtccttttctgtgtcattctttagaatttctggaagcagcctatcatcgctccgtctgccctccatacacagcgtttgtgtgtgttatgccaaactgcttggtgttttccaaccgtggaccatgatatctcacttccttaaccttaccttcatatgcttttcctttgtgtcttcttctgagatgcttcttccttttgcccaggcttgctcctgtttgtctgagacatgtgtctcaggaagcctttccgttcccctccagtcattcatacctctgtatgg

SEQ ID NO: 36485 - DNA, 387 bp, Homo Sapiens
tcagttcctcgagaatgttatatgctgattatttcctatctttacagattctatgtctaattagccacatgacacatttgaacaaaccttcatctgataccatgatctctttgtgcttcctcatctttcattggcaaatctctggaatgggccatataaatgcagccctcaaatccttaacagcttatgattcggcttccatcactcacatttaagcttttcttaaagatcactttccaccatcatcaagaaacaactgtagtcagttctcttgtccttccatttcttaggactatcaaaatattgtgatttgatatttgactcaccctacttctctaaccttgtaccgtcacagtctccacactcttctgctgcctccttccctat

SEQ ID NO: 36486 - DNA, 436 bp, Homo Sapiens
aatagtgatttattagcaagcaggaccacgtggcccttttagtttctgcttatctcccagagccaaggtgttaactgagccagtgttcactttggtcagaaaagaactggtaaggtatctgtctttctagtctcttttttcctgtgttcgtaggatatgctcttcttcggtctcctgtaccatgtggctgtctggagactatacaatccttctcttggcgatcggcctccagggtgggacactggcctcccataggccctggttctgagccgtgtgtgccagtctgacttgccagaacctctaccccattagagtttgggggactgacctcactaaggataccaagcagtttctcattccccatctgcctgcaaagaggggcagccctgaagatgtgagactacaggattccagtgccttgttgccacctttcacc

SEQ ID NO: 36487 - DNA, 377 bp, Homo Sapiens
tactagaggaccccatcgcgaatcacgtcaaatcaaaaacaatcattttttcattaatcaatggaggacccagcaattgaagtcttgtgtgtatttaatgtccaccgattttaaccttgttattactcaatttcactattttaacaccagacaataaccttctgagagctgcctcagaaaacacatcactctaaaataactggatccaaattaaggtggtctccttaggacagtggtttagtctcatgctgatattaaacagtacaggattgggagatactggtactcacttataaacctcttaagattaagggttcagctttataactcttttaagtctttagcactcaacactgaacttgtacggggtcttcttg

SEQ ID NO: 36488 - DNA, 578 bp, Homo Sapiens
gtatccctatccggatcatgatagtgactcgcggagagaggctacaggtggagagacatggagatgtcaggaaaacaactcagaaagccaccatatcaacctatgtgagaatggcaaaggcctgagagtagcagaccctgcaggtgcataagaacatggctttgtttgacaagacagaaagataaaagataaagagcaacaaggataactggcatttctagtagaacattcaaagagatgttaatgtcattaaccatgttaaggaataaaagagaaacagtgtttgtgttttaatcactttttcccccggagtgagagggaggctgaaagtcctagttttaaaaataatttctggctttaagttatctgtggaataccatgtttatgctccaggaggtcctctgaaatctgagactggtcttcaaaaggcatgtgaatgacagttacagatataagatttgagatgctttctaaaagtaggtaatttcacagccagaaaggaaagatggaatccaaattcagttccaaataaaatcagctaggaggatagaggaatgagataatgctcaatgtacagt

SEQ ID NO: 36489 - DNA, 424 bp, Homo Sapiens
ttaccaatcttgtgagtgtcctgatttgtgaccatcaatgtctttttaatgtatctgctcaatttctaggacttcaggggacatttcatgcgctgtgtgctcttctgagccctatatatactttccaagaattgcgagtgtgaatccctagaaatttcagtagagaacacaatagctattctttaattatagtaaagtccaggtagaaggagaaattatgtgtccaccaaaattatgggatctcattaatgtgggctaagtaaatgtcatttttgagaggctcacttttaaatacttcatatatttccctcttacaaaacagcgtgtcatgaagttcttatgtggtaaagattcaactagtaaatatttttaggttaaatacctgaactagttaaaattcccactaagaatagtcttaaaatat

SEQ ID NO: 36490 - DNA, 579 bp, Homo Sapiens
gaaatctgtgaactcaagcgatactgaatcctctaaaatgtggggaacaaaaagcaagattaagaaaaataaataaataacagtgctaggaaaccagtgaagagaggacacaagttgaggtggtgcgtgcacacctgcctacaggtgcacaatctcgtggtttttcctaatccattcagaagttctccatttaagagcgcagtctggttctgctgttcccaaagcgcctttcataccaaaggactccaaagtttcacacccacatccagacatatggggctcttcaaaatagaaatatcagcacaggaccagcaaagtgagtctgaaacgtggccaagggaaccagaattggaaggactcactaaaaagacatctagattctatcaattttaggagtccaaaactgaaatggcactagggacttataataataaaagcaatagtagtcggtgagcaatgagcagtgctctgtgtgcagtaagtcaatcaggcacaccccatgcagcagtctgatgtgcatgatcctgtaccatctcctcactaccttgggaggcacgagctctaacaatgtacttgtag

SEQ ID NO: 36491 - DNA, 475 bp, Homo Sapiens
gtacatgtgaattcaaggtctgtccaggcaccatacgggcacagtatccttctcccattcccacacacaaacaaaatactaaacacatatgtgttggcaaccttctctgacactccagaagacttgatttttaatttcacatttttagaaaggtcaatatggataaacggtagattatacttttctgggatggatatagaataacaaactggcttttactagtcgggtatataatggccaattttcatgaaatcacaaggctttagaacacatttctctttatccggtaatcagcacatggagtatttacgcctgtgaatccttcatgtatggtagggagaatggagctgatgatatggtgggtggggtactgaaggtctggggcttggatttgcataactttgatagaaaagctagaaaatttttcacttctcagcattaatagttcttgttggtatgtacttaaaaacaaaaa

SEQ ID NO: 36492 - DNA, 527 bp, Homo Sapiens
tggatcagcgctgattatttccttaggataaattcctaaaactgggaattaaagggttgggaaacttgatacatactgacaaaggtctttaagtttctacggattagcattccggcttgtagcgtatacagatatgcttttctccttacatccttaccaaaacttagggtaactctttttaaccttccgcttgagtccatgtggacatgcgtggtggaaacccgggagacagtgtgaagcagggctctcaccttggtgtggtgcagttgacgtatggatggctctcttgggcgggaggggctgtcctgtgcatggcaggatccttagcagcacggtagcatccttggacctactcactagatgccagtagcacacacctcccctcactcgcggggtcgtcatgacaacagaagaagtctcctgacacagcccctggggagtgtgggttggggaggctgcagaatcgcccccaggtgagagactcactggtatcgatggtggggacacaggctttggtcctcagagag

SEQ ID NO: 36493 - DNA, 425 bp, Homo Sapiens
gggtgatcttgaggatccccataactgtggactgctaatgctgtctctaaccaactccttcaacactgggaagatgcacctaccacggtgtagaaaatgagtttcttcttgtcaacctgcacagccgaattacatgctagacttttcagagcaataaccaaatcctacctgtagcaggtgtatatgaacagacactctcattctagaaccccctgtctccaggaaggtctttatgcagaaaaacagtcttactatggtgggtcaaaaatggcatgagaaacccatgtcccaagaaattggtctctgccataacttacttaactacttaaacttaaactacacctatttttggacgagactagttatttcaaacagatacttgtcatattcaacatcaaaacagtagcactaggtgccatggccaa

SEQ ID NO: 36494 - DNA, 428 bp, Homo Sapiens
tacaagaggatcccctacagcgccttaactacagcgctcccttgcagaaaggtcagctcacaggaagcaggaccaaaaggtttggctcgccgctgtggctttatcaacaaaaatactatctgacactgacttattcgtggcataagtaaaggaaataaacagcgggctttcccctatggaaatgaggaacggctgaagattctgaggaggcggggtaacagaactcaggccctaggagatgaagggtgggttaagtaagcaacgatatgatggcacacagaggggatggggcactgagagcagtttgggaagactcctgccactgtccagcgtgagggagaccaacatgcacgggggggtggtagtgacatgttggacatccttccttctcctctactcggtatacacgtaaggcgcggtagggtacc

SEQ ID NO: 36495 - DNA, 427 bp, Homo Sapiens
cataaagtctctaaaacaggtaatatattaaagagggagagtggtaggggagaacagtatgaagtcaacaggaaatggctaaagatggagagctcaggtagaatagtataaaaaatgaaaattgatagagtacctggtgtatatgaatacagcctagagagctttcattttccaaagagtgtggggataaattagtgaatgcatatttttcaaaattaagaaaacagaacatataattttgaacgctgagaaaaataaaaatttaaaaactacactgtatacacggtatacctcaactgtgaataatagtagtcatgtaaagtcagtcataattatgtaaatactgaatactgattttacaacaaatgattctataacgctgggaggatgggagaaaagagatgtgtgtgtgtgtaatggtggtgag

SEQ ID NO: 36496 - DNA, 421 bp, Homo Sapiens
cactatgtttgattgggaatgaagggaaagaaataaaatctaatgagacaagagaggtttgcatagaccagtattgatgaatgtgccacatcactgaggagtgtgctgagctgcgtgaggtgcagagggaaccgggaaaggagagagcaggagtatagaaaagtacagctcttgggaggctgaaggtcagatagtcaggtagcctggggtcaaatctgagctctgctgcttcccagctctttcacctgggacacgtcttccaagctccctcgcgtttctttgaacgtcaaacaaggatacaagatgtatacacaagcagatagcagaatagctcctgacacacagggggtacatgatgacattagtaaatttaaaactacaggccgggttttaaaactttagttttaacattagtaaattt

SEQ ID NO: 36497 - DNA, 420 bp, Homo Sapiens
agtcaagactcttgcttctggtcttattagcaagatcatgggggtcacttcatctctgtcgtctttcctgattgattatcctattttcaaagaatgagactcaaaatgtcctgttctgctttgcaaaatatagtttcacataagaaattaccttgggcaaggttgtgagaggatttggaatctaaatggagaaaagtgtagaggcatatttttcaatcttctacttctatgtcattttccctgtgtgttggattgctaagattatgtatctattgctggcagaaatatcaaatcctaaattcttggagaatgatattggttgcccaagattgtatagaagattaaggagctaggactctgaagagctgggttttagaatcataaactctcaggtttggaaaggatgttaaatggtctggt

SEQ ID NO: 36498 - DNA, 361 bp, Homo Sapiens
ccccacgtatgtcgatggggggtcatctttattacttaagtatctctatgtcctcacaacaaaaagcatttcatacatataatgaataagaacatcactgtacaattacccaaggctctccctttcccttcccttctggagctgtactgactaataacacattgtgttcttagagcaatttagtgttacaaagggctttcacatatcttatcgtcattgtagttcgtaaatgccctgagagaggacacaggaagaaaatagaaacttaaataaaactcaactgacatctttactacttgttacaaatgcctgtattgttttttaaaagccaacaaaccaagcaagccgctggcctaacgtg

SEQ ID NO: 36499 - DNA, 460 bp, Homo Sapiens
acatatgttgatggggtattatgtacgggcaaccaaaggtccctatattccaaagctcaagtaaacaatcattacctgttcatcactctctagggtgtaatcagaatttatatatgtgcaaacatttttaataaaagaaaagacagctaaaagccctgttctattctttacttaacaaatcacattttctcaagttgaacaattcttaaaattttttcttctcacgtttctatgtcattataacactttgtgttactgttccttcttcagttaatgactactcccaatttagaaatatccatgaatttaattaatgtgtaatttagctttacatattactaattgggatggtagataaggaagtgagatgtgacagaataacttagaaaatgcttaaatttatcatcctaattcattaagaacttaaaaaggagggtatggaccaatcaagtggggtacc

SEQ ID NO: 36500 - DNA, 458 bp, Homo Sapiens
cactatgttgatggatcattcccccagtgccagtccaggttcctggaacgtacacagtctccatgacaggtgagagggggagggtcaccactgatttttaaaatctcattttaatatttcagatatttccaattataagtaactttaatacttcatatgtttacttttttggttatatttcttttagatctacagatatatttagttgtttcatactagttttaacaaagctcagagcttacaattttgtctggtgttgtagcgtcacatttgagaactgctaatttgcttttcagatgtgagaagaagagaataattgcaaagtgtgctgtagatgaaagagttgaatgcttttgtagatatttggtgaagaagcagtgaaagtataggtctggtttgttaaaaaatggaaatagatggtgcttacattcctactggattcttcaatttataacagc

SEQ ID NO: 36501 - DNA, 365 bp, Homo Sapiens
agctgaggtccccacggtgatggttagctgcctgaatcacaagaggaaaggggaaatatttaagagaattccccaacagctttagaaatagctctgtctgtggccacatgaaaacaaaataaaatcatataattttattgctataagtttaaacctctaattttacaaatgttagggaatgattttctcatctcccctttctcattgcccccagtttcaacctacctcaacctactcatgtcctctactatattaaagagaattggccagtgccagagatctgggcatcatttctgtagagcccacttctaaatctctgtggttgatagccacttctgtccatccttgtgccaatcaacatagtg

SEQ ID NO: 36502 - DNA, 351 bp, Homo Sapiens
cactatgttgatgggggccaagaaagtgtaatgcaaactaaaaactcaagcatcttctggagaagtagaaaaacagaaaccacaaggtaaataacatgaaaaaactaagacttcctccttacaaaatgccaactgacttacgtttaaaagaagttcaaaagttgcattaattttaaaaatcagaggattaaataatctggtctttaaaatcatacacctttgatgtaagtttgaatcaggaaaataaaaggaagcaataaaaatctagcatatgttgcttctttaagggtctactgtctttaggatatgcatagaagttgcttatgaccaatcaacataggggtaccgagc

SEQ ID NO: 36503 - DNA, 389 bp, Homo Sapiens
tcagctcaccagcgtggtcaggtcgggctgttctcgccagtccaggcctgcggctcctgcagccctgccactttctaccagcagctcttatctctcattgcctgttcatttgtggtgttcttgtaatccagtggttagccctactactcttctgaaatgatttactcagatgctttcctgccttccaaagccagagtgttcttcaggcctcactctacctgtatggttattgagtcatgtaagagttacttggagatattgtaatttcatccataaatacctgaatatgcatctcatctccttaagaacgagaagattctcctgtctcaccagaataagatgattgtactttctacctcatacataggctacattcagttttccttgtg

SEQ ID NO: 36504 - DNA, 438 bp, Homo Sapiens
cactagtgatgggcggacacaaatccaaaccatgtcagtattccatattgcagttctttactgaagtcaaagttgaaagacagaatacaaggtggaagctcccaagaatgaaaggacagactggtgatttctcagagcatgttagaatccttcatttaaactcaaatatgctagcatccaaaaatgaatttggatgtgtagcatcattaattcactatgaagtaatagtgcatatatcatcacccaacattaaaagatatgtaggttctgcttactggcgttgtctttaagataaatcaccttttctgccttcaagaagctctatagagtaattaagcaaaaagataatggtaattaagtgccacggtagatgaaccaagagaggtataatggtaatgagaggaaggaatacctaagacggcctagatcacttagagg

SEQ ID NO: 36505 - DNA, 374 bp, Homo Sapiens
cactatgttgatgggtaaagcacaagaggaaaatctggcctcactcttatacacagttgggaaaagaaggaaagtttccataaccatttcagctatcgtaactgttcttccttgataagacaccaaaactcaagaaatggcagattcttaaaggttagttgcagtgtggaatctgaaaccttatatattaacttttcatattctgttgtgttaaaattcactagtctatctttaaatggatctttatgcatgactttgcaatatcatgcattgattatttgtaaattattgattcatgggtttacgcagatttttaaaatgttgacatattttattaaacaatattttttaagccatatttgttaatatcacca

SEQ ID NO: 36506 - DNA, 417 bp, Homo Sapiens
aaagcaataggggggaatcagcttcttcaaattcattccaagcacaaaagaaattttttccctttgcatataacttgacatcagttgattctgtgggggtcggggtgggtatgcagggcatgccttttattatcaagtgatttatttcaagagcctttgaggggattcaggtgaaggaacccccatctgtgctggagagttggatactcctttaaatagcccccaccacagtcataacaataatgataatgctggattatttgttaagccaaggttgtctgcctcatatccatcatgctgtttgcaatattcttgctttcaatcaatttatactgagtgtaactttaggatttctgctattaaatgcatgctctctatcctgcttcagtttctggctttgcttgttccgctggggga

SEQ ID NO: 36507 - DNA, 357 bp, Homo Sapiens
tttttataagttagagaaggcacagatgcatgtgaatatctgcagcattcatcactgaaatatttcatcaagacaacaacctggaatagcctcttggaattaaacaaggctttgaaagatcaatttaccctttgcccttatcctgaccgacttcttcgataacagcttcaaaaaatggatttggttattacaaactagagaaagacccgtgttacatgttttcaatcatagtggtcaacaatatataacgctgttattaaccaggtcctttgaaaacaatttgtgacatttaggagaagacagtctttataagaaattctatctaataagcaaaaaagtgtttggcaaatcatagaa

SEQ ID NO: 36508 - DNA, 407 bp, Homo Sapiens
ctttagaagatcccccagatattttctatgatgaggcaacattccaccatatttgccttccaaaagttgcagtatcatgtataattatgacagcagttttgttttaaaaccagagtcagattgaatgtagcttttttacagctgaaatttatgccttatgtgtattcataaaacattgataacttagtgtcacattatctttactctttggttatactcttcttgaaaagtaaatttacttatcaaatgataaggcttcagggaaagttaaaaaaagttttttttcttaaggcttcatggaatagaattccatgaatcataatgactacgtaagacccttttctggtaatgaaagcatgggagtcttaaccaaaaagctaagcagaattgttaagatctttttggtt

SEQ ID NO: 36509 - DNA, 414 bp, Homo Sapiens
tgaacaagcaatagtgtgtaccattagatgccattagaaccaaaattgaccataagaaccagagtcagaaaaatgactaactgctgtccttcattatgtatttccactcaacattagcatttatgaaacattttgcacattatcctgtcctcacccttgcaatgttacatttatataatctgtgtaagtgctccactgccccacagagtcataagtccctgggacttggtgatgtgcacagtgactggcacagagggtgagctctgtcgtgcttgggaagaaaaatggtcttcaaatgaatcttgccttgtcttgaaatgtataaactgccttttctagcaaaagcatagacactctttcccttggtgacatgtgctacgaattcagctgggttgaggatctgggctaaatgaa

SEQ ID NO: 36510 - DNA, 353 bp, Homo Sapiens
aagtgaaacagcaacatggctcaaagtttgtagtaatcttttgaactgtaactattagaatttcccaaaaatctaataaatatgcttttcttgtataaaatgagctatatgaatatttgctgctacttgaattttctttccaaaatttgtttatagacatactccctaaagatgtttgataatcagaaataactgattctgctagacaaatatgcaccaattgattgattttctttattttgaagaaaatttttttcctcttaattatttggtggcttcctttgctggcaaatccatttttatgccccacaaataatgtgaacagtagagacttctacttgcttgttccgctg

SEQ ID NO: 36511 - DNA, 389 bp, Homo Sapiens
aatttagtactatagggatgtcgatagcactttactgggggatttgcctcagatggagttacaggtacgatttcggcaggagattagttgcaagacagcatggaagggaagcggcgtagggtcactgccacgggggcttttgtctcttgcctctctgattccagttcccacccactgttcctctaaagcctttcactctcaagtgtgtttgcttgaggtacttgctatgtatgtgacttcgaacaatatatagtgctttgttttatgtatgttttaaatttatactagactatagttttctttggtttattttattcagtgaaagctatgttcttaagatgttgctgtttgtacttccaattcattgctctgaccactgcatagtattc

SEQ ID NO: 36512 - DNA, 354 bp, Homo Sapiens
atgaacaagcatttagatcagcgtgggacttagcactagtaaaagtgctcccttggataagcaactaatcatgggggttgagggttcaatttacccatctttaaaatggggagattggtctagtattagaatcctaaactagtagtaatgccctaagttagattttgtttagcgcaggcaatgtcttaaaagcatccaaattagctggtaaaatttaagatacttgacaatttgaacataaaatctgagggaaaaaatcgatttttcaagtctgggtaagcatctgcacatcagtatcaggtcagagataaagcaactgaatatgctcttgtgataggacattcagccacattc

SEQ ID NO: 36513 - DNA, 420 bp, Homo Sapiens
ccaatcttaaatgaaatgcaaacaccaggattgtgaaccatgtagctttggtcacaggatagcaatatggccttactggttgtatagcacttactgaatttttcttgagaattctaaaatttgagagtgatgccagataaaattgcatcaagaaatctgaaaggaacgatttattctggcttcaggaaatctgattttatatttctgtgacataagacaggttttcttttttccagaatgatcctctactctgaataaccataaaatttcacttgtggaatacatcaaaattatttatacatcaaaattctcttaaatattttatagtaatctttctaaaaatccttcagtcttactgtacttgtctagagttgcaaaaatgttgtgttaacattaatattaaaagcactttcaatgaaa

SEQ ID NO: 36514 - DNA, 436 bp, Homo Sapiens
tcgactttataggatcccccacatattttctatgacatataagtatatacatctgtttattcattttcttcaataatcaaacggattacaatgaagtatatttcatctatcagatcactgacaaatattaaaggcttaatactaaagtggtagacactgctggctgcagtgtgaattgatacaaccaatctgatatgtatcacagttgtgaatgtgcatagcttctaaccaagctttccatgtctagaaattaatcataaggaaacaactgaatgagctgaagaaaacatatgaagatattcactaaaagcctaaaagtaaatctaaatgttcaatgggagattcatgaatgggaagcccttcaatggaatattatgcagtcgacatataagaatatatgttggaggcccgggtggcgagtggctcacgcctgtca

SEQ ID NO: 36515 - DNA, 365 bp, Homo Sapiens
agattttctatggatacatcttagattagatgatgacctttcaaaatagggctttaaaacggacaattcaaatatacgtgcttatacttttacgtgaattacaaattgggtaaagatagaaatttgtttctacagaactgccaggaattatattacacattgagaccactgatttttgacactggccactttgtccatttgaattttgctgctgagttactcttttgggcataattctgcagagtggaagtctttaaagataaaggaagggctgagaatgttttattcttgttgacatatgagtatgattcaaattgagttttatggaaagatcactcacttcatagaaaatatctggggtaccg

SEQ ID NO: 36516 - DNA, 518 bp, Homo Sapiens
gttagaagaccccccagatattttctatgttttttaaagaaactcactttttttagaaaataatgatacagttctgggttctccaagtcatttcttggtgagggattctactgcccatatcttgttccagagcagtagtaagagggaggaaataggttataaatatatatgtgtaatttttctttctcctcttctatataaatctctcacacacatatatccacacatcccactaagtatttcacaacaggaaggcagctgtgaaatgacagtctttgtagtcattcagcaggcctcattgttgagtatttgtggtagcagtatttaaaactactgttaagttacttagagtaggaattgacacagagtgcattagaaccatacaggaaagaattgaaggcagttggaattggtttgaaagagatgacagtataagcaaactgtgtgtgtcaacagtttgagaattatacatagcaaagtgtatgagaggaaggggtgtatgttcatagaaaatatct

SEQ ID NO: 36517 - DNA, 387 bp, Homo Sapiens
agttaatcacgtgtattactctcatgaatacctgtgaaaaataaaaccagtgggatttggatgaaattcaagatagaccagaaacaggaggaaagtacaaatgtttacctaaagccagagaatttatttctagatgataattacattattgtattctctgcctttaaacataaacattgctggccgatagcaatctctggtgaataatggttttcgaggagaggagacacttaaattgttagtgacatgagtggaggagaatctgatatttactaatgaggcagtttgcaaagactgtccctgaagtgtagtgtagtctttcagggggattcatttagtaagctagattgatttaacctggtactgtactagcatagaaaatatctg

SEQ ID NO: 36518 - DNA, 357 bp, Homo Sapiens
gtctcgcttcaaactctatatacaggacactggctttccgatcgggagtcattacgaacggacgtgggacaaatatctcctacgaggcaacataaacggggaacaggtagggagaaaacataagttactaaattaaatgtcattttgccgtttatagaacctccctatcctgtacatcaattaatagtagcccaacagaatgaaagtagctccaacctccttaaattcctctcctggtgtggtagacatggaaatgcgctggccacatcccccttcaagggaagacttgttgctcctcctctcagcccttcctgtggtagctcacatccagactgagggaggccgagctatcaaagt

SEQ ID NO: 36519 - DNA, 373 bp, Homo Sapiens
taaacatggacgatccgggaagatttgactgagttttgttacacattcatgttattttagtaatggtaatattcttcttttcaatttttgatagaaacagaggagacatttttgtatgcctgggataccataattgttgaaatggaaatacatccacatccacacacatacatatatataaacatatatgtaacatattactttaaagtaagttttagactaacagaaaattttcaaatataatgcaaatcattcttatgtgtttgtcatcctgatttacctcatcagtcaaccaatcaagttctctgaaagtgatatctcaatataggcataatgtcacctagtgcttctgtcatagaacatatctggggga

SEQ ID NO: 36520 - DNA, 405 bp, Homo Sapiens
aagggcagtactgttatatgtggttcttccacatcaccctttactcaaaaacaacaacgaaaaagcaaaactcatatatacttctactttatagatacgcctgacagaaacatagtgaagcaatctgggaggcaacctgtggtagattatatgctaaatgttcatgtaacctctatatgattattataaaactgtttttatatatgagatttagacataaaaactattaatacaggctagactaaggaatttctacaaatactctttagagcacccaacattaaagttacacgagttgaattttgctctatttcaactcccttacctctctagtattcagttaatattaagtttaaataactttgcagagccctgcaaattaataatctacatgaagtatatctg

SEQ ID NO: 36521 - DNA, 375 bp, Homo Sapiens
taaaaatccggatccccccaaatcagatcctacctgtcctcaacctgctgtagtatttcatctatttgcatatcggcattctgatggctatgtagtggtgtaccttatagttttaatttttattactctggtggttaacaaagtagagccccttttcctattttttttggctgtagtatattctctttttataaagtggctgctgaactatgtttccacctttctattgggctttctctattttcagcatcaatattgaaacaatgagaattattattgaggcctatctggaactatgtttgtggaggtagagaagagaacaatatagtcatactctgaacctcaagaaagcttggctgtgtgtaggaggagtga

SEQ ID NO: 36522 - DNA, 388 bp, Homo Sapiens
tgttgccggtcacactagaggatcccccctgttccccctaaaaatccaggcatcactgatctcctttttgtctctatagattttccttttctagatatttcaaataacttgaatcacaatatgtaatcttttgtgtctggcttcctttacttagcataatgtttttgaggtccgtccgtgttgtagcatgtttcaatagtttattcctgtttattgtagaatagtattctattgtgtagaaatactacatttcatttttctatttacaagttgatgaacacttggattattcctacatttggtctatgatgaataattctgctttgaacatttgtgtaaaagtcttgcagtggacagacagaggccttgtgaatttttattagatgtg

SEQ ID NO: 36523 - DNA, 468 bp, Homo Sapiens
ccctaaaaatctaattgtaactcgaaagtaagatagagagacacaagtaggctttcacatagcttggctgtgaaaagcaaagattaaagcaagtgctgggattacaggcatgagccaccgcgcctggctgaaaccccatttctttacaaaaaaagtgggggaggccagatgtgtacatgtttgtgctctaagcagccaggagctgctgtggctggtgcatggtctgagcacatgtgggctgctgccctgatgggtatagggcagaccctccactccaccagcccacccggaggggacatcagccagaaagatggtagccattgagttctagctatgtgggccttggtttcctcacctgcaaaatagccctgatgatctcaagggtcctttcccgctctacagctcttcattttgggcggctccctaactgatgtgctacaacgtgctgtgcacttttctagggaccat

SEQ ID NO: 36524 - DNA, 429 bp, Homo Sapiens
ttgacacaaatatttcaagagctcttatggcatcacgatagcatgactatgtgctagtaaacaagtgcatataagtaccccagaaccatacttaaatttacaaatcagatcacagcccgttggaagtctccagttcatcagcttaagcagggtattgaaaaatcagggccctcgtcattgcgatagtatatctttggacgtatctcagcacaggatgcatttcaacatcaaatgaagtaaaaacttgtgtaacactgacatttattgggtacccacacaagtctgtgacatttcatttcctcttcaaaacaagcccatgaggcaactatgagacaggcactgctttatgggactattcacctgatttatgagaggtctctattgagagcttatcagtgtatactgaatcatgacagatgtgtcaatgaa

SEQ ID NO: 36525 - DNA, 364 bp, Homo Sapiens
accaaaacgaacacattaagctatgtgcattcccacattcattcaccaatccatcaacatacatttatttacaccttttatgccaggcacagatgattcatcagtgatcaaaataaaagtctttgtcatcatggggtttacattctactagggaaaaagcagaggaagaggggaaagcaaatatttgttagatgtgcttatgatatgtgatacatgctaaagagaaaaataaagcagaataaggaagttaggattttgatattttaaagagggtagtcaggaaacgcctctctgataggagatattcgaacacagacctgaagcaagtgagcaagctcttcacatggataactgggggaacagg

SEQ ID NO: 36526 - DNA, 386 bp, Homo Sapiens
agccctaaaatcattcacattgctagtccatatctctgtgttacatcatctaattagtaaaacaaaaaccattaagctctgtatgtagtatatgaaatctgctaggaaatggaaattctagccataacttagctatgaaatactaattaagaaaaacaactcaaacaatctcagcgtatttacaaagcacctcatatgcattttaaatacaggacccagagaaatagctgcgaaaggaaagccaaagttattaaatccaaagtttttcattttcttgacatgctctttctatttaatacagaaatgtactaatataggttgccttttggtattgtaatttggtcaaccaaaacttgggaaaaataggtccaaagtttttcattttc

SEQ ID NO: 36527 - DNA, 455 bp, Homo Sapiens
tcacctaaaaatcctctccgtttcactcacctaagtgaactttattgatacatactgccatctatacaccataaaatactcaaataatttccaacccaggctgcttctctgagttgtatcagaatgaaatgtagccaactagcaacactccatttccactgaatatcccttaagtaactcaaactcactttgttcagaaatgaacttaaaatgttcccccacccaccacaaccacaaccattgaaaacaaaaactaaaacttccatctttacaccctccaggatttcctatctccgaatatggcactgcatttaatacttacgtcagaaacatgggcatcatccctgacatatacatctccttcaccatccacatcttttcaatcaacagatgctatccatacttcagcacaccttttgtattatctacttcttacaacctccacttccactacc

SEQ ID NO: 36528 - DNA, 357 bp, Homo Sapiens
agaagatgagttcttgcttcatgtccgtgaaagctcctttcctctataactgtgatcatcccccttactcctcatggatcatacctcgctctcctcagatgttttaatatatccttgagatggggtcttgctgtgtcacccaggctgaagtatactgagtggtacaatcattgctcactgctggccttgaactcctgagataggaggcgatccccccatctcagcctcctaaagtgccgggattacagacgtgagccatcgcatccagcctggaagtattttgaaggttcagtgtgaggatttgctgacagattgagctggagagaaatagaggagtaaatagctccaagggtttta

SEQ ID NO: 36529 - DNA, 494 bp, Homo Sapiens
cgttgcccctaaaaatctgtgttcctgttcatattagacaacagccctatgtcctctctgaagaggagacccccaaggacaaacactggctccctgagcatcagaactggagggatcctctcagaggagcaggagtctgggcccagccccacaagactcttataatttgtccaaagacgaagagaagcagtgacagaaccaggaccagaagcctgtccttataataccctgatcatgagttctctgcaccaccacacaactgtgtctttccatgccaggacctgcagcatcatgttcacctttcctggtctccaatctctgcctggaacaaggacactgtcccagaactcagatgaaagtctgggaagcatcctcatttcctcattctcccccccacaatccaactggtccgagtcctgtccattcaaccttgtatctctcagtatttattctactcatcccctcaatgtcctaatttaggcacttttctcttt

SEQ ID NO: 36530 - DNA, 367 bp, Homo Sapiens
gtagcacacagattgacctctactaacccccagtcgggtatcgtctatagctagactacgagggtatctaatcctcttcgatcccctagctttcgttcttgattaatgaaaacatccttggtaaatgctttcgcacctgttcatcttccataaatccgagaattccacctctaactagtgaatatgaatacccccaactgttccttttaaccttgcttccatgaacaaaccaatcaaatcgaacacgaaagccttcaatcattattccatgctaatctattcaaacaaacgcccgctttgaacactctaattttctcacagtaaacgaccaaaggagtagtgaaataagtgaataccccactacacc

SEQ ID NO: 36531 - DNA, 360 bp, Homo Sapiens
taactgcggtttcccgtcacgacagcataactctgttcgttatgtaaaactctcacggttactacttcaagcagatcatatgtatccctgtagatgataaccaagagagataatacttattaactgtataaaagtattgatttgagtaaattggacatattttttaaaatactggtattcacatcagttagtctgagaatcactgctcgataaaacacccacattgcctaatgatgtaggcaaattacctgagtccttattaaaaatgtgtatattaagttctccctgtagaatgataatctaatggatataacattcaagcatcaaaagttttcttcttccctccctcagcatcttaaa

SEQ ID NO: 36532 - DNA, 373 bp, Homo Sapiens
ctaaaaatcggcagtgacccagtgatcgagggactagttaggatgtgtattaggccaggatggttgccaggagatagggagatggggtaggattctggatgtatcttcaggagcattagcattccctggtaggttgaagatgggccagtaagggaaacagaagggtcaaaggtgatgccaagatttttgcccaaagcacctgaaagatggagttgcccatgactaagatggggaagcacggggtcagcaccgatttggggggaagatcaggatttcattcttggatgtgctgagtttgaaacatctgagtcatatccaagtgaagagtttgaataggccgttggatatatttaggataaaagcctgggctata

SEQ ID NO: 36533 - DNA, 361 bp, Homo Sapiens
ctattgtctttgcttggatggggttaattccaagaccttgtctttgagctctgaacttctttttctacttattcaattccattgctgagactttccagagcattttggatttctataggtgtgtccaatatttcctgaagttttggttgtttttctttatgctatctatttccttgaatatttctcccttcacttcttgcatcgttttttgtatttccttgcattgggctttgcctttctctggtgcgtccctgattagcttgataagtaacctcctgaattgtttttcaggtaaatcagggatttcttcttcttggtttggatccactgctggtgagcaagagtgatttttaggggggaa

SEQ ID NO: 36534 - DNA, 352 bp, Homo Sapiens
cgtgttcttgctatcccattctattagtctaaaactaactataaagagacattccaggaataactccccaacagaaagtaattggctagtatagattcagtcatgctcttattcaagctaatttgtacatttcaccttgtttaatttcacttctgaaagctgctgtgattttccctctcagatgctcatttcatatctcaaaatgaacctccctcaagttaaaataaataccaccattagttaattatgaggtgccaagataaaggacaaataataagaacagaaaagcaccccccaaagccaatattataggttatatgcctaaaaatcttaaggtttttagggggaaagg

SEQ ID NO: 36535 - DNA, 428 bp, Homo Sapiens
tgataaaatccctgttccccctcacttcaaattgatccgcctgctcagcctctcaaagtgctgcgattataggcaagagccaccatgcccagcctaggagaaaaaacacttttaaattagccaggcaaggtagtacaggcctgtagtctcactactcaggaggcagaggtacgaagatgacttgagcccaagagtggaggctgcagtgagctactatgatcctgccactgtcctccaccctaggcaacaaagcaagaccttgcctctttaaaaacagcaacaacagcaaaaactatggtgtgaggtaggagatccagctgctttcttttgcatgtggatatttagttgtctcagcaccatttgttgaaaagatttcttcactaatttgtcctgcaacctttgtgaaaaattaatttacaaatgcaaga

SEQ ID NO: 36536 - DNA, 418 bp, Homo Sapiens
ctccattgctttcaaatccttcagtcagtcacaaatgttatttaatacctactatgtgctggaagtacatatatcaataatatataactcttgacttagaggaatctgaaattattcaagtctaggtcaacctactaattcctctatgaaaccttcccagagttctccacttgggaatgatctcttccattactgattttggatagtattctatcaacatctttattggaaagttatgaccctctactttatgatttagttgtttataaacatgtcttgtctccagcactaaacaataatctccttgtgggcaggatctatgtacaagtaaccttcctgacccctagatcaccctgtatatgaccacaataaattttagtttagtgaataaactttttaaaaaaatcaaatttaggaa

SEQ ID NO: 36537 - DNA, 383 bp, Homo Sapiens
cgttatgtacatactgtgtaaatctttagaagtaatgccctccaaagtaacacttaaggatgaaagggacaaaaatgagaacttagtttacctttaatgtcctctaagacaccttccggaactgaacctaaaacaaatatttcatttagaattataagactttaataattaaaaacagtctattaaattgccttcacatttctatttttcaatttagaaaaaattttaaaaatacaactactataattttctcaaaaagtctaacagaaaaatttaattttgttttagggaagaaatatcatcattccaaatctgagcattctgtcacaaccacttttgatgagtgtggtttcatcagaggagagaatgcggaggaggaggag

SEQ ID NO: 36538 - DNA, 416 bp, Homo Sapiens
cgcctgcgagcgaactctagagagcgcaacccctatctattaagctttttcacttgtccattctattttccacacccagtgtttccaattggttttcttctctaactgcctgttgctgcttcatgtttccagcatcctccgtttctctctgagtttatgatgcttattttgctttctaattgtttaacatggtgttctttgccgcgtgtgctgatcagtttattgctcctcttccacagtactcgtgcgcctcccatttctcattccttttctcctatgagtccatattcccttggacttgctcatgtccccatggaaagggcaaaagcccagcccttggcctgcgtccctccaagtgagcctgccatgacagtgggggaggcagagagcctctagcattcttatcccagccctat

SEQ ID NO: 36539 - DNA, 381 bp, Homo Sapiens
acggacagcatagaaagagtacaagagagaatggcataaatgacaaaaagttatcaaaaattataataaaaaacagaaataactcagctgccatacattcaactttccctagaactgagaaagaagcacgcacctataagttgctttgtacatccgatgagaaatggcaacaaggaaaagactgctccccaaatgtcttctctaattcttttactgcaccttttcagaagagggcttatagaagtgttggtagtctccccacacgcacagggaggctcggtcaggcggagcctaggcttcaaacattccagtagcaaaccctgagtgcgtgtgggagtacaacgtgataaacagcataaagacatcattaaaacacaatcc

SEQ ID NO: 36540 - DNA, 544 bp, Homo Sapiens
agtgccaccagcctggctaattttgtattttttaatagacatctgagtttataatccttggtctccataaagcagtttagagaaggaaggacagatgagtcatgctaatttagaaagagagtgagttctgtcttggaagatgcacttctctacaaagggaagaaagagacaggcagactaatcttgttggggacacagtctgagcatttgttagactaactagaaggttttacattttatgacctagtctcagaagtctcataacatcacttccactaaagtcccaagcccccccagattcaaatggagggaacatatatcccatctcagtggtaggaatttcaaagaataaattctgtgaaactgtagtagatagtctgttttctcccctgtttaaaacctcctgaggacctcacatgcttctggataaagctcaggctcttcaacatggtttagaaggtccttcctaatctggcccacatttgtccatccagctccaactcttgctactctacgcccctcttcccctcttgtggaatggcta

SEQ ID NO: 36541 - DNA, 426 bp, Homo Sapiens
gactagaactccgagtcagttactatgagaatgtctggtatttttccttatacaatattttacaatatctttgtgtgcaaaatacacttatacaaggtgtattagtagtttaaaaggtgctcttgagtgacttgggtcacataatttggttttaaacttctgttgctttattttaaacatggaaactgtgtgagcatgagagtggagtgggagagagtggagtggcagagatcgagtgtgtatgtgtttctttttgcctgtcagagagagagaagttatttagaaatgtccagttgtgtgatatatagcagtttggtctaaagttgattgatgtgatacttccttgtttcttgactgtttttctaagttatttgatagctttggctgtttttgcagattctggaattgggatgccatcttactgaa

SEQ ID NO: 36542 - DNA, 478 bp, Homo Sapiens
gcagggtctatacttattacatctgcgttaccagactctcctttctctcttcaggcctaggcatgaacacaattttgatcactacattctgatgactgcagacatgaacatcactaagctattctttaggtgatgatcttaagatcttaagccatgcaaggccatgattacaggttcctaatctacaaagtcagtggggaaaggatcagtttacccaacatgataaaagatagatttcttcactaatagtcagaaaggtaaatacaatccctagctagcagggagaaagggatatctctagatattctttggataggtatccctgtaatttacaccataatcctaaagagaggtctccagatacactaaccaaggggaactcaactttagcttttgggtttcactgaatgcctagggctttccagtctgcagttttgttttctctataagtatagtcttctttaggcttacacataca

SEQ ID NO: 36543 - DNA, 557 bp, Homo Sapiens
cgcggtcggtcataccagaggcgggttcatatacttcccgagatagaagtcggcatcatggttaggggagcttccatctctggtgcagcccaggacggatgtggacacagggtttcagtgacgtttatcctgtaggcatcacaaccaactctgacccctgtggttatggcaggccttggggagggtgtgctgagtgtcctccactggtaaatgctgacaacctttttcagtccactgctcccctccacacacacccccaacccttttgcaagagcggctgacaagaaatcaaaatgacccatttgtatttcaatctgctctctttagctcggtctgacatccttttaccttccctcccatggaaggtatggataagtggccaacagaaccaaaggtagggaggaagaagtgtttagtgcctggatatttagaggataaatcattaagagttagctctgcaagtcccctgattagtaaaacttcaatgctttgagggcctttatcccaaggcttacctaaaaggcacccaaaacaagtatacttaggataaaatgcat

SEQ ID NO: 36544 - DNA, 473 bp, Homo Sapiens
tacggaggctaggagagctcctcacccccgccctaagccagacacaatggggtcccaggaggacactgtgcaaacttaggctctgcatatacaactgagggaggatggccacatatctgttatagcaggaaaagcaaaagatgcttactatctggctgacccagacttcaaaacgcaaagtcccccacactgccctgggctcgttatctgtccctttgccaacagtggttcaaggccacctgagatagtctcggcccccatccactttttcagtgcctggaacaaaacacagtctgcttccaaaactacctgtggctctttaaaatggtcaccataaaattatgcaattccctgatcactttaatattgaagcaatagtgtttagtttagtttttttcaattccaaattagtcgataaaagcatcaaacattccctgaaggaaaccatcaaatattcaaaatcagggccaccg

SEQ ID NO: 36545 - DNA, 485 bp, Homo Sapiens
ccacaggctagtatagttaagctgctcataagttcacagaggttcactgtactcctcctacctactcttctaggtgcttctaagttttcaaaataaatcttaaaaattatctttagcagatatttcctacaatttaatatacaagtccagataatccaattagtgaaaatacattctgcagctagctaatcaaggttcagactcagatattctctaaagtactttgaagttacttaacagcttttaggttactagtaatacctgctctgaaaggttccaggctcaaactactcctgctcgagttccaccgcaggggattctgggaactccattcagtatttgttcaagcgctaaaacagacccaaaactactttcttggataactatgggctagaccaataggtaggcataactgctcttttcacccaagatgtgtaaatggcgaggttcaactgtcattgccgtatcattcccatcaacttcgg

SEQ ID NO: 36546 - DNA, 460 bp, Homo Sapiens
gattactgatcctgtgtatatcaaagtgaagcaactataaccatggacagatggtaacgctggaggtgtagcaagctaggtttctctgccacaagtgctctatatttaattaaaactaaaaacagattagcagaaaatctgtcagtatgccctccttttgtgtgtgtatatatgtatatatgagacaaatctaataatttcttgggttatttttattcagggcatatatatttagcgcttaaaagtgacttgcatttttttaatacctcaaattttgtcttataggtatcctccaccaatgcaaggacttgatggaaattgaaagaggttacttacagcataaaccctccctctgtgctctgtgagttggttcagtcctattatgcataagttccttttgagtagatccatgtgtgaatgcatagtactgaagacttactccctttgcctgtgattaaga

SEQ ID NO: 36547 - DNA, 459 bp, Homo Sapiens
acatgtctagatatggattagagagtttaatattttattcatgttacgtgggaaaagttcttataaaaatagcactaaataactggatacaggttcttcacaaagtcgtaaaaacagagaaaggcttagggttttgtctagcattgtaaaataaaatccaaagggctggggggaaccaactttttattctagcgacttttctgcttttttagtgtttcatatcacataataaatacatgcaggttatggtataggttacgttctttgattatactagcttaattttaagtgtttgattaagcatctgtgatgtcgttaagattttgttcttaattctcacctgaaatgagaatgctgatggtgtgcacacttagcagtttagtgttaatggctacctctgaggaccatacctttttaattgaatactatatgtagcgcgaccttcatgttgctgcagtt

SEQ ID NO: 36548 - DNA, 558 bp, Homo Sapiens
ctaacacgggctggagtcttcataaagaagtacacaagatttcctctgaacaacaagctcttccgggcttcaccagcttacagatgagaagcctggaggaaggggggggtgtctgagccaccctctacttggcccagaaagagtgggccaccaccctccaagacctgcatggatccaatgaagcaaaaacaccatgctctcctctcagacatcctgatgccactcacaacgggaaaggggccaatggctcagaagccactgcccttccggtctcctccagcaaatcctaatacccagttctcatgccgatgaccttccgctctgaaatgcttcctggcatccacccatcctcccaggggctggacaactaggtcagggagaaaacagcccctctaccatgctgagacagggacccctctccaggacaattctcttccctgagacaagagggtcaaacagctctcctagacatgacctcagagatgtgcagccagggccctggcccaatttattaccacggggctataattaggtttgttaacatacagtcgagtgtag

SEQ ID NO: 36549 - DNA, 503 bp, Homo Sapiens
aactagctcgggtgaaggagctgacataaccaaaacacaaggcagacctgtgaaccacaagccaagaacccactgtcttaggaaccaaagccaggttcatcctcttgacatagacaggcccatagcagtggtcaagaaaatcagcagtaggaagctaagaaaatcagcaacaggaagctgcttggtgaccacaggatctgatcaagagggccagaccggcagagcactgaccagcatcaggcttacccagcccgatgaacctacttcatactaccagacagccatctccactaagaggcacaaaagagccctctctccaggacaattactaattgactaaaactaccggagtgacacattcattctttagcttaattatacatccagtcaggtcatccaggaagttattttatttctctaatgtgcccacaaattgttactctattacgttatgcttccccctccgctccccacaagacagtctcactccttcacccaagcta

SEQ ID NO: 36550 - DNA, 477 bp, Homo Sapiens
tatacgaatcgaggttttacctagcttgggtgaaggagtgatagcttgggtgtggggagtggcagcccacaacagagtatgggcaagccaaagcccaggacagagcctggtcttgtgggggcatggagggagcccacccaggagtgcccagtaaacaagaaggagaagccaggtcatcagcccagcaggaaggggagtgaggagtttccagaagaatcctgctgagaggccaaggcataagggtttcacttgagccctcgatcctgacttggtggctccctgggggcactcttagtctgtaaaaggggctaaatgctcaaactatgacctgctacaacaagaaacagtgaggctctgtacacaaagagcttagctcaaggcctggcacatatcgcacactgaaaacattggggactttttgtgtttataaaaatcagtcctacatgctgctactaaagtcactccttcacccaagct

SEQ ID NO: 36551 - DNA, 607 bp, Homo Sapiens
agtgatggagtgaggcacagtgaggtggcactggtcaccagacagaagtgtgcaggagcgcctgtctacagctctgggggtgatggcagcagctcttcacgcccaccccaggacccactccacttggcactggctggtggtcatgcttccatcagaagaaccttgggccatgctgcaaagcgacaacaggacaaatccggggacccaggcaggtgctccctagagaacagggtggtgggtcagaggcttgaccccacttaagctcttcctcaggggtgagattggttgagtgctcaggaagccaatacctggcttgttatgggatgaagctcttggccagaggggacccaggtgtgtgctggtgagaggccccatctccaggttggaatcgttgcttgggctctggggagcactaattaacaaacgtgtggttagggtgaacccgcaggcacgctggctcaaacggagaggcacggagtgcagagtactttttcagggtggagccaggggaaggacccagagcagggaaagctcagaaacaggactgcaccccaacagcccggcagcccaggcggcctctgcggcatcacaatgacggctttgccgg

SEQ ID NO: 36552 - DNA, 471 bp, Homo Sapiens
gtgatacctagctgggtgaaggacgtgagatgtagtagaaggtgatggacaattcgaaggcagaccggcttgggtttgaacttgggtctgcctgtcacttaagtgctcttgtccatctgtaaaatgtgagtgacaccaccaatcccatagggttgagaaagaaaagaagcttatctgaggaatgcaaccccctttaaatgaccaggcccaaagaggcactggaatgagacagcagtcacgtccccccatccccccagctgagctaagtaatcatttctaagctgcttgctccgtgggctctgactgacaccaccaatagctataaattaacctaacaatgccatatgctggacaccacagctcataccctgtggttcaaacaacaatctaatcgccagtcactgttatttctgtagaccaatgagaattcctgaaaaacgacgtttgcaattgtccctctcctgactttgt

SEQ ID NO: 36553 - DNA, 512 bp, Homo Sapiens
gactcccaaataggtgggtactagcacggctaatttttatatatttgtagggacggggtctgttatgtgttcaggctggccccagacgcctgggcttaagcgatctgcacaccttggctctcaaagtgctgagattctgtgggattcgcacctggcctaaaacataggtattaatagttatattcaaggtaagaataacattttgaatatttgaaaaggtgttgaacactaataattttggaaagccttttctacaaaattttgaggaaaggaagaaaaagaagttttggcagaaagataaggaacgccagaatacactgattaaattcttagaacctataccaaaatattaaaaatttttcctaaagtaaaatttgacattctgtggttgggagagtttaactttaggagtaatttataacagaatcatatatatgaaaaatttttatcttgattttcagtttttgcagagtgctttgaaggtcatacattgagtctgaaggcagtctgga

SEQ ID NO: 36554 - DNA, 391 bp, Homo Sapiens
aatatgcagccaaaattccagccctcagcctcctggctcattaagactcagtttgagaatcacttcctctgagcagcctgtacctaaccccaccccagatctgccccagattatcgtgcacccatcactggaggagtctctcgtgtggtcgtcactgtccatttctttgtgtgatgtcctcactagactgtgagctccttgcaagcagggactgtgactaaaccatctctgtatccctgctgggggcactaactagctggtgaacccataagtacgtggacttgaacggcccagtggagggtctgtatgagaggtatccgcatagggcaatacacggtgtgagagaagaactgcagcttcagaagggctaggagtctgaaggcagtctgga

SEQ ID NO: 36555 - DNA, 458 bp, Homo Sapiens
ccccaaatgtcagcgctgccatccacatgttcatttgcctggcagaagggtagaccagaaagcctttcctccaaatggtataaagcaagtgaaaagcaagttacaaatacatgcacttttgaaaattaccatgtgggcacagaaaagaaaaagattctccttgttcttattttaagagaaaaatactcttcacatttcctttctgtgagaaagataaataagaaacattaagtagggaaaataggtggtgagacaaaaattattattttttccttagccaatgacctttgagaaattgaaatttccttggaaggaattaagaaggaaaaataagtaaaaactaaagcagccttctggctttctttgttaccctacacattgagcacaactgacagggtggccgctgcaggacaattcataggccttcattgtagagtcgtggtctcaggtgggggtac

SEQ ID NO: 36556 - DNA, 381 bp, Homo Sapiens
ttcatgagagaatggagttggaagagttttgcagattgtaaagtgctatagaattgcaagtacccacaggcatttatgcataaaatgcttattactgaagtatgtatagcagcaggaaaaaaacattggaactagctgaaatatccaacaattgggatatggttgagtaagcattctgtttaccgtcacacatgatgggtttgtaataacacaaggatgtctattttatcgttcacctgcaagtaacaaaaacttgacttacaatggcttcatcaaagaggatttcttgatcatatacaaataagcccagagagagacagcctggcccagttctggggcccagtagggccattcaggaaccaactacctctgttcactgct

SEQ ID NO: 36557 - DNA, 442 bp, Homo Sapiens
atatcctgagaatattctctatattctcaaagaaactggcataactttgcaggcaccttgcctaggagccctcttacttccatccacagagaaggtactactagttataagaaagaaatggcccaatccctgtactttagcacactaatggaaataaactacaaatttctgaaaggaagttatcaactcagcccttagtggccaagccaggacctaggggtataggaaatgaggcaaaatattttttatgaccagcagcctgatttgaagatcctaggaggtcaccccaggagaagtggctctaaagaggtatccagtgataattgctggcagcaaaaagggaggcgaacccagcacttgctgctctgctctgagtgagccaaggaggtgctgttctcccggggcacccacttcaacagctgttgtccagtgctgcattgta

SEQ ID NO: 36558 - DNA, 362 bp, Homo Sapiens
cgagttaagcaatcgggttagaaaacacagtcagagtgcatctcagtgttgtgggaactctgtccaggaaactccggccagaacttgaacagagcgaactctgggccacaccagcatctaaacagtaataagaaaagccaccaagcagccaccccaaagaacaaagtggagagaacacacagggaagggcagaacacgctgtgttgatatttctctgctcagagagctattaatttgtcacttattaagcagcacatggtgagtctgtcattggcaactatgggaaggagaagagttccccattttttattagaccagaaaacaaagtcacagaggaggtgatgcaccctctggccttactc

SEQ ID NO: 36559 - DNA, 425 bp, Homo Sapiens
catctatggtataataaatgaaatattcattttacgctggaatagagattataatagcctcacattagttcaggccatgtggcaccatttctattaaaaaacattccattttcagagtgctctggtgttcagcactgttggctgaggaactgtgggcctgctccatcgcactcactttatgtgctacggtcctgtttcacaaaggccaaatatccttggctcaagttcatgcagctggtgaaagaagatagcgcaaggtatgaaccccgactctctcacccaaagcctgcacggtgcttcttctacacttaatatgaacgcaatgatcacctttacagcctctctgatagctgactgtgagtcggcaggtctgaggcagggcctgggaaactgcattcctaaagcactggggctcctggaaggac

SEQ ID NO: 36560 - DNA, 416 bp, Homo Sapiens
aatcgagctcggaccaggacagtcttacaggacagtacccgtctgcagctggggactggggaccctgctttagatatgtactctggctttgcattctggcattagctaagcaccctcttaaaggaaattgggtctatactctcagtccgtgttctccctaacacctggaaacattgaataccttcaatgctgggaagttaactcccaccacaactagaacagctatgggaaagacaacagttgatttgaagagtgtcaccaatttgcacatgattccatcctttaacattcttatcctatcagctctgccaaacatggagaatagttggctgcaggacagccatttttcctacttgtagatacaactatttcttcacccaccaggatgttaaaggtccctgtaccttaagactgat

SEQ ID NO: 36561 - DNA, 403 bp, Homo Sapiens
tcttttacactgcgagaagagcggagtatttcgcagtgtcacctttcatacctgtggcacataagatgcagagcaagttaacagtcacataacagttgtttttctttttaaagtttagcattaaacacacgcacacatttcctcatttttgttttcctcatttttgcacgtttttgagattgcccccacccacctctgcatacttaccatttccaaactcgggttaaaaatctactttttccaaaaacagtaacactgacattcctcccctttttcaagggagacagagtagggtccttcaaatcttaattaccaacagatttgacaactgttttaacatcaaatctaagggtttacttcaaatcaacttcagcaggaaggaaagaaggtccagttggacaag

SEQ ID NO: 36562 - DNA, 427 bp, Homo Sapiens
gcccgtcttaccacaggcgtgagccactgtgcccgagccacttttccttttaacataaaaacattgatatcctagagagggcactgtattttgggtacatacgggttcagatcacggaagagttgtattctatactttttttcatcattcttagttcagtatgatgtattttataatttcatatgagaaactgtaacaatgggcatgtgtcatccagcaatacctactcataaatcatattaaattttgatccaaacatgggagaaactgaagttttctctgtgtacttggatgctttcagaggcataaaattatattaccatgtgaaagcaagcctacaaaattcctcaggtggtccactctgccactcaaatgagagccagacttacagtgcacactctacaaacggacttccagctcgtcaggg

SEQ ID NO: 36563 - DNA, 421 bp, Homo Sapiens
gctactctatgcccagcactttgctcagcacacatagacgatctgttgacagatggctctcaacgcctcaagtacgtgtcagagggacgcgagccgatcagtttacccaagctccttacttattctcatttaccctctagaattttatttcctgcctcagaaagaagaatcccatctgccagaaggaaatatttgtagccaacatgacaaaagtggaatccctattttgtaacagctgtgaatcaaaacactagtgactgaaattaactacatcgtgcttcggaacagatgtgtgcacagaaaccaactcaagctctggtgttcctgggcaccatgtgtaaatcatccacagacaacacggtgggccatgttctcaccttggtgctatgcacgctcatttttaatgttctcttgaaccatt

SEQ ID NO: 36564 - DNA, 357 bp, Homo Sapiens
acccgtctaacccaggcttgacaacagctgaattctcattggaactggctgtgctttagtgaaggggagtggaagaggcaaaaggaaagtaattccttaattatttcatatgtcggtgtctacttttaaaagataagaccagccccctcttcccagagatttggttatatttacacaaccaaattgaaagatgcttttaagtgatgctgtaggttaacaaaaatgtaatacatttttgttgtacttctccttttagatccttttgagttctatgtggagtttatttggtgggtggctatagcccatgttgctccgtgaactgggcaatgaaaagtgaagagttctgggagaatgtga

SEQ ID NO: 36565 - DNA, 443 bp, Homo Sapiens
gacagaaaccagaggctgtcgcagttctgctactcactgggtgactctgggcgagtggcaggctctctggtcctgtcttttctgatgtggagaatgactagctggtgcccgaggttttcctaaagctatggaattccatcattttataaatgacttcaatgacgaatcctactggcataacatctatggtttcaccaactcttagcagtgatctttggttccagattcatgtgaaaagccaagaaccgctttccacaatttgtcttgtcatgactctccggctccatattttaagaagcagtctacactagcccttgaatctagactctaattttttaagatacaaaggaaatcattaagccccggaatattagtagaatatacggcaatatggatcaagtaatccaaagtattagcaatggtgcaagaggctgtcacctagc

SEQ ID NO: 36566 - DNA, 440 bp, Homo Sapiens
atactagcacactggtctgttgaaaatgacgccaaaactcccttctctactgttcatccggatggggtccctgtctccaatggcttagacatgtggagtcccaactcacagcagacattatcttatagaaacattaaaataaatacaattagttattacattaattgtatattatcctttggctacattagggtttacagagcttctgtggactagtctagaaacctaacaatatataaaatattatttgggaaaatatttgtaaaactacaaatttttaaaatagaagctattcttaaattagtgactacctacatatgagtgagctgacagtaacaagttgagttttcaaatagccttcttctccttccccaacagtttaaagctgtctactctaagaatctgtcatattcaaatcaaacataacattttttttggta

SEQ ID NO: 36567 - DNA, 405 bp, Homo Sapiens
acattcactataaagaaaaacatcgatacatgttttttatcactaagatccttccattaatgacaactctcaactcctggcctccccaaagagaaaatgcctttaagtaaagaaaccctcttgtaaatactgtctagcaaagcattcttaatcttttcctcttcccaaagatggaccaccagaatcttctgatagctaagttccagcatgcttttttaatcacaaagaagacacacatccaactctccagtcctttcaactcccaagaaaatgtgaactgttaagttaaaccctacgctcatctcggaatcactgttaattgtaactgttatgcctacacaaatcattaaattctatcttcaaaataaaattaaggaagccaaaactgttcaattaaatccaatc

SEQ ID NO: 36568 - DNA, 369 bp, Homo Sapiens
gcttcactggccgtacgcacaaaaataagaaacagctgtacccttgaacacggattcaggagacaagctaacttataaggggaactccattacacttacacaaataaaggcaaactcttacggaaacacttgccatcctcacatacacacaccaacacagccgctacacaccaacagaccatctgtctgctagaccaaaaacatctctttccatgtacaaactaaccagtgacatttattaaacgtacaacactgagatcatcctgtcgttcccacataccgttcaacgcggcagggacaccacagaccttgtcacacaggtaaaatcccctctcaagatcgtgtcctcgaccactcttatcccttaat

SEQ ID NO: 36569 - DNA, 350 bp, Homo Sapiens
gacgccgacactctagacagcccatcagcgctctcctcctgcacataagatattcatttactgaagcttgtgatgagagtagcaggcccagtggtctgcaaaatgacttcagggttattctttccttgtcttggagaacagcacctggcttctgcccatccataccaatctccttataacatgtgaacattcatttagccatacccttggtgctctctcccaaacacacattttcattgtttaaaacatggccagggtgacaattttccaaatctttaaaagttctgctcctcttttgattataaattccatctttaatttggttctttttgcattttactttggactag

SEQ ID NO: 36570 - DNA, 394 bp, Homo Sapiens
gcacgcactcactgcacgaggctatagattatgcaacccctatgactccgagctcccatctgcgggaccaccctcagattatgaccttgaatcctactttactgagaaaactgaagcaattaaaagagatgcccaaactccaccacacagtaatgttatacatttcaacaatgtgccatttcagcctaaactgaagactgatttcattacaactctgaaacacaagaaattaaatgcaatctgggattagctacacttttaaactaagatatttttggaatgagatattaagaacatatcttgcacatgaaacaacttctgcctagctacatcatttgcttctcaatcaatgaaataaaagcactacaaaatatgccttttagcttaaaaaggg

SEQ ID NO: 36571 - DNA, 375 bp, Homo Sapiens
acccccactctagtccaggaatggcctcctgtattgatcaatatctcagctcagtctttgaaatgaaatgaggtactaagtaagggtggatgattgtagatgggtaaagaacttcaagcagtgagaaaataatgaccaaagttacagaactcgaggtaggctggtttttggaggaggtgagatgtatggtaggtagttttcctggagtggagagatggagctagatcagcaagctgaagcataaacatgaagactttgtgcactacaaaggctcaagatagatctgtaggaaatgggatgtgactgacaatcttgaaagagagtgctgtgttcacatttatattttatataggtcatactagtggccatgtggag

SEQ ID NO: 36572 - DNA, 379 bp, Homo Sapiens
ctctagtcacatttagcgcttctctccatgtgtctccctcttcatgtggcattttcctctccttataagaacaccagttatactaggttagagctcaccctcatgaactcatcttaacttgattatatttgcaaagaccctatttccaaataaggtcacatgcacaggtactgaaaattaggacttcaacatatctttctagggaacataatacacgggtgttaattcctactaagaatcttgcaaccaaaactgtgtgccagtgcttgcttccagagaacccaatccatgacatctcttttctctttcttggccataggtagagatacttgggaatattttactctttcattgcctgctccactctaagctactaaat

SEQ ID NO: 36573 - DNA, 439 bp, Homo Sapiens
acgccggacactctagtccaggtttgaatttcatatcactgaaggaggcactgaagaggcaggaaaaacagtcttgaatactgaacaccaccccttccctgtcgcccccattgcccagcagcagcaacctggtgctgagagtttctgtgtgctggagagagggagggccagcaattgtgaggcattgaactcagcactgcccttgttacagcagaaagcaaaaccggaccaaacccacctaatgcctacccatggagggagaatttaaaccagacctagccaaagcagaattgctgatcccagtggtccgaacttgagtttccacaggcctcaccactgtgacctaaagtgcttggggtctccgaataaatctgaaaggcagtctaggccacaaggattgcaacacctgacgagtcctagtgctaaactgggcccactg

SEQ ID NO: 36574 - DNA, 351 bp, Homo Sapiens
ataaaaatatcagctaccatttaacggggcctgtccaagataaccagcatctctgcgatcatcggtgctggtctaatacttccacggtcatcctctcaacaacccctcgaggggcacatactactgtcatcatcccccacagtacggatcgtcatgggaggcacaaacaggtaatgtaacttgaccaaagacattaactagtcttgtgtcagaacacacattccaactcgtgcacgtgttttcaaatccttcacttgggcatgtaattgtatttcttcacatcttttcatgacacttaatcgttatctttttctcttctaaaacagaaacagggtcccgccctgccacctg

SEQ ID NO: 36575 - DNA, 534 bp, Homo Sapiens
gtactcttctctctcagtactttgttcttgttaatatcagtgtatcaatgagcctggttttttgcctcttattattattattaacatagtgagcacaggcgtttcgtactcggcgtctgattttccagcagcgaagcctctgccatccagccccaccgtcccgctggctcttgctcattgtctttcccttccctgcttgcctgctccctcacgcccctgctctgcgtgtgggatgtgaaaaggatgtcagggactaggcggagggcatgttcctccgagcccaggctgcaccttggcacagtggagggtccaccaccccaggtagcccaggtgaggcccctgggtccccctgtcactcaggctgtccacatgaaagtccagatgtctccgaccaacagatccctgggagaaaggacgtgacggcttgacgcttcaccgggatgggttcccacgtccctccgcgttgacccacagcttccttacggtcttgtatgtagtgagatgcttttaagggccggccacggtggctcaacg

SEQ ID NO: 36576 - DNA, 621 bp, Homo Sapiens
gttttccaacttgactatttcataaaacatgaaatggtgcactgtctgacattcatccaaagtagcaagctgcaatgtgcttttaaaaaattccacagtgtgttcgttttgatggggccaaccagaaaaactagggaaagagaagttcagaaagttagggagtcataagaatgcttggaatttctaacagattttactaaacattttctgtatcatgacatgttccagaaggccataaaagttagtttatacgaatataaactactttttgccttgctgataactgcaaataaataattcagatgaccacccaccaaaacaccaagacatttgggggtttatgtgtttcctacagaatattttccttataaatttcatggtcaaggagcacaagaatgaagtagtacctcattttattccatttttaaattctgcagcacctgtgtcaatatttttgtatataccaataatatcatttacagaataagataatgactaacctccttccttgatttgactttaaaggaagggatagaaggcattctttaatttacattttagtacagcaacacactgatttctccagtccaaattacttaatctgtcacgttgctttcatgg

SEQ ID NO: 36577 - DNA, 371 bp, Homo Sapiens
tctagaggataccccctagtttcagaagtttcaatagcaatctgaaaaaggaacaaagttggaagactaacacaatgtgataccacatttgtcattcctgatattaatagttgtgcctttttccccttgatcatctggctaaagatttatcaattgtattgatcatctcaaagaatcacattttggtttaattgattttctctgttttctgttttctaattcattggtttctgctttatctttattgtttcgttttgcttattatccaaaaagtttatgatttttgtattacttagaactgtgttatttaacttccacatatttggacattttccagagatctttctgctattgaaacttctaaaactagg

SEQ ID NO: 36578 - DNA, 448 bp, Homo Sapiens
gctatctgatatggacatagaagtgagtgctgaagaaaagttaaggtgcatataattggagatcaatactgctaggtctaaaatctttccagtactgaccattcctaaaaggaaatgcagtgtagcttatttagtctgccagacattattttttcaaatgctaacttcacatcattactgataggctaatatttgtatcataaacttttatggtaaagctcagtaaataattttggagagtttatgtatttaacgtttttgagcacatatatatatatgccacatagtgggcattagagatacagagatgagtaagacatggcttcagtttgtgggaagcttcagggattcctattctaatataagtagcatgagtaggatcactaactgtaacctatttctaaatgggactacttgtctggcattgcgggtgatgtgaaaaaggaag

SEQ ID NO: 36579 - DNA, 478 bp, Homo Sapiens
gattatagaggatccccattttagacatcatggtataaaatcacgccacattatgatctgcttaaaattcctgttctcctttgggcttttctgacaaggcaatcaaattcataaagtaaattatgctaaatcagtctaaaatgtttattcaatatttgctatattcacagcagcaataattaggcaataacatgagatacaaatgagcagatactgttcctttcctcaagcttacagtttaattttgaagacagttacttatgtaaataactacaaagccaagaataaaggccacaagagtgatagcgaattgctctagtagcagtgggtattctagctgagaatatcagagactggcttcattgaaggagtattctgaccttggctgtaaatgacaagcttttaataggtagaagagacatgaaaggtcattcaaagctggagggaatggagttaaagatacaagacacagatctgt

SEQ ID NO: 36580 - DNA, 387 bp, Homo Sapiens
tatacccctagtttagaagtttcaatagcacattgcgctgggggtgggtgacgaggtgcacaagtcaggtcagggagggggactctgccctggcaccactggggcacaggacacgtggctcaggtgtcagctgaggaccctccagtgtaggcgaggggctcacagccgctgaggcctgtggacacggctccgtgtatactgaggtcgcagagcacaagaggttgggggtgtgatacggaccgacctcgcccatccaggaggaatggggctggtaacagagctttgtaacccctcagcaccggtagaggttgcgtggctccccagtggagctgagggctggcgtttcttgctctgtatttccctgctattgaaccttctaaaactagg

SEQ ID NO: 36581 - DNA, 546 bp, Homo Sapiens
tgaacgagttgaggttgtcaccgccttctcaaccctcttggggaaggcttgggtagacctggcagaaggggttggataggggatgtcctctccaggtctccccgtgaggtgagaccctttccccttgagtgccatggtggtcccccaggcatcatcaagccacctggattcttggtgctttgacatgagatccagtagacaccctgtaaaggaggactgtgggcactgcctgctctcttggcatgggcttctccagctgccctgcacttgggcttcttacagcctggaataaatcctcctggcccatgtcccctctgcctggacccagctacagagtgatactgctgatgccagaactgactcttctgttccaacagggagtggtgccctcgggtcccaagagggctggcagactgcgagcccttccctgaagtgaagatgagcaaagtggaagaccagcacacggaaacatgcagcagtccctcttgggaagaagaaagagggagccacattgtctataccctgggacttctgctatggtactct

SEQ ID NO: 36582 - DNA, 428 bp, Homo Sapiens
atttgtgagctttgtaccttatgtatcctcgtcattggtggtacttacttaaccaagttaaaccatttctgttgtggggttattaaaccactggtagcttttataccagatatataatccttatatccaattacacatgaagaaggaaaagcaaaactcaggaacactgctattgtgaattactcttggattcttgtgcttcgcctttgaaaatgcttaaatggccatgaccctcttcctgctttattctagtgtagtctttataaaacttgtgggatttgataagcagttcacatgcaaaccagtatcttttaataatacaaagtagcatctggaacaatagacagtttgaagttagaatctgcttagacaactttcttacttggtaaattcgactttttaaaacctggattatgctattgaaactt

SEQ ID NO: 36583 - DNA, 378 bp, Homo Sapiens
gccgggtggaattgtaatgcggtaagaagaagtgacatgtcatcccttgatatgtctgcatgcaaggtccacacccaaaagtgtcaatgtttgccccccaaataaaattgtctggcttctgaatccatgtgtgtctgtgtgagactttacagggctgggtggaagcccaagggcaagaaccactgcccttcccctccaccaaacccagccctccagcaaggcagccgacaacattccacgaggccactgtgcccagcctcctcccaccagaaaggaaaacaggagaatggctggaacaggagctcagggaaggcacacaaaagtaatgtggtgacctcctctgctatccacactgctattgaaacttctacaactagg

SEQ ID NO: 36584 - DNA, 495 bp, Homo Sapiens
cgggcgggtcgtctatatactcgcaaccgtgaattaacaactgtataaggaaattaaccaaaaaaacctgttacgaccagcaaaggaagaagaccaatgtagcagcagttctctggaatatcctggcttcgttgatttcgaaccacaaggttaacattaaaacacaaagactcacatttaaatatttcttttgaaatcagaaaaacaacagctctttgaaatgacgctggaacgcacacaatagattctactgggtcaatgtattatttatatactcatctgaactttcaaaagaagttaaatgggagatattgtcaacaggcaaaaataagatattccaatctattgttcaagtttatggctccgatataaataatgggctataaacccgtatctggaaaacagttgcgcagtgcgtgcttaatggccagccaatgaaaaccaacgtctcattctactccgtctttcagcacgtcaaggacatcccactccgcc

SEQ ID NO: 36585 - DNA, 523 bp, Homo Sapiens
taagaattgcacagcggcggcatattagacatcgggcacatggctgtctctcacactgggctatctagagttgatacaattccccagactagctgcatattaagcttgctgtgtacagctttattatggtgtggtggtggaagaagcattaatattccagctccgcatctgacagggcatttacatgcgcccatctgagcggcacctgagagctcctccaaggtgcagtaactgtgcgcctattgtaaaggcaaatgaagctcacctattccctgctgggatcagaagtgacctcaccaccccccatgcctcaaatccttcccttgccaacctaactcaatgccattgcagaatgacgaatgagctcagaaatagaccccaagttactaaccctgctaagaacagcaaaagcctttgctgaaatgttttaaaaatgcatagggagtgcagctggccagtaaaaagcagggagacaaattccaatgaacccaatatggaataagttacattttaaaactgatta

SEQ ID NO: 36586 - DNA, 476 bp, Homo Sapiens
gaataatggattcactagggaaacaggtaggaaatgcttgtccgtaactcataacacaaatatttgagaagcctcacactgctggagaaaaaagagagacttatttgttaaaggcacattacaaaaaaggcttcaaagacttcaggggaaatgagagatgtaaatgaaatgggccgccatttagaaaggatttaaaaagcaaacagaaaaagaaagcaccaaacataccactttaagtcaggatcattttatgaatgagcgttaggcacaaatcagggcaacatgatagtgttaggcccctccaagagtgaaaatactgtgttgaattttaataaaggctggacaagacaattttgtgctggatcagttatccaggctagtggctctaaagaaagccctgaaactttggtgtttccaaaatgagcactaatctatttggtataaagctatactagtttttatagcggattgaagtt

SEQ ID NO: 36587 - DNA, 447 bp, Homo Sapiens
gagcctaatcaagtagagaaagcaggcaaagaggcgcaataaataggagagccttccaggcaacataaggcccaagcaaaggcacagagatgatggggaaaaggctgaccatgttcaaatacatattcttaaagaacaggagatgtacttcataaaagagtgaggtcctatatgaagtagagtcaaagggactaggtccatttaatcagaaaagaaagatggcagtattttaatagaaccttcaattatttaaaggaagtaaacaggggaagaggatggaaaataatggtgggaaacttcctttacattgtcaaaggcctttttttataagtgacactttagcagggacctaagaagaagagaaggaaccagccatggaaggaatgggaggaatgacacatgcagagaacatgaatcaaaaggagctttacattatttggggaatgt

SEQ ID NO: 36588 - DNA, 481 bp, Homo Sapiens
ataacgtggattggtgtaagccatacgtagtattaaaccacttttacacttaagcactttatatgtggttgagctttacaccatcattagcttccggtggtttatcttgcctacaaagtatctgtaatataatagttcatcacaatagtctatatgacaaaaacaagaggttagaacatcccctcacctaaaagaggttataatcttggtcaaaaagtattaactttgacatgttacatgtttaaggcttttttcttaaaataactttgataagaaaattatagttgtatgctataagggtacacacagttagtgtggccagttttgcacattggattatacttctctacctaaaatctaatattttaaaactatgatcattaaattgctgactttgagggagacgaacagtatatacttttaagtactagtcagacaagatcataaataatgtgcctttatagcggattgaagttgggga

SEQ ID NO: 36589 - DNA, 386 bp, Homo Sapiens
atcggctataaggctacgctatcttagcagttactgcccagaacacgccatgtgaaggtcttataggaataaatgctaaatagttgaataactaaatgtgactccatgagaatttgaatggtgggaatgaagcaactgcactttcaaagttatgggggaggaattccctatcccaggatggacatcaaatattttttgtaaatcatttaagcaaaaacgcaaggcttcatttttcacttaggttacttttaaaaatgaaatcacccaatataagtttctgacactcattattttacactcactgctaactgtagtggtgtctctgattcatagaaacaagtcacagtctgcagtattattttccataattatagcggattgaagtt

SEQ ID NO: 36590 - DNA, 481 bp, Homo Sapiens
taatctaagctataaaaagagtaacaacatctctcaatataaagcaagatacagtctgtagcgagaataaattatcactcgatattggggtatatctggcttcaatcacttggcacatctgcggacagaaactccattcactaagtaaacgaaggaacttcttccttccaagggctgggaccaaatttcctgtgcaaaaaccttcctgtataagtgaaacctgtcattctcccagcaaaggataattgagattagagagtgtgtaaaacaaaaatacaaaaatattacccaaattatgtgtaccacatacaggtttgaaacctggccatccaaaatactaactaaaaagactattattgttcttaaggtagagaaatcagacaacacatcttggcgctcatgttgcttcctgcactaacctagttcatctgacaagtgagacaaattgttcattgggaagatgtttatatcatgcttcagt

SEQ ID NO: 36591 - DNA, 499 bp, Homo Sapiens
gaggatccctacctgtaaagaattaggtactcagaaatttattggaatttatgataaaactgttaacaggatggactctaatagtattccactagaggcctccctgcaactactttgtggtatgagatagtttcaactgtgtcatcttgatcactgtcccttggatatacttagctttgtcaacaactttctgaaaatgtccatctgcattcgaacacactagtcttaaaatttaagtataacacttaggaatatattgatatttgccaaaaaaaccccagtatttcctccttaaatatattaaaacaatttacaccctgcagattttatgatgtgtgataatttggctttgacacttatcttccattattttgagggcaactgtgtacagaaccaactaagggagccaataaaattcgctaggagtggctgggaggctaggatgaccaaaggtcaaatacatttaagaaaactaagctttagtgtagctcctagatgt

SEQ ID NO: 36592 - DNA, 441 bp, Homo Sapiens
gcgttcagaggatccccttatgttcgaaccaccttatgtactgacccacctccatcaattcatgtacttctacttatacgttcaaatatggaatgtcctatactcctcgatcctttcaaacaattcaactaaacaaatgtttaagtgccttaaaaaggcaagaccattatactatttcagctgggtcaataaaaattagaaaagaatcttagtttaaattctctatgctttcctgaaaccagaagagagattattttatacccaacacactgatgttaacagtatctatttctgccagacctaagacatagatgtttaatttcacattctgtcttcctatcagagtcccttctgtgaaataacttgcattcaaaaatattagaatttgctgctgagatcaggcaaaggcttaatctctgaaaagcatccatagaagattaa

SEQ ID NO: 36593 - DNA, 531 bp, Homo Sapiens
gtcgacacaccgaatgttactgttattagaatgtctttctcgaggagctcaatggacttcaaacccttaactgaatctcaggtcatattaataacatagaaagggcaagtacacagcagttaacattttacagatgaggaaaccaagaatggactaaataacggtcagaacatatgttgatgagtaagaaataaattttcattagactcctaataaaattgcaatttcttctaaaaccaccggccattctttaaaggaaaaggcatgcacagacgctggcaatgcgtggcattgctctgcatatacctgcagagagagctttctgtgtgttatctcagattctgtttaggaggaggtggggtatcactgaatacactgaaattgcatttccattccttgttcttccttagcttcggagtttgataggcggggagtggggtaggaagtatgctggccctgcctacactctcattctgctggtttttgctctgtgcacatctgtgcaaagccctgccaacctcacgtggctgt

SEQ ID NO: 36594 - DNA, 425 bp, Homo Sapiens
tggcgttctagaggtccccttatgttctgacccaccattatgtgcgacccactcttatgttctgacccaccaggatgtggttactacagcaacacactgtcaggtcagcctgggaagacagcaataacttctgtcaggatacagaaacaaatttatcttcttagtagctggccagataatttcctaagggagaaagggctttgatagcaatgaggtgggtaaaagacatagccttggtcttaagtgaagaagggatgatctagaggacagcaaatattccaagagaatgttacatccataaaacaagaacagaatgctaagaaaaaagaacaagagagtactcttggagattaaattatatttgctgaaagtaaaaactgtaggataggactagaagacaaaatttgaggaaatctgtcagaggt

SEQ ID NO: 36595 - DNA, 414 bp, Homo Sapiens
ttatgttcggaccaccataaatgcgtcaggatatgatactcgagagccagtaggaataagggcaaagaaacaagcgttaaggcaagtaaattagatgatgagagaaaacctagtctacaaagttaccatttaaatcttgaactccggacagctatttcataaatggttttcttgggtcatacaaggtgaccatgggtcatataaggtaatgttaaaatcacaagtcagggtttctgtctgactgctggtgggtcagatatcttcccctcccatgaaagaaaagtcattctttagtgttaataatcttgtcatgtctgtagaaatgagcacttcctcttccaccaccaagctccccaccccaaattctgcttgggacattatactgcaggctaatgatctaaacaaaattaagat

SEQ ID NO: 36596 - DNA, 413 bp, Homo Sapiens
ctagaggatccccttatgttcgacccaccatcagtctcaacacatgcagcttggtaagcaaaatttcctgcagggagtaccagtactgtttcattgtcaattcagaaaaaatgataacacgttttaatatcagaaactttgtgggatgtgggaagatggattccaaagttcatctgtctgagagaatgtagacctacatgtctacatttgggagtaaaggagatttaaaattaggtaaaatgtccttagggtgtatgcagaggtctattagtcctttttcttctcccctccaagggcactgactagtgattttcttcgggtgcaacgtcttagttcatgttgaatgactgttatgtactgggtgctgtgatataaatgagtagatgggcaaatgagtgaattcagtgcccagc

SEQ ID NO: 36597 - DNA, 415 bp, Homo Sapiens
atgaccgagcctgggataaggaacactttgtctcagtatttatgaagagcacacttggcaacagaggaagagaatcttttgaattccagatcagaagggaatacacgcctgtaatcaagattctggaatcgtacaaaataatgtatgcttagactctgcgtgtgagtggaaaccgttatattggccagtgtagatattagtcataacgtaggaagcagtttttaatgtgcagttcttagttttcaatcttgggagcttcttgataattaagtgatgtttttgacagtgaggaaattaaattatgtgggaattcactccctgaagtatatttttgagtagctttccttggatagtttaactgtagtcttgtcttcccaggatgaattaggtgacttattgaggtctcttcagtagc

SEQ ID NO: 36598 - DNA, 439 bp, Homo Sapiens
gtaccgccagggtctaagaacccctatccataggactcaacaaatatatcctattggttctttagatatactatagcactaaattaggtgctagggatataatggtggaacattatatcccactgatgctgtggaaccgacataatagtagaagaaataaggacagagaacagtcatctttgaattcttctgaacagcctggaagtgacagtattcttagagtagccccctcttagtataatacttccttctttcattatcttagtaactagcctcacttggagtcctgactagggaaggtagttacggagaggatggatataaagagcctcagtcagtatatgataaagttagtccgagtcagagtacaagggaagcttgttactagggcactacagaatgggtaatcgagataggagaagagggcatatatatactg

SEQ ID NO: 36599 - DNA, 419 bp, Homo Sapiens
aaataaaatccaaataactaggcatacagataacattccacagatctacatccaaaccaccatatttcagacctcatcttccactactaatctgataagactctgctatataactcaatacggtctacccaatcctacctgaacacagattatgatgctacattcctgattccatggctctactcacactgactcctttccttattcttatattatatacaaattatctctctactttacggatcagtatacattctccttaactacccagagtagtaggttttgactataacccacagtatattatatcataatccagtatacacaggtttcacaattccatattacactttccttcatgcagagtacaatggtatttatcttcaatttcttttacaaaatgattcactaaatgatca

SEQ ID NO: 36600 - DNA, 436 bp, Homo Sapiens
ctcccctcacttacctagtctccacttcactggcctccttccctttatctaacacactaagtaagctcttacttaagacacttcccgtttctttgccctggagactctttgatcatatattacttaatatttgcttccttgatttattcaaatctctgtgcatgtattacattctccaggaggtcctccctagttaccctatcacagcagcagcctccatcactctctgccttattctgcttttcttcatagcactcatctctatggtcattactgttacatgtctatttaatattatctatagttcctactacaacataggatccatgaggacctggactttattttgtactctcctgcatctctaggcactgtctaggcatgcagtaatagataaataatattggtcaacaaggactcctttattattgctaat

SEQ ID NO: 36601 - DNA, 357 bp, Homo Sapiens
cggaccccttagtctacactcatttcttccctcccactaggatttcttcccaatctgacgctctcaattccattccagtctacaccccatattcctgtttcctgacttcctatctctgtgaacttcttctcatcagtcctatcaattaagtcaggtctctcatatattaaaatacactactcccttgacaacacaccccgtctattaacaccctgtcaatatccaccccttttatagccgagctttcacaacgcatcacttccccagcaataaccacttcttccattcccatatactgcactgcctatgagaatctagtcttctgcctccagcactatatagtagggaaatattcct

SEQ ID NO: 36602 - DNA, 409 bp, Homo Sapiens
tcctggtgaaccctattgggggggatctctggcaaaacttcccctaggtcagtcactgaccctggcacatcatgtggcctctctgggcttaagtttcttttggatgtgttggagtctggggtacagcaggagtctccttcagccttataatctggccttagctaaggctctgtctttgccagtaacttactgctctattctacttaactcatgacttctatctcatagtccaagatggctgcctgagatccagctatcacaactgtttttcacccagctagaaggaggagggggtaaagagaacacctctctttttgagaacacaacctgggaattgtgctcaacactctttttccaagtcactggccaatacctagtctaagggctacatctagcttcaagggagact

SEQ ID NO: 36603 - DNA, 442 bp, Homo Sapiens
gggtaccctatctttccctttctttcttctattacatctatagtatatctattcttctgaatcatctttcaattatatacatctctcaggactctctatttcactagcagaattaaatatgaatactttatagttcaaatccacatattttgaaaaatccgtaggattaaaaagctttaaaaataccagagtatttatttatcctagtgattattttttcctccattattcatttaatcaacagcgatatgctagtatttttagaagttcatattttcttccccaagttggcttcacttgtcattttttttaatcaactctgcaatttgtcagttattttccattcctgttctatcatcagagggataacgatacctttcttatctggaatcagctgtacataaatacacacatattcataattcctctttctttgaaaaga

SEQ ID NO: 36604 - DNA, 361 bp, Homo Sapiens
ccgtatcagacatcttaatatggcattcattctcatcataccctgctatcattaccctgctgtattttctttcagtgcattactcactctctgtaaatccttatttgcttgttttccatcctttccatctaggaatacatttatcacgaataagggaccttgatctgaccctgttatatcatgctgtatcctctagttgctctaaccagtgtcctgcgaatgctggcatgaatgttcttgaacaatactcctagtatgacatgagacaatactacttgatcaggcttgcgttagcataatgctcacatagttcgggagacagggcgaagaatgtttacatgaagcccaaatgacgggcata

SEQ ID NO: 36605 - DNA, 364 bp, Homo Sapiens
cccggatgcctatcaggaaatatcgcagacctagaatgaattacagttacccactgtggaactgaggagctagggtttctcataaaactccctgatagaagacgacttttgataaaattttttttccgccgacaaaatcccctgtcttctcaactagttactgtctgtccactaaataagaggtggtccgtcacttcttcagatgagcaactacaggcttttcaaaagataattgctaatcaacccctttgtgcctgggtcttcttatttgtaaaaatagatactactacctaactccaaagtgtgtggtgaagacaaacaattggggtgatgtatactaaagtaacgaaagtgttgaccatac

SEQ ID NO: 36606 - DNA, 459 bp, Homo Sapiens
cgggtctgtatgggtgtgaccacatcacagcctcccctagagctgagtctgagggcacttgcacctgggcagccagtcgcgtacacacacaggcgccccaccatggggctctgctgcattccagggagcacattcgccgcgtgcacagagaagcacattttcacgcatgtgacaacacacacatcagcatgtggacccgtactgctgcccacaccaacaccagccgtgtacccccactgctgtccacaaccacaccagccatgtacctgcattgctgtgcccgacaccagccgtgtacctacactgcagtgcctgacaccagctgtgtaactgcactgctgcccacagcagcaccagccatgtacccacattgctgtgcccagcaacgtaagctgtgtacccgcactgctagccacaccagccgtgtacccccactgctgtccacaccctattcaaccg

SEQ ID NO: 36607 - DNA, 483 bp, Homo Sapiens
cggcccaagctgaatcactccttgatgcttggcatctgtgtagcacatattcagcagattgggtataaagagcatgcgttgcctttgcagcaaggttgcatcagatggctggacgtgcctggatgtgctctgccactggcatgaaggaccctgtgcagacaaggccaatagtgaaggtcagggattccaagaaagcacccagtttctcctcttctccctctaaaaatggtttcttctgcccacattctattgatttgccttaatccttttagctgttaacctttgcctcagtttagtggacacacatggtatctgcagtgggtctggctctaggagtgaggtgagatgaattgaggtaagcctggcagggtccctgctgcccatctgcccatcttgctggggaagacagaatagccttgcgctagtgtaaggtggtaagtatggggtcaggagaatgaaaagggtgccaaggcagccagaagt

SEQ ID NO: 36608 - DNA, 411 bp, Homo Sapiens
ggacgcagaaggtgtacaacgacggggtctacaaggccaaagtccagatccaggactagggtgaatatattaatactaaggtcattctgtcccacgggaacctgttggggaagtctcccaattttactcagaggacaaccctcagtgtcaccacgggcaccaccgtgacccttccccatgtgaaaggaaagaggcagtaaggcaaggattaaggtctgtttaggtctgttgggattaaaaggcgaaggagacattaacatggaaatggggctgaaagtaaaacttgaatgagacatgtataggccacaaataatcagaagtgattggggttgtatccaatatcactacagttcagataaactgccagaggtaggaagtgcagttgaccaagaagttgtaggcatgtgaaca

SEQ ID NO: 36609 - DNA, 552 bp, Homo Sapiens
ggtcggtacgcagaaggtgtacaacgacggtggtgcgataaacctatggcttacaagaacacatcagtttatttactatttaaatttctttcacgacatacgcccatagcctgaaggatttgggaagaactggaaattctaaaataacaatgggtgttgagccatgctaagagaagttagaaacttctgcagactcaaaccagttggaaagtggaagaggtctcccctccttgagttacgggcccccaggaagaagtgccctgacttcttcccaggtgcaaacaaatctgtgaaaatttagtagttccaacaaaataaataaactggaatcaaatgagaaaaatcacaaataaatctcaaagaaggcaagtgagagggtgaggggaggagtgtctcaagaaatagaaatcaggctacatttaaatttgggttcttatttctttcttactgaagatgcagtccccttagactgccagcaactcccaataacacaaaggtccatttcagctcttatccaatatttacggtaaaagaatcatctcaaccaagctc

SEQ ID NO: 36610 - DNA, 390 bp, Homo Sapiens
gcggaccagaatgtgtacaacgaccacaatcaagagataactgcatcaccctaaacagttgtttatcaagttttacatcacctgaagacacagacctattactgttagcctgtaaatgtacaaaagataagatgagtatattgttagtactggtcactaaatggaaacaatgtggattatgtcttgctaaaatatcagaataacaaattcagcttgtgtgaattgttcctatgctcctatgctaaactcagtgtgctaaaactctgactttaaacatttatagaatgataagactaaactttctatgtttctcagggttaaaatgataatgcagatcacaaaatgatgaaattttgtacttggatttaagctggctaaaattattcagtt

SEQ ID NO: 36611 - DNA, 402 bp, Homo Sapiens
atctagtcaagcacattattatccttcctctatagctgtatatatcctttctctaatactagtatcttttcttggtgagacagccacttcttgagataccgacatctgtgaccagtggccttcccaaaacgttcctttgtgttaagatttgtcttaatttaacatgacaggggcactcttagccattatgaaactgaggaaacagcaagctaatttttgtatctttgcttcttatacgtttttatagtgaagtaacagaggctggaactcagaaagctctcaggaatcactggtaaggaactgaagcataaggaagttttttaaaaattcaaggatatatgtcattaaaatccagctagatttgatgcacatgtttagtcgttgttacacattctggggatc

SEQ ID NO: 36612 - DNA, 410 bp, Homo Sapiens
aagaccagtgaagaggatgctgtccacatgcagctggaaaaggcagaggatgaagaacggagaggggttcaacggatcagactacacgggggacagaggaggagactacatcctgaggacgccaacaaataatcctgggtacctagtaactctccagagaggagagtgggaaacaaatgaggtatctgcactatatcatcaagcagcaaacatgtaatgtcaaatctcctacacataagactaagaggaacacacaaagtgagcagccctgatgcccacaatgtgtggggagtgtccagggtaaaatcacgcccagctgcctgccacgggcctgtcctgactatccattcttactcttaaactccaaagaacaggctcatcattcaggacacactcaagatgttgcaaga

SEQ ID NO: 36613 - DNA, 468 bp, Homo Sapiens
tatcctggacgtagcaagcttgtactgacctcgagacctccgtacgtgcagtgcctgctaccaagtcttctctcccccaagacactcacaggctcagctcctctccttattctggtctctgtccgaatattgcaaatgtccctatgttgcagcccctcccaggtgctccttcatcctcttccttcggctccatctattccttgtggccctcagcatcatatttagtattcactgtctctctccctctaacgtcagcttcctggaggcagagacctcttactgtcttgcttatctttgtgctgccaaaactgtgaggtatccccaaatgttagtcagctccctcatttcaccaatgggaagggacctccctcaatgtattaggtaaacttacatatcaacttagggtgggggcgtatgcatagtccaaagttcacttgcacatttatattagtcgttgttacacattct

SEQ ID NO: 36614 - DNA, 412 bp, Homo Sapiens
caccccctcgtatattacccgtgaatgttaagtttcttactaggggtgcaccctacgtaacgtaacttgggtagtggtgcgcccaaagggttagtgccaatgcgaattctgacatttttcatgaatttgaggatgcgactggggcgcggggagggaggtgtccgactcgtgtctaagtagttaaagtgattctacacagacttctacacttatttacaccaaattatacataagagaatattgagcaaaatttctcctctcgtatagtctgaccttaaaagatagtctctttatggtgtaggaataaggcgcttttaagcttttatttaatggataaggtacgtctcttttttattgtacatactgagtcaattcaagttgggttatatataagtttacgtttactcttttt

SEQ ID NO: 36615 - DNA, 507 bp, Homo Sapiens
cctactagaatctagtggtctggagggaggcttggatatgtcgatattgaatatcaatgcaaatcctcaagatatatatattttttagttggatgaccctgttgatggggattttgaattacttttctttggtttccaatctttgaagtaggaagtgttgtattttaaagagcataaaacaaattcacaaaaggttaagtgatttgctcaatgtcacatagctaataagagacctagacaggatgtgaacccagctagactgactccagaggctaagacattagcaactaaactatgctgactaatggttgtttatttttatgtcaccaaagtccaaacaggacagagtaagatgaggatggacaagccacagtgcaaatgcagaaggacctaaatgttggaaattaatccagatagcaaatgatacctaggtcaaagagtcttggcaatctctggtaaatatttttcccagaaggtttcaaacataattcaagtttatttaaaagt

SEQ ID NO: 36616 - DNA, 468 bp, Homo Sapiens
tgtacaacgacgaactgaatgactttatgtatgcatgagcattaatataaataaaccagaaagctacttttatatttcgaaaaataattcattgggtttcctgtcaaactttgccatgtaactcctaagtgataccttacttactgagatggatcagccttagggagaggtttgtcatactttgttacacactgaatagcctataattatcaagattatatccagttagcataaagtgctgtttagtttctgttatgtcgttgttaccatagctggagtcgggtgggtgtttaaacctttgtgaactcaaaattctttaatgatgatggaatatttcatgttttagtattctcttgatctagagtatatgttcaaatgttttaccaggtatgtgtattttacaggttcatataatatatcaaatgcatttctgttccaagaaaaatacaagtcgttgttacacattct

SEQ ID NO: 36617 - DNA, 481 bp, Homo Sapiens
acgcagactggcgatctgatcagatcggctaacggttatcaaagaactttgagttcttttcgctagcacttttgtctcaagagcctcatctccagtgggtctggtgcggcccttttccacagtgtggtgggggtcggggcagtcttgacatgacagtctgctgtccaagcatctcaaagccattgtcagtgggcatcagtctggccattgaagaaaggagggttagccttgttgaagttgccatcccaagtgggttttccgtgtgtcctcgagttaggaaggaaggaccggggaggactagatgacccagttgggggcacagttggttgggctgggtgtcctctcgagtcagacggtgaaagagggggtatgaccaacatctttagggggctgagaggctactgaagtcctcttccagcttatttctggttaagctaatacacaggtgtgatacggagtagatgacttttccctgctctga

SEQ ID NO: 36618 - DNA, 558 bp, Homo Sapiens
gtacgtcaatcggctaacggtaataaaattaccctcctcctgcccaacggtgttgagtctggggcaagctattacaacgttttcaatctagcattgattccaagccctctcccccacccccaggaaatggccccctaaaagagttctgtcttggaatgttcctggttttggggcggaagtttaaaattttgaatgccagtgtcccagagactccctggctgaggacttatagcacctaaatggatcgttcttagggaaacatttaaaaggaagaaatggaaaggatgtgttttgtaaaactgctggaagctattgaaactgcaggcaggacctcgggtaacgaattttctgttagctttctcctccgaggtcccgcgtgctccctgaggaaagggggctttcgcaactggtgggcaaccccgccgggcttccgaggctttgtaccatggatttgggagtgacaatgggcatttccctcagattcaaggctgctcaacctcacctctgtagggggaaaaaatcagaagggagtgtcccaaggacctagccgttaggccg

SEQ ID NO: 36619 - DNA, 439 bp, Homo Sapiens
tgacattaggacaggctgtaaccactactccctggaagcagagcctgcttacggtattgccaaatgaaaccactcccagcctccctgtcgaatccagccaaccctgatgagtgcccggagcatgccgggtagacctgtctgtgcctggaggagcctcaggtccagtgttatgtgatgatacctgctgcttcatctgggtgcccccctcaaccacagatcctcctttgagacattcgcgagtcctattgaaacgccaccttcttctcgaagccttcctaggcttcacgatcagacacattctccatctcccaccccaacatttctgaagggagcagttacattccattctgcactctggaactcttgttactatttcccctccccggggcaaacagggagctggctgtgtcccaatgaatctctggggctacagttgtct

SEQ ID NO: 36620 - DNA, 642 bp, Homo Sapiens
atgaaggcagtctgcagtgatctgagtttcacagcaacacctgcatatttatctactcattaccaagtggatgatggaattttttcaagcacatttcaaaaatctgccaccttcaagtacaaaaaaaataaacttggtggttaatttttcccttaacaaagtacagctgtggagaataattgttcaagatcttacccggtaatgtcaactgcagcagaacaaagagtatttaattagcaaatctatccagtaattcaacacctattatataaaatgccttcgtgattttattcaggataattggctaagagggttattactgacattcagatggaatttaaaattcctacgcaagtcgagtcataatagcagtaatgatctccccaatcaggagactcggtgtcacacaaggctctcttgcaatgcagcagccgatttcctgacttcttaattcctgggctcagctcagtgagagcccttcacgccgatatttcagtcagcaatacatctttaatgggactctattaaaataactagaacaaaaatgactttttgtggttaaaaagaatgacagcacgtgcatcatatcaatcatggcaggctgtgcagaacagttgggttagggcgatctgaggggatctc

SEQ ID NO: 36621 - DNA, 433 bp, Homo Sapiens
tgcattccaaatctcctgtgtctcccggcccgccggatccctgccttccatccgacaaacctgcgccagcaatagatactcccaccccctcaaaatcaccccagctgcagcctctcctctcccccaccaggacttagtgcaaggaggtaagcggagtttctcctcaacttgagtttctctaataaatctgcgctccgctgggtgtttcataaatggtctcctcgctctttcgtttatttttttccctatacacagaaacattttccttccatcaggattttcgggccagggggtagagatgatttagaccacgccatggaattggtcacctcgcgggtgagttttcaaataaggcccataaacatcctcggcacttgataaaaatgttggcttcggcaccaatttaactcggcccgccgtacggccgatctga

SEQ ID NO: 36622 - DNA, 456 bp, Homo Sapiens
acttctatttttcaatgagagaaaccaaggccctgtaggggatgtgacttccagacgtctgtgagacagtgggagattcagtaaccaggagggtcccccaggagtggctgcatcagaactgtggattagtgagaactcttcctaaatccggctggtcagtgtgtaaccacccaatgggttcaccttgcctgtcttcctagacggatttatcaagacaggggaattgcagtggagaaagagtatttcacacagagccagctatgcaggagaccagagttttattattgctcaaatcagtctccgctgagcattaggggatccgagttttgaaagataatttggcgggtaggggctcaggaagtggggagtgctgattggttggagcttcctgaggtcgatggagtcatcgacgggagtgttgaagtgaggttttcttgctgtcttctgttcctgggt

SEQ ID NO: 36623 - DNA, 462 bp, Homo Sapiens
cctgatcttgtcactcaataaagcactccttcacttgctcaccctccacttgtccgcgtaggtcattcttcctggatgtgggacaaaaactcaggacccgctaaatggcggagctgaaagggctgtaacacaaacagggctgaaacacaccccttgtttgccccatggagggcaaagagagggaaagagaggacagagaaggagagaagagctgtggcccttcaaggagcccagacctaggagctccctgagccagggctatggctcactctttggggctctgcagtccctggcgtctccaagcttccaggcaccaacacattccttggtgccaccaatggaagctgcttgcagtatgcctggtccagcagcagccttgtagggagctgatgcctggaactgcccgtcctgccacagctggcgtgcctgactgtgcgctgtggccagactccacactcactc

SEQ ID NO: 36624 - DNA, 387 bp, Homo Sapiens
ccgctgcccttacgcgcatggaatagttgataaaacagtcagtattctgtgctgatgacttatccttttctcccttaagaaagagtaaatgttttgtgcttggattgagtttagagacaccagatagaataagattggcaacactgttagccacctgctgaccacagctaaacaggcatatgtgcttctgcatggggaatgctatggcgttaacagagccttccttaaaacctgtaagttcgttaggcttccgggtaccagggttgttagagtaggccacagtttacttcctttttcataagtgcttttctttcctggatctcagtataggaaggaaaatcagacagcatttctcaattgttgacgcgtaagggccagcagcgcgta

SEQ ID NO: 36625 - DNA, 398 bp, Homo Sapiens
cttatgttctgacccaccaactatatgccatggccccatattgggactagatgcaatgatagatctgaagttgtgatctcattttgatggcgctgaaggggaagacaaagaagcttaaggaggcgaggaagaaaagtctagggtctgcctgggagctatgaaggaggagaaagcttggaaagagctcagtgcaaaggagctgagggttgaggagccaaggttatgaagaataaagatccactcacctgagacaggagaggggagacagttgttctaagaagtgtcccagggctgatcaaggctcaggagttcagggcctgaaactctcttcatggttctaaatggttggaatagactctgatggcaggtgggtcagaacataaggggtaccgagctcg

SEQ ID NO: 36626 - DNA, 452 bp, Homo Sapiens
tggccgactctcgaggatccaccttatgttctgacccacccttatgttctgacccaccattcatatacacatatgcatttatttatgcattgttgaaaaagattttttgagcacctacaatgtaatgttccaggctctatgctagaattagagatgcaggggtaaaagaataaaagaagatggaaaaccaaacatggtcctggaggttacagtgtagtgaggggcaaagacatggagccaatggttgagctgaaacctcatgtgaggagttaactggatggagaaaggagtcaagagagttctaggtagaggaggcagcatgtcaaaggcacagtaaagggaggatgaatggtccatttcagggatggaagaaggctgctagattggaacatagggaaggagggaatgtgtgatacaagctggagctagaaaggtaggtggtcagaacatag

SEQ ID NO: 36627 - DNA, 455 bp, Homo Sapiens
accttatgttctgacccacccgtgatgttatatggacataacctaacgcatttaaaaaaaataaaggttatgcaccaaataatgtgaatgctacagcaatcaggggggtgaagacagctgtgagcaggtatgtgtgtgcatgggatggaaggactctgctcccatttcaaccacttgatccaaccaagatctgttgcggtccaaaatctgtggaatgctaaaagctcctgggaatattcctccagagtactcccaaaagcatatttgctttcagactgagtttgcctccttaggtgcataggagctgcccaaataggtaattccaagtacttactcatgacagaataactgaatgaaggtaccactcaggaaacagctgtgaactttacagcggaaaatcccatatatgcctatacctgagagacgtacatttttaaagatggaattttagggtt

SEQ ID NO: 36628 - DNA, 522 bp, Homo Sapiens
cttatgttctgacccacctacactggcaagattgtgggtggagtggcatgggaaggtaaatgtgagcagacacactcagggatggagctgcgctgaccatatgagggggaaggggtggatggagagagagtgaagtgctgcaccggaggaaccctaattacacaggataaagccttaagggagcaactgttcatatctacacaaatcgatggggaaataaaagaatggaagattcaaaacagaaacagccatctgcacatataataaacatttggcaagttgtgatttctccatctgtcccccgatgagcctggagtactaagctgatgtatagcaacgacgcttaacaagaaaagcccttgagatgtcctcttccctatttctgtcagtttctcattctgctttataaattccggtagtgtgaccctttggtcatatttggaaagaagatacagatattaagaaacaaaagagattttgaagtacgtgcttgggtgggtcagaacataaggggtaccgagc

SEQ ID NO: 36629 - DNA, 480 bp, Homo Sapiens
accttatgttctgacccaccatctgccgtaataacagctgtagttttgatcactaggttgttactagtggaaggatttggggggctgagtggagacacctgtggctcagagggcgagctgggtcttcatggacaaggcaccacctggtggcaggacatggactcttagtttcaacacaccagggttgtattgtgttcgcgacccccgccccctgccagctttttgggggaggattgataaatcttcgtgaagtggcagaaaatatgaaagccagccaattggaatcttgcttattctgatctgttatctcaggggttagattcgcgtgctgaagtggtctacgtaacttccatagcgattgggaggtgttctctggtggggtagcagttctgtgttatgacatcacacatggaattcacggggaggaaagctgggtataggcattaagtgcccagtagagcaggtgggtcagaacataag

SEQ ID NO: 36630 - DNA, 501 bp, Homo Sapiens
actcctgaggatcaacggcctgacccaccctccgagtcaccgcagggctgtggagcaaggaaggaagctcccttttcctgctggacacctgcacacagccctgccatgggccagagcattggatgcggcctctgactgctactgcacacattcatttatatttcatccactcctctcttcttctcctttcctttacctccctgggggtggaggagggaggatgagaggctgggagaatagagcagctgaaattggactctggaggtgaacttcacctccctgggggcagaaaacccttgaggtgtcatcaccaaggtttgtgtagagaatgccaggttttcttcactttctttccttttgcccgttccagtgggtgggaagttctgggtttggtggtgggtctagtcagggttcagagaacctggcctctaaatgaaagaaatgacacagcggtacctttacttagatggctgcacttcatggtgggtcagaacataaggg

SEQ ID NO: 36631 - DNA, 351 bp, Homo Sapiens
cttatgtactgacccaccaggcagttattacattaaagttaatacaatgttcaaccaaatattcaagttaatacactcaggcagtctggtaagaaagcctgatgggagtactagtgaggccaaggtcaaggacactatctcacatgaagctctgtatgctgggttcagagtgacaaactatcctcccatagtaagtcagcctggttatcaaaagcacaataagattagagatgaaaatatttgtaccaaaagaaagggaagctatctttgtttgtctagatacaaataagagatttacacatcatctaagtttgctactttaggaaatggtattattgtttcaagagcttg

SEQ ID NO: 36632 - DNA, 527 bp, Homo Sapiens
tagctgactccagaggataaaactaatgctctggcccaccagggggtggcaacataaaccttcaaattaataagaaaataattttgtgtagtgataaatattgcgaggaaaaaaagacgaatgatggggagagagtctgtttcgggggtgagggtagggatagcactgcttttcccaggatggtcctggaagacattcctgaggagatggcatttgatctgggacgtgaatgatggcaaagaagcagttgtgtaaagatctagaagaaaagatatcttaagtagaagcaacagcaagtgcagaggccatgaggcgcggctaaactgatgggtttgagaggctgaatgaaagtaggccgtgtatggctggatccagatcataaaggaccttgtggaccttggcacaggagtatatttttgttctgatagaatgagaagcatttgttgggctttaacaaaggcatgacaggatttcaggcacgcttttgaaaactgaagacttgttaacgtggagaatggagtgtgggg

SEQ ID NO: 36633 - DNA, 482 bp, Homo Sapiens
cttatgttctgacccaccaagtgtcatgatgtcccttgtcaccaggaagtctcactcccaggtagtgctgtcccatgttgatgagggaggaggaaatgtctcagtgaggaattttaagagttcccaaaagctgacttaggatggcatcacagagtggcagaaatgagacctcagttaagtcattgatttatgtaagtcattgcttgttgaatcatccctagtctttggaatcccatgattttagtttcctccaaagtaaaacaatgagagatacataacattaagaatttgtattgcagaaatataatgcacacattgactacaatcaaaaagtgaatttacatgtcagaatgaaaaaagaacctattcattagggagccaacaacaaaatcttgaaaaaaattaaaacctggttcttctttacagactggttgtagccaggaaataattcaggatttagtccaggtgggtcagaacataag

SEQ ID NO: 36634 - DNA, 427 bp, Homo Sapiens
aacttatgttctgacccacccttatgttctggtttgtgtggagctgcccaagaaactgctttctgtcttgcctgaatcagagtgctaatgggaacaagggcatagtggggataggaggttggaaagagctgaaagcaatgatgggtaccatggcatgagtgagctgcaggggaacacagacctacagaaacctgtgggcaagagatcagagacaaaggaataacagaacagctaagactccaagaggaagctggaggcaaactcaggaaaactaagaaaaactgaaaggcagctgtgtataggaggaaactaaaactaatgcatatgcacaggcccagggaagatggcatccccaggaaaagtttgagaggacaccaagcctttatggtgcgctaatcagtgaaggcctttccatgcatggagccag

SEQ ID NO: 36635 - DNA, 526 bp, Homo Sapiens
tagagggtaaaacgactcgacctgaggcgttcagagtgctcgtggttatttcactgggctgaaacgacgctgggctgtgcaggaagacctagggcgcctgtaggcctcagtgagactggcgtccgatgcccagtgttcaccctgctggcggcagtcaggaacatgttcacaaaggctttaccttcaagtggtctagaggtgatctgaggtggagtaacaggtccagataggctacgttcataaaacagcttcagcggggtttaggaacactgtgcatttacgggacgcagtgggtcagagtgctgctgtccgtgggaggtggccccagggcaggtcagtgggcacgtcctgtggtaagtgggactgtggatgtggtctcaggctggactcagcagccctgctggataccaaggcctgcaagggctggccccctggtgaattgtcccgtgccctgtgtatctatgagtcctgcagagatgacaaatcaggggacggggtcatgtctagtcaccgtttggcaaaatgc

SEQ ID NO: 36636 - DNA, 429 bp, Homo Sapiens
cttatgttctgacccaccaactattgggtgaatgggtgctgcaattaatgatatatataaatagatttggggggaaattaaagctgctttttgcatcatataagtttcagacagctataaggcattcccattgagatgtcaaatagtagagtctatgcatatggagctcaagaatttgtcagtttacattttgctttaaagttgaggattgaatgagataacctagtgtatactagaagaggagaaggccaaaggctgaactctgttgcattcccaatatttagatatcagattccacagaaggaatcagcaaaagaagacagaagcaaaatagaaagataaatggaaacgtaatagccaaactgagatggtagtgtttttgctgctaaggtatagatgagcagaagtattcactgcagggtaccgagc

SEQ ID NO: 36637 - DNA, 506 bp, Homo Sapiens
tctcatggtcgtagctagaggatgacccttatgctctgacccaccatttgtaatgtgagctatgaaggaaaaggtagcgggaagaaagagggatgcgagcccttctactcttttaagggagggcctttggggaggtctttccagctgagggcacagcccaggcaaaggctcagaggcagaaagtgcaggagtgtgttgtgggtggggaggctaccaggcacctggtgtgtgcccggggagaagtcagaaaaaggcctggcctcggggggcccaggaagtggcttccagaggtggggagaaggcaaaagagaggactaaaccctttagtctgtttgagggaactccagcccccagcatgttgctctctgggggatccagcagggccaggtgggcagtgggagcaccctagccccaggtgctaccttccagcctggggccaagccttttccctttctctcatttgcagctttctgataggtgggtcagcacgtaagaggtaccgagct

SEQ ID NO: 36638 - DNA, 441 bp, Homo Sapiens
ggtgttctcctgtagcacacaacacccgaagtggtgcgtcctggagccgtccaggctggcctcgtgcttgaaggcagaaagaccatggggtttctttagttctctggatcaggattccccatttgttgggaccccatcaagcatcaatctgacaatagctgtttccttagtgcttactgtgtcccgccactgtgatcagcacatttcacagccacagaaccaccctctggagctgttcctggttagggatggcacgaaccatctctgtgtggccaggcctgctggggctgccctaggcggtggccatgctggggctgcgcttgtggcctcctggcactgtcgtctggcctggcattctcttggggcccaggtgttcctgggtaaagcagggcctggggtcaggagctgggctttcatccgaggtgggtcagaacataaggg

SEQ ID NO: 36639 - DNA, 516 bp, Homo Sapiens
accttatgttctgacccacttgaaaaagttatctataggacttaaagcattcaatgttcctatgttgcgagaggatgagttcagcaaagccagaggattctgcagtgttctgtaatgaatcctgtagtgttctagcctgaagcaccattggcacagaagctaggcacaacagaatcatttcaaaatgactctttgagtgttacgtgatttttaacaagcagttgcacacagatccttttgttagccactaacacaatatgatagccatctctaaaccattttatacagcactaatactgaagagcatgagaaaggaatggggagttcacagctcctacagtcctcatgggcacaaggaacagaccaggagaaaatagctctgttctatgcaaggagaaatgatcccaacccgtcccactctaccgtctcacatcaatccaggccatcccctcccttttgagagtttgcaacaaattgacctttgtcaccttggtgggtcagaaaggggtaccgagc

SEQ ID NO: 36640 - DNA, 410 bp, Homo Sapiens
tcgctcgctctagaggatccaccttaggctctgacccacctttgctcgtggcattctcggcatataggattcagctggcttcccatgtccctttccatatccggaccaaatcaatccttcaagtctgaattattctattctgtttccctgaccacctcagcgcctaggattagatacctcctttgaattcttagaacactgtctgttggacataactgttcagtatctgatatcccttgctattgtttgttaaccttttccatgcataattgaatcttccaccaaggctgatgagctatttgagataaagtcccctgcctcaaggaaaaagtcttctgccttaaataccaaaacagtggtttgaccagatttgaaggatgtgttcctgaaagtagaatgtcctcatgaat

SEQ ID NO: 36641 - DNA, 368 bp, Homo Sapiens
accttctgctctgacccaccctaccatgaactctgctgttcagacggggttaaactgagcagatcacaggatggatgccatgtcagcgtaacttcttcatctaaaagaatcagtggatgcttctatccaatgatgatccttaaacatgaacagccaatatattattgcagtgagttgactatattccatattacttaaatcagaatgtttatggatacattccgacataggggatgaagccaaaaccattgaaataaacaagaggccaacttcctgctaagcattaactctgttcaaggattctcctccacctccaaacacacagtgacaaaggccaaggcacctggacaggtgggtcagaacataag

SEQ ID NO: 36642 - DNA, 393 bp, Homo Sapiens
cagagtataaaacttatgctctgacccaccatatgctgaggaggggtttctccggagagtggaccaggagacgaggacagcctgagtcaggagaggagggaggagagccagcggaagagacatctcttgctgtcacaggagcaggaggggaatggatgtagataacgatgttcagtgggttaagggggattacctttaattctctcaatacacagtgaagggcctgggttgagtaggggactcaggagaacagtggcgttttggaagtatcccagggcatggggctgcctaggggctttatggaagtcaaagctttagaggagtcagagagggaggtgccagccacacgaggctctgttggactgaggctgaagcctgtgggtatgttccagc

SEQ ID NO: 36643 - DNA, 387 bp, Homo Sapiens
tcccttggactgcaaataagatttgggttgaatattagaaaaggggaaaaaatagtttctaaaccagttgctttttttcccctggcagaaaagctgtgagttttaaggttacatcatcagagctggcgtgaaacatgctctacctttccctcttccccagactgttggcagttgttgtagtgaacccaaaggttaaatgggcatgagagtctgcatagcactcttccacgaaaggtgtgggcccttttcttggcttgagccactttgtgggagtggtttaaagacaaccagcttcctcattccctgtgctgttcccactctgtgcataaaaagaggacttcagccctgaggcagaccaggtggcatctttcacaagtccagaattgc

SEQ ID NO: 36644 - DNA, 368 bp, Homo Sapiens
actagaggatcccgtggcaattctggactcgcagaaacctgggaaaaggcccaagatctggtgagggctgcagctccgtcctccctgcgagggctctctcctgccttcctgaaggagttaaaagcctttggagataatctgagggtgtgtgttttaaaaatcaaatggtaagttggaatctcacttctgagagattcattcctagtgaggccctgacgactccgatccattcctgacgatctgcattaattatttaatgagtcacgtgacctcaaagattacaatttcaatatctcccttgcacaggcgctacacctttatcagctgcaaccagggtcctttttttggctctgccggcctccggggca

SEQ ID NO: 36645 - DNA, 514 bp, Homo Sapiens
atctagagcatccctgtgggcattctggactccagcctgggtgacaggtgagattcgccctcaaaataaataaataaatacataaaaagctagaataaggatcaccctgtaactataaagatgaatgcgggcaccaagaactactgcagaggagccttatttttgaagaaccgtgcttgcagttcaaagccgccgctgaacagacggcagagaaggggcttgcacgtggccacagatctaacatgacagacaatgggtgtctagtactaacacagctgggtgttttcccagcatgatttggtggctagattaattttatcatctttccttctaacttattatcattctgatattaataccatggctaacaaccaatctcactatatgatgagaccactattctgaaatgtaatgtctgccacttacagcttttaatctagtaaagtgctccctaaacctaaaataattgctgtatattgttccctcattgttaatatactacagtccagaattg

SEQ ID NO: 36646 - DNA, 352 bp, Homo Sapiens
gatctagcaggatcttcgacctctcagctgcatggggcatgctgggaggcactggatgggctgcagcttcgccacgttctctcccttcaccctgcacaggctcagtgctacgcatggagagaatgctagccttagtcaggaggcagggattctaatcctaagcctgccttttttcttcagaagtgccccttaaccaaagtactggcctttttaagacctctcagctttcccactgtaacatggactggctgctcatccctccctggctcctgactgagtgcccagtggcaaagatgcccttgtagagggaagtgggggaatttggctggcccctggcaggtcgcctgttccc

SEQ ID NO: 36647 - DNA, 443 bp, Homo Sapiens
cattctggactgataggaggagaaatttcagttttcagaaagctgctgagattagaatgcaccttagaaggctggatgatgccacagaggaacgaggagagagaaagcatcgtttggggccgagaagggactgagccccagtcacagcagaagcagacgatgttgggatttgcttgcttcccacaacccagagtcccccacctgcccacactctggcttctcctcaggctgaggtagatttgacacccggcaccccacagctctctactacatgggagtcccgggctccccgcactgtgccagttacgcagaggaggtggactctgcccagaggactccctgtccagctgggcagatgcacttttaaaagacaaatacagttttccatgacagccttctaaagacgagctctggagctgtgtgcccaaggccaggagcctgga

SEQ ID NO: 36648 - DNA, 436 bp, Homo Sapiens
tcggggccaattctggactaagcagtagtaccggggagacagaaaagtagtaagacacatggttccccaagctcctttatgcctaaaaagttctgacttgcagttgagtattaagctcaacaactcgaggtgaaagtcaccttcactgaggggagaaggtgagtcttcctagctgactatggagatgtggggcctgatctaaataaaaagggtcattctcttctgtggagaactacacctctcctttgattctattttgattatagctataaatagtccttagggcccagtgaactaactagccctccacaaaaacagaaatggagatataaagaatttgtgctcttcccatcttctaagtatgcttgtgttcttgggatatcactccactaggggcatttcacaaggatgtaaagacccagtccagaattgcccc

SEQ ID NO: 36649 - DNA, 399 bp, Homo Sapiens
gctctacgagatctatcgggcaattctggactgtcgagaggcgttcttagtaggcagtagcagacctgctgagtgaaagggcacacttttagcaaataaacaatcccctgcttctccaatacctgctttctccctagtcctccccaaaagcgtgcatctgtgttcaccagcaggtctgccctgtgccaccaggagagggcagcagtcacccagtgtaccctgctgctgccctgtgaatcctaggatgggaccagctgtggagaagcagcctgctgacagccacagcctgcagcatgggccgccctcacagttctgcctgggctcacttaaaagcaccttttgttttcctcctctctgtttgatccaaacacagagctctctgtcatggtcacgtggtag

SEQ ID NO: 36650 - DNA, 387 bp, Homo Sapiens
gcattctggactccctggatttatgcaaaaactgggatactttctcaaaacactctaatataagcagagcttatgttctttatcccccagaacatcagcaagcaaaatgcctgaacatcccaaaaaactgttgccatgacctttgcccttgactggtccacttttgcttcgactggaccacttccatttttggtagccattgctttgattgtgctttgtcttcaggatggcattggtaaagccatgttttggctcctgttacagttctttgaagaaatgcttcaggatcttgatcccttgtttaaatttctatggaaagctctgctcctgtctgcagttaatctgggtgcaacagttttgtcacccatcaagtgaaaagtttgttgg

SEQ ID NO: 36651 - DNA, 386 bp, Homo Sapiens
ttattaacagtaactcactctaagtgcagttggtacacataaagcacttaacagctctgccctccaacagcaccaccgaagtcttgatagaaagccatatcccttattaacctggtccgaaggcggggtgtgacttggcctctgtctccctctccaaactcatctcttgaacccccacactcccataggtcctggtcacactgattcttgtcaattcctggaacacatttgactcatcaaccccaaagcttcttcaccgttccagggcttgccctttgcccatgcctaccccttctttcattcttcagctcttcccttaaatgtcaccctgatggaggactatccctcaccagtctagtctttcctgctattttctatcatgaaag

SEQ ID NO: 36652 - DNA, 497 bp, Homo Sapiens
ggcgcgacgctcgctacgcattcggtttaccaccgcctctgggttttcttctctcagacaaccttactattaccagcaaggaagaggtcacccatttcctttctgctgtagcagcactgcccaaaatatggtccgtgaaatgctaggcccatgagctgctccagaatatgtggaaacaatacatgccaggcatttcccctgccatatatcatttgcatactggtacttaattggtcaattcagcaactctttgtggcttcctcttgcttcctgccttctagtgattcagctacagaactatttaaataacagcagataagtcaaccaattcatcctggggagactttccagttactgaccagtaaggtggtttcccccgaggtcagctgttcctgaaagctgtatgtacttccgtctttctcgctacagctgaaaccaatgtcatgagtcccctatccttgagatcagggcagttgattcagttcagcccaagagga

SEQ ID NO: 36653 - DNA, 578 bp, Homo Sapiens
agtacgatgctcaatgacggagacaaatgaacgccgtatagcaaagtggatattatggaagagaggcgcggagctcgctacggattaggtttacaacggcggagctggggtataaaacatgaaaagatggtggggaaaactgaacggcatgatcaccattatttaggtccgtaaccattgtttcattctccagctcaatcgtgtatgaccagcaactgtcaatggagggtcacttaagaaaaatgcaaggttctgacgattatccaactcacacttaccaaagtgattgatgggggtttctgaaaccactacaagtagcagtacctgctcgtggatgccaacaacagcctgcctggcattgtcatgtgcatacatgtgccatttggatacgacatgccagtagcaagaaaaaataggtaaaaatcatacctctctgagcaatcaacattagcaagtaggaggtcactggagtggagtagaatgtgggtcactcgagggaaggtggccggctgcatccacagtcatttacccatccaataaacatttcctaatacctgttaggagccagaaactgagac

SEQ ID NO: 36654 - DNA, 403 bp, Homo Sapiens
agtggactctgttccaaggagaacaaaccacactcttgggaatcccacactacagagactccttttgtctctctttttgtgaatctctaggttgactctcacagtgctcatttttcactctattgcaataacctcgcacttaacatctaccctggcacatcagcagactatcagcaattggaaaaattaaccaaataccactatctcagatggagacatctagacagagaagtttaaggacactaacgtctaatttcccaaataaagggaacctctttactctcacaactgcttctctggtgcgaccccaacaaaggagggggtggtggtgagagtcccacctctaaagcaaattgtcagacagatgaaaaccagagctgctttctttcttttaacattatgg

SEQ ID NO: 36655 - DNA, 464 bp, Homo Sapiens
cacgtcgcgacttggggtcactgagctcatgatccctaagcagcgttcaaacccaggcagtcaggcaggcaggcaggcaggctggctctggagcctgtgccactgccctctctggtaactgattaggaccaaatatccctgtgatagtccttcataaaggctgtccttgacagctgagcctttgacaaatcttgggcagcagtgagtttaaggaaatgtgtgaatcctgatgagttcctgaggggccaacattctggagggctagttactgtggagccgtatgctttacccgtgggctgagatggaataggaccaacagatttccgctcagggtcccagtatgggctctggcttgaactgaaggtgatccatgagctgggttcagaaaagggggtaggcaaatagggaagcaaggccaaagtgctgggattacaggcgtgagccattgtgccggacaccacaat

SEQ ID NO: 36656 - DNA, 426 bp, Homo Sapiens
agttacaacagctcagggcctcccaccctgaagagcagggcatgctatagcggccacaggtgtctcggtatgttgggccagtggagttctttgtggagtggggttatggagcatgtcacatttggggctgggacaggaatgaggatagggatggcggaggagtcttttaaagacatctctgtaccctcccctccttcctacttaaaccctctgtgggttctccattgtcctcagggtacactttgacttcctcttcctgatgcaggcctgtccctgtccatctcccacccttttctctgccagtctgcccttctgtctcctggaatgccccctgtgcaatcctgcccctttgcacatgctgttccctctgtctagactgtcctttcacctcttcaattgtagctttcataacataattcctacgtg

SEQ ID NO: 36657 - DNA, 552 bp, Homo Sapiens
ctctagcggacgcgcgctcagttacaacattatctagccaagtgaaaaagctatcgccttaagaggggtaagagtctccccttgttcaattatcttgggaaaacctgtctacagtgcggaaccatcgacttctcatcctggtttgcagtttgaatgtctctggttaaggcattgggcagtttggtgaacttttctgtgtggctcagacttcgagtaccagacttgtcccttaaaattcatcgagtttcagcttatagggcttcaggaacagagcaatttctgttttaataattctgtggaagaaagttggattggaggaacctagaagaatttaggatctaggccagtttgcaggtagataataaaaactcaaatacagtgtacagggctacagtctaataatagatacagtagcttttctttagaagcataactttttatagtcatcccagtttctaccaatcagaataagacaaatttgtttataaaatagttttattagttttttgtctgattatttacataaatgcagcaagaataagctgtgtaacg

SEQ ID NO: 36658 - DNA, 362 bp, Homo Sapiens
atagtagtagtagtaaagatattcattaagcagctgcttatcgcatagctgaaccagctccggcgaaaagtactgcatcgccgtcttgcgatacaggtccggactggcgatcaggcgctcggtgacatcctcgccgcgtacggtgaagtgggtaaaccaggagaagtggttcagcccgtagcactcgacgccgagatcgcgctcgtcgcagccgaggatctcgggcagctcgcgaatcagctccgacggggcatcgcagatgccgtacacccgacgcttaaagccggatttgataatcgcctcggtgaccagccctgacggattggtgaagttaaacagaatggcatcttcggcgggtaccg

SEQ ID NO: 36659 - DNA, 385 bp, Homo Sapiens
tacaacagctccagttacaacagctttgagaaaaaattctttggaaaattactctataatgtagttttaaagcaaccatgaaaagggaaaagagaaacttctctcggctgcagccagatgtcctacccgcattgcaggcagagctcccacgggttgcagacatcttatttgcccagttctagagtgagggcgaagcgtcctggttcttggccagcctgctacccaccagctatgtgactgtgaacagattgagttctgatgggggcctctgtcttctcatttttcatattctagggtttgggtagtgggatcctttccagaccttttcaactctaacagacattttttacttcttgagggggctatgactcaggtaaaatctttt

SEQ ID NO: 36660 - DNA, 466 bp, Homo Sapiens
aacagcttgtgaaatacacagctactggaaatggttatgctcatgaagcacttaccacttgattgagtgtgtcttctcggtctgcctcctctgggttcttggaactgaaaattttaaaaagataccatgttttaaaacatcagtacgtttaaacaagcaccacttagccagaatgcagcttcaagcattcaaaagatcagttctcatcagattagtgcagaggaagagggaaggttgactttccttacctacagcaaactggcaatctcatactgtaacctcaacactgaagaacagattatgaagtagtcatttagaatatccaaggtgaaaaccaacaggagatatttataaaacattttcaaaaacattctgaagaagtttgcctttaagataatccacttagacttcagtaaagtgaaatcactttaccaattgctttctagtctgctggaatttaactttg

SEQ ID NO: 36661 - DNA, 360 bp, Homo Sapiens
agttacaacagctcatcatgttggtactgggcatctgggcaactagagtctctgaaatagagggggaagggggtcggcggcagggacgagaaaaatatttgaagaaataatgggcaaaaaattctcaaacacagtaaaagctataaactcacagatccaagaagcgcaaatcacacaataagaaacatgaagagaattacactcagacacattataaagaaattgttcaaagccagtgataaagagaaaactgtaaaagcaaccagaggggggaaaaagacgttatgtacatggcacagagacaaagatgacatcagatttctcactggaaacactgcaagcataaaagataatggaaca

SEQ ID NO: 36662 - DNA, 408 bp, Homo Sapiens
ctctcgaggatccccacagctccagttacaacagctagctcagaagcactgcaccctagctttgttcagtatacataagcctggccaggaaggccacaagtaaagggaagcggaagggttctttatatcctgttccagagaggaagaaagggaatcagttcctgcatccgtttctcagaaaacagcacagaacagaaggggtaagggtaacaaggccatgttaaactacctcttaggcctatatgtcaaagtagaatttaagacccaaatctagttaattgtataaaaaggctaagttggattttctttgaggttctttgagagtccttaactgcgactctcagatctcttcagagcattttttaagctcttcagggctataagagttcaccaagggtttctgaaacg

SEQ ID NO: 36663 - DNA, 396 bp, Homo Sapiens
agttacaacagcttccagttacaacagcttccagttacaacagctccagttacaacagctacttcttacctaccagttcctcagtggaaggcttacctctttgtcagttgtggtggtcatggcttttccccctggagtccttacagtaacaacccccagaaggcagaatcctgctctggtgttatacgtcttttctcttccccaccacaccacccccagcatagggcattttcctgtaaagggtcttgagtctttctgggaagtagctggggaatgagagtataaaataatgctgagggtcatgttcaggcagcatggcttagagattagattacagacattgaaaccacatatcctagacttaaattccgggtgctatttgctaacaatgaatcc

SEQ ID NO: 36664 - DNA, 441 bp, Homo Sapiens
ttacaacagctccagatacaacagctcatggaaagactgaacaaccaaaacgttgcctctgttggaagacctctgacgaatttatcacaggaataatcaagtgctttgcttttaagtctttgttctttatttgtatctactgcaagtttgttatttctttccttcaatatgtattaaacacctctaccatgcaccaggtaagctttgaggccaaaaccataaacacaacaaatgtggttgctgcccccacagtatttacagtctaggagatggagcagttgggggcaggagtacacatgaacgaaataattatacactgagtcattacaaactgtgttaagtgccatgaaggagaagcacagggtgactgaaagtgttcagtaggctcctgacttcgtgtggaggtctcagaagatttcccttgggaaacgatgtttattc

SEQ ID NO: 36665 - DNA, 413 bp, Homo Sapiens
tgttgagaaatgttcagaaatgaatgtttagaatgaaactgacttactatcagctccgaccctggggcctgcctgtcctgacaggtgtggacgccaccaccacactcacagctgtgaaacatctttcctacagccatataagtggcaactcttgagagtttagtgtgcttttaagaaagctaatgacaccaagaggaggagaatggtgctgaacagacaattttgtattcatcttacagagaacagtaagctattaagagcaatctgctcaacagcgagacgtcacgaacaagctgagccatctcccctggagtactgtgctaaagaatctccttagaagaaacagcatttgccagacgcttatgcagaagtggatgcatgatgtaacacagtcccgtattgtttattctgga

SEQ ID NO: 36666 - DNA, 403 bp, Homo Sapiens
agttacaacagcttgaaccctcaacctgtctcaaatgcgcacttgcctctgttgggaattgcacagggaaggggaacgcgtccaaaccacaccaccctctatgaccagataaggagttttaactaatgcacaggccctcagattggtccttaacaattggactttaaatgatgcagctcagggctgtaccatgaagagcgtatctgaaggagcaaccaaattaacaggaggttgaatgcctctcgcctcccttccagaagcaaacacatgactccagagcaggtggggagatgccactccattcttacttgctgagctaggttgcctgtttttgttcacacacctcagtaagtgagcacttacctttcaggccctcttagaattccagaaacttgaggctaaa

SEQ ID NO: 36667 - DNA, 359 bp, Homo Sapiens
gatcccccgtacgacagatatcagagaaacaaacagagggtttagcgctcaatacactcgcatcgcgagaggcgatcaagaccaaaagcaatgatgaggacagaaacacgacaaaaatgggaggtgtgaataataaacattattttaaaaaaactatactccaggtgctatgttatgtgttccaaaatcagcctaatcctcatgacaaccctgcaaggtacccacaggaggctccgagaggtttggtaacttgcccagagtcacacagctaaaaaactgcaaaactccattttgaactcaagtgcagctgattccaaaacatgtacttttagtaacgacaccaaactaaactatttaaa

SEQ ID NO: 36668 - DNA, 368 bp, Homo Sapiens
gaaacacagacaccgagcaaaaagcataatcgctcccctttcatcatcaaggagcagggaacagctgaaatcaccaacactacagtccctgaggagaggaaagaggcctttcagacggtgggtgtgtgcaggcaagtgagttcatgtgcaaatacacacacacccccacgcacctcttcttttcccttcagactcaaaattcaagcatgcagttgtccatctcaaggtcccccagtcccaaggctggcaccacagtcagcagttgttgagccatttgtcccacggctgcgatctctgatctgaaccacatctcacagagcaggggagaggaagatagaagaagataagttctctgggaaactcccacc

SEQ ID NO: 36669 - DNA, 473 bp, Homo Sapiens
actctagagagatcccctacaacagcaccagttacaccagctgacacagatgtgtgagcacacacacacatgtactggctcatgaaagctaatccttgaattagaaatgagagagcactggatgtgaacttaagaaacacaggtcaatcgccctggggccccactgactcactttatgtcaccagcagaatcccttaaccactgaatgactcaccttctctctctctcccttaaatgggaaggacaatgcttgcctgtgccgtcacggtgcaagaataagtgggtttattttgttagacagctttgaacttgttggatgaaaggagctatttaagtacaaaggagatgagggcagctgggtcaggtactaaattaagactaatcgagatggctcttcattattgagagcttctcttgggtaggtgcccaggtgtgtgtcacgtgcgccaaaacagttttaccacttgagaaaa

SEQ ID NO: 36670 - DNA, 566 bp, Homo Sapiens
attgagtttgatgtctatttattgctatatatttgcatttaaatacagaaactatatatttttttctttgttatgacccagtgtgtctttggggatagctttatgagctctttcttgaacgcttaattatttctttctaggtggctttgtcataggctgtcatgcttcattgaggtatcagctcagctgatctgttccactttctcttaggaaaggcaccattttggggccttcagtgggtaacagatttctgaagcttctcttagccccattctggcaacactgggctgatttacaaccggcaatatggaaaacctcctagacagctgcctcagctgcatttgaactactgcctgagagtctctggctgccttgacactctaacagaccctggcggcaaggcaggtaccgccttctgctatgctgctgatcattgctgaaaagttgcgtaagtcatgccaattgtttataacatgtatttaagccgtgtatgaacctgggagtcatgagtctgtgctcttatttcaatgtaataaagaggagaagaaatactggatggtttaaat

SEQ ID NO: 36671 - DNA, 456 bp, Homo Sapiens
gccagttacaccagctgccaaataaaaataatctctgaattgagttaggaaatttagttcctgctacaactggggatttcctgtacaggaagaggaaggggtgggcaattacagaggattagggaacatccctttagagttcttcctgggatgacaatggtcgaatgagataatgtgagagtgctttgcagttggaaagtgctgtaggaaccctgaattcatctgaaactgtagcttagtgtttaaatgatgtctgttattacttttttgaatagtctggagtgcttgttaaagaaaaaattattctgtgatatttgttgaatgaagcacagtgaggaagactttactcagggcccttgtaatagctatagggaccactgcaatagggtcttgcagtgggggagagagaataggctcaattctgaatacatcatcatgggcaagtgggaattatag

SEQ ID NO: 36672 - DNA, 596 bp, Homo Sapiens
acaacagctacttggtctccacatggcccaccagccccttcgaaccctagtccagacaggagaaaagggagaaagggacaggtacagcccctagagcaggggtctcaagcttttccgaccttgactcacctaagaaataaaacttagatcaccactgcttaaaacggcatgaggactccctgtccctggtcatggtaccaggctccaggtccgacagggctgagaaccatggtgaccttctatggagacagaaagcaactaaaacaactggatttttaaaatgtgtgttatgctaagacttaaagaatcaacaagatggtgaagaattacccaccaaaaagagaagatagaaaggaaaacaaaacagatatagaaacactcagctacttttgccttgaggcgacttcctgattcccggaagcatggacttttattttgacagcttcttcagatggaaggatcagaggtccatgcccaggcccacagaaggtgaggggtcaacagaagaccgggaccctatagggatacagtctcagacaagggctgagcccacagtagaacagctcatgtcaggagctaaagatactagttggaat

SEQ ID NO: 36673 - DNA, 376 bp, Homo Sapiens
agctgggagtcactggtatcactctcaactcacactggacttgtcttaggggtgaaatacaggcacccacatcttcacacatgctctggcttttctcccaggcacgagagaagatgatggggaaaggagcgaactccagagtcttagagaggcagtacgacgggttctcgcaccaaccagcactttctgtgtggagtctcacctcttgtaaccctgagtgcaaaaataccaggaacaagctgacttcccacctggcagaacagaatgctaaacaggccggtgagtgctctggtttccaaaaggtcattctgcactttgttaaccaaagtgattttcaaatcttagaacaattctttctaaaggaggtcactgagta

SEQ ID NO: 36674 - DNA, 413 bp, Homo Sapiens
aacgaggacaaagcgcaggagcgtgatatgaatgagatctgagctctatcttatgagcacaacaaacttactgcgtagcccacaaaacagggacccctcctactctgcagggaagttccctatcaatcagggcataccctgcacattctgtgacccaaaacgaatatggcacacgagtttctagcttgtgtctcttcctttcaagaacatcatccttggtgatgctgaaaagccatggtcttggcactgtggtcacacaatgctaatgcttgatcttgaaccatctcatttaggaaaaatttcaccatgaactgaagcattacactcaaacatgctgaaagacgaggggaaaaatttcattctctctttaaatttgattcatttcaatattaaatggatcccgagctgttgta

SEQ ID NO: 36675 - DNA, 355 bp, Homo Sapiens
ttacaacagctaaggggtagcccagcacagaagtaaatgcagtgagctgcttattgtctggagaggtcaaggaaggtgttttgcaaataacgctttgaaggctgcctcatattttaaccgttgataaagaggaaaagtaggtgaaatatctttaagaaatatcaaaaaattataagtccatttataacttcttatgaaagccattttttacatttgtaagaaaatacctttatccattttgtcagctgtcttcagtgacaactagatttcactcaactgcagtgtggcagaggctggctagatgcacagcaagcccacttcctctccctggagacaaggtcgaacatttcctagc

SEQ ID NO: 36676 - DNA, 356 bp, Homo Sapiens
ttacaacagcttcatagagaaggagaaagcacagggacaggctgccagatttctgcagttgtgtggtcaatgggcttcgttattttgtttcaattatcatgacttcccaaaataccagagaaactcatatttagaagtttaaaaacctatcctatacatacaaaaatatttccagattaaatcatacaacatcaaggatttactgcaaaataatgcgaaggggagtaggtatgggtatagatgaatcaagattggtcatggtttgagaactgtttaagttggtgatgtgcacacagggaggtacagtttactctttcatttacttttgtgtatacttaaatttttccataatgaag

SEQ ID NO: 36677 - DNA, 459 bp, Homo Sapiens
attacaacagctttaatactagttatgaactattaaaaggtctaaatttttttattgtggtaaaatgaataaaattcactattcgaaccatttttaagtacacagttctgcggcataagtacactcatattgttgtataaccactaccaccatccagctcccaaacttttccatcttccacaactctacccattaaacagcaattctccactccccctcccccagcgcctggtaaccagcattctactttctttctctatgaatttgagtactccagatacctcgtataagtagaatcatataatatttgtcctaaaaagtctaaaaatatttttaaaacagaaactagcacccaaataaattttaaggtacaacatttgaagcatatgattctgtatacgtttttaaatttttgacacaaaacacattcacatataaaatgtactaagtcttccttag

SEQ ID NO: 36678 - DNA, 464 bp, Homo Sapiens
ctcactgacgaggtacaaatgtaccgtcgtatagcaaagtcgatattctgtaagaatggcgcgcatgctcgctactgattacgttttacaacggcaggtgtagggaaaacataaaaagacctcaagatgagaattccatctatgaaaaccatctaggctttatcttaatacccaaacttcgtatccatttttctatggaaaaaaatacatactctatatatttttctcaacttccaccaattctttatggaataaaggggatgagtgaattcattcattggaaaacacaggaaagtgaccactccttctttaaggcaaaaattagaaatttatttatcttcaattaagcaaatctctacatattgttggcttctttcttttcatatctgtaaatagttagactaccatttactactaactatagctccttgatagcaagcgccaggccttattaactcaaccca

SEQ ID NO: 36679 - DNA, 413 bp, Homo Sapiens
ataaaaaaaagatatgtaacattaggcattgatggaaaaggactagatcctagtataagcatcctaataaaaggagaggttcaaagacgctctccagaaccagtatttcagactttctatgataaactaaatgtgccagtacctgagattccaggaaaaactaaaaatttgtttttgcaattagccgaacacgtagcccagtctctacaagtcacctcatgttatgtttgcggaggaaccgtaacaggagatcaatggccataggaagcccgagaattagttcccacagacccagttcctgatgaattcccagcccaaaagaaccaccctgacaatttttaggttctaaaagtctcaattattagacagtattgcacagctattgaaggaaaacaattcactcattctatagg

SEQ ID NO: 36680 - DNA, 412 bp, Homo Sapiens
catctagatttaatagggcaggcaaacaggtaagaatctgaaaggaactcgacattatggctgaaccagtggggatatttttcgaaaggagtttttaaagccaggttagaatagtttgtttaaaaaaatgtcgagagggagatgggtctttatttcattaagtattatgagacagcttctatgtgccaggtactaaggatgaaaaataagactctttgatacctatgaacaaatatgtatgcaaataagaaacttaaatacttataaaataattgctttaatagggggtatgtgcaaagtggggagaactttaaatatgcttaagggagtcagggaaggcttcacaaagcagattatatttgatattaaatatgaaggaaaagttttctaggtggacaatagaggaaggaca

SEQ ID NO: 36681 - DNA, 403 bp, Homo Sapiens
tacggactcttagaaagagttaattcttgatgtttataccaaaatatttagcaatctctaatgtattttgagaaggaattatatttgtgaaagaatgtagtttttcaaaatgacatagatattgtaggatatcggaatttttaaaacatgattgaaaacaagatgagtttcactcattagggtaaatggaaaatttctgagtatgatatcagcacactctaagattcttttaaaataattgtgcaatagtcatttttctggcagagtcaattcattcttctggttcaatatattctagacagatgaaagaaaaggaatgttgatctgtgtttatccttgtaatttttctaagctttatatacagttttataaatgggatgaattatgtgcacgataccatcaa

SEQ ID NO: 36682 - DNA, 359 bp, Homo Sapiens
tagaggatcgcatggtgatgtagtgaggacagaggtaggagggcagtgcaggaacaacttccctcttaggccaagaaatctgaaactgggaaggcagtggggagtcttagtgtgtatttagctgaagtagagtcacgctttagggagattggatttgactggaatatctaagataggttggagctgggagagaccctgggatgccattgttgactaatattctgttcttgtccatggtgtcttgtgtttctgagggtgcactagatgtgggtaagacagttaaggagcagaggggatactgttttgcctcaggaagggcttgcccctctcctgtcagcagctgggttgatgtgctggtc

SEQ ID NO: 36683 - DNA, 662 bp, Homo Sapiens
taaccagtgtgcacaggtgctggtaacattaacagacttgccaacagagatgctgagtctatacacatttttaaaatctctggtatttaaggtcaacaggaagaaatgtcctggaaccttccatccagctttaccagggcctaaacactctcggcagggggcaggagggtcctggcccaggcccaatccagcctcacagttatgatggggctggagaaacacgagcccttttcaaggggggcatttggagtggcaaggccctggggaaggtaacgctcacactccaaggtcacactcctccatctggacaaacacacaagcaccccccattgtattggaagtactgtcaagagctcaaaagtgccaccttgcacttttgggtcacaaggctccatctgccacgagcgggggatgtgacttggggatgttttcacttgctggaggaactgtacatctcatttggcagttaatgtctgactagttgcaatctaattcagataaccagtcatcaaaggagaaccccaggttctagaggagtctgcagatgcccatcagagaccaggaccaagtagtcagggaacctgacaagtgtctgctctatggctagaagcttctgaacggggtcaccaccgactgtgctaccacactgggttaagtaagga

SEQ ID NO: 36684 - DNA, 403 bp, Homo Sapiens
ctgctggccttacgcgctgaagtgttgcgcgcggtgcgcgcgcttccctagtggtttcctgcaggctatggccggacacctagacctagtctggcaccagcgggacgtgctcctcgtccccacccccgatggggagggccctgagcgggtagtgctcgctagtgtggcggagctgggtcttggcttcactgagctgacttaagtcttagtttctgttttgtttaccaaagcgccctggcggcggagagtaagggcctcggaggcggaatcttgcgtcctgggggcgggcacctctcccacccaaaaggcacccgacaggcgaaaaacgatccgccaagtagcaactgggggcggggggcaaatggaagaatgaggttccacgcgggcgcgtaagtgccagcag

SEQ ID NO: 36685 - DNA, 408 bp, Homo Sapiens
gccctggcttttatgcgcttcgcatccggcgcccgctcgcgcctgggtccgcatcctggcagctccgcgtttccctacccctgctacctgggctccagcgccggggacgctatcttgcttcactcggccgtgcgcgccgcaccgccccgcactgcctttttctaggcatggggtcatctaggccatgcatgattcgcccctgccccacagaagtccctgaggggtcctggccggacagcacggaatagaaggaacggaaactctcccaaaaggagtcccaggcctggctctatccctccagatgacgtcccaggaggccagagcgcgtaagggccagcaggcgcgtaagggccagcaggcgcgtaagggccagcaggcgcgtaagggccagcaggcgcgtaagggcag

SEQ ID NO: 36686 - DNA, 503 bp, Homo Sapiens
agtgtcacattgtgagaagaacattgaatggggcatcttattgccaccatcttggaaaatatattttactacagtgactttcataggacagacactaaataaatgagatttcttcaagccaaagtgggaacaggtccacctaggcaagagaaccaaatgtgaaaaagtacatggtttgtttgggaacaggtcggccttgttttggagcgagaatcctatggtagagggttgtaaagagatgatgctgagaacgaagggttggaccagattgtgaagggccttttatggggaagccataaaggtttgtaagtagttaactgatgacaagttctttgttgagaattggtgggaatgtgaagggtggattttgagcagtggttctaaactgtttcactgcttctcatcatttattacccaaagaggatttttagcccaaagatagggggatataggagggatgagggggagcaggtgtagtacttgtatcagaatctcattttgag

SEQ ID NO: 36687 - DNA, 433 bp, Homo Sapiens
gatcgagctcgcacctctgaatgcaagtgtcactagttctctttcagtaattgggatagtcttgttccttggagccctagctgcaaagcctctgggaaaagtctttggtgaataaggcagaggaggaatgattgtacctgttagccatttgactgggggcaaccgggtgctatgaaccagtggtagctgaataactcttctctgtccagtcatgattatcatgatcatagtgatttgctgccaccaattcctgaaaaatctgccaagggcggcataaaaatgtacctgggtaagagcttcccagctctggcaaaataagagagtggggcaaagaagaggaagagtgaagggagggacaaacagcaggatttggtgacactctcaggagaaatattgagaacacctacaagacagagacactttgcatccagag

SEQ ID NO: 36688 - DNA, 410 bp, Homo Sapiens
acctggttgcattaaagtgagtctatttaacctctgctcatcgttttatccaccaatataggttgtcatctatctacctgtcctttttttctgtatctatatctgcataagtgcctggaatggtgctcatcaaatgttaacatggtgttatattttgggtagtgagatttggtgaccttctgctgttttcttttctgtatgaattgcttgaatttgtataacaagcgtccacaatttttattaaacaaataatgttttcccttaaagaagaacaggataaaagagcatgtatagaattcaatctgatgttattaggctatttgggtacctgtctctctcttgttagattgcaatcaacttaaggtagtggctaagtctcattcattttgatgattcccagcactttgttc

SEQ ID NO: 36689 - DNA, 514 bp, Homo Sapiens
accctagtaatacaaattatttttgacatgtcaccattattttccaaatatgctttatcgtttattcaccaagtaggtgggaagagaaaaaaggagagtggggccgggtgtgagggaatgtactgttgcttcaatgttaagttgttgctgaagcatttttattgttctaaaagggctttacatttgccaatatgttaaatactaaatggaccagttataggcttatattataaatcgaccaaattttttttccccatagtaagttcagtgacttgtacatagtaatgctattctaatagcgctgcttagtaatatatgtaggggtaagtcttcagtgtttcaacatttactaaatgtcttacggaaaattaacgcttcttagtttcttcattacggacacctttttgctatacctattttcatttccatgattcaccaacaaatgttcaaaacacttttatttcctcgccggaggagtttggcaattggtttttcttctacactctgagctcat

SEQ ID NO: 36690 - DNA, 511 bp, Homo Sapiens
gtggcgctttctactctgctacatatccttacaatttggtttatgaattttagtaccactaacatttttcggtgcatattttggaaataaagaaaaggtaaactcttaaaatactgctttcggccactgagcgatgactgaaataatacctcagtgtatatattacatcatgaaatacaaaaagtcccactggtataaaactacagagaataatcatttcggaataaaagatactttaaaaaattaagtgaaggacagtaacactttcaaagacattaatgcatttcctacattatcaattgtttatactgccttttacctctgatgaaccaaattaaaaggacatattgtagaaaggctgacatcagccaactcaggaaactaatagggttatacagtggataaggaagtcaagatgtagtccaaggaatggggctattcggtttacagatttgaagttagcctattccacatatcggagaacggtataggataccaaaaagtctcaatg

SEQ ID NO: 36691 - DNA, 354 bp, Homo Sapiens
tgcaaaggccatgtgcggcctagttatggccagaaactctgttttccagttttggagcaattgtggcagtgagatcattccaactcgtggatcacagatacagcagcgagttcctgaatcccagacccagtggtggtcctctaactgaatgattatagcaaatgttgcagcatccctccaggataacttcagattcctggcatcattctagaaggcttagcccataattcattcctttggcccttccaataatcaggtaagcatctaattccctctattaaatattttctgttaaaaggcccaggatggtctgtttcctttactgaagctagcatggacactttgcatccagag

SEQ ID NO: 36692 - DNA, 508 bp, Homo Sapiens
ctatcggtcggtacctctggatgcaagtgtctggctgcctttaaagccagctctgtttctactatcctgggctttctcattaattttttctttttgttccttctgctgtcagtctacatcagtctgttccaagacttgtgcctgttggcctctctgcctcatctctcctcgtgtcatttatcccgtccatgagcacccgattagcctccattaaacaccagcctctactttcttcgtgggcgatgtttaacaacactccattaccccttgaaggtatctggcgtttaagggctctctctctagcttaatttcttatattctagccaaagaactgttttcatgttccttcaacatacaacacatgtttttgtgatttttaaaaatatgttttttctacacgaataagtatagcccagattatctcattagtgacataaaaactctcctgactgagtaagcctgtcgttgttactattgttattattttgacactttgcatccagagggg

SEQ ID NO: 36693 - DNA, 488 bp, Homo Sapiens
tggatatgtaaccataaataatacttacaattatactttgcttttcatgtgccacacagagtttctatgaacaaggattaaattttcttgctaagactgagaaatcaactagctagagtctagaagggagatgtgcaacccaaggatggatttagattaatgattcttcgatggcctcttactattctcggggtgcagcacaagttccttcataggactttaagactctttgggatctagtccctgcgtatctctccagttctccttaccattctcctgtatctgcctctggctgcagctgtgccacagccagactctggaaggagcctcttgctgtcaattatccaacaagtgtttactgggtacccacttctgccaggcactgggttagaggttggagacatagcagtaaagacttgctctagtggaagacaagcatttaatactataattaactgcagtactgaagatgaacaagggtgatggag

SEQ ID NO: 36694 - DNA, 500 bp, Homo Sapiens
acctcttcatgcaagtgtcaacttggtatgtgtgaaggtactgacagacctcccaactggttcttaagagagccaaactgaggctaagttctgagaactaagtaagaactgacagcccttgtaggttagaaagtagtggggcaacatgttacaagtagtgcttctggaaggttagatgcggttagaataaaatcattgccattttggggagctgggaaaatggatgtcttcagtctagtctaaaaagggatgacttgaataagcttatataagaaagaaaagaaaaacctttttactcactggaccatttcataatcttgacttttttcaaacataaatctgtgtcatttttcttatttaaaacagctgagtagtttactctcctacttagagctgtgattcttatcatgggctcttgtgatctaaccccagcctgcctccctggcctctgtccttgcttaataacctctagccatatgaacctggaataccagtctaat

SEQ ID NO: 36695 - DNA, 460 bp, Homo Sapiens
tacctctgtatgcaagtgtcatcgaaatcagcaacttagggtattttgtgactgaatattctgattaagtgggggctgccctgtatgccacttaacatgaccaatttccaaagattagatggccataattgcccttgacactaaaatcatgtgaaacacagccagtttctttgatgactcaaaacgtactttgtgatcttgccaagctttgagatcatcgttacaagcagcattttggttgtgaaaaacaactctccttatttaaccttttggggtggattctgagcaagaagttccctaggctacggtcaatctcgctgaaatacaaccacccaccgctcctttctgggtttagaaatctggttttcagaggtgggagtggcttcaagcagcgtctacctgtgttcagaaaagatgaagaaagacaggctcaggctccctggacactttgcatccagag

SEQ ID NO: 36696 - DNA, 398 bp, Homo Sapiens
agtcggtacctcttgatgcaagtgtcttcttacaaccacctaacttctcctcccacaatccctaacctgggtacaattgcatgtagataacattgacagatggttagcacatatattgatctaggcagatgatctcacagatgtgatatgcgggaaataataacatcaaacagctttggaaaagatgtgtaaacactgtgaattttttgcttctatcactttaagagttggactgatttgggaaggactcaaactcttcaagtctagagtcttcatagataaaatagggacattttcaacttcctcctagaatgatgctttcttgtggggactgaatgaatcaatacacatgaaagtgcctctctcccttgatatctacaaatacatgtgcacacaca

SEQ ID NO: 36697 - DNA, 398 bp, Homo Sapiens
tcctctggatcaagtgtctgtttttcccaattaagtttgtttaatgatttaaatccttgaactacacactttcctaagctgataggaaggaactagtactgagtacattcgctcactggggcataaatctgagctgctggtgaaggttggaaactctggcatgtgaacctatcagaagccttcgtaaggaagtagccactgactgagttcgttgtgacagagggctgcaaaaccctgagacagcctgagcttaggaacacaggcttcatcctcccagcgagaaagcaaacatgatctcatggcaaacccagcgacttactcgataactcacctgctaacatgaacgctctcgcctacgccgaccactttgcactccacgaggcggcgatccctctagc

SEQ ID NO: 36698 - DNA, 518 bp, Homo Sapiens
tcgtacctctgtatgcaagtgtctggtatcagtatatgtacaatcaatatgtatgactgtataaattaatgaaatccacaagtgaaaggaaaaattgtacattttactctacgtagtgataaatagggatcaataagggatgcctagtaaataatcagtctttattacctcctcattaaagatataatgataatccctaatgagtgttatcacagttaatttgcttttttcttcctagttgcatgtggcagaattcctcttcttgattcaaaatcttattattcctcttactctgccggggattcaaatatcaatctatcaatttgtttattctccaaacttctactcaacagactccagaagtttttgatatgccattctagggttctaatctcatgccctgtatccgggttttctctgaaagaatatatattctggttttgtgactgtggtaaggagcccttaacctcttttggtggaataagtcccttctggtttagagtgtagactgataatgg

SEQ ID NO: 36699 - DNA, 350 bp, Homo Sapiens
ggtcggccctcttgatgcaagtgtcacttagtgggatcaaagaagctgaaaagacatgtgtttacccatcacgtttaaccagtgctttcagctctggcacctgctgctccggtcaccaaaccttccagcagccccctgacgacaccatctcctgtcctgacttctcagagttttcttcttgggtgctagtccctgcctgctgaggtcctccagctcccaggagccatgttcccatgggtgcctttctgcacgtggctgcctcctctgagtcccggctgtggccccttccctgctggctcctgtgtggtgctgtcagcctttgtcctgccctcgacactttgcatccagag

SEQ ID NO: 36700 - DNA, 534 bp, Homo Sapiens
ggtccctcttgatgcaagtgtctcagtagaatcctcatgaccttggttgaattacatggacacttattaaaggctctcaatggtcccgcactgttctaagcactggacaggacaccaaataagaatgtagcagggaggaactcaagatgctgaccatctcattgaggagacagggcatatttgaatctggaccgtaagtgctacaggacaatgatggggaaaaaagacatctctgtggaatggttggcacggtatcatagaaaaaagactagagaagatagaatttgggccaagccttgaaaagagtatgggtcgaattcagctggtgaaggatggcgaatttccagacctgtaggatgatctaattactccctactcacagagttggagtaattaagtcacaggaccactctgaacagaatggacagagtggaggagtagctgagaggtaaagttcccgcaggcaagatgaaaccttccaccttgacccttggatgcctgcaggaggaggtggaccttgattggagaagcttt

SEQ ID NO: 36701 - DNA, 533 bp, Homo Sapiens
ggagctcggtacctctggatgcaagtgtctaattggtagtggacaattggcgtattagcctttctggaggcaatttgactacattattgaaatatttcaagatctttcctttgactcagcaagtctacttccaggatttgtccaaaagaaataatgaggatggtttcataaagatgcaagaataatatgttaaatgcattgcacataatctttttgttaaaagtgaacaaccagagggctgagggtctctgcctccatgcccacgtctcaaaattgctaactcctgttgattccactgtctgaagagctcttctgtgtctacttcttcctagttgcactgccatttcctagttcaggccaccatcacctttcacttggattactgcaacagcttcctacatagcatcccatccctttccggtttactctccacctggcaggcaggatgagatttttaaacacaaatcaaataacctcccactcctgataaaggtcttcactggcctcccatagccttatgtccaacctccttg

SEQ ID NO: 36702 - DNA, 478 bp, Homo Sapiens
gaccgtcttatgtatcccaggcatagatttgtaggattctctagagcggatgtgtatgtcctggaatttccatcgcttggtagccaaaattaacctctgctattgtctcttatgtctcagttccctctctccccctctgggcaggggccgagagcagccagaagccatgtggccagtgctgtggaaggctggtgtgcctagatgggcccaggtttcttcatcctcagcactgtgcttctcagccaccccgtcttcatccccctattccctcacactgataggtacaaaaatacggttcctaccgcctggaaattgtacaatacatttcatttggtgtttcaagcctgatcaagagaagctctttctcagtcacagtttttctctgtagttaacaagcctccccaccattttccctgaaatagccaaactctcagcctcatctaggccacaggatgtgtgagacactttgcatccagag

SEQ ID NO: 36703 - DNA, 563 bp, Homo Sapiens
tcgtacctctgaggcaagtgtcaacccagggtgtcagggcccatgttctgagcacacaggacaggctgtagttgttagtgctgaagccagtccagcatgacgtttgctagctctgtgatacacagcctcacctttagacctcacattcttcctgtggaaaatgggatgacaattcctgctctgtctttcttacaggtttggatgaccataaaattaaatagggtatgacaaagagctttggtgactgtgaactactatataaagcttaggatcgtcatgatgtcatcagcattgtctgcaggggtggtcttggctggctgactatgggttgccaatcccatggacatcttggtgtcctccacgccctcttctcggcgccagggtaaaatgccaatcagtgacatgtccctgtgggactcaaatgacacaagatgatcaccctctggagctctagctctgcatccttgggtcaggccagcaagtgctgccagatgtgcacctcccagtccagcagccactgcaaaggcaggaaattagcaccagctctgagtaaacatctctgt

SEQ ID NO: 36704 - DNA, 359 bp, Homo Sapiens
ctctggatgcaaaggtacaggcaagggttattagaccaatgggaattggctagtattaacgtaatcagtagagtgggcctcagtacttaggaaaagaacagcctgtgtttgcttgccaaagccttacatatcatgataagcatagaaccagccagttacaaattctggagatggctatattttataatgttgttctcttccaccatctctatcataccagcactatcatcaagcacaaaaacttttcagctgcacaatttactatgctgaaaattcccagacccagaaatcctatcagacatactggcaccccgataaggacagacactttgcatccagaggacactttgcatccagag

SEQ ID NO: 36705 - DNA, 400 bp, Homo Sapiens
ctctgtatgcaagtgtccctggtacaaataagaacttgcaaagcttcatgttcaatggagttcttgtctggatgagataaggagtgcaatactgcacgctcttctgtacttgtgataaatcaaaactctaatgatgctattaaaatgggttttcttttggccctggtaagctggaaagcattgggaggtggggaggatagatttcacttggaaatacctgaagctaaaaagtggtggctttttcttctttcttctaaatgtactccttgctctaattaagcgatgtgatcactgtcccaacactgacataccccaggatgaaacacattttctattcaagtagcctttttttcccttgccttcttccatgagacttgctgaaattgtcatgttatttctt

SEQ ID NO: 36706 - DNA, 431 bp, Homo Sapiens
tctggttgcaaaggtctagaagaaccaggcagcttatacaatttagttcttctccacaagtaaaataataacttaatattggcttattcttgtgggaaccaaatatccttaaatccctatcagtctcaactacctcagtctcaaagctgcaaaattcagagtcagggagtgcacactgtgtgagatgaacagtggtagaatcaggtaggacaatgtttccttattattttttaaggcattagggaaaaacaaaggtcatgggaagggtgaatgataaatacggcatttcctcaatcaactacagtaaccttcccactcatctgggcattgggcacacacttcctactttttcaattagaaagttcaggtcacttcccccctcccagaggactgggagtgattaatcctcactctcatcatgttccatgtaa

SEQ ID NO: 36707 - DNA, 366 bp, Homo Sapiens
gacttaacatgctagctctagtggtgctacggttgtttcagaaggaaacagcttgtgctgtctctgaacgccatccaactggatcacagcaccaaagaatgcactgctccatgctggagagctctggtcagagtagcacggtctctgagtcctcctgctggagtccctctggtccgatttgaattaaggccccatgattcttctttggttctttctaaaataactgatgagttaactgaaagtgagcatccatattttcttgtgtattgtgttatgtccttcccagtgcatgcagatacacacagcccctcatactgacatatacacacagtctcacgcatagacactttgcatccagaggggtac

SEQ ID NO: 36708 - DNA, 397 bp, Homo Sapiens
ctctggatgcaaagtgtcagatcaagatttggtaacttctgtggcctctctccttggctgcagatggctgccttcttcctgggtcttcacatggcctttctctgtgtacatataaccttggtgtttcttttatgtgtgtcctaataacactttataataaggacaccaaccacgcagattagattagggaccaccctaatgacctcgttttaacttaatcacctctttaaagaggctgtctatctccaaatacagtacagttctgtggtcctggggggttagggcttcaacatataaattgtgtaagaggtggcacaactcagcccacaacatcttgtcaccttgctcccttcatgccttgctgcctccctttttggtttctttggtgtcttgtttt

SEQ ID NO: 36709 - DNA, 419 bp, Homo Sapiens
ctctggtatgcaaagtgcatcatacaactagaaaagataaaaaagtgtagtgccaggaaggctgaagtacaagcatgaatattttcaagtgttttaagaccactgtacttaatccatctaacagacgtgaagtcgatttttagtccacttcttgatccttaggctaatgaatgacaagaatgttgcagagcggcgtcagctgctgagaagacagaaaactacttgttaaacagtgtaagaaattcccactcagacctggaataatattgtcttcttcctaggtttaaaattttttcccagtgagcttcaatcaggcaagaaatagtctcagattagaactacacagaattgatgaagtaaacctgtattacaagatagaaagttaccccgtgtacctgatgatgttcattgtctatttg

SEQ ID NO: 36710 - DNA, 422 bp, Homo Sapiens
ctctggatgcaaagtgcaaaataactagaaacagaggaaatcactgattcacttaatgccagaacatctttttcttaataataataatgatttcttacatgaaaaagagcaagtggcagtcagctgagcaaagcggcacaggaacttaagtaaatacaaatataatacctatagaaggtaacacacaaaacagcaagtgagtccctctgacgggctcaagagagttacccagaagcatggagatgagattatttatcttctttgtgaatataaacccatccctcccgccactacttgggtgccagatactgtgttaagtatttttcacaaatgacctcatttgatcctctccacacaatcacgctcacccctctgcctcccttcattgatgactttggcaccaacctcactgtcttttctac

SEQ ID NO: 36711 - DNA, 422 bp, Homo Sapiens
tctggatgcaaagtgtcctctcaagtgtctatccttgatttatcaccaactctccaccaggtctggtcccgttattcatttcctaacacttttaatacttttccttcacagtactcatcaagccttatcaactcagttaaaatctgtctccccattagaattgtaagtgccacagggcaaagattttatcagtcttatttaacttctgtatacttggcataaaacttaagtgactggtaaattttgattgcatatgtgaatgatgagttaaaaaaagaaacaaatacgtatctctggaagaaaattgtacaggatgaaattctaggatcttacacagagaattcttccccttccatgctttacagcaggaagaataaagtaaattttctaagtataataaatccatgacactttgcatccag

SEQ ID NO: 36712 - DNA, 421 bp, Homo Sapiens
ctctggatgcaaagtccagatggaaaattgaaaaatggcttgacctagtgaaataagatcaagtgcagagtctaatctgatgctggtgttgttctgccttcaccttctgtctactctgaaggaatcaccatcagggtggtgaatgcttatcatgaacataacatctttattgactgtctctatcatgacaatttgtaattagctttgaatgatttttgcacagctataaagtatttaggattcaaagaaatgcatttgggctcaggacagacatgttgaacaagaaaacagcttttattggaagtaaggcagaaaaggagcactaaaatggaaatcagagaaattttttaaaagaaaggagactgggaaggaattagaaatctgaagagaaacatctggtttataaagatagtgagaatga

SEQ ID NO: 36713 - DNA, 351 bp, Homo Sapiens
ctctggactgcaaaggtcagagttggctgggcccagccaatgagtggagaccaacataaacagcctgcacaggctcctgggtgatgtgggtctgcgccagggagagctggaggtgcagtaagagtccctaagggaggagtttctgtgttcgaaaaataaccgtgagcaggtagaagcaactaagaaatggctgaggccaatttcagggggttgaccaggaagagcgacagatccattccttgggtttgcacttgggcgctgttcccctccaggcagagtcttctcccctttggctgacctttcccctgccctggattaaagacccatggtcccaaaatcttgtaaaagcag

SEQ ID NO: 36714 - DNA, 411 bp, Homo Sapiens
ctctgtgatgcaaaggtctatgattttgactgctatgaatacatcataggagtggaatcctatagcatttatccccttgtcactggcttcttccacttcgcataatatcctcaaggttcatccatgtgtgtatgtgacatgatttccttcctttactaaggttgcatgatttttcactgtatgtatatgccacattttcatcatccattcacctgttgatggacatttgaggtgcttcacctcttggctattggaaatagtcttgtgatgaacatgggtgtgcaagtatctccttgaattatttggaaataattcactttgctttgtgaatatctagccacagtgggattgttggattgtatggcaattctacttttaatttgtgaggaacctccgtactgtttttcggta

SEQ ID NO: 36715 - DNA, 417 bp, Homo Sapiens
ctctggatgcaaagtgctcatagcttagctcccacatacccatgggaacatatgatgtttgttttccattcctgagttacttcacttagagtaatagtctccaatctcatccaggtcactgcaaatgctgttaattcattcctttttatggttctgtagtattccatcatatagatataccacagtttctttatccactcgttgattgatgggcatttgggttagctccatgattttgcaattgtgaattgttctgctataaacatgtatctgcaagtatctttttcaaataatgacttcttttcctctgggtagatacccagtagtgagattgctgaatcaaatggtagttctatttttagttctttaaggaatctccacactgttttccacagtggctgtactagttaacattcc

SEQ ID NO: 36716 - DNA, 369 bp, Homo Sapiens
ctctggatgcaaaggtctacctagagccccaaactgcataagcaccaggcttgtacaccttagtccctcaagatagtttcaagtgagcgtgcaattcactcttacagaggagggcctttggtcaacaatatagccagaggaatttcaccttctcagctttgcaagaattttcagagtcacaaatcagaggcatctttggtgatgactgctggtggctagctgcgtgtcttccattggctcaccactgtgcttggtactttacacacgtctcattcaggcccatgctcagaagaggaaactgaggctcagagaagtgaagtcacccaccttgggaagtggcagagccaggtttcatccctgtgttatgac

SEQ ID NO: 36717 - DNA, 361 bp, Homo Sapiens
ctctggatgcaaagtgcctgtgagggtctggcggcagaggcctgcgcttatgggtcagcagctaggactgatgggttgaataagaagggcccaagttaggccagttgttctcacagacccagaggtccctagagtttatgatgcccagagcctaggagagggaaatgcacacacatgccctcgaggacaccagcatcctgacatccaagttactgtactgccctggttagcaagaaagaacatctgttcccttctctatgcaattgttacagtaactgttgttacatttcttaagatacatagctatatatgtagtcactctgcaaacacacacactctgatagacactttgcatccagag

SEQ ID NO: 36718 - DNA, 373 bp, Homo Sapiens
ctctggtatcaagtgtcctttacataatggttgctactcttctgtgtatcataggcacacacactactctgagtacatatctgtctacataatagagcactatatttgttcattgtgcctgcacctaggatgtgaattttagacctcttctccccccttaaacctaagaattctcctgtctttttctcttgcctcaggatatcatgaattattcccctttctcctcccacctctatccacggaattgatttctttcttattcctctgcttataagcttctttcctcttgctcttcctttatccagctcatgtcgactaaatcagctaattccatttgtcctgttacagaaatattagctcctaggattgtcac

SEQ ID NO: 36719 - DNA, 405 bp, Homo Sapiens
ctcttgtatgctcagtgtcggcgactgcagcggccatgagaagtcaatgatgcacgggcagagagaggccattatggacgggtggataaagaacaatgacatcaggagcatagggtctagaacaaaatcagtggtgtacagtgacaaagagtggggctgtagtgacaggcagggactacctggtagtgacagacttgggggagctggtgcttacaggtccggtaatgatgcagcatatcgggaggagtcagtaacaagagagtggactatagccggtagggaagctgcgagtacacagagtggccggtcccgggacagtacggtgcatgggggaaggtgacaggctgaacgacgagatgattccgatggaagcaacagggcagtgcggggtaaggtgaggttaga

SEQ ID NO: 36720 - DNA, 390 bp, Homo Sapiens
ctctggatgcaaagtgtacccaggatttcagagcagggcagggcgaggtctgcatctgagaagcagcaccttcacacctcctccacgctgctcccagagccatctttccaaaatgtgaaactcattctggcatccccctaccagaggatcttcatggctgtcaaacagaaagtgtttcaactttttagtttgcagtagttttagagtttcgcagcaaagttgtaaaatgatacagcattctcaaataccactcctccaacttcctgagtgttaacatcttctgtaacattgtagcacagttaccaaaaccgggaaagtctttgggaggagctatgcaggctgtattcacactgcacgttttcccatgaatgcctttcttctgttccagga

SEQ ID NO: 36721 - DNA, 376 bp, Homo Sapiens
gtgattctagagtatcccctctgggatgcaaagtgtcttgcttcaggcacttccctttgcttcttcttaatgtttgttcgggtgggtacctctgtgcagatgcctataaatgagttcttagggtataggagtaaccacccagtcatcgggccatactttagtgtttaggcaggcttaactcagaaagtagcagcatatgtaattgctaagccaaaacctacctgaaatacttcagaggctaagcccctttcctagccaaatacctaactactagagttgctctctgtcagtaagttgattccttgcctgcacattatcagacctgtttctggagccatctttctcccttaaatgacagctgctacagtttccacca

SEQ ID NO: 36722 - DNA, 420 bp, Homo Sapiens
aacacctctggatgcaagtgtcactagtgttgtgactggccttgaatctctgtggttcagtcatcctgcatatcctttcctgtattcaaaatgctttctatcccttgcctcaagttttaaaaataggggcccaattttagcatttgcactccacagaaaggctgcaaattaacagtgtttgtgttgaccttgcatttgaaatgataaaaataaaactggggttatattctttgctcatgcctattcaaatttatattatttgttaattacataaaatgtttttagtctcctataaccaggcaaaagcaccatgtaaacttatcaaaaaagcaatttacccatacaacgttgtatcctatctttaaagcttagtgtttatagctaataagtgtaaagatgttgctttgaatcctttggcat

SEQ ID NO: 36723 - DNA, 438 bp, Homo Sapiens
tcctgacccactagggggtctcaagtcccctttctgtgtgtagcagattctgccagccatggctgtgtgtcagtgagaagaggggagctacagagtcttccctgtccttctctctcccaggtgacctctacagggctctggggccacttgcttaagggagacccgacttctgcacccggtcatatcctccccagggcatgaccacttcccctaccagacgtagtaggccagtttcagccttagtaatctaagaaatatgtgagcaatttgatgcggatctcagagagcctcgtggaagtaatggcgctgagagatggcgcctggggaagaaagaggagacaaggatagtattctggccccagaagaaactatgaggtgggatataatctttttaggtgtatgggagattgcttcatatagggtgggtcagaacataag

SEQ ID NO: 36724 - DNA, 404 bp, Homo Sapiens
taccttatgtctgaccaccaagaggtaagctccattcccacttaggagggctaggaggcagcatcgtggggccacagaaggcctgggttgcagtcagaggacaggatgcacattccttcaagatacagacccagaatgttgggcatctagttcttgggttttctgttgttgctgttccgttttgtctgtcttccctcctttgtttactagcagcctggaatttgccactttttctaaacgaagatttatggaacacttaccacacggctgacgctgcgcgaggctaaggttctaatacaccgcagctcacttaactctcgcaataccataaacgcacactgtttcatcttgaccctttcttgggaaggtgacagagaggtaggaggggtgggtcagaacataag

SEQ ID NO: 36725 - DNA, 529 bp, Homo Sapiens
ctcaaaggcatgagtcttggctctctatgttccaagtcaagcacacgttcaagtgggggcctcgtgatccaagtggggccacattttctcccctactccaaaccccatacctattccccaagttacagaaaattttgatgggtctgagaaaatggggttacatggggtaggggatgacatgagtgtaaagaggatagaaagaggctgtggttctaggactcacctctccagcctaatgtactattagcctcccataagcacgctgtgctgccataattcccagcaatttacaaatttaccaggaacattcccctcctgtgtctttgctcaggttccttgttcaaacaagagtgcctgcccttctctatcctatgtcctcctatagctgcacaactcactcatgtcttaattagattacatggctatgttttggttccttttttacctcgtgggtcttatctcccaacaaaactgaccacttggtgggcaatgacaatgtcccaaatcctgtgtttcttgcaacgcttag

SEQ ID NO: 36726 - DNA, 375 bp, Homo Sapiens
aaccaatgctctgagctcacatgctcccccagctctggttagcaggttgctccaccttgcatggcctcggcctcggcctctgctctggagtcatgcatcctttaggagtagggaggttgctagcacaggattgtccatgcccaaggagggttggtgccaccactgagcccagcttgaagccaggctacctgaagagcaggtgaagtttgcggagggatgcccagcagcctggttgaatagctgagtagcaacacagggaccaacctctgctgcccagttagctactcttcccccagccaccaccacctgctaactgctctttgagcaacgagctctgtcttagactgtctgcttgtgggtgggtcagaacataag

SEQ ID NO: 36727 - DNA, 495 bp, Homo Sapiens
acaggtacaaacaggggcgcgtaatgaacgtctggtcaatcactccttccaaagatctaagcctttcatctcctttgtcagaggaagaaacctcagggttttcatgaaaccatcacctcctctaacagctgccttttcttcatacagcacctctcagtgttgcctcattctgcctggttaggtgctctctaaccaatgggccatcaatcccaggtcactgaaaggtcctccagggttttgggagatgtttagacttctattgtggagtcctctctagatgaagagatatccatcttttcttcaacatcccttgtttcccaatctttttattgttttctggcctcccttctaatttatggatgtttttaacggtgagacgccccaaatggaaccagtatccgatggaggcgtaatcactgttgaccagaacagaataattacctcacttactctgcaaggtacttctgttaaatgctatcccatccattatgtgcc

SEQ ID NO: 36728 - DNA, 539 bp, Homo Sapiens
tgggggtctgcattggtctccctcctgcctgcctaaggaggcaggctgctggggagcccacgcttttcctctctggccatcttgagtttcttgtcctcacccgccctgttgtcttcccctcccctgcactcagagcccaggcccttcctggccagttgacctgcttcctgcttcagatctgctccgtccatcatgctccatcctctcccgtgactcccgcctctgccagaaggcacttggcagtcccctccttgcaggctgccattcatcacaatggtttgctgtggccccgtgtgtctctgacccgccctgagcgaggcctgtgcctggcagcgctgcggtggctctaggctgctcagccctgcggtcagcgcttgcttctggagttgaacctctcgacgtggccacctcctcattttgggaagtccttcttgggtttctagaccctctcctcttactcctctcacccttctagtaatttgaggtgacgctttcctctttggtcctggaatttgtgactgtgctgcccatgatggttg

SEQ ID NO: 36729 - DNA, 398 bp, Homo Sapiens
aaacagttggcttggaacagcagatagagaagcagtgatgatgtaaactgcagtgtctgcggggccacgaggacaatgattaatgtggtttcccaggcctgctatcagctgtggtgcaggcagtataggaataggtctcagaacatgttaccccaaggccctcttgcaagcactccagtgagcagaggatcggcctacacattcccaacccatgagctcaggctggaggtgagccagggagagccaaggtggacagtgggaggagggtcagaaagggtctgaacgtctcactgctgctccaggaagggaagactagccatccattgaggcattacgacaccacctctgactcgaacaatggactgtgtggtgtgaccttaggtgggtcagaacataat

SEQ ID NO: 36730 - DNA, 467 bp, Homo Sapiens
catgggtacaacctggcgtgcacgtggtgttcctggagggacaaaacacccacaggtaaccctggctgactgttaccaattcccctccccctgttatccaatagcctagttccttttttgaggctcctgaagaggaccctgagcctaaaagaaggccatagatctgggaagaaattaatcccacattacttgtcagcagtggcacagactccctgccattacctaggttacctgactggagtttaagccactaccgatcactcccctatttaccttaattaatcagattggcatggctccctcaggaggggtgctcagacctccctgcgcccctgggataagtgaggaagttggggagcgcttcttggcgaaaagacctaagaactgcagggaggcagccctggaggccagggcgggtaggaacactaacagaggggccgcctgcaccaggtgggtcagaacataag

SEQ ID NO: 36731 - DNA, 534 bp, Homo Sapiens
gtgatacctggctgctactcaggagtctgcttccccaaggccattcctgatggctcctgctggcgattccaggcctgccagctggtgagctgtgcactttgcttgtgactgtgggctgcactgtctctccccagcatgggctcaaggtgctcaggaaccaaaccctggtgtctcatccaggactggacacgtggtgagagctccatggagcttaactgcatgagggaggcgggatggactctggcttgtagggcacagtctgtgtagcaacaaggaacatacctggtgtttagatcagatgttcaatgactcatgtcccagagaaggggcctgcagccgtatttggtcagttggggagcttgtatactcaggccattgaggttgccatggccaccattttgggaatcttttctctgggagttgccatcagaatttagggcattaaaaaagtccttaaatttaggtaatgtctgccttaagcagatggtctttgccttttagaactgtcagaacttgtctacccttcaagctggg

SEQ ID NO: 36732 - DNA, 410 bp, Homo Sapiens
gacaggggatacccggcgacttctacttccgtacaatcgaggagctccagcagaaggtgaggtgtgggatcgcctgggcatgctgggtctgagaaggcagaagccttcgcaggaggaatctgcataaggtccagagagctttgggttcttggtttctcttggacatgagcgtaaataccacacatggagtgggagcttagagtatggtgctttgtgtgtgaaccgtctttccgttttcctcagatcctgtgcagcaaggctgagaatgccaggctgattgtacaaattgacaacgcgaagctggctgctgatgactttaggatcaagtaagtcaggatgaggagggtcagtgtgacttctctcctgctgtatttccaagggcccgccccattggtgggtcagaacataag

SEQ ID NO: 36733 - DNA, 388 bp, Homo Sapiens
ttatgttctgacccacatcagcaatgcttagagtgtttatctggggtggtgatgaaattgtgatccatccacccctcactgatatccttgtacatcattcagagatgggcagccagagttcagtgtttacgagggcacatccagaaaaagctaaaactctctaatctactctgatttccaacttattcatttaatcaagcacttaatgagtacttcccatgtgggaggcactgtgtctgtcactgtgtgatggggatacaaaagtgagactcagtccttgttgttcgttgacaaatgcttaaacaaataaggcaatgcagtgtaatgcatgctctagtagagttacaaccaagtttctgctctgcgtaggtgaggtacaggaagttta

SEQ ID NO: 36734 - DNA, 382 bp, Homo Sapiens
ctacaggttttggaggagtagtgtgaacattgggtgatttctagtggggttagagaaagcagtacctggttctttggccacatctaccagagcaaagacctaaacttgtagaggagagtattgtttgcttgttatgaggattgtatctcccaggtttgttcttttgcatgagttgccgaataatgtaacagagacttcagaattaaggaaaatggttttcaccaaaatatcttgttttacctttatttgtactaaatggaatacacatgtttaatagctaaggctattgagtgcttatcatttgccaggaactgtttctgagcctttcacatatgacacctcattttatccaccctctacccctaacaaatggtgtggtttg

SEQ ID NO: 36735 - DNA, 435 bp, Homo Sapiens
gtggctgttcttgagttccccttatgttctgaccaccgtttaaccatcagccgggttcctgtttattttgcctgggccggtcacctgtccccagagacagagcagtgagagagcataaagggatactggggagttggaagaggaaatgagatagcaggtgtgcatagtcacgggtgggaaggaagtggatgggacaggactgggcaggcatcattcaagagacgggctagggtgcagatggagatgtaggagcaagggtgtctatggcccttagagcactttgctattcagaattctctatctgggcatttttgtggagaaatgggtcatggtcttcatcagattctcacatagccagtaacccaaagaggttaggaagatctaagttagtcataggggcaccagaaaatggatgggattgtccagagggagtga

SEQ ID NO: 36736 - DNA, 427 bp, Homo Sapiens
cacctgtaggtttcaatcagttttttaaatgttctgttcttaaagtgggtaacaagcaaaatgcagacatgagctatgagtaagggggatggaagaccaggtgaatgtgtttctgcagagaggggacataagccagtccttccaacactgtccttagacggacaaagaacctctgcccctttccttcctgcttctcagaataacaatgtgagcatttgggctgctctcaaatcctaaagggattcaaagtagccaacagtcgggtatcctctccttctcgaggtatgggtctcatgggtctcggtgcatcatgccaagaacagaaaggatcctatcgactgtccccatcacttctatttgaattgctgggataattcctacattttaggaaacagacaaactctctaagggtgggtcagaacataag

SEQ ID NO: 36737 - DNA, 535 bp, Homo Sapiens
ttagtctgaccacccatcttcgtgttgtcacgcatctgttgagggctaagtgctggggtaaatgcctcacctatatcacttaactcttctcagtctactatgaagcaagtattttatcattactctgcagacaaggaaatagaggctcagaaacattatgggatatgcctaagatcactcagcaggacagtgatgggacagaatcagaactcgggactgctagcctcaaggctgtgctctcaggccacagtcccccagacaagcaccctagtcagactatgaccaaccaaccctggagacccagggcccaccccatggggtccaccacatctctgggaaagctgcaggaggcagtggccaggccagaatatcccatgccaggcttcttccatctcactcttccctagaccagcctccagcactgaccccagggtaccctgctgccttagccctttcccatccaggaattagcacctccaacccaagaggcaacctgttgattccagaacaggcagaccgccaatgagaagacagc

SEQ ID NO: 36738 - DNA, 587 bp, Homo Sapiens
tgcaggtagctctagaggctcccccttatttgacccaccacctgaatctgccccagaacgtggctgtcactcaccataggattctcagcatagaatttgtaattctgtaaacacctagccagtgccaaggagagcatgaggggagagaaagaaaacaagaaagcacaggtgttcacaatgccaagaagaaggatcactgagatgaccaaacaagaggcactgtcttttctggctacctagtagggaggacaatgtagagtctctgaatagacagtggtcctacccacaggcacactcagtgactataagcttcctgagagcagggctgttctgaagagatttgagttttctcctggccatggagagtgtaattaagtagccctgggcccttgaagacttatagtgcaggttgactgaaagaactaaatcagccagtctttgcggagaggttgtcatgcaaacgaagtgctaagggtcttgcatgcatcccttcattttatcctcacaatagactgtgaagtaggcaccgccatccctgttgtgcattgtgcaggcaagaaaaccaccaaagcaaatgggaccaagac

SEQ ID NO: 36739 - DNA, 484 bp, Homo Sapiens
tttgatgataacatagtcgatagagatagaagtacacagaagcaatatagccatgagtatcgactcactatcttatatacatatcctagtagaaaggtcggatgaatcgtgacaatcctagtcgaaaaggtgaaggatacttctccacggcttagattctagggtggtcctggtgaatagttttcaccaataaaatgtgacaagagtaacactgcaggagttccaagtctcagctttgaggccttagttttcattttcactctcctgtccagagactgtcatgtgaggaggcctaggtctgggtgccttgatagatgagcattcacatggacgaaagaggagcagccaacagccagcaaacaccctcccaacatgtgcatgaggccatccaggacctctccagatctcaggaaagcagctgcctggctgctgacacttgagtgatcccaggcgagataaccagaaggatcacccggctaaagtg

SEQ ID NO: 36740 - DNA, 433 bp, Homo Sapiens
taatcggatagtacttgagctttcatgatgttctcatgggccgttctgggagatgccagattggtgaaagaagctccagtgtagctaacacgtgaatatagtgagccttagtttccactttagttgtctgaagttctttctctatctgggaggcctggctaggcttctcctgataattggtgtgttcattcggttagtccacaaatatttactgagtacctcatctgtgtgtcagattcccggagaagccccgttatatcagctgtactctcctattttccctcgacctcctcccagtactttagggaagggggcagatgagaattacagccaggagaggacaattatgtttggtagtcccatagtgctctagtactatcctggaattacaatccaccgtaggtatggtggggggtgggtcagaacatccggg

SEQ ID NO: 36741 - DNA, 407 bp, Homo Sapiens
tctgccaccgtttacaggcaatgagtccaagctccttagtatggcattgcgcatatatggcccgtgtgttgtgttctctgccaacctctcctgccccatcccttaacagacctcaccttgtactgtgtcattgaacctcagtgacctagatgaatttctgccttctccactctctgcacctaggtttatgtcctttctttggctgagtgcagcgtctggattcttaattgtctggcttagtcttatttgtttaacacaaattagctctcttcttccaggatgggatcttgctcctctagtctgagttaagtggttctacatattttcctggcaggaactatcatgtgtcaccatagtactcaccaccttctactgtagttgtcactgtatcccgctgttacctatgc

SEQ ID NO: 36742 - DNA, 493 bp, Homo Sapiens
cctcatgcgaaccatctgcatgtccatctagggaaaccacggcccagaggcgtcagactgaaccccagatctctgcacacccaatccaggctcacaacataatacaacttgctctcctgtgtgcttcatagctaagctgatcgcgaattctttcctattcaccacaaaacatcctttatggaaatcaacttcaatttctttgacgatcggcagtaattcagaggtatccgattttccgcgcaagacctgatctgtttccacggtacatgtgtttccactgactcctcctgggtgccccgtctattggaataggcatcacgacgtagtgagcaaagcagaaagacacgcaaaaccacggtggaatctcgcaaggatgatgaaagaatctgaggtcacatggtataattccatttatgtaaggttcacaaggaggccacattctgaagccaggagatggaacggcggttatcgtggtgggtcagaacataagggg

SEQ ID NO: 36743 - DNA, 492 bp, Homo Sapiens
cttatttgacccaccaatgtccgtcttcctgcctggtccctacctgaccctccttattaagcacagggataagccttggcatgtcctgccagcaagctgagggctggggctgtctggcctgtacttgccaaatgtagtctgagctgtcttctctctaaaggactcttcagccccatgacccccaagtatagagccagacccaaatgtgcctcttcacatgttccaaggtgggcatgcttgggaacctcatccagcccctccttgacctgaggggtctgcagcagcagcccatgctcatcttaggcagtataaggactcctgtggctgcagaaccacgaggtgggactctcctcaaaggctgcttcttggtggacagggttgtggaaatcaggacagtggctatggcaggagtggcagctatgacagctgtaacaagggaggcagaggcggctttggcagtggtagtggaagcaattctggaggtgggtcaga

SEQ ID NO: 36744 - DNA, 366 bp, Homo Sapiens
cttatgctgacacatcgtatgatatgcccaggtgcagcatgcaaaacaagtgcagcctttgcagacacagacacacacacgacaagctaggcactgcctcagttcccaaacatgcgcctctccacacacacaggactcactccagagataagacctgcacacctctggactcacatatcaacacaaaacagacacccacagacacacatacatcaatcatccccaaaacacacccacatgtcaccaactctcaggacacacgtaaatcaggcacacacagacatatgccatcagacctcaacacaccaccagacaccaacccaccctcctcacgcaaccctcaaacatcatcaccaactgtcagca

SEQ ID NO: 36745 - DNA, 434 bp, Homo Sapiens
cttaggttgacccacctcggctcccaaagtgcggggattacagacgtgagccaccgcccccggcctctctaacatttcttttggttctttttatagtttccatttctctgcttacattgcctacctgttcttgcatgctgtctactttatccagagcatctggttctgatgcttgctttgcctcttcaaactatgtttttttgccttttagtatactttgtaattttttcttgatagccaggcatgatgttttgggctaaagaaactactgtaaataggactttagtaatgtggtggcaaggtgtggagggaaaggaagcattctacagtccgataattaggtctcagtcttttagtgagcctatgtctctggactgtgaacttcacaggtgcttctcagtctccccctctccttaggtgggtcagaacatcag

SEQ ID NO: 36746 - DNA, 355 bp, Homo Sapiens
cgcgattcttggcttccgcagacacctggccttgtctgcatctttatggcttctcttccctccctggagctttatctctgaggcagccttgtctcttggtggggttcattttgcatgcatggaacttaacaggctccacaaaatctggagagaaactctggcttagttgagcccagagagtcacaaactacctgtagtctaatgggctgtgatggggaaaaaaggaacacagtacaaaattaggtaccaggactgttagtagaagccaggttctcttcgaaggggatgtaggtggggaggtcagtgacttgcatttttatacagatggtgggtcagaacataaggggtaccgagc

SEQ ID NO: 36747 - DNA, 445 bp, Homo Sapiens
tacacaataccctggagaggacacactcccacctgaacagtgtacccgaactctcactgtggagaggacactctgccacctgaatagtccacccaagctctcaccgtggagaggacactctgccacctgcatagtgtacgcaagctctcactgtggagaggacactctgccacctgaatagtgcacccaggttctaactgtggagaggacactctcccacctgaatagtgcacccaggttcttaccgtggagaggatactctgccacctgaatggtatacccaagctctcaccatggagaggacactctcccacctgatcagctagacaggcagagctgtgggcagtccctcttgcctttcactgtgccatttctcttctcccttccctgggagtggaggtgttcctgcatgatctgctgctgcagggagggggtttgtgggtga

SEQ ID NO: 36748 - DNA, 434 bp, Homo Sapiens
accctcggagcacgtgtcttccctctgcctccagtggcgcgcacggggcacgtgtcttccctctgcctccggtggcgccgcacggggcacgtgtcttccctctgcttccggtggcgccgcatggggcacgtgtcttccctctgcttccggtggcgccgcatggggcacgtgtcttccctctgcttccagtggcaccgcatggggcacgtgtcttctccccaacccccgtttcttactgtcttggtttccccttggatcgtacctcagactttacttagtggcagtaggagtgtccttggtgtcctgtagtgtccacagaggctggtgtaggctttcactcatcaaacatctgctgactggcaggaacgggtctggctgctgggttatggtctcaactctaccccggatgggactgcctcagaaagtgaaggagc

SEQ ID NO: 36749 - DNA, 446 bp, Homo Sapiens
agatagccctgccataccgtgggaattcaagatgagattgggtggggacacagccaaaccatattacctctggagcccctagaaacccaaggtcagtcatttagggcaactgctctgagctggagaaaggaggatctgaaggcccttacttgatgctcagtcactgcagcaccagccaacttagtcatttttgttctcccatttgccagcaaggcaattccttcatacattatctctagggggtagcttgcatcctcagtgattatatacttagtggttataattttatcagccacagatgaaattctcaacctgcaatcatttttatgtttgataaaagtagggaaaattgtataatgaggagtaagatgttcttctggtccccaagcagtcagtgtgctttacatgcaataaatggtgtaaaatgcacttgtgcgcactgaaat

SEQ ID NO: 36750 - DNA, 370 bp, Homo Sapiens
cggactcagctgtagctctcttagccgctaggggcgtgggctcctccctggacattctgtctcagcctgagacttggtgattgcaccttatccctgctagttctgtttggagagttcttttgacctcttgttagctaatccctcgttactctaatccctgttaaaattaataatttactttcaactttccctgtcaaatttctctctcctgatcagacccatagtgatatacttataatagtgaaaaattagaaagtacctaaatgcccaaacacagagatgtttatcaatttatagtatatccacatagtaaaacactgtatagccactgaaaatcatattgtttatctatgagggggtttgtgggtga

SEQ ID NO: 36751 - DNA, 555 bp, Homo Sapiens
tgcactcataacaggcgtgagccaccgcgcttagcaatacctgacttttagtaaatcaaatttgggcaggtggttctgagagcttgtgtggcatgtatttctcagtggaattttaaatagaatggtgactcggcatttattccttgtctgaagtaagcaagtaggaaggaccttgttccccattcaagggaatgaacggtgtggtatgtactttgcaaacctacgtatgggattagtctgtagtgctctgaaacctagaaatcaaaggaaaggcatggggcctttgaccgactgacctttgtttcttgctggtaatagaatatagtaaatggaaatttatctcagtagtttagtcagtagattctgttattggtaatgatgggtgagtccaggggagtttggatacttgaattttccagagagatttgtttaaaccctgaactgaaatgttttttctcatgtattttttgatgacttttaaaaaataatttcagcctttattttagattctgggggtaaatgtgcaggtttgttatgtgggcatattgtgtgaca

SEQ ID NO: 36752 - DNA, 378 bp, Homo Sapiens
gaagacagaagccctggttaatcaggttaaccagaaacaggatatgataattacaggactactcaccgacaggcgtggttcacagccccctccaaaccacctttcgagggatgatattgccagttatggttaaacccaggaactgaccttggcccagagccttcaattcactcggctagggactttgcataccaagaagtcattcccagaccaatagatatactttccacattccctttaaacaaggcttgtgtcggtgttaagataagctcgctaagggtaactaaaggacagggttggaaactatgaaacaaggataggaaaagtaggctacataaataggagcccctggaacaactttatgagcagccccaggta

SEQ ID NO: 36753 - DNA, 409 bp, Homo Sapiens
aaaaactcggtcctttactccagctggagtgcatatgtaatgagaagaaagagttttacactgatgaaggaatacaatcgccacccctggatcaacagtcagacttaaatagcaaatgtggcatgggttccaaagctctgtgattttcctatactgaaagatttctcccaaccatggaggagcctaacaattcagtcttcagggtctctaacagcactgacacactggatgttaattacattgtgattggagcttccttcccagacactccagtgtactactttcctcctttacagcctctcttctaactgccaataaaagagtcctcatgagctcagctccagcacagataagactgacagaaggttccgaggttggcatttgcaaaatcgcatgagcatataattgc

SEQ ID NO: 36754 - DNA, 464 bp, Homo Sapiens
gaaacatgtatcagtcctgctggtacatccagagatgttcaaggtactgagctaccttaattacctgcttgcaattcacaaatacattctttcaaccacatcctcccaaactacagaagtatcctgatgaaagaacaggtgtcaggctcaagggaaagaagcagatgtggtcacaggtgtctgtttcctttagggggctgattcaactatgcagatctaaccctgccaaggtagagtttagttaaagaggaagcctgcctagtgccttccacttctcagtctccaggcccatgtggttaatagcagaataaagtgtttacaattttctaatgaaaattttgaaggaaggggcttatgtttataagattccagcatctcagttcttcatcatatttcctccccaaagagcgatctctcttccagtgtcaggtttatgcacatcaaagccttctttcggatcattc

SEQ ID NO: 36755 - DNA, 386 bp, Homo Sapiens
cagcaacatccttctaaacgttactgactcctggccagtggctctggttctgtagtgcaggaactgggctcactgatcagacacatctttgggaggcagccatgatcaggagcagatttatcagttgcagtatcctaggtcatggagatccctaacccgccagggctctcaacatcgcgtggctgcttattaggtctgcttaaaaccaaaaatcaaggacttactgaataaagtggttcttctccctccaactcaaacaccccttattagaagctgaaagctgaacaccaacaacattctgtacagaagaccaaagacagaatgtgtggaggcatcagggagccctgtccaactggcatgagaacagaccattcaatggagtaggt

SEQ ID NO: 36756 - DNA, 390 bp, Homo Sapiens
atgtactcagcatggtataggtgctggtgataaatgctgaacaaaaaagaggttccggacaatcttggctccctatacaatccaaagggtgccagttttgtactgagtacagtgtcagccatatcacacaagttgaattatgttgacgctttaatggcattcatttctcaatagtctatttcaattttcattttgtattcaatccagggcttaagtacacgtgactataacttttcagagatgacaacgtctctccatagattacttacccactacaaactaaatctttacaatggacttacggcggttaccagcttacccaaatgatcatccttagtttcactaatgcaaggacctgtacttaaatgtattctgacagtacaatatgac

SEQ ID NO: 36757 - DNA, 428 bp, Homo Sapiens
tacaacaagcccagtttacaacagcgccagttacaacagcttcccgctgtgtggctccagcaagttggctcccacctcaggtctgggtttccaggcattaagtgacaaagtggatgcgacgctccttctggactgtaatgcgcactgcgtggagatgttcgtgttccagtgtagacagggcgttgtcacatcaggcaggactacagggacaaggtttgtcagcctgtcttctgggcaacttggggtatcctccctttatatcacctcctgcccaggtgctctgcgccgccagaacatcatgtcatatgggatccctgatggcacattttgagactttggttcacagtaaagattggtcctgtgtgatcttaaagtaatgtggcttaaaaacaaatggctgtcagggaattgtaaatcaaagcaaacac

SEQ ID NO: 36758 - DNA, 483 bp, Homo Sapiens
gttacagcagactatgatttattacagtgaaggtaaataaagcaaaatcagcaaagggaaaaagcatattgggggaaatcaggtacaaacttctgagttctctcccagtggagttacgtaggatatgcttaattcctccagcaaccagctatgacaacatgcttgaagtgttgtctaccaaggaagctcaactagacactcagtgatcagaatttttattggaggatggccacataggcaccctctgtataggtactctcgactggcatgtaccagaattctaagactcctggaaggaaggcgggtattcagcatgaaccacattgtttttcataaacagttttaggcacagggagccactcttaccagagaatggcagaaaccctcctgaaatctaagttctagatgccagtcaaaggccaaccttgtaagcacacctttgaaagtatagtagtcttaggcctgtcatgttagctctttttt

SEQ ID NO: 36759 - DNA, 351 bp, Homo Sapiens
tacgcaacaagtcagagcgcagtgacctatgggacctactaagagtacgagacgacgtcacaagtaattcacccttgacgcctagcagaccccttgcttctgttcttgtactctataacttagcatctctctgaggtttataaaataggttcctggatctcccagctggagcttctgctgaatccaaggcactacccttatcaaaagaaagagatgtgagaagtaaaacggatacagacgaatttaacaataaaaagaaaacaacagaaatgaccacaatgtgaaagagtaacaaaaactacacagaaaaggtattagagagttactgagctgttgtaactggagctgttg

SEQ ID NO: 36760 - DNA, 380 bp, Homo Sapiens
ctacagagaaacagatcatacattttgagtggaaaaccctgctagccttttaccacagaaaacaccgtatattacacttgttatgaggtaaaaacctcatggaggtatgtgccacaactaacgattattgcctagatggataaaagacctcatgagaaatcatatattaactaaatccatttatgctgctataacagaatacctgagactgggtaatttataattaacaaaaaatatatttttgaacataactggggcctgggaagtccaaaattgagaggccagcatcttgcaaatgtcttcttgctacatcatcgcatggcagaaggcaaaaggactcaataaggacaagacaaaaagaaaagctgtagctgtagtaa

SEQ ID NO: 36761 - DNA, 400 bp, Homo Sapiens
ctgctgtctgcaaaccaggctccgtgtaaatcctttactctccctttctgtaacactggagagagagtcacttgtgagatgcacaaaataaatataattacacgaacatgaaaaacaaaagggctcaattctagagcacacaggctccctaaagaatgtttacagattaaaggtaagagtaacatttatcaccttaccaaaatacaggcaaaccaagccagagagcatcgagggcagatggaaaatggcaatgtactcctctaaaatgggaggtatctttttcaactcccctttcttttctgtggagatgttgtaactgagctgttgtaactagagctgttgtaactgggctgttgtaactggagctgtgtgactggagctgttgtaactgggactgttg

SEQ ID NO: 36762 - DNA, 378 bp, Homo Sapiens
cggcccagattaacagctgcagaaaaactgtctccctccccttccctgctcattttaaacggtcctatttaccagaacactatgaaggtagtaaaactatggtaagacaaacacatacttacatattttcagtttaaaaggtgaaagtacacagaggtaacttccatttagctcactcccctaagtcattctccttgtggatttcctctttacaggccttaaggtgacttgcatcatgttcacgcccagggtgaagtgtatcatcaccacctgcaaatatttctaaatgggatcagttctattaataacaatgactatttctaaaggcagtaataagtaaaacagggttgttgagctgttgtaactgggctgttgtaa

SEQ ID NO: 36763 - DNA, 393 bp, Homo Sapiens
acacctgtactcagtcatctcaagatgctagtgtagacgacggacaagagacctgagttaacagaaacaatagggtgaattaacataggtacaagataaatgaagctcttagatctgatagagaatctcctgtcatgaacccttaaaggtggcattggcagatttcttcatctgaaacctccagaatgaagctctttagcaaaggtgattgatagcatttgcatggcttcccagttggaccagtttccccttccctccttcctttccttctcagtctttctcccttcccttcattctagtcaaagagatagacctttaaaaagagaatctacagaatgtagtaattgctataagatgaagtgttgtagaaaggacttttttcagactaggtct

SEQ ID NO: 36764 - DNA, 460 bp, Homo Sapiens
gggagtgtaaacaggaggcgatagtataactcgtgtatgggagtaaaagtatggggtcaaaataagggatatggaataagagatatatgtgcttgtaataggtatgtcgtgtcataaagtaattccgctctgtacatatctttcgcttttttactgttactgacatagtatttctgtctgtactctggaccatatcttttgttgattacatgttaggatcaccatcttcccttggtctatgcttcctttatttattttcatgttttctttacaatctcaaacttttaaactacaaaactactgaactcaactttaggtgcctcattcttccctagctaaaggtcataaaagttgtttcagaattttttctacaaacaaaacaaatttgccttttaaatttaggtatttaatccatctggagatgtgtttagtgtggtttttataaggatctagtattttt

SEQ ID NO: 36765 - DNA, 442 bp, Homo Sapiens
gaagagtaaagaggcggggggactgagaagacacatggagaactgacaagataaagtgctgagtggaacaaaggaagctgtataattatgtgtagaggtggaccctgcttatatatcaacacacgtgcaggaacacacgcataaagcaatactatatttgctcggtccgtgtacatctatgtcaagcctaagaaaatgcccgataagtcattccctctgaggaaggtagagggagttaggtgagtatctcaaaggagattttagccttatctatattatattgcttttaaacagaatatatagatatgtcatttgtatattcaccctccaaaacaaatgtatttatggtgcaaaaagatacagaatgggctaactgaaaagtcaatgataaaattcctttcacacttcagggaagtgatcattgttaacactaataacttgg

SEQ ID NO: 36766 - DNA, 494 bp, Homo Sapiens
aaaatgagagtgtcaagctcatatatgtttcctgcatgtgtacacagaagctagcagtaatgcatcatggggcaaaaggagctcgttgagagctccattctggtatccagtatctgcttccaggatgatggcaggcacccactcttaggagtactgataccagcacttccttgagctaaccaggtctcaacggaaggtaacaaaccaccaccagcattcatatttcttccttaagtggtctgtggactgaaatactgaggagctacagttgtccaaagagtaaaagagaagtaacctcatgtccgtttcatgactgctgcctggtggatagcaactataagatacatatccatttcactaatgttcaaaggtggaaggaaaaatattatgtcttacaacgagaaaaaggtaaggcataatgtcgttaggatactagaagatgtgacagattctattttcatctctgtcacaaccttatttagtgatgtagaaac

SEQ ID NO: 36767 - DNA, 458 bp, Homo Sapiens
ataactgactcatgagtctataacaggatggtcagttgataccggactgcggaatcctaaaagcccgcagagtaaaaccggaatcttagtcatagccgccctcggatggtaatctgatactgatccccattggaaggggatctgtaagtgatctgatatgtccttcttttagcgcactattgtgtactcatctcgtgcatagatgcacgggttcatcttcacgtaaaaattgacccctaccaaacctgtgtcaaagaacagttttcatagcatatatagagggaagaattatagtagtctttcagcaaaagtaacaaaaccttccattgtactggatttttaagcagcctgaaaaacatttctcaagacttccctgtcagaatcatctgatgtcgagtgtatctgtgcgttcttagtttttctatgcgatgttaagttttggaggaactagaaatgtt

SEQ ID NO: 36768 - DNA, 433 bp, Homo Sapiens
aacgtgaactgagataatctgcgtacttagggactatgggccttatgtaccgtgaggaactttgctgctgagatgaatattgatacaactaccctcataaacccctcccgctgtctgctgcccagggagggggcggagctcccagaggtgagctgaggtgcttgcactgtctcagaagccccattaagttgttaaggcatttagtagtccagacagtgccgactgcaagggcagttcaaatccccacacaaatggggatggggtcatgaaagagggggctttgatttcttgcctgggcagggcacagaatccaccttggtcaggggcagtggttggggaggaagtagtaaactacccagaatgggagactctcacccttaccccacctctttggccatgatctcccaaagcctcagtgtcatttagaggggaa

SEQ ID NO: 36769 - DNA, 504 bp, Homo Sapiens
gatacggacgcgaattatacatattcgatcatacaggcatagcatagtaaattgatgctgtgctagttactagctactcacgcatgtctacactgcttcctgagatataaagtctcatggcttcactgactggcataattacaaatgacctggcttcaagattcactaattctatctccttgaaaaaacactgctgctaaactcctctagtaaatctttcaattcggtcaaagaagcatatagcatctgttacaatgtatgtttggttcctttttacgttttcaatctctatgtagataccatttagttcatgcagcatttaccttgggtcactgaacatgtatatggtggttagtctgaattccttctgagataatgaagatatctgtgtttccttaaagtaggttcctggatatattgactctttgattgtgccatgtttccctatttctttgtgtgtcttttaacatcatgttgggatccaagcatttgaaaaaatatcac

SEQ ID NO: 36770 - DNA, 404 bp, Homo Sapiens
aactattaggcaattctgtaatttataattccataagatgaggaaaactatttgtagggtcatggagagaagtgacttaccagctgcaccaatagtgccttgaagatgccgtggcctgactacgtaatgactgtcttagtcatgacaccgataagcttcaaatctacaccattacagtttgtacaacaggttggcttaatgaggttgatgcagatgctcaagagcagttattaaaccctcacaatgagactttagcaaatgagggcttcaacaagttgttgccagtaagtgataacagtggaagccactcagttgcatcagacacatgtgtaaggtgctctgagtgctagacgctggtacagaactccaaaagaaaatcaggcctcattgccgaagcttgatca

SEQ ID NO: 36771 - DNA, 427 bp, Homo Sapiens
tggctgggacattccagatcatggttcctggagagttaggggtctagttgaggagcccacgcttctgggttcatcgtcttggattctcaccggatcgcttcgctggctggacggagcgcggtgagctctctggagtttgtttgagcgggccttggtcgccatccataagggctctgccctcataacctaatcacctctcacaggccccatctcctaataccatcacatcaagggttacatttcaacataggaatttgggggagacacacacaaacattccgtccataagaggcatgaatcccaacttttgaaagagggtcactagatggaagtatgctgattggtgggacagagcagaagcagccacaggggaggaggctgcagcagaggtggcaactggtttgccgaagcttgatcacggggatcc

SEQ ID NO: 36772 - DNA, 401 bp, Homo Sapiens
gatacgtgatctcataaaaatactgactccagtatcaagattaaatagtatattcattgctttagcgttgtatttggaatgggggacagagaactgacaattggaatacgagaaacacaagaaatctgagactgggcaagtctcaggcacagatttggagtgatcacatgaaaaagacctcccaatcctagattcctctgtccataaaactcatcttcctttccccaccaagacatttgagtggatcagagccaccctgaagattccaagcttcaacctgggtttcaaatcctactctaaagtaaactcacactcctggtgatttaagccaaatctaccatctcagaaagcctccaaataggggtgacctcaaggatggacacattgccgaagcttgatca

SEQ ID NO: 36773 - DNA, 420 bp, Homo Sapiens
ctcacactttgtctaaagtctgactgctagtatttgaattcgagcatgcattccccctgagcttatcatagtggaggcaaactgagtggggttggtttttctcctcaagaaatgttgttctgggacagtgagtcattggtttttgttcttgcaacccttcatcatctaacaggtttggttaactcaagaagttctaggaaatgttcaaacactgcagatatttatcaaggggcatttttaggagtagcagagtgtcaagaactcaaattgacatctagtggcaacacttctaaagattggggccccgtactatatacaatgctaaatttccaatgctgtgattggaaaagactatgagaaggcctctagtctcttcccactaccatcatctgcagcaggcccacaccacccaaatcaaca

SEQ ID NO: 36774 - DNA, 396 bp, Homo Sapiens
tctaaacaattttatgaaaataagaaattaaaagaacaagtgaatgagcctgaaaatgatattggaagaatgtaaaacatacaccttaagttaataaaataaggcaacatgtataacacgtaagagtcacttttaagaaccaaagttctttgaaaactaataaaatagacaaacttctggtaaagccgatcaataggaatgagaaagggaataaatagggatttaaaaggaaataaagcgtatattagagattaaaaatttactactgtgagaactttaagcccatcaaatgggaaaactgttgaaatggacatgttcctagaaaaatacaattttaacaaaacatactcaaaagaaattacctgagcactcctattgccgaagcttgatcacatc

SEQ ID NO: 36775 - DNA, 495 bp, Homo Sapiens
agatcggagaagtcagtgaaatcatctgaaattaaaaagggaaggataaccccatcacaggtaagacttgttttcgtggcaaaatggaaatggtcttttcttaccaatgtcatctgggcctggtctcatttccttcggttccataggtctcaacaaatttacctggtgggtattgggtacatgaaatgttcttttcagtcctatttagtgttcgaagagcctctcctctctactcagtatggaaaaacatgaatttgagagcaacagatgacattttctgcctttaaacggcttaagatccagttggacagatgaggtgtacacacatgagcctgcttttaagaccttttgatagagtaacagcttagcaagtacagctgagtacttgcaggtaccaatgagtacctatatgataagagtgcagaattatgacttttaagtagggctgatgatggacaaggtgcatacacatatgctctttcactgcctttggag

SEQ ID NO: 36776 - DNA, 415 bp, Homo Sapiens
actgacgtttccaacttacgcgcacgcacagtttcaactcacttgcctataaacacacacacatttcaatcagttactagaatgtgacattccactacttgtctgtctttggctgtctacactgctaggccaggccgaggacttctctctgaactccaacaatctttgaacacccttcctgtctacactttcagctctctcaaaatgttcagttacccttcctgtctgtgctcatgacttcagtctcattcccaccaaaccatcctcttttctgcagccacagggatttttctaaaactcaacccaatagggtctcttttctgcttaaataaaacttcattgaccacttctctacttcccattactgatcctagcatgatacacaaggccttccatgggaaagtcagtgcgtatt

SEQ ID NO: 36777 - DNA, 403 bp, Homo Sapiens
gtacagtgtgactgggagaacccggcggtgtcagaatacagaattttattttagaaaggtaatagaaaacatatgctacttattatgaatcactcctagcaggatctgggaagattcttagaacctataatattaaacatttctgtagcaaacatgattatttgctctaagtggaataagtaaagatttttaatagcgtcacgtcacttcaagttatgacactaaatgcattttggagcgaaacttacaaaaaacaatatttttaaaactttctggattttagacttgtgagtaaagattagattttatataaatcgcattgtgagttagggagtgcttaatggactggccttggaagccagtcagtatttatggcaagtcagtgcgtattggggatcctcta

SEQ ID NO: 36778 - DNA, 365 bp, Homo Sapiens
cgagcaggtacagcagagggagctgaaacagtaagactataagcagaggaagagtggcaggaaagaacaaaactcaattcaaatgttgccagcacacagtgaattgcagggaaccggctatcatgagagagggtcccaggagtacacacatcaaatgtggtttttgaaccagaggacctcctgactgctggtggcaggatgtctctattccatgtagttatcaatgtgttactcttttctttggttgaaaggattttgggtcaggcactgatctttctttgaatgtatgtgcctgttggatgcctgaacagtgagaaatgcaggaacgtggtagttagtgatgcttaggaaagtcagtgcgtatt

SEQ ID NO: 36779 - DNA, 510 bp, Homo Sapiens
ttcgtagagcttctggtaccaaaggattaataataactccagagggagcagaatgaagctctccattctggtgatccttgatgggtccatgaccacagggagaagtcgtgtattggactagtctagaaccctaggaggaggttgtggggaaatgagagtgggagggagaagagtggcaagtgtgcctgctccaggggccgcaggtcagcagctgcaagtcctgctgtaggtcctggaaggaaaaaggctttggagaaatcacgagtggcctttgaaagcaaaactttcggaaaatttcacagaggcaagatttgagagggtgaaagaaggcttgggtgaatgcccttccatgcattcattcatctggtagttgacgtttattgaccgcctctagaatgccagaacctgctctaggtgcccaggactccacagtttgcaaggtagacggtgctgtgcccttcttggagcccaggactccacagtttgcaaggtggatggtgctgtgccctt

SEQ ID NO: 36780 - DNA, 433 bp, Homo Sapiens
cgtgtgatggtagcacctggcgtatgctgtggaaaccctaaacaagccatttaaatttgttggaattccgtttttcaactttttaaaacctcttaagagtccagtcctaaatcaagttaatgtttaaattcttcacttatgcttagtatgtacattattccaaaatgtgaattggtcccaaatatcatattcattctaacagaggacattaaaagtttaaaagatatctgttatatggctgaactgattatattttatcggaaagtgaaaggaactgaaaggaactactcagcatatttctaatgagtatacagaggaaaagtactttgcctcatttaattttgtaaaatctctctctggcacataattcacagtctttttttgcccacaggaatagtgaggcagatatgtattaggaaagtcagtgcgtatt

SEQ ID NO: 36781 - DNA, 490 bp, Homo Sapiens
aactgactttctgaacaggtctgtccatagtaagtgcagatttcctgcttgttggttggttgttttagagacaggatttccctctgttgcccaggctggaatgcaatgatacaatcctagctctcaaaataatcaatattctgagtattgacattggctactttaatgagttccaccaacaggatatggtgcctcaaatccaccagtacttattcaattgctagtcaggctggctcctttacctacaaggacttaaaaaaccaactcgccaggttggtagttcaaggtggcaggtgcagtgtgggctttgcaaaactcaggcagacctgggtcttccacaccagccttgcaaccgagaccatcactgcagagcctgctgagccatctgcagggtcagccagtacgcctacctcaaggggccatttgtgcattcaacctaaaactctacttttaataaggaagacggatcggaggaaagtcagtgcgtatt

SEQ ID NO: 36782 - DNA, 424 bp, Homo Sapiens
acgcctattatcttggcacacagtgggatgactggcccccactacaaatgactacatctgacattaccacatcaacagacctatattctcccagataccaaacccatgtattaacatataacaacttgtaacagaacctactgaaaagccagtatttaaaaaattagccctaaataacttacttcaattatttctagtaccaaataacatgaagcaaattaagggaaataactctacagaacctctttctagggtcttacattactgacaatataatggtaatgtgtattacaaatgtattttaacagcaccctggaactagagcctatcaacttttcagggtgaacattcaagcagaattagcaaagcaagatttatgacggaagggaacacaatggttctaaaacaaagcatggcctgggaa

SEQ ID NO: 36783 - DNA, 448 bp, Homo Sapiens
atgacagagtgatatcctgtctcaatcaacaagaaaacatgattctttttatcaactttaatgttagtgtacttctggcaatacgtgaccttttaagaattttgcttatttcattgagaatttgccttaatgtatttttaaaatttatcattggtcgcaataaacattaatataaaaaaagtacctatgaggtattctgaacagttttaggagcgtcttggtttttcctggggcaggggcaatgaacctatgctaaatttcataggcatttcttatacagcccttcaaattgccccttaaagtgttaggtcaggatgaaaagctatttcaagtcagtagtaacaactggtttattttattgcttgcatttggcccaccaggttggtggctgatgaaatgtgtatgaagtaacaggagtctttgctgagtgatcatctgtttattcttt

SEQ ID NO: 36784 - DNA, 406 bp, Homo Sapiens
cgcccaggtgaactgactttccataaaagaaggggaactgagggctctggttcctgttgaacctctcctctcaaggcctctcccgtgcacacctggatcagcccttcattctgttgctcattcagcagtgctgaaggaaagaggagatgggggaacagcacggagttccggagggtccagttgcagtcatacaataagtccctaacaccttggggtgtacgttcagggttctctggctagaaagggtagtttgaggccaaaaccaaagagatcaggaggcatgaagggaaggaagtcgttatctgtctggtggttcagaacttggcttctgaagttcagctccctggcttccatttttggccctccctctttcttgccctgttgccctggaaagtcagtgcgtatt

SEQ ID NO: 36785 - DNA, 405 bp, Homo Sapiens
tacactctctagcctcaagatcctttatcaatggttcttaactcctgactgcacatgaaaacacctgggaagcattttaaaaatacatcagtttcacagtctgaagtggggctcagtctggctatgttttaagctcccatgtgattctcatgtgcagccagaaatgacccaaatgatccgacccctctacctgtctaatgtcactcagtattcattctctttgctcattaacctgaattcaagctagttcccatcttcggacttgctcctttctccacctggagtgctctttcccacatttccacatggctccttctcatcctttagaactgagctcaaatgccacgtcctctgcggcgtcttccctgaacctactctcctcacttgggacagtccgtgcgtatt

SEQ ID NO: 36786 - DNA, 397 bp, Homo Sapiens
ccaaaaatcaacgacttgaagaagccatttgttttccagaaaaccacacaccctgacaatctttgtacacactgagcccccaccaatcacactgggctcgaggctccccagccactgtggaaacagtacttggatccacatcttagtcaaattattaaaatacagcagacaaggacaggatcatagtcctcatctttctctcttcccccacattaatacattattatttcaatgaaatgagccaaattttaaacctaaactacttatgtactcttgcaaattttctgataatttttaatataaattcaaaacataaattcattttgaagttggaatttgaataaactcattgtggttcaaataagagaccaacgacgggggaaagtcagtgcgtatt

SEQ ID NO: 36787 - DNA, 491 bp, Homo Sapiens
ccgcgttgattagtgtgtactgggaaaacctggcggcgatacacagccacgacacacagtcgtgaccttggacatgtctctgaatgtccttgagtgccccagccagcagcctggacttgaacccaatctaacatctctggcacagacctgacaatagctgtgcagtgacgctccccatccaccctgccttgagaggatgtgcagagaaaactttacacgactattctccaaatacaggtgtgccaagcttgtagtgtcatacccaaaaagactccaggctgtaatcactgccaaagatgcttcagcaaagtactgagtaaagggtctgaatacttatgcatatgtgatatttccagttttttttcttcatcattatggggtattgtgtgtggcttgatgacgaaaaaatataatttaatcaattttagaatacacctgtaacataaccaaatgtggaaaaagtcaatgggtctgaacaccttccgaatatc

SEQ ID NO: 36788 - DNA, 474 bp, Homo Sapiens
cttctcccttagggcacccaccagatgccacgctggagctcacctgtatgatgtgtctgtcagcctctgctagaaggtgtctcccagtcaggagacacggggggtcagggacccacttacggaggcagtctgacccttagcagtgctcgagtgctgtgctgggagatccactgcacagagctggcacggcaggaacatataagtctgctgaagctgcgccaacagtaacctcttcccgcaggtgctctgtcccaaggagatgggagttttatctataagcctgtgactggagctgctgtctttctttcagggatgacctgcccagagagagggaagctagagaggcagtctggctacagcggttttgtggtgctgtggtgtgctcctttcagttcgaacttcctggctgctttgtttacactgtgaggggaaaactgcctactcaagccttagtactggtggacgcccctccct

SEQ ID NO: 36789 - DNA, 463 bp, Homo Sapiens
aatagcctgactttccctagtttcctagtccactttaggccttaggcaagtgacctggaaatcctacaccctacactaggaaccttgacagcatgtctttatacaacctcataacactttacacagaaaatctcacaggtggccctctactcttcaactttaccatccagcttagacacttgctctgacagaccagaaatgatcactcttctaatttcaccacaaccaggaaaactaataacttaggaagaccagcaaggatatcgtcctccatgggcaagcataccagaaggaaaaatgtaagggtaagaactctgcatcacaaactggttccaaatatctgttgttttcttctctcaaatgttaaaaggccatccctttccgatgtcagcgtgctgtgcctctgttggtgtaaagcatttgtttctcctggaaagtcagtgcgtattgggtaccgagctcg

SEQ ID NO: 36790 - DNA, 364 bp, Homo Sapiens
tttaaatagacgttttattgaaatataaacagaaacgtttccaaattggaagcatatcactttctgatttttcataacataaataggaatgcgcctctagacctagctataaagcaagctggacactggcagctctcccgacttgtctttgtgcctgtcccagccacgactctacgaagggtaaacatcttcagtggctttggaaagtgtcacttggcgatgctcagctgtgtcccagacttccctgtgtgtgtccagttaaggtgagccaccagctttccttgcaagataccaaagcaggatgcttgtgagaggtggccctcttccatggttgggcctgtgggaccccaagtgccagcattag

SEQ ID NO: 36791 - DNA, 372 bp, Homo Sapiens
gaacttgactacatagtcttctctttctagttgaagactggattcttcttgaaattgactgcatagtcttctctttctattctttgaattcttatttggatttccttagcactgtgttcaggaaatgctatcattccttacaagcaccatcagcataataatttacttgaatgaccatatgtggttttaattctgtattttcagaggctttcagaaggatgttttcttgcagttttactgctttcatgcctaacatcttagtccaatctggatgctataacaaaaataccacagactaggtagcttaaacacagaaatttatttttccatagttctgcagtctggggagtccagtccaaggtgctggcactt

SEQ ID NO: 36792 - DNA, 400 bp, Homo Sapiens
aaaataatgtatgttacttagatcccaggtaaaaggaaaatactactacctggtcaaatacgctacccgaaaatagatgtctcagtataattttgacaaatatggatgcatttcttctagcatttctcccgcaaattcttctagcatttacttctattaaaacacaatctcagtgccaatttgaatgtgcttggagactgctgcacacttcaacagaatgatgggaatctccaagaaaataggaattgtatttattgcattgatgatggtagtggtgaatacttccaaaaccattcctgggggaaggaggacaagatgaagtgtttctctggattaaggagtgaaggtctttgatatgcatgataaaaccacaacccaagtcatttttgatgtagggaaa

SEQ ID NO: 36793 - DNA, 355 bp, Homo Sapiens
cagattttaaaataatatttctacaaaatatataatttaaacagaaaccagactattaccttggaaagcccagctctctccttggcaagcttctgtttctttcttcctgcaagaaatgcaaagttatatttacattttgtcattataaaaatgggaattaaaagaattctaactgctgtggcagtcattaattccatttgcaaaacatttctaactctaggaatctatccctccctgtgatctgtcaagagcatatgacatgttctggtcaatgagctgtaggaaatgtgacactgcactggagcttttctccttccctttggggcagaagatctagcaatttgcaagatggggg

SEQ ID NO: 36794 - DNA, 449 bp, Homo Sapiens
acggaggaggtgatggtgctagcgttctagaggacccagcactggccgactccttggaggtctgtccactttttcacactccttgctaactgaagtagccaagaacctaggtttgggaggacagcctttcttcagataaaaccacaagtaaaccagaccagacttaagagaatctaacttattataaggaccccagagatagtaattccaaaagctactgaaaagaaacaaaaatgtttagttactgtttactggaaattctccccaacacatatatacaaattcaattctaatccctgattttaacaaatacgcctgttatacagtctgcctggcttgacaaatttgacttgggggcaccttgagtgggcggcgggcactcaaagtgataggcagtgatgtcccagcgccactaacgccaagacaccacctaacggctcacagctggc

SEQ ID NO: 36795 - DNA, 448 bp, Homo Sapiens
cggctgttatagaggatcccagaaagatgacatttctatcccagcgtggcttttcagagatgctaaacactcaccaaccaccacacctctgatcactttctttttccttgttgtgttttggtctgtatttttcatcattattggatagagctcagtcaatatgtgtgcttttcagaatgcttatcttaaaatagccagaaggagaaggcatttgtgtctacctcacaatcttaggccttcccatagattgtggggtctctgtccaagtcattgtaccctcgtccccacttttccctctgcaaatagcttccatgtgacaatgtgacactgtgcatgcttgtgatcctatgttcaatgaaatgttcgtagcatgccctttgcccctagctgtgggctcagactttatgtccacgaccacctgtagtacccaatgctacaaggaggctca

SEQ ID NO: 36796 - DNA, 497 bp, Homo Sapiens
aggtgctatcatcagacctctaaaatccttagtgcctcgttaactgacaactgggtagaatgttctatcttctaaagatcgtgagggaaatgcattccctgtctcactgagcaaagcctgagaagaagcttgatcaggcctctgacttacttaaggaaacagggctgcagggcagcacagccacaggcagccagaaggaaagggcaaaggcacagggatggagcagccagatggcggccatggtgtcacaggtttccctctccccctattggtgcttgttttcaaacttcctaaacctcaagtgcgagcccaccgttttggcatcgaatgctggatttcgtgccgggatctgtgtggcactgttggcagtggagtcctagcgaggagaccctgagtgctgggaaaatgggggtccctgccctggctccacttcttctaggggcgaactaccatttggttactgaacttacggcaaattcagagcttcttcaacaaaa

SEQ ID NO: 36797 - DNA, 474 bp, Homo Sapiens
ctgagcccagaatgcaatttttaatgtctgagcagttaaaactgcttaatttctgcagagaacggagtaggcagagggctcaggtgtgacatgcttgggtttgaatcctcaaagcaagaacaagttcactggaggcccagaggcaggcctgctagggttacgctccctccgacctcaggcaggtcactggcagaagtgggcttggaggcttccctggattcccctgtggccaggtcacaggctgtcaggggggttgacgaggacatatagagaagggcagcccaggagtcagaaattccaggtcctgcccctggctctgcccccagtagcctgtcaccttgcagaccggcccgttcctgaatagagccaggagtcccaacatcccagatccagcacctggcgcattttggaccaagcccctttacaaactcagggtatcatattgggcagcatgttgcctaaacttgctgggac

SEQ ID NO: 36798 - DNA, 350 bp, Homo Sapiens
taactgagaaatgtagcttctcatgtgagctgaaatttaaaaaattcccaatgatatggctgccttgatatcgctggggggagtataaatccatgtaatttttttgtaaagcattctggcagtatatcaagagcctaaatatgttcatagcccttgatccaaactcgctcaagaatatggtgaagattcagcctcatttctgcgcggatcacagcctgaagtagattttgtctgtgtggatccttcaaatcattggcaaattaaggagctagagcaaggaagtgtcacgatggcgtgatgggcaagaatgggaacctaaggaagttgatgcaagaacgtgatcctattcc

SEQ ID NO: 36799 - DNA, 492 bp, Homo Sapiens
tagagttgaactttattctgtagctagggaaaaaccatggaattgtatcttaaaagaagataaaatggtcagatctgtgcctggaaaggatactctagctgttatgtggactggagggagctggaattgaggcagtgagcccagctaccagagtcttgaaatagtttagtgtaagatgctgaatcatgagttggggcagagatctgaccattttatcttcttttaagatacccagccagtctcaaggtagtgccctgggaaaggagaacacccagtctcagggtagtcctccagactggggtaagagacatagccctgctgaccagatgcatgtggtctgatgatatccttatcaaaaacaagaggacagccacatattgccttatatgtaagtgctggggggaagggaaggctgtgatgataaaggcagtgtagtgtggctcagaggtggggagcactgaatggaggcttcctaaaggaaggtgagtgtgg

SEQ ID NO: 36800 - DNA, 464 bp, Homo Sapiens
tgggggtgatttgttaacaacataacaactaagacacagcccaatcccagttccccacgagcagcccttctcctactgctgaatagtgcagagctgctgccaaaggccactgtgctgggcaaagaaccacattctcatcctccccttttccagctctccctgttcccttcgtgggcctggtgcagactgggaggcctcttcatgggcctctgcacatgcatcaggctgcactccactgtcccatcatcttccctgagagcttgcagccacggagtggttcctgtgtcagctccaagttttgaaataccatccatgaattcacaagacagtaattaatcactctgtgaacttagctgatggattagctgagacaatcaatttttaaatgttctgtatcatctgaaacagggtttagtcaagaggcacaaatgcagtgaattccaaagattcttagcaggttatca

SEQ ID NO: 36801 - DNA, 486 bp, Homo Sapiens
ttagaggatcccagcactggagcctcctgtattgaagctctgctctctggtatctctgtgggcaaggtagaaaatcgtaaaggctgagaaattactgttgagagactcatggatccaactgatataggaaatgcacatctttgcatacatgctataattcaccaacaatttctgcagagaagtattaagattgcactacatttgaagtatcctggagggtattctagggattctaaggctatacagttcctggccttccccttttggttgccattttaaaattatttagcactcctttgtcattcaaagaagcagaattcaatttaaatggtacagaaaattttgaggaacagacggctatttagaggtgtaggcatagtaaagtgaacctacaggcggtattaaggcacccagagattagcaacagcagcaagccattatcacctttaggtctggaggggactagaggggaagtgttactggagc

SEQ ID NO: 36802 - DNA, 545 bp, Homo Sapiens
acggggcagtataaaatctatgaacttctaacgctagcttggtaagtctatttaaaggtttccaaaagtctgacggaaacctaaactataagatctttgtagtcccgtattacaaacagaagagggtagagttgaggatggggctgtgcacctccaggttgagcccttggacacatgattctagcgtgatgggatggagagcgacagccatggtggggttccttgctccaggtgcaactcttgggcagcaggaggacagcagtggtcagactgaacaaggaagctggtgtcaaagccagcttccacctggggtcatgtatagtcaaatcaattcatagtcaggctcctatcatcaagtgggcttctttccatgccactgggcaaggcatcttcaaaagagaaactcagggtcccaacacagcctgaggcaggtggtcagggccactgccacatcaacagcttctgcaggggatgcatcagatattctaaatgctcggttcttagaaatacaccccaaacacgaaggcaaaccagggaaacggcta

SEQ ID NO: 36803 - DNA, 390 bp, Homo Sapiens
tcccggcgtctctagagatcccgttagcctacattggtgagatgactccgacatacgatggctaatataatagtacaaactgaagaggagagaatggtaaaggtgctttcgtgattctacaaatgcaaagaaagggcgtatgacacaataatgcagtgtgggcatgttttagcgctttctggtgcaaggggccaaggccacccaagattccatctttgcatttagctgacctcagaaattctattcaaatcaacaaatacccactgagtgaaggtcgtgtcaagttcagggttggcagatccagggtctgatgatgatccttatcctgatcaggatatgggatctactcactattgtactcacagtgccctaggaggcctagggggccca

SEQ ID NO: 36804 - DNA, 418 bp, Homo Sapiens
gggcgttctagaggatcccgtgagacataaacagtatatactacgaatgtatgaatataaagctgcaatactttacttggaatgaatcacttaaatggttattttaatattgttatttatacttttgaaatataaagtgtttgaagtatagttgcaatttttttaaatgctacatacattactactggtacattaaaatattcatacttatttatatctaatatccaaagaaaatttactaccaaagtgttacagttagtctgacatgtttgttactttattcaatggggatcattatgggtaaacacaattttagtatctttggtttcactaaatgggaacgctgctattacaggacaaataaagacaggtgatgtggccaccaaaaaccataatagctcttcagttaactatgtta

SEQ ID NO: 36805 - DNA, 627 bp, Homo Sapiens
agtactgtgagactccttggacactgtgagcctcttagttgtaggactgaggtcttcatttccttgcttctgtttgtggagggttgctcagcttccctacaggctgcttttccatccttgcacatgacctcttccattttcaaagccagaaatggtacatcaaatctttctcacactttgaatctctatgacttccccttctgccatcagccagaaaatgttctctgcttttatgggctcatgagaccagatggtgtctacccagataatctccctattttaaggtcaactgtgctgtataccttaacataatcatgggagtactacctcataacattcaaaggttccagggattcaggtggaacatttttggaggcacatcctagaacttctgcctactaccagtgggtatccaggtctcctaggataggggaggccagaaacattcagcacattggacactttaacaagaactaggctacttcagtctgcagaacagaagaaaggggtaacaggttctacattcttcaaagactgcatgtagaagaaatgcttatacacgcattcactccacaaacaagattgggttcctgtcaggtgcaacacatgtgtcagatgttggaaatc

SEQ ID NO: 36806 - DNA, 394 bp, Homo Sapiens
gaactgtgagctccttgaacattttttaggcatcattatattgttttgagttttccatatgactgactttcagcaaagataaatgagggcctagtatacgtgtgaactcccagaaaaggccaactgttatgaaaaatgccttacgctatgatgatttgttcctgtgtgacacatcagttgtttctgtttttgtttttgacagtccttcaaggtaggcctgcaaaattgagtatttctttctatagctccttcttctctttactttcttggcttgtaccatataaaaaggtcagtatcacccagttacacctttgtgacttgttgtgtagtgttggataatgaagtaaaaactttacattaaagttcgttatcaagtattttcagctattatatc

SEQ ID NO: 36807 - DNA, 588 bp, Homo Sapiens
ctccttagctcccaaaggcgggactgcagatgtgaacccccatgtgcagccaagactttattcttctagagcagtttaaattattgttataagtctgattagcaaacaaatgcaaatgtcaaaaattgttcttacaataaactatgtaatggaaagacaaccaaatgcctgtattctggatctaagccttagagtattgctaatgaagatcaaagagggaaggggagataagggttgtaatgctgcttgtccgaaatgggatggtatcaagaaaaagttgtttcagtctttattctaatcctcaagaagtgttagtggctaaagaaaggctctgaatgatgagtactaataaccgccattccgagaggcttatgagggaagcagcgtgctaagtactttaccttagtcacctctgctcccggccacagaagcgggcgtcagtctctttctcttcccacctgctgctgacttcttcaggttccttaagaacctgcagccagtaggcagtgcagcttgaactgactcttgtttcctacattaatattgaaaacttaaagtgacactgatatatccaaaacatgtccggga

SEQ ID NO: 36808 - DNA, 351 bp, Homo Sapiens
cttgtgaagctccttgacccacaaggatatcccaaggtttctgctgctcttccaagaaatgtaagtgtaccagtattcgtttcctgacttctgctaaacaaaaaagattatgatggggccagcagcaactcatagccttccaagaaatcataaatctcttctggtcctcctcttacctaggccaacccaacctatctcaacaacagcatccatcaggagagcaggctctatctttcccatatgtctacatctacaagaccttgcttccaacagatttacttgtgttgtgaagatctgagaagactggtataacggagagagtatgggacaaatgaaccaaagggaaaacct

SEQ ID NO: 36809 - DNA, 507 bp, Homo Sapiens
gagaattccacgcggaagctgtaggatcattgatagttgatactcacctattttctgccagagaacaggaacgcatatctgttacgcgaatataaaacctacactgtgaacaatgcctagcacacaggaggaatctgaattattgaacaaacaaatgacataaccctgagcctataaacacagcactaaaaattatattcctttccagagcaccaaatgcaaaggtttcaacgatagttcagttaacaatcaccctgacgagactcagaaggacaaactgaaaacttctgaaatcaggtatgtcaactagaaaagaagttttacttcagcagttcatttctacttccactataaagttatcttcaataaaatttcatagaaaaagtatattctgccatgttatttttcttgaaaagacgttatgcacttgtagtaacaagtatgtaataatttatagtgtaaaagattaaatattaaatagaaaaggaatcactgatagggtgctac

SEQ ID NO: 36810 - DNA, 501 bp, Homo Sapiens
gctcggtttcctccactagtgcaggcctttgtaagggctctatttctcactgagataatgtgccagctgaggaataaattttacaacacttcttttacctccttggtaacaaggacaagagaaaccttgacaatatatctgatgtaaatcttaagtctcttagcagactaaaatggattcccagatgttttttctgagatgttgcaagaaggcactgcagaggtcaggaattccagttagttttgctactagctcaagatacagggtttttaaggtattaatttgtaatactttctaaaagtatttaattgctgtttttttccatttcatcatccatctggttggccctatggtttctctacagtttattccttaagaaaacttcaaaatccaaggcaaccttgcttaggctgatgaattcaaattaagcttgtatgttagaatccaacaagaacaggaattaataacttcctctttctacctcattaagaaactatttca

SEQ ID NO: 36811 - DNA, 447 bp, Homo Sapiens
agctcggtttcctcactagtgcaggccacatgctcatatgctgtgtccggactgcgcaatttctgtgtgattttatttgtatcaatgatgactctttatggggggtagaaatgattcagagttaacaagccatatttttagttgcgtcagtgatttcctttgatcattatagaatgttaattttattttctgtatattgtttcggtgttattttgatggcatattttatataaatggtagaacaatatggaaaattcagaaaattgagggagaaaatcatcgcagtactttgacagctgtttcagtttggagatagttctttattctctatgcttacattttacaggttgtaatcgtgtgtggctgctttcaggcagtgtgatttctcttgtggtctagctacatttgagtggttagaaaaattggttgctttctttagttttttta

SEQ ID NO: 36812 - DNA, 406 bp, Homo Sapiens
caggcatacccagagaagtcctgtgctctttatctgtcattggagtatggcgctctcctgcctgggtgtgtgttcggctgatgacaccataccatttcagcctcctccccgtctgctgctatcatgggtaggatgtaaagaaccaggattcattacatttggactataaacttttgcatacagtacttcaatgcaaatgtcctaacagccatatgagattctcattatttcttgtacacatttcactcaggaggcaatgtgatttcaagaacgtaattgacttgtgctggttcacacagctaagtgttgagcagattcagtatatccccaagcccatggtgaatgcggtttcttggttaggacccagggaccaattttttaatttcagctgtactactaaatatta

SEQ ID NO: 36813 - DNA, 437 bp, Homo Sapiens
gctcggtttcctccactagtgcaggcgtcagcctcgaagcagtagaagaaactcaccggattaaaagccaggccccaactgcgggcctgggtcagcaggcagatagcgccctggggcgtatgccccagggccttgccgacttcctggcgcacggcatcgctcaggctcatgccgtggcgtgtgaattcacgcaggtaatcctgctggcggaaaccgaagggcgccaggcgccccgtgccggccagcggcgagagccccagtacttcatcctcttcactgaggtccaggtacaacaggccgatgcggtagcgaaaggcgtgggccttgggcgtaaaccggcgatgggcgatccagccgctgtagagggcgctgttcacagggtttccccaaacgcctgggccacgcgcagagcgctgaccacgccgtcttcgtgaaag

SEQ ID NO: 36814 - DNA, 498 bp, Homo Sapiens
attcgagctcggtttcctccactagtgcaggcaatacgactaaaacatggtttatacttgtccatagctcagtcattaacatcatttggaatttattcttacacccatgattccttaaaacaatataacgaacataatctaactttcaactagcaaatattcaatatcctatcacagttctttggggttttcttaaaatttctaactcctaccttcatgtcaggctataaattgctaactttcctgacgtcaacttacatgcctcagaatcccatttcttttccctccctagtctcatctgctttaagataacaaagctagtaaacataaggagacttaatggaagtccaaaaaaggatcagaaatgctatgcaaaaataccccccggggcgtcgggggaccagggagaggaggggacatggctttgatagcaatttcaagcagtttttgggctccttacattccacagctggtttaacctctggagcctacactagt

SEQ ID NO: 36815 - DNA, 413 bp, Homo Sapiens
aagtttcggcggctctcagctgccctccacgaggttgggtcacccctgatttaaggcctgccttgccctctgctcttctgggaccaggctgggcagtgcagacagcgcagccctgcagccttcaggacaccttgttcccaggccctgcaatccaccaagctggatagatggggccccccttgatggtagcgggaggtcaggggtaaccccagggccctgctgctgccttaccttgctggggtgactgcttgattaaagaccccaagactggaccaggccctggtgtccccagacctgcagctatggcccaacaaggcaggtgtttgaggaggccctggacagggtcccaggactgcaccaggggcctcatcagcaacctgctgaactggtggtgtgaggggagggtggactcc

SEQ ID NO: 36816 - DNA, 388 bp, Homo Sapiens
taccataaaagaaaaaactagtgtaccttttctgacactatatatgctttattttaaagctttgatagtcactttgatcccagaataaggtaaaaattagtttatcctcaaatactgtgacctgcctctcccttttcattgatcctaagcacagttctagtcaaatccttcgaacactgagatctgacctgcccattttgcaggaaaacattatcttccctcctgtcccgtggtaccctggggcttcactcctcccttaggccaaagacctatctccacattggtgtcattgacagccactcctgtggggtcccatgcatgcttacctgcagctgcagctgacgcggccccgcccaggcacttccagaggggttccatcctgggccac

SEQ ID NO: 36817 - DNA, 386 bp, Homo Sapiens
gaccactagtgcaggccatgaagagatataacactgtatctatggcattaaaattttatgggaggagggatgatgtgaaaaaaatgtgtaaaatgactccttagaggggctagtaatgaaacactgatccatggaacctgggctgtttggcctgttgtgtttccctcaaactgcattttgctattgcatactcctgatgattgaagttcctttctgtatttccttcagtttggcagatgaatccaaaggcttgatcagtctcaagcctgatcctttggcaagacttacaggtggttttgcattctttcattgggaggcacaccgcgtctgctttgtgcccttttttgatgttgcatctattgaggcttaatgcctacactagtgga

SEQ ID NO: 36818 - DNA, 422 bp, Homo Sapiens
tcactagtgcaggtccatgtcgttaaatttaaacacaatgttaaagcaatgtcttcagtgcttttaagccatgggctaggattagtaatacattttaactctaaaattagagaaatagcccacactatacttctcattagttgcgggggctgtgtcttaatttttgttcaagaaaataggaacaggctaagaaatgtgaatgtttgctgtgatgttttgtgttgctgtgctgaggggttattttacattcttggagtcctgccttccatctggggcagggtttctcaatcctggcactactgacatttcgggtcggatgattctttgctggggggagttgttcaatataggatgtttagcagcattcctggcctctacccattagatgccattagcaccaccactttcagtggtgataacca

SEQ ID NO: 36819 - DNA, 399 bp, Homo Sapiens
tcgtttccagtgtaggcagaagccagcccaccatgtacaattggtataagagcctggttgttgttcttagaggtagctctctttctcgggctgggcctcctacatatactttacccttgacatactcagagcatgttgagtatcatgccctgtggtctgagtttaatgatcaggcacgaccttactaatgtttttagtgttgggttgtacgtttggaaagggttgaaaccatatctagtacaacttactggcagggagaagaatataatcaaggaagaaagtatgtttaggttttgtcacagaacagtgttaaaagaatgtggagttcagcgcgagatagatcgcaagaattcattatttcttttctaatctataaacttaattattgcattggctttc

SEQ ID NO: 36820 - DNA, 470 bp, Homo Sapiens
ggagaccaccaagtgggcactgattaagcagaaagactgatcatcaaacgcttatactggcagacctctactaatcttcagtaactgcaacatgtatatttgaaaacaggttcttcatcctaaaggctatggagcttttaagggttttgaggaagttttgtgtcccctccttctgggacacagagtccagagcttaaattgaatttatatatttctaagaagaactgaagtccatttcatacttttgcatgacttcaagattgcatttgcggcagttccattccatattagcataccccaaaggcatacattctgtggagaatgcagagattgaaatgctattaaggaagatcattgtttaccagtgggtcaggtggccagaccccattctacagcccatctgtcagccacagcaagccaatccggtaagaaggaacggaggaagaaaaagttagagtgagaaacacctg

SEQ ID NO: 36821 - DNA, 505 bp, Homo Sapiens
tccactagtgtaggcctacttcttcagaaaggtttccctgacctctctggatcgcttgtgtttttactgtgaatttccacacccatccatctattcattatccatttaacaggtagcttttgagtgtctaccatgtgtgatacatgggaatatattggtgaataaaacgaacacggtctggctctttcccactagagcttaccttctaattgagagacatagtaaacaagtagcagataagcagtaaatatctaactacagtagagtgcagtgagagagaacaacagggggaatgacttgatgtggaccaggaagatctctctgaggagttgtcataaaagctaagactgtcgaacaaggaggcagccatgtagagtgtagctgagtctcactgtgcagcttggcatgtgttcattctccgggattgtactctgtgctgctgatagatgtgcactgattgtgtctcttcagctagattgcaagttccctgagagctcagaccata

SEQ ID NO: 36822 - DNA, 502 bp, Homo Sapiens
cactagtgtaggcatatactattcaccagagacacaaatgagaatcaggaacaggcatggtcctggccctcacggtgaccacagacttgaaggggaaggatgacacgcacagaaacaggaagccgtagctgagctagtgtctaccacagagaggcacctggtgtcatgaaagcagataacagggggttgctgtgactgagtcagtgtgtccagacgtccctgaggatgtagtgactccactgtcagatgagaccgtgaccaggtgaagaggctgggagagggaaaatctttccaggcagatagagcaggatgtgcaaaggccatgcggcaggaaaggagcataggaagtgcaagagcctgaaaatggccagagagaacaagtgaacatgtggataatcacagcaccgacctcatacaggactgctcaggatacccaggacagagtcctagatgcttgaagtcatgataagtatccagaatgacgcaacatttaaaataatca

SEQ ID NO: 36823 - DNA, 528 bp, Homo Sapiens
gtagtaataacagtactgagttaacaaagagttccagaacaacaggtatgagcgaatgattgacaagggtgaaggcgtctctgatggtcgtatgacaaaccggggcaaagatgctgtgtttagtagtgggtcatgttatctctgatttgaaataccttgcacagtgagtggcataataaatgatcaatcaatgtgtgtggaaaaagttgattaagtgaatgacgagttaatgtaagttacattatatagtacagtgatgcaaaaatagtaaaaatatgctgtgttagcaactgacgtacaataaagttgaattcacccgaatatctaagtcttaaaagataaatgcaagtagctggtagctgatttaggcaccagtaacagaagtgaacacctaaaaagtaaatgctatcacaggtaggaacatgtgagtgaccctgattacttgtcagtaggaaaagatgtggagtgcaggcatattctctttctactttggatcagcaatcagattcactcacagatcatcgattc

SEQ ID NO: 36824 - DNA, 549 bp, Homo Sapiens
gatgatggagatttagatatggcgagtagggaggatggttaagggctaaacctagtggctgacactccattggggttgagctagcgactgcctaggtgtccataaggcatgggagtcaaggccctgacatgaaagcctgagataacttgggggtggaggagtgtgacccattagggtcacccctctgccctgggctgtccacatctccacgggccatgccagacagaagcaaagggtcccagtctggctgactcagccgcctcatcacccctgctgctcttcacctcgctcctgtatctccctcctcacctggcactgggcacaaaagcccccacgtgtcccagcccagggcaaggtatctagagataagacagggaagctgtggacagaaatggctcgtgctgccccagactcctctgcctgggctctcctgtggctgtttggattccaggagagggcaagctcctctctaaatgctgggggctcatgaaggctgcagagaaactccctggccaggaagccccaaggcaatttctgtgcccatttcaa

SEQ ID NO: 36825 - DNA, 399 bp, Homo Sapiens
ctcgtcaaaggacctgggcacgtgagtccaagtgctgctaacaactacactctagagtaaagaaaatagcttaaaatctcgccatcttgttcctcatttgtagagggggaatattaaaacagttcctgtatgacccacttcacaatggctgaaagagagcgtcaaatgagttcatggacaggagacagccctctcattgtaacgagatctcacccttgattcctctgctccacttatataacacatctctttgtctatgcccccaaaagtacaactcctatccaaaaatccccaagcgtgggcctttggcatcttgttcactccctccaggattttgctcacactgtaccctctgctggaatatgttttgtccgcactagatgttcaaggcacatctca

SEQ ID NO: 36826 - DNA, 408 bp, Homo Sapiens
gatgagggagtcaccccgtctccctgctgaagccatcatctggttttacaatgccctccaagtgatttcaagcctggcacacattggtcagaccactgtgctaatagatagtagatgttatcaccataagcaatttggattcccttctgaaaatccaccagttggataagctcaaacccaaaattacacataaaagaatgaagggtttcaaaagaatcattactatcctcaaaaaagcatacaagagaaatgtaaccatgtagcccctcttaataacagtacatttgctgaacacatatgcaaaacagaggagataggatcacgacatataaattatgctccacttaatttacagccacatgggtcatttggtacactcatagcttctaatgccggtgcccattccag

SEQ ID NO: 36827 - DNA, 550 bp, Homo Sapiens
agagttgagagaaatggcgggactggcccattgaagcagacgcacctgtgccgagaacggcccccaagcaggtgggcagcagttcaaagggccacccaagtgagtatccatttccaagggagccaacttggtgagtagggtatggtagcatgaattactaggtggaaaccatggatgcttggagttaacaagtgatgtgaaattgggcagtatattcaggccccagcaaagaaggagcccagtcggagggtggtggggagaaggttggtcgtggagggctcattacagcacacagagggatgggcagcaacacaaagcaatggccgtctcacgcactggtgcctggtcaaacaggcctcagggacaggcctcgggaatgagacagaactaagcctcgaagcagaaagtcctcagtccgtacacagaaacaggactgtgggagttagggaccaacaggcagagagtcagtcttaatactaacaaacaccactaaacaggtagcgaggtgcttagccactgcacaagtctgttctgggtgagacacagtgct

SEQ ID NO: 36828 - DNA, 383 bp, Homo Sapiens
cttccttcctgaaatgccagcaggaaggggttggagctcccgtgattagccagggagtcaggcttcctgaagtttacacaatacaaagcatattaagtgagaatgtagcagaaaaaagaacttatcccaatgattatagcaatttaaattctcttgaacccaagctctcaaggcctacctgttttatagcctcaagggactctactcctatcccagactataatgaattgtgtctcctggagttgtgcagtacgcaacctgtgaagctgtacacgacagccctataaattctctagcagacagccctcctagattctagttcccacttcacagctgaactgcatttaatctctgtaggactgttttcctgtctgtaaacctgg

SEQ ID NO: 36829 - DNA, 485 bp, Homo Sapiens
acgtcgaacatctgatcgctcaataccgtcagtgacatattcagccggttattaaggcggatggcctacgagaaaaataaaagagtcggtatccaccatccgggtatcgtaggtatagcggtaatagctcttactggttagcgagatgtaataggcgctgtagatgttgaacagataggcgttggtgttattgacctgcgaaagctgcaggttgtcattatccagcagctgttccatcaggctgatcatcgacagcgcggcgattttttgccgaaccccgagctgtctggcgacctcatcgtccagatgttcgcggatgcgggtaattctttcgcgcgccgcccaatcggcgggcaaacattgcgctcgggtgatttgcggatcgatcaggctcatgcgtttgaggcggtgcgcctgcaagtgagcctgcacggcttcggagatatctttggcgcgctcacttttgtccagggggatccctccta

SEQ ID NO: 36830 - DNA, 386 bp, Homo Sapiens
gagcctgagcagccatgccgcgtgagtgatgaaggccctacggttgtaaagctctttcaccggtgaagatatgacgggtaaccggagaagaagccccggctaacttcgtgccagcagcgcgggtaatacgaagggggctagcgttgttcggatttactgggcgtaaagcgcacgtaggcggactttcaagtcaggggtgaaatcccatagctcaactcgggaacttgctttgatactggaagtcttgagtatggtagatggtgagtggaattccgagtgtagaggtgaaattcgtagataattcggaggaacagcagtgccgaaggcggctcactggaccattactgacgctgaggtgcgaaagcgtggggagcaaacaggattcg

SEQ ID NO: 36831 - DNA, 473 bp, Homo Sapiens
gtgaaccccgggaattcaagccaccctcccatttcagcctcccaagtagcggggaaaacaggcacaagccaccaaaccgggttaattttaaaaatatttggtagcgatgggggcctccttgtgttccccaggctgatctcgacctcggaggctcaatcgatacccccacctcggtctcccaaatgtgtggggataacagggcttgacgatggtgccgggctggggcttttggagaaggagtcttcggggtcccgaaagttctccggcatgtccttgtgggtgggccagtctctgtcccttgatgacaaatttggttccggagtagagtcgggccaccgggaccgggttggggggaactacagggacacagggggtccaaggatgtaccggggagatccacgcggggagtactctaataaggagatacgtgttcttatgcaggcccaagtgggccctgaaagtccttcctcaaa

SEQ ID NO: 36832 - DNA, 443 bp, Homo Sapiens
gtgatggggcacatattttcttcttggccttgggtgtgtgcaattgcccaaaaaggcaaaaaataattcccccaatggctcgcacgtgttgaaagatttcgcacggggcaattccgtcctcatgatgtggaaaagctaaatctatcccacctgaatgatatccagtggatttccaaatcaccatcatagcgagggcagagcactcgatgtgccagccgggcctccggggtccccgagggaagaggcccagaaacacctcggggggtgagggccgccttccacgagggcgaagtcatgggcatgaggcttgtcaaagtccgcgggctctccgatggcaccaggacaccacgcggaccaatttggccatatttgtctcccttagatttcagatcgaagtagacttggccttgggccgtggaataagcgtgcccaggagaaatgat

SEQ ID NO: 36833 - DNA, 370 bp, Homo Sapiens
cgtgtgagccaccacgcccagccccagtggctttaataatgaccaaacctcatctgtgttttcctcatacacacccacactctctggtcctccccacattggaacagtgcataataagtttcacccagtcatttctccagagtctcctgaacttatggatcaaaagcagcccatctgaagtatggccctggctaggaaaagccttcatggcaagtatggaccctgaacatgggctcttggtaaaaactttcggtccttagaacctttcattcttactgacaagccaatgttcaaactatcattctctatggaaaataggaatctattctacaagattgactttttcctccatgatttataagttgtggga

SEQ ID NO: 36834 - DNA, 417 bp, Homo Sapiens
gtaccctttttttccttgtgttggcttccagtgaacgtcaagtcctcaagatgctgtacaatggccgggccttgatctgggtattggtaaacaggagtagggacggacgtagatgatcgcggaggcctggctacattctcctttccctttcctgtgaattccccattttctttcttcttcacctagagataaactagttaaggggatatcaaactatttctttggagtctacacaccggtggatccatattgggtattcggaacagtctataaaccggggcatccaataacacagttccagttaccaggaggaagaacattccctaaatttacaaggtcctaagtgggtttatttccaatagggttaactcagtagtttaaagacttttaaaagcaagggactttccggtagtgtgg

SEQ ID NO: 36835 - DNA, 445 bp, Homo Sapiens
ggcatccatacggaaagtctaagattggggaggcgtcccccgctccgcccctccccaccgttcaatgaaagatgaacgggcgagaggtctgtttggcctgaacccatcaacagcggggagattaatcaaccacactgaaaatgtggagggatttatgggggagggggttgaaatgtgggtgtttgaaacaaaagtgtataaacaaatgaatggttgataacttagttatggaccgggagacgggtagcttattaaagaaactccgtgttactcattccgggagtggggggtttcggtaggcactttatttctccactttcaagagctggggctgggcccaaatcttagacggtccaattctgcctctattaccaatttaaatctatggctggaacctgtgcacggaaaatcaaatcctttaaaaagaaagaggagaagaagaagc

SEQ ID NO: 36836 - DNA, 440 bp, Homo Sapiens
cctaggttagacgtaaatagtgaaaataagtttcaaggggacagatttagtgtacagttagaaaatactgtcattataaatgccttacattgtgtgtatatgtaaatgcctgcagataaaataatgaaagttaaacaaaatgatgaaagttcccacgctcattcacttcagcacatgaagcaaaccacaaaaaaccaacaaccctccatggtccataagctttaaacctgaaacatggttacatttgacttgtgcctggccagcagccttttcatttttttagtttggtaatcaacagttaactgttattttcagagtacagatcctaaagcatttgtgcattagaaacatttcttggggactgatgtccagatatcactgtgtaatccctattttagctaaatttctgtaggtatacgtatcattgcatgcatcataaa

SEQ ID NO: 36837 - DNA, 515 bp, Homo Sapiens
agatgtacttataaggcatgggacataagccagccatcgtgtccataatcaagtggcacagtgagtgggaccaattcaagcgtaggagagtatgcaaaaagtaatccagtgatctccactaccccaggtttctgcgtagcttattcactgcaacaaataatctgggtgttattaggcaactagatcttgcaaaacggtgattaaatgcagtcaattcttggtttgagtgaaccaagctgtcgataaaatgtagctgcattctcagttcaactgcaaagcatttaaaagaacgtagcttccagagcatatccatccagaagacagctttaaaaaaccaaaataggtcagggccatttatgtttcaatggatgtaggcctaactgattattcctataataaaagaagtttccagggaaatatcccagagcattcaattgagtcttccacccagcataggtatcacacaaccagctctgttttactcctgggttactttgggaaagggtcatagaact

SEQ ID NO: 36838 - DNA, 435 bp, Homo Sapiens
atgatgggcactttcccacgtctaacccacttgtaacttcatcttatataaagttccactttatcattgataggcaagtaggtgtattattctacagggcctcaatttcctgcaattcaaagccattagaactctggcttaaccagctagacattcctctaaatacatacgtaacaaaaattgatggcaggagattttattgggatcactggatacctacactcaacaggcagaacttggctaattccatttataccactactgagacagtgaagacaaattaagaatcagaacaggaagcacatagcatagggatacccgtgtcagcgacatatttaatatgcccctcagcttaagactcaatactgaacagaccaaaaggccacctcaattgccgctcccgccacacttgctattgaaacttctaaaactagg

SEQ ID NO: 36839 - DNA, 381 bp, Homo Sapiens
cctacgtttagaagttcaatagcacctagttttagaagtttcaatagcatttcataaggctcaaactcaagtaatcattcaccatgggaatctgacccagtctattcagtatctagtggtgaatgattacttgagtttgcgccttatgaaatgctattgatcacggtatttagataacacccaaccttggggacttcaagaaattttaaagcatacaatgtaaattctatgtatattctaactgggagaaaacttggaacatggtaattgggggtcatgagttaggtataaagatgaacattcactttgtttattactgtttttcactgacactactctagctacatccaatttcttgctattgaaacttctaaaactagg

SEQ ID NO: 36840 - DNA, 480 bp, Homo Sapiens
cgtcgctgtactgggtaggcctctccatcccaaagcctgattagttaccggactgcttgaggtgtaactccagagggtggcgccgcttatgcccagcaggtgggatgtgccagagaaaggcatctcttactgccacggttttcttttactggcatttcaacctcacacatcgcacccattttacaggtgccgcaaacgaggggccccactgggggacgtggttttattcagtgactcagaattggtgctatagaaacttctaaaactcggtctcagtttagcagtttcaatcgcatcacttaggctatcctgattgattcagccaaaggcagtgtggctggagaaaagtgcgatgagaagtcctagctcattaaagctaactaggatgccttacaggaggctacagccggggactttgaaattttccacatattatgtcttacaaccaggtgctattgacacttctaaacctaggggggc

SEQ ID NO: 36841 - DNA, 444 bp, Homo Sapiens
tcgatcggcggcccctagctagaagtcatagccatctctttctcaaatccaaaaagcagctcttcgaagggctcttatgacatccccaggtccagtggcagggcaagcacagtccttccagcacagataagccatgtcaatgcagtcgtctttctcagcaccatcatcattagccaggtatcccttctccctccctggtcagccttccttccttctctgcaacaggcagcacagtccatcacgttcacagtagcatctcacaactcatttgatatgcacagcgttcacaaaatcttcaaattcatcgcactgtatcagcacacctcatactcaaataagaaaatgcattaaatagtcactggtaattagccactgggtgcaaagctggacggcacagctcaataaccaactaaactcagctatggaacattctaaacatcaggg

SEQ ID NO: 36842 - DNA, 424 bp, Homo Sapiens
tgacatgattagaatcgagctggtacccctagtgttagaagttcaatagcagtatattagttaacaggcaaactatggcacataaaccaaatcttagcttaagcaaaattttagatgtatgtaaatgtattaaatacggactgtcaagtttagaagtggccccaagaattcccatattaaaagctggtttgaggtcaagtctttcaggagcacttggcctctaacattgtagaaataaatatgtcttcccgatctttcttttgttcggttacttcctctggcaatcattgaattgaaatatctttattaagaatagcctggtagtgattgacagatctgggacataggaggacaaccccgatttcgaagcatgtgggagcggtatggcagaggagtcaatgctattgaaacttctaaaactagg

SEQ ID NO: 36843 - DNA, 478 bp, Homo Sapiens
ggacagatagaatcgagccggaccctagtctagaagttcaatcgcagacgtcgtgtttttcaccacattctttttcttggtctgcagggccagactgatctagcttccttggctttatcccctggctttcgtaggcacggcctggtgctggtggatatccttctcatgggcttgtttgatgatggtccattttctccccttggagatgggtttccattgatctttctgcaaagagtttttatcagttttgttaattactccttagtgtgggaacagtgcatgctaagtcttaacaacctgagggttcaggtaagcagtttttttggtttctatttttgtaattttaaaaatcaaatgggaaatgggtgactgtggaccgagctcgagataaaatctttgtggcttttttcttttaagtgagcatttcatctggatttggcacttctggtttgtgtacctaatcatttagtgtaagagt

SEQ ID NO: 36844 - DNA, 456 bp, Homo Sapiens
ctagtttagaagttcatagcaatttattgctagtctcgggggtcttgctaagtctgtgcctgctattgacacggcgtattctccctgcttctctgggtgtccgggttttgcaagttctgtttcagattatgggcagcttcattaataaatcctttccataacccggtaatctaggttccccccttatgtacaattataaagcaattcattcacaactgtgatttaataattattggtgcaattctttcttaatgcccatgttctattctatactttaagtgtgacgatatcctggcccagcacataggaggtacgcaacaaaatatgatgaatgactgaaagttgtcttcaacctccatggagcacagacttaaagtataaggcagtgtgatgtagttgatagcaggtggatctcgggctgctattgaaacttctaaaactaggggggatcctcta

SEQ ID NO: 36845 - DNA, 552 bp, Homo Sapiens
gcgtgcttgtaagttggctatgctcgtcagttccagaatgtgagtgtgggtgtcatctcactgcagatatgcagacgtatttgtattggccgaagagaacccaggcactaggacacatccactactgccaaaaaaaggagcagaagtactgttggaacctggacagatggaaagcaagggatggttatatgctgagggctcagcagaggtgtctgtcctcaccaggtcccagtgcaactagtctagtccagttgcacacaatatccatcctccatttcttcaataataataaagtgtggttgggtataaagctacctaaaatgaaaattacatttccaagttcagttatcctgaactgcacttctttggcagctcagggtactggtgtctaaatggtggctaatgagatataagcaggaggtctcatatgacagcttccaagagtcctccttaagatactggacataagcaccctctgcttggtttttcatcccttcctatctcctgtggcctaggatgtagatatctgctattgaaacttctaaaactagg

SEQ ID NO: 36846 - DNA, 364 bp, Homo Sapiens
cccggatgacttgtgaacacgcctgccttggactactttcatgcgtagatgtatcatttttgataaaccccttgggtcacacctgagattacactaagatgagatgactctggcatggagtctggtcaccagaaaaaccaaccatgcaattagaggatcagggctctaagccagcccaatccagagaggggaaaggaggggactggaaattgaatcattggccacgtggttgtactcaagtcaatcctgcctattttacgaaagcccaatagaaactggacaccaggctcactggagctttttggttggtaaacacatcaacgtgccaggcaggtgacacaccctagtccaaaggcaggacaag

SEQ ID NO: 36847 - DNA, 461 bp, Homo Sapiens
atgctgaggtgatctcagaggatttcagtgctacctccacaaacaggtggacaggtagcttgaggagaagggctcagagaagggctatggtgagaatcttggagaaagaacatttgggctaagacttgaaggatgagaaggagtttatcaggggaagaatattcaaggagagggaatagaatatgcaaagaccctgaagggagagaggcaggacccccttccaggttgtgaggaccctttcaggcccaagggtctcattagtcactggggttggcttttgagagcagagggaaccctctaaggcttgccttgccttcgactggatgcaggagagggagaggcaagagagtagagtggctgggtgatgcccaggtttctggccgggcttgggggtggtgcctcacccccgtgttgggagtgagagggggacaaagttcaggactgtcagaggaggtagcact

SEQ ID NO: 36848 - DNA, 419 bp, Homo Sapiens
ccgaggatctcagtgctactccacaaacaggtgtttgttaaaaggttaactttgctaaacatctgaaaagaactatgctagtggaagttctgtcctagggagatgccatccagggatgcagagggccgtagagaccaggagcaccggcatcccactgacttgtacagtgaccttggccaaaccccttggactctcctgccctttacttgaagtggggaatattctcctgctcctgctggagccatggagagatagatgaatattgtctctataaaatgctctgattgttttggaagaaaaatgttgtatcactgccagttgtcgttgtcattaacagtgacacttacaaatcgataggtgcatcgatctgaggagctgcaaatactgcctgtggctgtttgtggaggtagaaaagagta

SEQ ID NO: 36849 - DNA, 377 bp, Homo Sapiens
ggagaagctgttttcggaatatttgtcacattctaaaatagcccttgagcattgggagtacagcattacaagggttgtgtctgtagaggctatttggtgattagaatgggtttacgagcttggcatctgtgagtcatggaggactgtgatctcagctaaaattatctcaggggcgatgctaccagcccaaacctaccaagtggctgtcattttctcaggggcttttaaacatatgaaggacactttctgacaaaatctatggctgatagtgaaaagctgaaggaaggtggaggtcagtagatactcactcctccctaagcaattttgctgcctttggaagactttgaaaggggttaaaaagttactttttaaacttc

SEQ ID NO: 36850 - DNA, 412 bp, Homo Sapiens
atacaatattaaggcagcaattttcaaatgaaagaatgtaatgagttccaggtgggggttagtagatttttttcagtaggtcaagttgagttgaggtggctactgtcagtgtcaatgccctgtctgaacaagttttaatttaacttcaagcaatacataggcttttggttagactgtttgcatatatttgtctactgctgctaagaggcaaaataacctttttctcgagaaagtgagataaaactatgattgcaaaaatgtttattttttaatcttttcatgaatcaagtaattttatctaatttattcaacaaatatttattgaatagttactgtgcataaggcccagttgggaatatgagagaatataatattgatatagattttatcaccaagaaggtctgagtcttat

SEQ ID NO: 36851 - DNA, 537 bp, Homo Sapiens
cgtgtggctatagagtagacacgaactatggcatatgttttgctatagagattctgagtatcccagtcttttggaagtactgttttaacaagggttggcaacgtagaaacatgaggagcactctggctccttagcaagaggaaggagcatctcagtggtgctgaattctcatcttcggagggtttgtcctgcagccctctgcggcagaagctgagagcactggctcttgccctggcttgggttggccacccttgctggagggtgttctgcagggaccctgcttttttcctaccagttcaactagttgtactatacaaaactgtacagtggtgactaaccagggaccggatacagcttgtttagatttgagataaaacctactgtttaatttcacgaacttccctggtgaaagccaaacttagctgtgtcccttgtccctggtcactgcttggttggtggtggggcaggggtgaataaggctactgcagggactgggagcgtagcctgcgggaggcagtgaggagcctagcctagcat

SEQ ID NO: 36852 - DNA, 597 bp, Homo Sapiens
gtgatctagaggatccagtagagatgagcaaggttgagattggaggagagtgtagtatggagaatgtgttctggaaacatttattctagacataatcagggacactcacagttttggagataatctttggagttctaaagaagggatggggaatcgcctgagggctaagattaagtgaggttggaacctgggggacagaagggacttcttggtggctggctcggtggttggattggtcaatggacgggttgtggaggggacccaaggttgaaacattgcaggccaggaagagcttgggtttgcacaagacagaggccacaacaaggaaatgtggcttgggggcagtggtagggaatggcccacggtgtgaacttggaggctactaaactatggggaggggggcggggcaagggccttcgaaaaaggagggagagggtttgaggcaagttttaaggcaagtggtccggtcaaccacccaagtgccaaggtggcccctggccccaaccccaaggagtgggcaggcagggacatgggcaggggggagctcgggatggattttctgcctgccttccatttgccttgcatccccttcattaa

SEQ ID NO: 36853 - DNA, 623 bp, Homo Sapiens
gttactaaaatagtgatcctctctccttcactggctggaaggattaaatgagatagtgttataggaaatgtactttgtgttccttagttgcctccccccgccactccccgtggtaggaactcttgagtacttgtcaaatctgaactctcggcatttttacctccttcagggaaaactatgggacaggctcttactgaacacccgcttttgtgcagaatgcacttcctgatactctgggagtttcagaggctactaaggtgtccttctgggcctcaaggagttcatctggagacagggagacgacacattttctacaataactaagaaaagaaagggcaatgaagaccataaggaaataacagtgaagtttcttaggcatccaaacttgatggaggggacaaaggaggcttcaggaagttttaaactagaacaggacttcagcgctcttaacatttgggtcagatacttcttcgtggtgatggtttgtgggcagttaacagtggtggagggctgtcctgtgcatggtatcaagtttagcaggatccctggcctccgcccacttagatgccattagcgccactagttaacaacaatcgaaattatctacacactgagttaagtaa

SEQ ID NO: 36854 - DNA, 436 bp, Homo Sapiens
tgtgtgtgtgtaagagagcgagcgagagagacgccagccgttgtgatgatgttaacattctctgggtctacaccagtggccctttctgcctgcatttttattacaacatagtcctaacactgcatttcactgtcaggcacctccgtccactccactcctgcgcattcctcccggctgtgtctcctgtcttttttgggtcccttttgtaaatgtgggctcctcagagtatttggagccaccttccccccaacacctccacctctaggggcctggtcctttgtgagtgggcagggcctatgaaaagcacctagcacccacggaagacaatgacatcatgtggggccaagtccgatgtcctccatcacacactattgcccagcttccatgggccttgcaagtttaaggggaaaaaaatgggaagccatttctgagaaaa

SEQ ID NO: 36855 - DNA, 466 bp, Homo Sapiens
tgggctggagtgatcctctcgtcttggcttcataaagcaccaggatcacagataaactgtaatagtacctggtcacaacagagtactttaaatcagtggtcagagaaggtgcccgagagggagaagcacaaagacctgaaggagggtgaggggtaagccacacagatacctggggacagcattccaggtcaaagaaggaacaagggcactagtcggaggcagcagagctgcggggcttcagagcaggcaagaggcccgtgtggctggaacagaatgagaatgggagtgggtgacgatggaaaagacaagagcctcccaaaacaggcaggagtcaggcacagtattcagtgtggggccaagctgagacctgacagaaggaaggaagagggaaagcatgcctatccccctaagacatggggtaagggggacatgggctgatgaacggaacacccttgacccacaaggc

SEQ ID NO: 36856 - DNA, 562 bp, Homo Sapiens
tctaaggatccgcttacttaacccaggtgtcagcaagtcgtggacttgggtttgaaataaattatcatgctgccaaaagaaaattatccaaaaaacaaagaatgactggtagcattttagtcccatacctggggtattgtctactatgcatgaaggctcaagttagagacaggatcacattcacatgctagtaaatggttctgggtctttagtgtttttttgtttgtttagtgtttcattctgaaaataaaacatcatagatagcaactggtttgtccattgtcttctttcttggaaatcttatggaaggttcctttgaacactatccttggcttctctgttaggacaaactgaaactgtgattgataacaaaccatagaagttaatttaaacaggattatccattttaattgacttgtaatcgtgagaataacaacaacaacaacaaaaaatcccagaacctctaaatggtaattcttgaggggtgaaattgtatcttcgctccgttctggatgttaccaggcaccgttaaaaaattaggaacaggctagacacgctggtt

SEQ ID NO: 36857 - DNA, 441 bp, Homo Sapiens
tgggtgtcagaggtcctgttacttaccagggttgggggtgtagagtcatgtgaagagtcagaagcatcaataatagtagctgcgtggacaatctgatgtgtggagtgatggtatctttactctgtatccagaaaaagctagggtagcaccaatttgtaaaacctcatccagttggtatatgactgacttcagcaatctctggagataaagagctgggaggattgctccccttctttgtccagctcactgaagtgcatgctgattgtgcagcagaggacctgctattcacagagtagggagaagttgatcgaggtcaggaacgcaggcacaaagggacactgtcagagctgacctcacgaatgctaatctcctttatcccttccaagaatggactgtaatcgtctccagattaaaatgtgcagtagaggtgaccaaaacaaa

SEQ ID NO: 36858 - DNA, 501 bp, Homo Sapiens
acccgacccaacaaatatgacaattaattaggaaatgatttgttcagagtctttcttccctgataaactccatgaagtgcccatggcttgtcctggcacacagtagtactcaattgtctttcaaataaacagccagagatggcacactgtatctaatatctccacatatctaaaatctatccatcttttaagacctactccaaaaagcatgaattttctataatccaaaatccaccacataatcttcccagttcctctctatcctcctgcctgcccagacaagaataatttctctttctttgaagtcccaaagcaatttatctatacctcttcttcagcacttctcaatttctttactgcattattgttatctaggcatatgatttatctcatctgttaagactatctgctcactaactgtatactacacatttttgtgtattctatagaaacttgcataattaagtactcaatggcatagtattacatagtatggggtac

SEQ ID NO: 36859 - DNA, 384 bp, Homo Sapiens
ggatcccattcttttggcaatgtgatgtgaactagggtccagaaactgaaacttcatttgacatcagtgtagctgaattcccctaataaataaaaaggtcaactgtcagtagcaataagtatgttttctggttttcccctgaaataaaattggtcagtcaatgctgacaggccaggcatatgttcctgagctgatcacattaaatatacacgatttctctatcctgcgactactttcaaaagcacattgtttcatcaaggttatctcaaaacactagtacttgcatatagtgtatcatctgctctacttctgtactttctatattatacactgggttttgcttcccctaacacttgaataaaacatactgccaagttatagtag

SEQ ID NO: 36860 - DNA, 412 bp, Homo Sapiens
tgcttatagtatgaaaagattctgttgtcatatcctcaatttcgtagatccttttttcattttttattaccgttgattttggaattgcgggtacttgagcaggtttgttacaaagatatattgtatgatgctgaggactagagtatgaatgtactccaggtagtgagcatagtatgcaataggtagtttttcagcccttgcctccctccctgtctcccctctctggtagttcccagtatctatctttcctgtctttatgtccatgtacacccaatgtttaagagcagagattctttcctcagtcatgttcaggtttctaatgaacccatcaaagacattttttacttctgttacattgtatttcatctccagcattttgtttcattccttctcggaatttttatctttttac

SEQ ID NO: 36861 - DNA, 443 bp, Homo Sapiens
aggaccccctccgcatagaggcagggggaatagaatgagaaggtacataggtttttagcttttggttgaatatggtggcccaattcataagtgtgctgaaagcttaaaggaagcctttgaactttatcctagggatagtaatgatttatcatctgggaaatggcatcatgaagagtatttcagaaagatgaatctgatagcttaattaggatacagtagaaggagatcatagagcaaacctgaaactgtaattttatgtcatgtcttaatttgatatgtgagacgagttgccaggataaagtataaactacatttcgtattgaggttgatagtgtttctacaataagtaaaacactccaaatcttccataaagaagatttgtaatgttagagtggtaatttaaagatacttaaatacaaaacaggaatcctggcatagtatta

SEQ ID NO: 36862 - DNA, 462 bp, Homo Sapiens
acccacccagcagaaaagatcacagagaaacctttacagtcactgccacatattgacatttcagataacaacagactgcacaagtgatggtggtgccttagattgtaacaccatatttttatggtatcttttctatgtttagatatacaaattcttgccattgtgttacaggtgcctacagggttcagttaaatgacatgctgtacaggtgtgtagcctggagtgacaggctattccatatgccctaggtgtgtagcagactaccacctaggtttgtgttaagcacatgccatcatgtttacaaaacaacaacattgcctaacaacacagctctcagaacgtaccccctcattaagtgatgcataactgtatttaaatggaaatcttattttgaagtgcttcaattaaaataagatcttatgaggctatactttttaccactgaccttttaaccaagatctt

SEQ ID NO: 36863 - DNA, 390 bp, Homo Sapiens
ttgaggatccccacactatgtaatactatgctacttgatgcatctgtgtgtttgagtattttatatacctcatataagtggtatcatgcattatttgtcctgtgactggctttcacttagcatagtgtttcagggttcatccatgttgtcacatgtggcaggatttccttttttaaaacttaatattccattgtatgtgtatactatattttctcactaattcatccggtgatgtacatttaggttgtttccacatcttggccattgtgaataatgctacaatgaacgtaggaatgaaaatacccctcaagatcctgatttcagatcttttggataaatatccagaagtgagattagtggatcatgtcatatgttttccatagcagctgc

SEQ ID NO: 36864 - DNA, 364 bp, Homo Sapiens
agaactagatcctgatgagtaatcatgttattttcaagcaataatttgaagcactattcttttaatgtaacttttattatttatattaaaccaaatgatatcattgttggtataatcaatatatgacagaatttgttactgtgaggaattttagaggttatctagtgtgagttatttttcttccttcatgccagcccattcacaagtataaaagatacatctttaaaatctccaggacatcagtcaattaattttagtggctgcgtcatttttcattgtagaaccgtactgcatgatttaagcaggttcctgttaagtgacatttaggctgattcactttttcactattctttacagagcccag

SEQ ID NO: 36865 - DNA, 403 bp, Homo Sapiens
agctcggtaccactctgacgagtcaggatcgaatgtggttatcattggaggggagagggtgcatttttcagccttccacaccctgcaatgaaggtatcaatgtctctattttctatgcaagtgctataatgtagtaagaggcaggcaggccagagtttgactcctggctatgcccaatactgggtaaattatttaaactcctcatgcttgagtttcattataaaatgcagacaacaatatctcattcaaagggttgccatgaggattcaataagacattgtgtgaagtgccttttccgaagtatccattctcagcaaatgctcacaaagcagtgagtattattactattatttgagacagcatctggctctgtcaaccaggctagggaactcggtcagaggtg

SEQ ID NO: 36866 - DNA, 453 bp, Homo Sapiens
ggtccgacgtgtccagctctgaccgacttcctatgttgagaccccgtctactagaagcaacagtgaatatagggagagaggatttgaaagctgatcatggctgatcccaggaaagaaaggtctccccttgcccctccccatacacacactgaggactcagaaacgttgtcccaccttctgcagccaggagtccccaccacctcccacactccagcctgggcaacacatcttctgttagcccgcttcatcatgaagcataaattaaacagaacaccagagggaaacttgccaccataggactgacgctcaaagccctttctgagttggatggcagcttagttggattccttatcagcctctggctctgaggacccagtgttccaggttaatgtgaatgtttggcggcaacagctcacaccaaccctgcccttttggggaactcggtcagaggtg

SEQ ID NO: 36867 - DNA, 465 bp, Homo Sapiens
ttgttggggagggtgaagctctgtctacactgcaggcagtggaggggcagcaggtagcaggcttggcagtgaatgagcctctgtctacactgcaggcagtggagggacagcaggcagcagactttttgggaggtttgaagctctatctacacagcaatcactggaggggtggtgggcagctgggcttgtcaggtaggtgaggctctgtctacacagaaggcttgtggtggggggcgaggctctgtctacactgcaggcagtggaggggtggcaggcggcaggcttgtggtggggggtgaggctctgtgtacactgcaggcagtgaaggggcagcaggcttgtggggtgggtgttgtcccacgccctgcccttaccctccgaggcctttttcttgcgtgaagcatgaagggcgactttgcggttggagcctggtcccgcttcttcccatgagtgttttgttttccc

SEQ ID NO: 36868 - DNA, 385 bp, Homo Sapiens
aggtgacttagaggatccccactttacgcaggcttgccgtgtagcaaatcaccacatattttacagcttgaaacaggtttatgagctcaaagtttgtaggtcaaaagtcaggcaggctcaactggggtctgtactctgggtctctgggtcaggctcaactggagtctgcactcccggtctccaggcctagcattaaggagtcagcggccaggctcttcttagaggctctgggagggaacccactccccagctcacccagttgccagtagaattcagctctgtagactgtagaatgggcccacttcccccatccttgctagtggtggcaggagtcactctcaggtcccaggggccactctctggacatgcacatggtcccctctgt

SEQ ID NO: 36869 - DNA, 597 bp, Homo Sapiens
agcagcattgcagggacaggtcctcccctgatctgggtggtggtcttctcccacttaaagcactatatacaggggaggtcccaggctggacatctttaccagtggctgggagaaagcaggccgtgctctgtggtctcagagtcttcctggcgctctttggaacctgacagaacatgacctcagtcccagccagcgagtggcagagaggactttgtacttggctgcaataaaacatgcccttcttcgcagagacacgaacaatctcgtctctaccagaggcctgtgagacatcagctcaggaccttgacctgcagacacctcccctgtgcacattcttgatctcagactttcacaggtgctttctgtggcaggaagagtgagggtcccaggaaaggtgtggatcccagaagtctcactcagtgtcaccctcacggacacactgggaaactggtccgaccgagtccaggaagacagcagacacacgtgtcctctgtggcaccagctcctgtggacacgaccccagcaccgcaggccatgccagttactacccgggccaggctcggggacacagcctcatggtcctgagtagacgcaaag

SEQ ID NO: 36870 - DNA, 443 bp, Homo Sapiens
atccccattttacgcaggctatacaactttgtattttgcaatttgaacgcagagaaaagcatgaagagatggttgggaacaggttctttcttgtctggaagctgattctgggacagtttttctttctttcacagtaatttccagttaaatggagatgaactggatgctttgaagacagtttggcttgcagtgtttctactagtgttactggtttttcacactttgtatctaattattttatctccatgacaaatgcaggataaagttctccattttctgaggaaagtcatgtttttccataagaaacatcacgattgtccatgctggacttttctatctggggccacgcagccttttccatctcctctcccaggtttctcttgttctggccctgcggtcctgcagctttcctgcctttccgttttctacacaatcattcttcc

SEQ ID NO: 36871 - DNA, 459 bp, Homo Sapiens
ggctgacttaagcaccccattatacgcaggctatagctagataaaaataaataaagaagattaaatctttattttgctgcattctttccttaggatacacagaaagaagccatgttactgtcctgctgttcattaagtcaattagccattcccgactgcgggatgacataattttccataaacagtctcttacgcaatggtgtgggttggtggtgtagaagtagatcacataatcaacttaaagcagttcctttatttaaattaaccatttgaaatcatgtgagaccttatctcttaaaaatatagatactcgagtagctatattaatatcagataaagtggacttcagagaaaagaaaattaccagcaagaaaaagagacatcacatagtgataaaagaacgaatctaccaaggtgacatagtaattttaaatgtacatgcaccaaacaacagtttca

SEQ ID NO: 36872 - DNA, 355 bp, Homo Sapiens
tactctagagcgatcccctttttacgcaggcagataacgtgactgagaaatacacacaggccagcctgggaggccctgtgttggccccatggccagctacctctctaattctggttctatggcctatgattctttgtcaggtctgctttgtacccctggtagaaccatgtctgagcatgccagccagcagggggatgctctttgtgtgaggagaagctggtctaatcccggatatcctataaagttgagcagattgcgaggggagacagaggacacgcctttaggactaatgtgtttttccttggcagaagtccaaggtgaacctctgtctttgccaaaggaataccgcttcagg

SEQ ID NO: 36873 - DNA, 364 bp, Homo Sapiens
aagtcatgaggcaggggcaggatgaagcccaggactctgctctggtaagtacaagaaaagaaggggcttaaaagggagagctgccattttaaccattctagcaggaaggcaactaccaggaagactcgtgtattgggcatagttgtcaaggaagtcagtcgtgtactcaaagagcttgtttcagaggaaccggggcaggagccagaaagggggcctgagaaggtgcaggggagggtgcagacaatgaggctgccactcccagattccggctgtgaaagtaaaggggcaggtagagcggggtggtgtggatagatgcagggtgggacagacgtggtcaaaagccagtggagggcctgcgtaaaag

SEQ ID NO: 36874 - DNA, 362 bp, Homo Sapiens
agacgtttttttagcctatttggagtttatgagaagcgatggtatttggaacacgaatgtatccttgaagacagatcctttgcataggttacaggggtagagcagagactgtggtataggaggaaagcttaggtcatcgtgggtaagactgttgcacatgcatgagactcatttgcaaaaccaggctctaaaatgctttacaaattttagtaaaggaagtaggtgtggagtacagtggagctgaaatgtaaacttgtgttaatttttaaaatatacaaacactaacttgcaaactagtgagtttgcttgtgatttacaatatcttaacaattatccatgtgggccaaaaacacagatttgtt

SEQ ID NO: 36875 - DNA, 371 bp, Homo Sapiens
tcagtgtgtgtcatgagtccacatctggttacccagaaagagttaccaggagagggactgcgcttcccggaaggcacttggcttacatagttcccagagctagaggtcagggcaggtctggaaaagagccacaaaaactctgaaaagcacattcctcgggtgccaaggcctggccaaggtttccagaacagcgttccccaggcccctgacctgcctgccatgcacggacacggccatacatggctctgaggactgagtcatgctgataaatttttctgtttcttgggttccatttgtgctcctgtaactagctcgcagggctcttgtaaggattaagttaaaatatataaagcgactagaggccaggcgag

SEQ ID NO: 36876 - DNA, 462 bp, Homo Sapiens
cctaacgacctggactctaagagagcttttttctagcatacttttcttccctaaggaaaaggcgtgtggtcatgtgacagctacggtgattttacttgagatatttgaccttgagatggagatgaagataagtatataatgcaggcgccacattcattctcatacaaggtaaagtcattcaaaagataaatcgaagaactatagatgtatttaagaagaaattcagcctatatgtaacaacaaaattttgaataatcaagttcagaaattggatttttaaaaacttattagctactttaacccttttgaaatattcccaaaaagtgttttctcttcctgagttaaatttattcgtttattgacctattaaagatctttttagtgcttcagagctattctgtatatctgttcattttcggtatttagtaggatatagaagtaatagattgggctgaatagaat

SEQ ID NO: 36877 - DNA, 358 bp, Homo Sapiens
catatgtaatttgtgctgaatttgaaatgacagctaggcatttcaggcagtgtccagtaagaggatataaacttggaactaactcttgaactgagtctaaattttagagtcatcctgcttataaggctatagttggggctatgaaaatggccaagccctcttaaagaatgtgtaaatagaagactatgactccaaggactgagccctggggacagcttgcgatgaagggttggaaagaggcttgtggagggaattataggtaacaggaggagtggttgggagttacaagaagatttacaggagtttagttgtggaagccaaggaaagggaaattttagttgtgagagtcaagaaaaga

SEQ ID NO: 36878 - DNA, 395 bp, Homo Sapiens
ctgtcgatggtatcatattattcacgctatttataacttccttttttcctacttaacaatatgtctcgtgtagtatctaaggtcctaaagctctttccaccttaattttctgtcatcaagggactcaggcctgggatttaaagagtctatttcttaagaatctgggtaaatgttcccacaactgccttagcagagcagggaggagaaaatgggaggaagtgttttatggctaggcatcatgaaacactttgatgttccctggtcagtcgacatggtcattttcattcctctctgagccattggcccagaagggcgacttactctaggttaagagagatggagctttgcattcaggccctatcctgatgcccacaggattctgcaaggaacccacg

SEQ ID NO: 36879 - DNA, 363 bp, Homo Sapiens
tgatctagaggatcccttcttgcgatggggatcgctggtggaatgcctcctggagctggaatcaaggtgcttttgagtggataggaagtaagagagcactgtgttggcagccgtcaaagccttcaccagtgacagcaaagctctcagccctctggtgaaaactgagaagcactgatctggcttcacgttgaaaaccaatgggtgggggaaaagttcacatttgttttacggaacatcttaggtgatgcatatgttctaataaggaagtacagtgtgcaacttggataatgctgcaggaaagctgattttggtaacgctcctgatacaaggtcagagacacttcctttctgcaaggaacccacg

SEQ ID NO: 36880 - DNA, 384 bp, Homo Sapiens
gccagtttgtgcatttcatccagggctggtctagaggctgcctttcagggtggtgaatctggagtcagagagaatggagccatagaactcatcttcctgaaaggccctggtgtgaggggcagatgctggggaccagatctgggaacctgttttaggggcttccttgtgggagggattgggcaaggagaagtgaaggaagtaacatggtgaatggagacctggatgatggaggaagtgattgggaggggaggagactggacattctccaccccgactcacaggacaaagtgccctgcagccatccctgaagaggaggtagcagaaggcaccaaaaatgttcccaggaattagggttgatttgctaagaggcagagtccccagagt

SEQ ID NO: 36881 - DNA, 488 bp, Homo Sapiens
agatctggctgagagagagaagccttgtattacttgtctatttacataggaatgtatggactgtagaagcttcaggtttggagattggaacatagaaggaagggcttcctttatgagcaccaagacaactcagcttctttcattccattgtcttctgtccgcaagaagagcttaagtttgctctaaagattttattgatgaattctaaatagcaacaggatcctcagtgaaaaaaagactcatgcaaagtcccagagcccagagaaagtatggtagtttatcacctatgttagtgcaaaggaaaaggattatcactacttttcatcacattttgaagatctgacttattaagtactttgcagtctctcccgtttgaatctgaagtgtagtggtagcagctagcacttgtcatatttcaggtttggtgtagtttatttttaacctcctgctggtctggagggctacaaaggtcacaccacatagaacaa

SEQ ID NO: 36882 - DNA, 429 bp, Homo Sapiens
tgaggtgactctacaggatcttaatcggaaccaatgagcaaaatgggtcgttgagttggaggatccagtggtaacacagagtgggcgatgatgaggtctggagtgtgacccagggactgggcacctgagagtaaggaggaaagtaagtttgtcaagaaacctgagaggccaaggtgttggctaggtggttggctggacatttccgtgtggtccttcagctacactgtgcatccttctcagccctgctctgtgccccagaggctgacctttaattaccatctcagtgccctttccctcagactgagagatacacagcctggaccagggaagacatggagacagagcatccattcctccagcccctcccctcaaggtccctgcaggtaggccgtgtctctactgaaacccaccgctcattgggttccgatg

SEQ ID NO: 36883 - DNA, 557 bp, Homo Sapiens
gatagcagctcaaaaacttactgggtatgtattccttttcttctttaaatattgcacattctgtgaattggtgtatcccggtagaatttttccctgaaatatattcatttggtactttctttctattcccattcccattggcatggtcttggatcgggctcacattaactcctaactggacttttgaaataacttcctcactgtactttcggtcttttcttttcctatgcaccttttactctgccacagatttgagaagtccaatcacagatctgaccgtgtcttgctgactggcttcctcaatcatgtacaacgtaaagcctaagatgtctgctttgcttctgactccctcgggatactgaaataccccagcacaacacctgccaatagagtcaggctacacacaactcagggatgttcccggcagttacctaggaagctcctcacttgttcccccgcgattcataattcatacttcatcttctgccaactccagcataccagtcctggcatgccactttgggatttatctctgccactgtggcgctgatctaccc

SEQ ID NO: 36884 - DNA, 356 bp, Homo Sapiens
tgtctgtataactgagactgtatctgctgtgttgaaataatgtataatgtcaattataccagttgattgatggtgctattgagttccatcatgtccttactgattttctaactgctggatttcaccatttctgatggaggggtgttgaagtttccaactataatagtagattcatctattctcccttgcagttctatcagtttttgcctcatgtattttgacactgttattaggcaaatacacattaaggattgttatgtcctcttggaatatttcttcctttatcattatgtaatacctctctttagccttgataacttttcttgttatgaagcctgctctatctgcaaggaacc

SEQ ID NO: 36885 - DNA, 375 bp, Homo Sapiens
tctagaggatcccgcgtgggtccttgcagaggtgggggcaggaggacttcccctcccctggacgctgtctgatctctccttaagtaaacagaatctcaccctttgggaatttggcgtgaatctgtgtgctccaggggcttctggtgaagaaacttaggaggactaggggagggaggaagagctgggaacagacttgcaacctagttggggacagaggaggtagacgaaggacaaagctaaggaccttttaaccctcaggataatgtcatacagaagctgcttgcccctgccagaactgatccattaaaacacagtggcagagggcatatgtgtgtggtacctccaagactcccaacagtcagtgtcagatatctg

SEQ ID NO: 36886 - DNA, 409 bp, Homo Sapiens
gcgtgggttctgcagaagcgtgggttccttgcagaacggtcttggttaggcatctctcctccttgtggtacacagggatcctggcttcctccttgtgatgctgtgtcctcatcctgcagcttccttagtccattcaggtggtgggcgcgtagacttccatgtggtgattcagggacccaggcttcttggaactagtaactctgccaggtttcttcccttagatcctttgccactagttagacttagagagggcagagagggcctcccaggagagagaagtgacctaattaaggagtcacatggtcccagacactgcaagggggtggggggctaggaaatgtagtcttctggtgtgcctaggaagaagaaatgcattcagagagtggaagtactgagtctctgcaaggaa

SEQ ID NO: 36887 - DNA, 366 bp, Homo Sapiens
ctcccttcctggtgacgacaaagctcctgaggacgtgggcgacttagtacatcttgtatgggcctctctgcctgttctttgctttgctttctgggacatccttaggctagtctagcaattctgaactgcctggcttgaagagttgattcccatgggatgttaaggaggggccagaggttctggaagaatagtaaaaaacctacaaccaagtggtagcatctcagtattcctcttccacaaagtagcccatccccccccatcaccaagggaagcccctagtggtggcaggcatcttgggaatttaccttcattactaattctcccttgtctaccagtagcactccttaacctgctcactggccattc

SEQ ID NO: 36888 - DNA, 415 bp, Homo Sapiens
gacagcctcagaatcccaacgtccgggacaggccgctttcgagcgcttgtgtccatgaaccgcggcatcaacaatggtagcgacctgcccgaggaccagctgcgggtgagagaggcgcagcccacccagcctggccccggggaatccaggagggacctgtccttagatggatggcccgggaggggctcctctgagatagacagcccccagtggggactctgctgatatggcccacccaggctgtgactgtcttgagaggcaccgtcacaaagcgcattggtcctgaaacccgcctgcccaaaagaggcccccatcttgagaaggatgtccgagatagaccacccaggaggtccacccagatttaagcctttgggggactctaggcagccatctttcacatcttccaaaaagggtc

SEQ ID NO: 36889 - DNA, 404 bp, Homo Sapiens
ttctccgtatccccggcatcagggcgagcgtgctactcctttgtgacatgggatcatgtctcggttcgtctctcgttatggctgcattccaagggggtggagtacatccctttctatgcaggttccctgggtgcctttctccgggatctggagaactccttctcacactgtctacagtgtgtcgcttcgtcatctttcagccatgcgtgattctacaatgccagggtcattcaacgcaggtcacattaccttccttctctccctcggcgagctccccacaaggtccaaatctagaagtcaaggtttctcccaactcagttcccaacaaaaccagggcaaatcctattcttcaggcccggcaccagacccagactcaaactcaaactcagctgcaacaaaagacg

SEQ ID NO: 36890 - DNA, 358 bp, Homo Sapiens
atcccaacttcaggtgcgagctggaggatcatgttttccccagcgcataggaggcttgcaccgtgtcgctagggtcgtctcgtaatcaggaggcaggagtaaatggagcagcggctcccaggacgaggggcgcgggttggggaaacttccatccaggcctaggatttccagggactcgtttctgagaagtggctgtgattctcaggcaagactttgatttcgagcactagaccatgaagtgaacttctgtgttgtctgcagagcaggactcctgtctagggcaggacgtagtttgagacggagggagaagggtgattgtcccagggggaagatctgccgggagccaccaccatctggc

SEQ ID NO: 36891 - DNA, 355 bp, Homo Sapiens
ggctgttctactccctggcatacaacccctgcctccagcctctgagccctcattgaccagaactgggttacatggttgtcaccagctgcaagggatgctgggaagctgagggagaggagggccatggttggcttagatgaatgaggatgcagggccaccccgaagaaaattggggttctatcagcaaggagccaggtggaatggatatcggagaggtaaatagcatctgccagtaaagaaggctgtaagacactgtatggggtgatcccatttgtgaagaaggatgtgtgatgcgcacaagtgtttaggaaaaacactagaagaattagcgatggtctctctgggaatggggatt

SEQ ID NO: 36892 - DNA, 381 bp, Homo Sapiens
aatgtgtcctccttgatgagggacgtgcagccttcccaggcgtttgctgttatgaactgtcctccgtgtcggtggttcttgggtgtctcttggacacatgcaaggcctgtgtgcagcccaacctaaatgtggccccaggtcggcccccaagagccagttggtgctggtctccaggaggccaggagcatgagccagaaagagcactggccgtgccacctcggccctctggcccagctgacctcgctttttggtagcagtgctctcccactgaaggaagtatttgttggcctctctctggctcaggctcgtaggtggttttcaccactatttgatgagccctgttagggaacacgtagaccaagaccagaacttgcacatttc

SEQ ID NO: 36893 - DNA, 375 bp, Homo Sapiens
gagctcggccctctggcgagctgtaactcagggcgagctgatgatgttaatttcaggaaatagcagagagagctcagtatgttggattatcccaagcaatgggattttgaaaaagagccaccatacagtccttatctgagtggaaaggggataatctgggattctggcctactgtgcgtacaagtgtaataatcgcttttatttgaagtgctaatggattatttaatccatttcagccaggcatttgcatcttgatatttgtcttgacagcgaaggtctgtctgtcttagatctcttatttttacaagacaccttagttttaccagatgtaggagcaactggtgtgggatctagatctgaggcagctcgcccctg

SEQ ID NO: 36894 - DNA, 353 bp, Homo Sapiens
gtcagaggggccctgtgggacttaccgagaccctgcctattggccaggcactgtgattgtcctcgggtgccatgtgccatggaagccctctcagaggtcgaggggaggcaggtggagacagagcctctgataggcctttcaagctgtagccccagagcccagaggcagccgaattcatgtgtgcagtcagagagcacttagtgggcactgtagtcaatcagtgagcgcttactggacaccacaggcagctcgcccctgagttagcggcagctcgtccctgagttgagcagctccccctaagttagcagctcgcccctgagttagcagcgcgcccctgagttggggatcctcta

SEQ ID NO: 36895 - DNA, 462 bp, Homo Sapiens
atggactctcatcgcaaatggaatgaatactccagagatccttgcaaaagctagttgctacaattaaaagcagaatttgcatccagctttgggaacaactaaagaggaaagaagcaacccaaattctccctaaatttcatttaagttgcattaacccttctctagccattctggatgggacacatcatacagctacacactccccaacattagggagggtttattcaagggcagaccaactagtgcaaattaccatgcaaaggtacaccctgaggacccaggtgcccaacagcccctgcgcaggcagacaaggctaataaagtcttagttcctgcagaccactgcagctgctttggcagaagatgaaggtcaaggttagttgtggagcgagacggcattccggcagagacagtggcatgttccaagcctgggggcaggaatgagcagaccctaactcaggga

SEQ ID NO: 36896 - DNA, 417 bp, Homo Sapiens
ttcctagagtatcacatggactcatcatcgctatcctggtcacctatctctggatatgaagtggttgctcagcatcctccaaatgcagcacctggaattcactcaaggtggatatgcccagttcagtgtggaaataggcatgcttgttagctgaagggcatataaagtaaggacccatgggacctagtggctgaacattggaagccaagaatcaaagatggctctcgggcatgagcccgggagctctgaggtttacagatttgtacctgggaggactgaggaagagagaagagaaggaagcttggggagtgggaagccaagaatcccacagtggaagacctcaagactggagccgttctcccagcttccaaggagcagctcattccccgctctataagctgtcacagggcgtgggag

SEQ ID NO: 36897 - DNA, 443 bp, Homo Sapiens
gagtcttgtcctttccctcttcccttatgtgggagccacacccgaggcatcctctttcccctccaccgtcaatctctcctaccctagggcatcactcccttccacccgccaaaatctagaatggcccccacattggaaatgctgtccttgactgctctccctcctgcagtcatacttccaatttttcccttatgcttctcaatgaatggatcaacagctccatgtacccgaagtctccatattcctcagttctcactctgttcccagatctctctgtgtggatgaccttgccacccttccttagaatggctctgtttagcgtcacccagtcagtgactttgtgtcaactcattcttacctggggtctcagtggaatgctattccactgaccacgctcttccttggaaacactcttctataacagcagttcccaaccttttagg

SEQ ID NO: 36898 - DNA, 432 bp, Homo Sapiens
gtatgctcgctgtacccagctgctctccctgcctccacatccccaaactctatagtatggttttcttctcttatagtattcagttgttagcaactgagaagggggcatcaaccacccaaaagcaccacccctcccagtcactgctcactggcagatgggcagcacttctccttgatgcccgggtactgacttgttttccctgcccacaaatatttcttgccaaggaaggaaaggaaataaggatcccttttataaggcaggcattagtggtgctgggagatttgctcaaatagggctagcctggttctttttcttgtgtatttgttttttagcctcccaaagcagggagaaagcacctagtatttgaggaggtataagtaaagtgacaacatacactcagaaaggccaatagggcccatgaggcatgaccta

SEQ ID NO: 36899 - DNA, 420 bp, Homo Sapiens
catcatcgccaggctaatttctgtatttttttgagagatggggtctcactatgttgcccaggctggcctcaaactcatggcttcagacaatcctctttctttggccttccagtgttaggattacaggtgcgagccaccctgcctggcctgtttatgttattttagaacccgtgctcactttgtgcagagcaggatgttgagaacacatccttgaccttatggactttagaatttaagaaagagataattcagatttttgcagtattcaggggttaacagtacaaagaagaacatatgtagtattaccgaaaagagtagtacttcatgacaaaagcctgatatggccgtatgtggctctatcttgagtcagaatgctttgtgtgcagtcaggaattgttgggtgattggtagagtagagat

SEQ ID NO: 36900 - DNA, 431 bp, Homo Sapiens
ggagctctgggttacctgtcaaaggctggaccaggaggtggtttggccaaggctcagcctaggcaaagtcatgaacctgttaaattgttctttgtcctcttctttcttcagatttttgtcctctttcctattgaactccgtttcctttgccctggtatctctcccgtatgtcctgcatgtattcctggctgagtacctgttctttatctcattcttatttttggatcggtgtcaacgaatggctgtctgtgctaacagataagatgtgaggagaagagaactaatatttttgaggccctgttatgtgccaggcactgttagctgatagggttttagttatattcctgatagaggcaaatgaatgtccaaagagttgtccagaggcaacgggaagacactcccactcctctgccctccccttctgcccagca

SEQ ID NO: 36901 - DNA, 475 bp, Homo Sapiens
ataagcctcctggaggcgctctaaaaacgttctttgtgacttatcaggcctttggacaacttcggtggtcttagacaagtttatgggtttctgagcggctcttttaatacttgtgaggagataccggtgaaaatcgtctaaagctctctttctacttgaggaatttgggtcccagttaggcctggtagagggaaagacctcctcaagaaggtctctagcttctccttccggtccattggctgatgtgaggaagtactttttggcttcttttcggatacgttctttcttttcagaggtgaaaagggttaaaaggagctgttggcaatcatcttaggtgggtgagtgagtccggagtacagactctgtcagagaggtcaaagcctggggcttttcagagaagggaggattataagttttctaattatataagtcagaagtagaaaaagggacacaaactaagaagggtgctgagctc

SEQ ID NO: 36902 - DNA, 372 bp, Homo Sapiens
ccagctggctgcttcctcaaggtgcatgtttgtgtgacttccggaattaggggttgagtgatggatgtgctagtgtattagccagagctggggagagtgccacaagaagctgcaccaccagtgacctggaggcagtgcgattgtgtctagtgctttcctcagtgaccagcagggagcgattggggtgtctctaagctgagaagaagactcagtttccagtaatcatccctgctggagtgtggagcatggaggcagggaggccagtgaggaggctgtggccatgtgtccatagttaggaccatgaaggacattattgctaatgcagtgtccacgggaagcactgtgaagggggttatggaccgaggatggcag

SEQ ID NO: 36903 - DNA, 533 bp, Homo Sapiens
ggctgggcaagcggctccccaagcccagcaatgctctcttcccccagctccgtccttgtatgatattacatgtctgcgttgcccaggtctttcctgggactgcctgagatagtgtatgattcagtagcggaaacactgcctttaaaacaaattataatttgcatgcagaactttgtaggagatgacctacacaagtggcatttggtgagtgctgcctttggaagttattctgtggggagctgattctgatgacttctgcctctttgtgatctaggcgtagtagacactgtaccagctgtgattctggtccagaagtgttagaagctaaataagactccaaagtacacagaaggcaggagcggacttggtcatgaggttgtgggagaagaaggggaggaatggatgagaggagagctttggtctacgcaggtggcagttcgagaaattgtcataagaacaactcaggtgaatttagtatcagggaggcgggtgggggcgggggacgtgaatcaatgtggatggtcgacagttcc

SEQ ID NO: 36904 - DNA, 569 bp, Homo Sapiens
ggatcaggtgctgtttcctggaaggtctctcacccagccccataggaagttaggctaagtctggctctcctacatcaaagaggctttccatctgtctcttgctctgcctcagaaccagggggcccagaaccccctcctcacccaaaagcccctccacagaaaaacagcttgactctgacttcttccatctggccttgctctattaggcgaggcaggagaacaaaatgcctctgccaccaggcttggcagcttttgtctatagagcacaggcagacccagccggtcctctgagggctcagcacaggccattagcacacaaagttgcatgtcagcccatttgaacctagggccacaggatcccaaagatcctgtggaggaggtaggactggagccaggcctgtaggctgttcctgaggccagaattccctctccacacatactcaaagactccccagttcacttgggcagcatgagagtggtgcattatggtgctaggctgcgttcagctgtctgggaagcgggtggagtatggctcagggagtggtcttgcccaaaggtacatgcgatgc

SEQ ID NO: 36905 - DNA, 568 bp, Homo Sapiens
gccctttgatcccagttagtcacagcaggcattactctgggacaagcctgtgggtttaacttcacattttatttatattcttggaaaaccaaagcgaacctttaaggtttccagagaggccttttattttagcagtgcagcaagtttttcctttgtaaagcatcactgtggtacgaatgatgctctgtagcaatagaggaggagtcctgtggtatgtagaaccaaggaaagcagacttcttgcaggaaaaatgagtgcattgaggatagtaacctgactttctgacctgtgactaaattatgatagtagtcagtcattttactctcccagggtttgaggaagtggccggtgaggacttggagcctagtgaggagttagtagagctgcccagggtggaggaggccacagaggacagccctggtgaagagaacagtgaggccttggatgtgttgatatccagcaaggacctggcactgtctagtgaggacgaggcctgcacaggatgtaactggggcctgggcgagcccttcagcgaggagctggggctcatatccagcgatgatgggag

SEQ ID NO: 36906 - DNA, 425 bp, Homo Sapiens
ctgtctgtgtgtgactcgtggtgtttgggccgtgtagcgtgtgctgttctgtgtgtagctctctgctagtgtgatggcggccgctgtttgcgggtgctgttctgtgtcttagctttgtggtgctcgtgccgtgtagcggatgctgaggagtattcgatgttcgtgcttgctcggtgcccgtgtccctgagctcaagttctgtagtctaaactacataatgctcgctatatgcatccgccgtagggcaccgtgatagtaaactactatcatgctggtggcttataaccagatgaagttcatgtgtcgtgagcgttacggatgactagaaactctgaaatcaaggatgcagtagggacaggctcccctcaagatctggtggggaggagccttccttgttcttcccagcttttggtggctccaggtgt

SEQ ID NO: 36907 - DNA, 575 bp, Homo Sapiens
catcatctgtctgatccagcagactggcctccactcttctcagtgtgccaggtgcactcggggcctgtgccctcagagaggcagctccccccacagcttcacaaatacgactgcttttcaaagtgtcatctcctcagggaggccctccctgaccacagtatctaaatcctgagccgcaaagccccttcacttccttccctgcctgttgtcctatgagctggtcttgcgcattccttgatgcaggtctctgccgtgacttggctttgctcacgtggtgtccttggccgcgagccagtgcctgctaggtggtgggtgctcaacattcatcataagccttttgctggctaagcatcctttgtgctgggtaacggggggcataggggatgattgcccctactgccatcccccaccccagtgaagaccatgagtgatagggatgctacaagccagtgctctcagggctggggtgggcctcccaaggcccctccagctggccagggaagagggcaggctgaaaggcaggctcaggtgtgtcagccccctgaactccccgcaagggcaccatcaggagcccc

SEQ ID NO: 36908 - DNA, 546 bp, Homo Sapiens
tacatgactccatcatcgcagtggctttaacagcaaacatttgtttcatgctcacgagtcagcaggtagcttggctgaccttagctaggcttcaccagcaaggctggccctaggctttggattgggttcaggtctggctcgtgaatcttcatccagattcacaggctgaagggtggcagccagccagggcgtgttcttctgtggtggacaacagaagcctccgttctgaactgagaagctgtcacttctgctctcatgctataggctgaagcaagtcacgtggcaagcctgacatcaatgagttgaagtctactcctctcatggaggctgaagaaacatttgctgagcaataatagaacctgccacaattatgtttctgatggggtaggacgggtccttgcaggagtagagggtctgcctggagggcatgggtaagaatcatggctcatgatttgtgtgggacaagtggtcgcagagcagaggctctgggtaaggagacctggtttgagtttataaccagagacaggcagttcaccaactgagtct

SEQ ID NO: 36909 - DNA, 466 bp, Homo Sapiens
tcatatcatggtagctcatctgtctctgtctctatatcagagaggcatgcatttgggcatctcagcagagagcttccagacatttgggctctttgggctcaggagggctttgtctggtgtgtctgatactgtctcttgttaataaggcacctggggccagagaattagaagggtcaaggtgggcttctcctatttcccgccgagtttaaatgtctctgcacgctgtttcaaatgacttcagggaaacaaagcagtttctctcagatacccagctggcatggacaaggtgctggtttctgtgaggtcccctctgagagatcactttagtcttgtgggtgtcaggaggacaggtcactcagtgactttgcttctgagcgagaccccccaggctggagctggtgctgaggctgacaagatgcttactgtagtctctggggagccaattagcactgcaccttcccgggaa

SEQ ID NO: 36910 - DNA, 356 bp, Homo Sapiens
cggtacccctctaactttagtacactgtctgagctctacaagccactctactgagccagactctgtctgtccagagaggagatgaactcttgtttggtgttctctttctgaagaaaacagttttgttggagggggatctatacagtggtgagaatgcagtatgaaacgtgcttcttccatgggccatgaggaagatgactcatgttcccttaccatttaaatccggagacggatgaaaagaatttctcttctgactctgaatagctggcacatggaatcaagttgtggatgcattaagccaaatgcaacgtaatggataaaaattgtaaaatctttcagtggcattccatgccttg

SEQ ID NO: 36911 - DNA, 372 bp, Homo Sapiens
tgagagcaagatgaggaaagttgaggagctgatggtagagcccccgcgagggcaggcgagctgatggctggagcccccatggggaggcccagcttgatggcagagccccgtgtgagggaggctgcatacttcgtattgataagataggaagggggacggaaagaagacaggcggcgctggtgtcctgggaagactgtgagcgctggcctcggactctgcaggttaaacacaggcagcaggggcaggaggctgtgctaaccaagaggagaatggccctgggtgctgcggggagaggaggccccgcgtgaatggctctgccccatcctgtgggcttttgtctctgtggtcttagagacccgccttctttcctgg

SEQ ID NO: 36912 - DNA, 363 bp, Homo Sapiens
cgtaccgactccatcatcgcgaagattatataagtactaactagaacaggtgaaggagtaatgaaggagtggtaagaagtcaggagagctttaaagaatataggaataatggacataaggagcagccagcacccctagaactaagaaagaacacccccaggccctatccccagctgagatccagatgttgctgggaagggcatggctgtgcctcacaatggcagagaagtctgggagaatgttctagaagtctgcccttgggtgccagggaaagctgtcatggaacagtgtctgattagaggcacacctatttgtgggggcactaggagaagctgctagttgccaagtgctactgaccaccat

SEQ ID NO: 36913 - DNA, 388 bp, Homo Sapiens
ctccctgcatcagcagacacatgccctccatccccgcatctccacatagatagatggaagaacaaatcatccatgttcctattacagtcgtcctgtgagcacggcgagatggggctttgcttgagaggggatcactcaggccagtgcctcccacatcttactggacagatggcgcgaaactagcatgtgatttgtctcttgcacagtgggtggccggaagggaagtgacaactcttctggctggggcctccagggataggtcagagcagaaccttccaaagggcacccatggtgccggccccagtaacctacaattcccttgtggtcaaccagcttctccagaaccaagaacccactggctcctgggtggccaagagcaatctgacca

SEQ ID NO: 36914 - DNA, 609 bp, Homo Sapiens
ccaagcgtgacagacacaaatcgagcacacggtgttgtgaaagtggtgcccgtagactctcttgatgtagacttgccgcaagccttcagtatgtaaaaaacccaagaacacaatatccgtgaagcacagtgaagtgaggtgcgctgttgaagttgatggtgttcactgtacatttcataatcacagttagaattctatactttggagtttggactgggcaaaaatgtagtgataacctatcaattatggctttagcagagacatattctataggaagcaacagtagccagccctggctagtgtaggcaaaagtagggtgtgtagaaggggcctggagtatctcacagggtctaaggaacagtgggtacatgagcagcaggaagggatgggaccaggccagccctggtcagggactccccgtcagagcactggactttacagttctcgaacctcagtcctcggcctctgtgcccttcactttacatcttgagcaggagaatcacagtggccaagagaaatccagtcagctgttgttcccagtcagctgtattagaggcctgggtccggatcggagctgactgcagggccctgtgtgtcccccagcggtga

SEQ ID NO: 36915 - DNA, 375 bp, Homo Sapiens
ctgctccacacgtgtattcagcaaatatttcctgagaactttccttgggacacagcaatgaagaagacaggccatcccctgccctcatggcactcacagccaaaagtggacactaatttacgacaggtatggatgcgagacgatcatagaaacactcttctgtacttactacgtgcatggcaatgtgccatatattaattcgtttacttctcacaatactcatgaggaaaggaacattatcatccccatttcacagatgaggaaactgaggcatagagtgtttgcatgaggtgctcatggtcacacagctgggtgggggtagactcagatttggaacccaggcagtgcttccatcactgttggggtaccgagctc

SEQ ID NO: 36916 - DNA, 369 bp, Homo Sapiens
tggtgagatctagaggatcccgttggcgtgaggtacaattggcgtgggcatgctgaataaattagtggcaatggattagtggatgggtcagaagctagatatgggtctgaaagggcagtgatatgtgaacaatggcaaaaaataacaaggaggtgaggtgagggaaaaccgacaaaaaataggaaaccatagacagagagagaaaagaatgaatgaagtgaagaatgcaattcagagaaaggggaactcttctacaagtggaatgttcagggggggtagtaaaggcagacagaaaaggcggaagaagagggaaaggtggagaaggagcagcatatttttaaaaaggagagtgcaagagagaagcctcag

SEQ ID NO: 36917 - DNA, 385 bp, Homo Sapiens
cccgttgcgcgtgaggaccaaccctgtcaagatagagaacaacatgaccaccaggagcttgctctctctttctccccttgtatgcacaaagaacaggtcatgtgagcatgcagggaaatggtgtcccttcccaatcagtccccactggggatcttcagtggcatcccagagctgtttgctatggtggcagtagctggagagctactgttaattaatttgagcaacagtgcggctgataaatttgatctagcagggaggtctgggactgccatcctgaactcaaggttctcaaatcctgtagctcttgggtcatattgataggggctatatttttaaaaagggatagttgggcagctggttggaaggaaatggcaatgagttcatc

SEQ ID NO: 36918 - DNA, 403 bp, Homo Sapiens
cgtcctagcctcgtacagtgcgggattgtagacatgagccgctgcacctggcccagccttactttaaaaaataaattctgaaactgactgcttctcaccaacttccctggcaccattgtggctaagccactgtcatattttcctgattatctcaccagacccttggagatctccacccagcagccagacggacgctatttaacaccaaggtcaggtcatgtccttcccctgctcaaaaccctacagtgctttcccaggacaagcccaagtctttaaatggcctaccaggccccacacaatcgggcccttggctacctccagatctcatcaccaccagtctcctcacattcactggacttcagccacactggcgaggcaaggaccactggcgaggggtaccgag

SEQ ID NO: 36919 - DNA, 362 bp, Homo Sapiens
tggggtaagtcaatggggagcccttttgcaccagttcaagctttcctcagccaggaatgctcagccaggggtccattcagctaaggaggatgtggcaagctgccaccattaacgaacactgatagcgtgctttacccgggtcaccccattgaaccctgcagtagcctgcctctaagacataaattgcagaattcacttcacagaagataaggcgggctcagagaggctacctaaggtgctcaccaacacacagctcataagtggctcgacaagtcttccaatgctgctgcgccagagcctggacctactgctacagctcccaagcaaccagtgggctttaccatgcactggcgagctaggac

SEQ ID NO: 36920 - DNA, 353 bp, Homo Sapiens
tcctagcctcgcagtgctgggattacaggtgtgagccactgcacctggcataactgccagcattaatatagtgttactcactctgtggcagccactgttctaaatacctcccttacgttcccttatcatttccttacaacagccctctgaagtaggtattctagctgacgacactgaagcacagagaggtgagcaacttgcccgaggttagttgctgattagtggtggagctgggattggattcagtgactgtcgcatacagccctttgctgacattgtagactctgttctgattcctgctcgccaatgagggtgatgccacgcggtgccactggcgaggctaggacctagga

SEQ ID NO: 36921 - DNA, 354 bp, Homo Sapiens
tgcgcgcggcccctgggcctctcttgagctgctgcagagccagcaaaccccttactaggctcctggaagggggatgagagccccagaccattcagccttagctcagccttgaaaatagctgcttgcttcctggcccagggaaacggacatgctgcccggaggataggagagttggctgatggcgagtgagcgtgggttagtcgatgctagtgcttgtttacatgcctgggttacctggaagatcatgacacatgcagtcacttggttgtttggagaacaggccagagtgacaaagtgttcagttgccactgtggtccagccataggaaatgagggtattcctagctgtgcctgt

SEQ ID NO: 36922 - DNA, 611 bp, Homo Sapiens
ggtaaagtgtccagtagtctgaaatgtctgatcatctccctttccccagtgcacagttaccctgataaaaggccagaggtctctttggggaaggatgggagaaagattcactgcatacattgtcggcaatgtagtggggtccttccccaaggggacccgacctccccttcatttaaggggttctgggtctgtaaactagctcaagtctggaaattgattgaagagccatgattctctgtttttataattcaaattagtgtttgggccatttgacctagaagttttctgcttgtataaattaagtaggaatgcagtgggcttcctatcaatttcacttctaggaacaccatgattaattaaccaatgccggagctctacacgagccagactgttctgattgctgctttgcctctgctgtccattagggtagctgtgcccacctgaccttatcatatctagtttttgaaacatggcagggaaaatgattccacgtaaccggaccatatcagctgggtgactgaataaaacaccttctcagctcgctttcctctggcctgaagctttttgctgtagctgcttttgcaccacaggacacagtgtaggcagtggat

SEQ ID NO: 36923 - DNA, 439 bp, Homo Sapiens
gtacatagcgatgtcgggcactggatgaggcagcgacatcgtgtaggactagagagctcagcgaccgggtgctgagaggcgacgtgtccgtcgcacacagtgttgaggagttcgcagcgtacggagatccggttcagtacctcagtgatcaattggctggatgcagaagagcagaaacagcagcacagtctcctgggagccgcatccccgcgcacattgagtgaggaaccgaccccggcgcttctgaggctgcgcggaagagtcaggcagccgcttcgggcacaaactactccagggggcgttgtggcagcacgatttgattcaacttgcattaccctggcatgaacatcacagggacaagggagtctggggtccagcatgtacaggcagctgcacacacgccgaccgccacacagacactgtcccgggaaacgcctgc

SEQ ID NO: 36924 - DNA, 522 bp, Homo Sapiens
cccgctgactcgtgataagattatgctgctttaacaattaatggagagaaatgggataatgtctctggaggcagagattctatgcatctctttatacaaatgtagaatgtctctgggaaatggctgacaaatatgtcttgactcgcctcagtgatataagagatgcatttagttatggggttatagtgaaataaatatatgggttgacaaaactcaatgatgtaacaaaaagcccagaatttgaaaaacaggcataggaagaggaatgttttacaatgtccttcctgtgacatgggtaaaaacacctgccatcctcagccatcatcgagttttgttgaaatgaaagccaaaataaggggcaagagattatcatccttagtggaagagaagtagcccgttactcaacatcatatgtcttaataacttgagacgactctttcaaaatagtgtccactactggcatatcttacccaaacaagcaaagtcagctacagtcaacaccaagtggagtgtactctcaga

SEQ ID NO: 36925 - DNA, 427 bp, Homo Sapiens
agaccgtctgcccagaatctatctattgtagcttactctaatgcatcagttcccagcctttttggatttgtgacattctagtgggtgttggagtttgcatctccctcctcacaacttcaatggctgtgacagccgggtctgtgttatcagtggagagcacagtcctgataggaactccacaaattttctctctcattcagtcttatcttaattacattaacctttaattttaactatcactttcagactttttctggaccattaacaagctgctcaattacattgctatatggaatatgtttatttaaagtttttgaccaattaaaatgccttgaaaagttttgtgatacagtataaaaagtagtcaatgatagtgagaattgtattttatgtgcatttttgtgcaagaaatttgatagagtaatat

SEQ ID NO: 36926 - DNA, 429 bp, Homo Sapiens
gcttagcctagacacaaagactgttcaacagggagagtggtcctgtgtgtccagcacctcccagggagaaagccagggacctgtggacatgagactcctggagccagagagatggtccccttggggtgacctaccttccccgtgtcttcgggccccggctgcagtgtcacagaacatggaaggtttggagggatctgtcaagaagaggacagaacgagccacctgtcacatccaccactgtcctgtctcatgtattgcagcccagacactcccatacacccatcagaccaagggccccaggggacaggccgtgtctatcccatcagaccatgccaagccatgccacatctaaaactctttagataaagagctttctttatctaaagggttttggccagcccagacctcgcagcaattggttaaatagat

SEQ ID NO: 36927 - DNA, 412 bp, Homo Sapiens
caagctaagtcgagaccgaggctgagagacagctttgttagaattggagctgttctccaactaccccctcctttctctgcctctccaaaaggggcagagctaggcttggggtatggtcaaatgtctctttccaggaattttcatcctgtcatctatgcccagagtgttgaattagggtactggagtgttagaccttggtgacattttctgacttgggctgttttcttagagtagccgcctgcccaggctgtggagttgaccattctggtgggcgtgtcagctgtggctgcaactcctttggaaaatgcctgctcctgtttagaaggctgtgcctgtgttcattaaagagtcactggtgtcctgttgtgttggacacagtcaaggcacaaaatcaaatcctatccagtatctg

SEQ ID NO: 36928 - DNA, 356 bp, Homo Sapiens
tgttcatcagctgctcctgagcgtaaaacaagctaggcgaaccgaattactgacaagagctgattccggagagaaaaactctcgcaagaaaacccgaatttgtctatagacggggtgggggttcatatatttagagcatcttagcctgtaataccttataagtcctctgatcagcctgatcatttgacatatgaggacactgtgtcccagagaaagcgtactgatttgcccagcatcatatggttcaaacacaaatttctgtgtgattacagcatatggatctgatggagatgaggatgatagaagcatctaggttacaaagttccattaatccttgttaggaatttttacttttg

SEQ ID NO: 36929 - DNA, 577 bp, Homo Sapiens
atccaccaaggtaagtcgagaccgggaggaggcagcatgcctgagctgcagatctatttttactcagcagtcaagccatgttagtgcctttttggatctcatctataaaaggaggcagctgatcgagggaccactaaggttctttccgcacctaaattctaaggctctattatcctcttccaaaaggaagcaaatgagcttggtagcacatgcaacacagaaaactggagaagcagtctttggggaaattcagggacttccctgtgattcgcctcggaaggagattcaatatgaaaaagacacaagggacaccaattcaagtttgtaccaagatcaggcccagggacttgctgtgcagacaggttatgttcactggggtgagtgctacagaaaagggaaattcatccacttgtttttctctttggtgagggaacgcatgattcagaacagcctaagctatcacatgcatatggttgtggtgctctcctcagggtaactaacaggcacgaagaaatttagatgtaagtggccttagtcaatcagaagggatgagctttcattttgaacgataactagg

SEQ ID NO: 36930 - DNA, 420 bp, Homo Sapiens
cctgatcgcattgcctgtaccctcttagcctcggttcccttatctgacagcagccctttatctattctagctctctggcttgcaggggatgaggtgaagcaaccctaatcggctgaagccaaagaaaggacttcagatctcgtaactgcaaatcctggggtctagcctcataactgcaaatcctggggtctagcctccctctctggttcttgtcacctcctcgtgggcttcagtcccaagttccagatcggtgcaagacatggtcgaagcccagggcccgcatcctcccagattccagccacctgggagtgtgtctgtggtccctggtctctgacgaggtcctgtgccctgccattggttccagtggactgccggagctgatgggtcaggcctgcactggagctggttggagtttgctcc

SEQ ID NO: 36931 - DNA, 421 bp, Homo Sapiens
cgcctgatcccaagggaagaccaagcccagggaggagaccccacctccggttctgccgggacaggaagtgagtttcaagctacgtgctctgtggatggctgcttccagatggatgatttaaacactcttctgcatctcccagcagcagggttcttcctggctctctttctcccacctaacatctgtcccctgcaactagagcaaggagatttaataaggagaatattcccaagtcatcagactccaagaacataccaggcactgggtaaagcttcaggcagagttcttaactagggatccatggataggggtcaggggactgtgtacctcctcccaaaatagtatgcaaaatatacaggagacgagcaaacttctggggaaagtgtaaccgtttcttcaccagattccttttttcttttct

SEQ ID NO: 36932 - DNA, 479 bp, Homo Sapiens
aggccagcactggggtggaaatgcgggggaacaggcccagtcagaagaggcgacagctcctgtgtcacaggggcagctggtagctggaagcagaggaatggctcgtctgactcggggaccagcagaaccacctgactgttgaatggagacaggcccagggccagagtagaggccgtggcaggaatccaggcagatctgctggtgtctcaggtgagagggcagcagcagagggtgagggttcaaggcagccagctggggactcgtggcacaggcagacaacagggagcgcactgtgggatgtgggggcaatggtgacggctcccgggttttcagtctaagtggctgaaggtcgacattcctatcaattgagatggggagaagcgagtggaacaattttgggggacaatcacgagctgaattttagactttaagaggtttttccatctctgagcctttgtttccttttctggagaaagggg

SEQ ID NO: 36933 - DNA, 398 bp, Homo Sapiens
gtatatacaaggagaagcagtagattgtagtttgaaatgttcatatgcaattcataccctaaaggcttggatggccttctagcattaccaactatgcatctctgtgctttattgctagaggagacttgactattactcaagatttgattttttaaaatgacctgacaggagtgttaagagaattttgacagtggcttgtatctttgtctttgagtttttagcacctttaaatgccaagcatgattttttttcctctataacctaatcttggaagtgagaaaagagtttgttttataactggggagaaagaaatggtttatttttgtgtttgatgtcagtcacaaaagaagggaggcactgagagaaatgtaagctccttttttggggaactttactaa

SEQ ID NO: 36934 - DNA, 396 bp, Homo Sapiens
ccccattgcccgaccatacactctacgaccggataccaatcgttctgagggtacctttagaagcctccgttacacttttggaggcgaccaccccagtcaaactacccacggtacactgggcacgcaatgcgcgtgttagtagccaaatagtaaaagggccgtatttcaacagcgactccaagacaactggcgttgcccattctcagtctccggcctatcctacacatctaatacccggctacaatataaagctatagtaaaggttcacggggtcttttcgtcccgttgcgggtaatcggcatcttcaccgatactacaatttcaccgagctcgcggttgagacagtgcccagatcgttacaccattcgtgtatggacgggctctggggtaccgagc

SEQ ID NO: 36935 - DNA, 389 bp, Homo Sapiens
ctacacccttcaaaattgggtattgtcgccaaagtgtccaggaactcttcagctctgagtctttgagaactcagcttgtaagctgcgtcctgcctgtggaactgccgatgctggctcagccgagggcagtgtctgaaggatggcggagggggtagcgtttgcagaggctgagaatgctgtgttagcagtttccaccggtgtcttcccaacagcctctcggagcctcctgggaactcttgatctctttggccctgagtttgagaaccatagatttatttagactgttgatttttaactttctcaaggctcagctcattatttgtttattcccaaaggagagccttctgccccatggaataaacagcactaagcatccttcccatttgcct

SEQ ID NO: 36936 - DNA, 482 bp, Homo Sapiens
gcgcacggcccaaacatgaaagtcatcaacatttcaacctttatattctcacaaattatttttcctcttagctgcatgaatgtcttcttccaggtgcacttagagcaggtggtaaacatcccaactcttctcattcaagcagattcatggaagtttagtacttagaaacaatagtatctccatttgggagagaaaaatgagaatatccagcaaaccagtcctaaatgactgattactgaagatcagatataactaatgacttcagtagttgaggtcagtattaattccagcatttttagcatagacaggagaaagggaaggagatgatcatattatcagtggatcctgtgaagactaaagaggaaaggtctgtagtgatttagaatctgagcaggtctctttggttgaaaaactatctaggttaactcagcgtacactagcctgcagccttctgaaatgggcgcaggccagccaccttctag

SEQ ID NO: 36937 - DNA, 418 bp, Homo Sapiens
gtgtgagttgatgaaccaaaaagtgtagcctgatcggaggtctctggagatagaactaagccttgccgatgcagagcttccgagcagccctggagtggggttagtggggaggcccccagcggcttgtggcagccttcagctctgttggagcccgtggggtctagagtcaccgccctctgtaaactgtaagctgctctaatgctgtgcacgtattgatgtcacaactatttttacgattctgaaatttaaattcaacagacagccaggtaaatttaaattcaacggagagaacaagtcaatttaaattcaacggacagaacaggtaaactgacatgctggtttgttattaagggtcctgaactttctaaaggctcggaactgtcacattaagttttcctactgtaaattcttttcctga

SEQ ID NO: 36938 - DNA, 392 bp, Homo Sapiens
ggtcaggaacgattaactcactcacgctttgtagcttcagctgcctgcactgtggctcggtatgtaatagttgagtataagaatggatgggaaagaaaggagtatgagaataagctgattgcatatttcaccgctttatgttttaaacttaggtcagctctggatctgtctctgtttttagtgtttctggttataaacaaagagatgggccaagtggtgagtaaactgagaacttatgttccatacctattgggcaggatactagtattcaatactgcacagggtcataacttggcgtgcatattcattttgttacacatttctatttgattattaccagagtttacatttaatgtgggaagaattatcttattaagcacgtctgttcaatt

SEQ ID NO: 36939 - DNA, 406 bp, Homo Sapiens
gatagcttacctcctctcccccaccccttttttcccaatgctggtggtagccacgtgaaggctttgtgtcttatttaccattgtaaggaatattttgaagctattaaaagtgatccttgattgttaccaaggttatatagagatctcgaaaatatttatgttatcatgttataaacgtggcacaatataaaatgcgctgtctgcaaccatgttgaatatacatgttcatttggaaagcaacatgtaaaacaattatatagctctgttaggctaagtatattaatgtgagatgattttcaaaattacaaactaaagttttcacttactcattatttttgcattgatcaattctgaagaaaatattatacattctatagcgaaaatagtactcactgtaagtatactt

SEQ ID NO: 36940 - DNA, 391 bp, Homo Sapiens
tagaggtatcccctctacatccgtcttacttttttcacctcttaaaaaaatcctcttcaatgatcatttttccttgtttcactttcgtagcttggcatcagagctagaatataaggtgggtgatttcactagtccgaagtgtgtgtacacggaaagatggaaaatatctctaggcattgtaatatttctttattcatacagttttcgtttccctcatttttcttaagcataaattgagctagttaaatttgtacggatatacttcattgtccttggtaatataacatttaccatacgggtttaatttcaaagacaaagacttggtgtatgctctatgcgtttaaagtataatcttggcatataaaagttaaaatatcttattagtgaagtg

SEQ ID NO: 36941 - DNA, 401 bp, Homo Sapiens
gtctggaaacctagccctattctcacacatagtgagacagccaccccttatgccccaacaaagccgaatgccctaagaggccattaatttcttgggataaatggtgttctatggatcataagcctgctagttaatgaatctaactatgaaatctgtctgtctatgctgtttacaggttgagaattaaagtatattagatttctcctagaatctttacaatagtagctctgaatttatgggcatagagttcaaattttaattactcatccaattgggaagatactccatcaataatttaatttaagaccttaatttggtagggctaaaacttgtcatccatagaagaataaaaattctttctggagaaaatcatccttaatccaggaatcttagaactcata

SEQ ID NO: 36942 - DNA, 428 bp, Homo Sapiens
catcatggcggcctggaccaactactttgacctaattgctagaaagagttcccttttacaagatctggcgcagtctttacatttccctgtctaaacccggaaaccgtcatcctgaggctttcttaacatatttcctagttcaaagcaacccatcgttcttgcttacatctgcatttcaaaccagctttaaaaacttaagtggattgattagttctaagttattcttgcccagactttcatatatttccttgactggctactggattatagtattccgaaccctggccagcttaagattagagtagatagcaagaagacttttcttctgcaacagctgttaccgagtttagaagccctttagacttgttccgagggattgtgctcttacaggatagatccctggattcccactctccccaggccagtcg

SEQ ID NO: 36943 - DNA, 445 bp, Homo Sapiens
catagagtgcaacgtcacttctctccacctatctgatacccttcccttaggcacagcagggagctggctcacagttaactcctcatgttcgaagtaattctaggtcccgtctgcagatctgctcctatatttagacaatgccctgttcagtataaaggttaaaaggttttcatcgagaaaaattccaaaggacttaagaagagagtaacccggtataactgggaccagcttaaaggaactgctttccataacattctccaactaattctacactagtgaacaagcacagctggtcctgggtaccccagtgcctagctcctccatgcttcctatggaacgtgtggagactcagtgaggctctggagaggccagcttacaatgtacacacccacgttctccaaacagtcactgtgtagcttataacacaacacaaaaattctcggaa

SEQ ID NO: 36944 - DNA, 456 bp, Homo Sapiens
tgacgtgacaccgtgctaacaactgcgctccgcatatgctccactcttgatgcgcatgggccaagtagcacgcacagccattccgtacatcgtccacctccacgttctgtggcgtactctttcacgctctgccaacacctgggcgatgttggcctgaaaggcctggcccatcatgatgtccatcttctccaggttcaggttcatcgggtcgttgtccttcacgaagaacaccttcatctcatgcttcaagatctccggcctttcctgctccgcattgagcattgctcgtttctggctggtccccctgttctgcaactctgggctcggcttgactgcagtgtgtcctcggggtgggggcggcttcttgaggccgtgtgccgtaatactccaagtccttctagtccctctgctttaacttcatcaccagcttcacagtgtaggagctccccaccgtcg

SEQ ID NO: 36945 - DNA, 422 bp, Homo Sapiens
atcatggggttctggaaggacgggttgttgtaagttagataggaaaccctctgcagatgcgtttttgggaagatgatgtttggttcggcgtgggtatcatgcagacaagtgaaatgtcaggtctggagagaggtctgggcagggacttagatgtagatgccctcagcatgtagatgccacttaacgctgtgaggtggccgggagtgagtgcagagtgagtgggaggagcaagagttcctggacacttcttgtatcatcaatagcttaatgctggtatttgtcctctttgatctaatttcccatttcagttatttcaccccagcaaatatttattgagtacctcccagtgatggcttgagaacagatgaggtcacctgccgagtgctaagcctcccaggtttgggtgggtgggtcgttgcatg

SEQ ID NO: 36946 - DNA, 396 bp, Homo Sapiens
tgctggcttaattgtttcttttggaaactttatggggccttagtagtttgaaagtctcatagcttgctaatggtgctatgggatgttctgttctttcattttctgtggctcattaccatttgagtaatgtctgctcattcgcttagtcggctccagttttcaggaataaaagccaaaggttttcagcactgaacaatatctggggtggtcagagatccccgtatcccaacgtataaatcacgcactgtcattatgaatctcatgcatgttccaactgttttgcatggcatggtgacaaaactgattggcgtaggctgggatgtatagaatcatcttgtgccatatcaactctgtgaagtttttgaagctgacttttcagtgtcatccctgggccac

SEQ ID NO: 36947 - DNA, 391 bp, Homo Sapiens
cagcatggggtccgattattctacatccctgcaaacacctgttattttgtgtttgtttgtatgttttgatgggagtcatactaatgggtatgaggtggctatcttatacttttaacaccatcttctttacattctattgttggcggtaagtcacagccagtcgtcttcatcagtcaagtatagcatgttacatgagccataaaactcgcaaaatctagttcttttcttccacttcatttacactcgtccaccattctcattgaaattatattgtctattagagaatctagaaagatagagttcatacaatctataaagattcagtctttacttgtattgagataccaaatattgactatgcaagctatactggttaatgtgctctttgatg

SEQ ID NO: 36948 - DNA, 429 bp, Homo Sapiens
catcatggggtacctgggaggcaggaatagttgcctgcttcattcactgttgaacccccagtgcctgaacagtgctggttgtgtaatacgtgctcacttaacatttgtagacgtgaatgatctacatatagtgcaccttaagaaacaaagcaaaggcacgagtctataaacagctgtgtgtacagcatactgaggtgtgtagtgtctagtggcaacaaaggtgtcatgtgtgtagagacgggggatgttgagcaactaggttcaaaatggtagtgatgagtgaaccctgggacaaggtatgggcagcccttgttctaatcctgaaacttttctacagtttagaatctatttatacaataagactttagaaaatcttatatatactaatttttctctcaaataacacctgaggggtggattaattccagg

SEQ ID NO: 36949 - DNA, 404 bp, Homo Sapiens
gaaggcatcacaatggttgaggtgcatgtactctgggccttgaaagctgagtcacattatgccatcagatgagggatatgatgatggagagggcattgcaggctgaggaaacagcacaaaaaacacactaggttgtaaaaatgcttggtaggctaagagatccataaatagtttcagcctatattaagcataggtcagatagtgcatcttaactgagtcccaagataattgtgagaatgaattcaaataacatagtggggtacttataaatgtgagatatcatgaggaaatgctgagaggcacagtgggcttgtatgagaagctggctccctgcggagtactgctacccagaaacaattccatctctttctctctctcccatttcctcccttcctcaggacatg

SEQ ID NO: 36950 - DNA, 458 bp, Homo Sapiens
gaatccccatcatgggtctggactgggggctggcttctgataatggtcagtttaagcctatacagccacaaatatatgtacacatacaatatgagtcacccacgggcccctaacacatttgacatgttctcactgatcactaaaaatatctaaatcccatgaaggagtggggagaggacgaacacttggaaaaagtaatgagatcaagtgtaaggaaggacagagatgctgggaatggacccggtcccacggaaggttctagctcaagttcttggtccacacgggagcccctgggttgccaggaactgggctatctcaatccccgtggctgtggggctgtgagggtcccttggggcccagaacctgaggtagtgacctggagaggcgggaaggcatcttctgtgggcttctagaagtctcgtcgcagatgctagctcttttctgacatttttcactca

SEQ ID NO: 36951 - DNA, 424 bp, Homo Sapiens
atcatgggttctggggactttgttcagatgtagacaaggagagtggtgttagtggaacaaaaccagagggcgatgagcaccaggacccaagattgatgggaaacgatgcgccgatgcgccgcggagtagaggagccaccacgggtagcaaagtgaacttcccccgaatcacggttaagccccctgggccacatggagctgtcatctgcagtttttcccacctcggaggcctgaccctgtgctctccataatcaatgagtagatgtggccctttatgttccctgaggcttccctgactgctcattaaaaggatctgctcagtcctagtgaattgatttactttgccacagtccttgaaggatgctacagatcaaaaggtgtccaggaaagtgatcttaaagatgctgacactactcccagttact

SEQ ID NO: 36952 - DNA, 384 bp, Homo Sapiens
catcatggggttctggaaaatccaggatatgacggcgtttaggatatgtcctgaataattatgtcaaagttgcttcatgggcccagtaaaaaaataaacagcctcaggagaatgaaaaagtccatgcactttccctaactgcctgactgaccctattccagcggccaatggcagggccgcaggagcacagcctggaaatcccacggggccaactcccatgggacaaaatgaagcgcaggatggcgctcaacccggacatcctagttaggaagaacacaggtgcccagaaccatgagccagggctgaagccagacatcatccagcagggcctccgcgtgccctgtggcttccccgacaccagcgggctcggctacttcccacttg

SEQ ID NO: 36953 - DNA, 415 bp, Homo Sapiens
cactccttccctctacagacacactgattcaataacacatgtgaaaaattccctttgtgggaaatccagaaaccagttgagggtcttctgggactataggacaagcatgaaaccagcgtgaatcaacagtcggcgagaaaaacctagaggcacccctcttgccataattcttccgcttcccatggtacccagcacaagtaccacgatgagtagagaggaaaccctcagactcccaagcttctttttggcagagggaacggaaatgactggaatgtacatccaaaattctgacttttctggaacctgcacgagagactgttttctgtcttgcctgagtccgagagctaaaaacaaaggggccaggttggaagttgctgaaatcaaagtggaagtttggactaacaagcatgagctc

SEQ ID NO: 36954 - DNA, 376 bp, Homo Sapiens
taagcagcaggcagctggtcagagatacccatgggatgaaaaaagagtgcccttgatattggagggcgaggggtgaatactgtatattgcagcagctcggaccccaggcctgctcctacactcagagcctccaacggcagagctggcttcgtggaggtgtgatctgggcagtggcctagggtcccaggtttagaagggtccctgcagctgatttaatgctcttctgtcaggggtttcatcattaatttatgaatgagagagtcttcattctcattttgcagtgcatcctgcaaattatgtcgctagctatgcccaagagctgagggtttggggccactgagctaaagtaacagaagtactctggaagaaatctagt

SEQ ID NO: 36955 - DNA, 386 bp, Homo Sapiens
ggtagccaccaggtggtagacaccctgtaagtcggatgtggtggactcctgggtcacttgtaagccaaggggattccctcttcttccctccctctacctttcccaccccctaaccctgcatatgggatttgtgtcccattctgttgcccttcagagcctcactttcaccactgtccttgtcttccctgtagtcatgaggggaagaaggaggtggagggctgcctgcagttagggagctggggcaaaggcaccagggaggctcccggtgctcagataggactggaagtctgggacacatcatttttcagagggggaagaggccagggaagagagaggctatatttaatagccaaatagatatgagcccattaaaaaccaggaggaaa

SEQ ID NO: 36956 - DNA, 405 bp, Homo Sapiens
gctggcggtattatacttatctttatcacttacttcactttatcactcttgtagtaggtatcgcttattctttttacagaaagaggaactgcaacccagagaagtgaatatatgtttaatgagctaacacagaagaagaaaccagcgactggagaaccccctgtattgtgaggggtcatttggaatcaccttacctggcttaaactagcaaacgagaaggaaggcaatatatttactaaatataatagacaagtctggagttaagactgcaatcaggctgcaccgatgattcaggggctcagttaaagccttcaagatgctgtttcccccccgttcatctctattgtatgcttcctcattttcaggcttcttgtggtagcaggatgcatcccagcaagttcagac

SEQ ID NO: 36957 - DNA, 394 bp, Homo Sapiens
tctggacatctcgaagagaaagtggagcatattacctgatgcacatgactttgttgggaagagctttacatttagggcagcgacttttgggtaaagtagtgacaagagcatagaaaaccaagcaaatgagaaaaacaatgtaattaactccaggaaaaatcaaaagttgtacctaaaggaaatgtaatcataaaccaataaagggctcaacaggaaatggtaaacatacagttatactaaactgtgaatgcaggtttcagccaatatcaaactgcttagggagactaataggagaggaaatgtgggtgtcgagggtgggggtgataatatgttgtgggaaagacagtgtaagagaagctaactcctcttccattgtaggaagtcaacaatgtca

SEQ ID NO: 36958 - DNA, 393 bp, Homo Sapiens
tctggaagtggctctggctttatttgcaggtgatcccacgatcgccacaaggaggccggggttggcctcctgatcactgccctagcagcagggtccatgaggagtcccataggggagcagtctctccactgtaccactgtactgtaatgccacccccatactgctggctgggggcttaacccagcctcagcaagaactgcccatgctggtttgcacccagtggccctcacctctcttcccagcatcctctggggttgcctgcgatggttctactccttcctctggagcattcgcttcctaaggacaaaccctgggcatcggtcaccccttcatgcacaggtcggtgaccgagtacctccatgtgcctggcctgtggctggctgttcactagtg

SEQ ID NO: 36959 - DNA, 429 bp, Homo Sapiens
tgtctggagctctcatgagtagtcttccaggcactacaaggagtctacaagcagacatgcaggatgtagagaagcaaaccagagaagacctgaggtcaagaagacagatgttgcctgcacagtgggtgaaaggaaactgctcaggttgtgacatattataatctcctcagagcccaggccttgacagatttatagtaaaagtgcaagaggaggctctaactggactaaagggattgcctccagccctggtcctatgaagtaggctccagacatgcggagcagtggatgaaaactagagttgacccaacagggagggagaattgtaagccagtaggagccatgagagtgccgtcgatttcctagagctctgcatgaaggagctgcgcagagtatgcccacttcttgctagggtcaccaacttgctcagat

SEQ ID NO: 36960 - DNA, 371 bp, Homo Sapiens
tggagtcataatgagaggtgcaaaagtggggtgcttggtgcaactggatttcttgtggacagcggccaggggtgggatgtgcgcattgcgtgggcacaggaatctcaatagctggccccagagcagaagcagagaaggtgtgaaggcctggactcttctgagcttgaggtcaggggatctacttgcacattagagttatttaaatgaggaaaatgcatgccctttttgaatcgatgttgtcaagcctttcttttcctaggagaatctttcgattcccagcatggggaaagcatgttttcaggtattaaaatgagtaaggttgtaacagttaccatgaatccacatgttgtgccccattctaaatcaagtat

SEQ ID NO: 36961 - DNA, 415 bp, Homo Sapiens
aggacagcagcatgaagtagtagaggaaaaactcctgggcaacagtctgggctagatttgtcctgggctagatttgtccttcatgacagaaagaagtttatctttatgacagtcacttccatttgaggactatgaaatcgttgacaactattattagaatttcagttcatcctagaaaaagctatgtctcacggaggtttctaaattccgatggtcccggtcatataagttactactacttggaaaattgatggtaattttgagaaattgtgactgttttaggtccacgttaggacctcaattctagttgagactgaattccctgtaattctgattaagtcctgtactgtatcctctgccacttgatccacatgggagtgccttttacaactctgtgtgagtcttttaagttaat

SEQ ID NO: 36962 - DNA, 420 bp, Homo Sapiens
gatggcagcagtacattcgaataaagctgaggatctcagtctgcagtgcctggtccctcggaggcattctagtatccctcttagttttgttttattaggggcagagcctgttgctgaaaacagaacctgtgggtcaccctgactatccttcccaggccttcgagaactgccttgcatgtagtagagagactcacagtttgcaggagtggcaccgtctttgaggcagctttcacataaagcatctgaagttcctttgctaagtcatgtgcccagtcctcaaaggtacctgcagatcaactgatcgctgggagtagggctggtccaggattcctcttattgtgtgcatacataaggttcgcccgagtccggtgggacagagatgtgggaggtgatgggatgcagaccctgtaggacccgtga

SEQ ID NO: 36963 - DNA, 389 bp, Homo Sapiens
agcagttataaaatgttgtcagaaggtagagttatatgtaacacagaagccaccccctaatattgaggttaatattcaactggtttatttaatagcaggagagaaactcacttcagtgttcatggatgtcaatttgagattctagatgatattcagtcactcttacttgattaatatcccccattctggatcatgatttttctataccattccctaacatgtggctcagaggcctaaagctaagtttcttaggccacacactgtccactgactaccctttgtctagtgctgagttgagtagagcctttacacactcccatctctcctcaagagaatgcatttgtaagactgttaattctgtcaccgaggggcatagttgaaaacagcta

SEQ ID NO: 36964 - DNA, 448 bp, Homo Sapiens
tcgatggacagcagtagtgcttcgctgatctgtgtcaaggctctttggagaatggaatgataaaaacacgtggacacaaagtttcatctttcccctttccagagaggtgaccatttcacccttggtctagctgtggaggccccaggctctcggtgaagacccctgcttttgtgggggatggagtgatgcagcactggatcatggcaggcaggggagacagtgcgtcttcacgttttcccatgtggagaccaaggcttggagactcagggggtctgttcaaaaacactcgatttgtgggctccatagcaaccccagagtacattccctctccagtgggctagaatgggccgaaggaaaagtgcagagcatgttaaatataagtgaaacccaagtttcttttcaaagaatcaatacgtcagtatgttcagctctcttattctttgattct

SEQ ID NO: 36965 - DNA, 403 bp, Homo Sapiens
cgatcaggacagcagaattgacatccaaaattattgctggctgaattatctgctctctcagtaactgatggaacaaccagataaaattggaaaaatcggatctaaatacaaaatcctgacccagaattgtacttggcagtaccaagatagactgtatgtcgatcaattgagaaaactgttctagcttgacatagtatacaaagtatgttgtctgaacacctgaaattatattagaaaccaacaacaaattgatatccagaaaagcctcaaatgtctgaaaaccaagtaataaactttgaaataccctgggagtccaaaaagtattcacaaggggaactggaatgtatttggaacaaacttgttataataatcatatttctggtagactaaaggtgacaacttc

SEQ ID NO: 36966 - DNA, 424 bp, Homo Sapiens
aaggagggtacttactccagcaaggaggacatgattagtgttccagcatgaaacctttgaagtgggtcagcaggaaaggaagaaaaagcaaaagcagccagacatgggagaatcagaacatttcttgttgcctaggttattctggtagactttgaaatgccagtccctattagtttggtgggtaaacattctcattattttctgtaattggcattattattggaaggtaattaacgacagtaacattttcgtataacactcagacctggatgggtcttaatgacttcccttcagtcttgcgtgaagttgttttctgtttgatttttgagtgcctgaaactacttagggttctggctgtgagtggactctgctggccctgctatgttttataatataattgcattgaccatgcctgtcaaattgt

SEQ ID NO: 36967 - DNA, 448 bp, Homo Sapiens
attaaggctcactggacagcagcagacatttgcacgtgctgaacccattgtacggaaaggcctcagttataagtatttctcttccaagggcagtggcttaggggctttgcttcaattgtatttaaatagccatagatcctgcctgttgacaagataaagaagagaacagtttcagtcttttaaaagtcaggaaaatgtggagagatagtaaaacctgttcccagatttctctggtgcctgctggttccttctctgggccaataaacaagtgctgtctccagtaaagaaggactgatgtcctgccaccaggcaagtagaggctgaggaagtgtacccctgccttttcagtgacttgactttagcaatcctcaatatttcggggagaaatattttggcttccctcagtttgaagtgttaggtttttgtttcaccccagtctatggaattc

SEQ ID NO: 36968 - DNA, 428 bp, Homo Sapiens
aaggctgataccaatgataggaatcactggcttccgaagcgttccagcatccccaaacagctccttaaacccaatcctatgttgcaattcccaaaactgtgtctccaacctagacttctgaatcaccaatgcttgacccccgaccacacctaggtgtcccagcaactcaaactaaacatgatcaaagctacattcatcttctaaaactactccttggtctcagtgatgccatcacctttagtcgcttatgttagaaatttgagaatagtcaacaattctcttcttttacatcttcaaatccaaaccatcaccaagaccaggattccccttgtgaagtgcggctcctaccttccagttctcatccccactcccatcatcgggcccaaacccccatcctctctctctcatggacactgcagcagcctccc

SEQ ID NO: 36969 - DNA, 394 bp, Homo Sapiens
ggaactggacagcagacaaaataggtcatagacagaatgactgtagattagggccaaggagaggcattgggattggggaactggaggtcggtggtggagtggagcggtggttccagacacaggccaccgttctaaggagtgtggctctaacaggaggacaggaggacatgggctcgggacaggaggtgcttcttaacgtgacaaggccaggccccttacctaagtggacactagtcctggggccctctctgcagggttggtgcacatgaggaaactaaggcatggccagcttgagtggtttcccaggtgacccaggtggtgtctcgcagacggagccagaactcaacctcgggactccgactccagcagccccgggccctgggtggccagagtg

SEQ ID NO: 36970 - DNA, 451 bp, Homo Sapiens
cctggacagcagacaaaacacacttccgggccaagcctaagtgtacctagtccaggctaatagaaaagaaggcatggtagcccagaatatctcagctgtataacctgctagggccatcttggtaaaaatcagtcattaacctctgcttcaggtgggtacctatattctgtgcctgtcatgagctgtaattgcgtgaccatgaaatctgggatagctgtcatgataacgtattaatagaaggggcattggatggggagaggcaggatccacacgtggaaacaaccatgtcattctggacccaaatttccttctttgtaaaaagttgatttggaattacgtggtctgtaaggaacattgttcctttaacattctattattataggatgtcttatgcggcctatcaggcatgagacattgttgagattcccttgtctcaaaggtaatcacagca

SEQ ID NO: 36971 - DNA, 351 bp, Homo Sapiens
gcgaacaggacagcacgggagtcttaaaactcagaggagcaccacttttaccttctgctcttccctttttcctgcctggaacgcagaagtgatggctgaagctcctgaggctataagctctgtacgtaggagagtggtgaagaaaggagcttggttctgcaaggatgttgtagagctgccataccagtcctgcatggtattcctgtgcactactgttacgtgaacacacaaacacctaatttgtttaagccattaggccaggcctctattagccattcctgactgatacagaagacaaaaatggcatcacagactcctgaactccaaagacactgcctattctttcgtctg

SEQ ID NO: 36972 - DNA, 436 bp, Homo Sapiens
ggactggacagcagctcttccctgccggaaggaccaggccagtcgctgtccttttcatgctagagagtggttgtggttgctgacttagcagagaaggtgcttggctttccccttaactggagaaaaaagtttctaagaaccaggcctggttggcagcagacctagctttcttggggtggcagggaggctaaagcatacctcaggacagtcagtggtgggtccagcttcggctggaggttctttctactgaataacttctacgggctctgtcattagcaggatttgtataatttgaagcagagctgggcaactgcagagcaatggggaagccagcccagtgtggtggcaagaactgggcaacttgggaccagcctggctgtctcttgccagctgttgttatcagaaccaggctcttcacactcagatccttgggccc

SEQ ID NO: 36973 - DNA, 424 bp, Homo Sapiens
ctggcagcagggggcattttagaggcccaccctcagggcgcattctttttctcagggatgttccttgatgagaaaaagaattcagcaatatttctcccgtttgcttttgaaagaggagaaatatggctctgttctgcccagctcactggcagtcatagtttaaggttatctctcttgttccctgaacattgctgttatcctattcttttttcaaggtgcccagatttcatattgttcaaacacatatgttcttcaatttgtgcagttaacacaatcatcacagggtcctgaggcgacatacatcctcctcagtttatgagatgacaggattaagagattaaagtaaagacaggcataggaaatcacaagggtattgactggggaagtgataagtgtccatgaaatcttcacaatttatgttcag

SEQ ID NO: 36974 - DNA, 429 bp, Homo Sapiens
ggctgaagttctgacgatgcttctctctagctttatgtgaagatattcttttccaccgcaggcctgaaagcgctccaaatgtccacttggaggctctacgaaaagaatgtttcaaaactgctctatgaaaagcaatgttatactctgggagttgaacacaagcctcacaaaggagtttctgagaatgcttctgtttactttttacgtgaggatattcccgtttccaaagaagtcttcacagagttccacctatccatttgcagatgctagcaaaagagagtttcaaaactgctccatcaaaacgaatgttcaactctgtgagttgcatgcaatcaacacagagaagtttctgagaaggcttctgtctagattttacgtgaagatatagccgtttcgaacgaaggccacaaagtgctccaaatatccact

SEQ ID NO: 36975 - DNA, 392 bp, Homo Sapiens
cgggaccgcgtaacaggacaagcagctcatgatcctagactctgcccgacagcccagcctctatgaagtcttctggggcaactcctcactccttaacacccaatgcttatcttttgttagtaaagagtaacttgacctcggatttgtaccccttgcccaattgtaaggaataacaataaatagttaatgaatgaataaattggtgatttgggaggtggtacaaggaaaggaatatgagggaagtactatttatttagcacatttgaacaaccctgctgagtaggcatgatctctctcacttcacaattgaggaaactgagggtcagagaggattaataacttatccaaagtcacatagccaggaaggggcagagcaaggtttagaatccagg

SEQ ID NO: 36976 - DNA, 398 bp, Homo Sapiens
ccgcgactggacagcagacatttgaagggaaatgaagttaaggcctgcataactccctgtgtgttcttggagaaggaaagcaagcaaaatatgcaaggtgtgtaacgaagcaccagcaactcagtggtggaggagggattccagtgtatttggagaggagaccttaggtggccagggggccccttccttctgtctgtctgggcatctgttcacccatcattcactcttccattcaggtagtccttggtcacctggtgtatccaagatctctggctcctagtgcggtgacggtagactggataatgcagactagtggatgatttgacaagttaacttacatggttacggaaagaggcatcacttttatgactctggaaacccaaatcccttatttctaa

SEQ ID NO: 36977 - DNA, 381 bp, Homo Sapiens
cgaatcggacagcaaggttctgaagagaagaaaatatggtggggtgggatagagtgaggaaagatgatggttcaaaaccttgaaagactttcatatgggaagaaggcaaaatttgttcagtacgtagcgttagaggccaaaaatgccaaaaagaagttattatagggcagacacttttaactctaacccttctaagagttagaccctccaaatgcaatagtttaagtatcaatatccttgtgctgtaattgttccaaaagaggctaaaagaccatttattttagaaattggggcaagagtagagggattagattagttggcctcttgagtcctttctcattccaattctgattgtgtgatctaggaacttctcatttaaaa

SEQ ID NO: 36978 - DNA, 463 bp, Homo Sapiens
cccatagtgctgggatgcaggcgtgagccaccacactagggacgaagttttattatggccgaaggacacttactggagagggtctccaggaggtatgaatgacaaaaaaatttaactccttcaccgtcagaccgagagcatcaccccctgaacatggacttgcagaattccacagaagagaggagactggcctagtacagacagccccaggagctgagggcccaacaggctttctaccctggatgctgctcccatgccctgacatgtaggcccactacaatggtatacttgtttgctctttcctaattgagaaacaaacaaacaaaaaatcagacatactgtttgctcttgaatgcttgaaacacaaagacaggtgacaccaccttcctcctcaaaaggaacttgttaacttgtcaactttctacctgcacgctgcccagagacttatttggtctggcccttg

SEQ ID NO: 36979 - DNA, 381 bp, Homo Sapiens
tcggactgcagatgactgttaggtgttagggttaatttaataacccaggtggaattgattggagatagacttaccacttctgatcctttgattggatctagcctccagctcaatataccttcctcaattggcctacaagaagaaaaagatctgaagctcagcataatgctggctttagccagaagaatccagcctttaagccatctatatgtgtagccatgaaggaccttctaatatgccttgtgagcccttatggggccacctcacagccacaatttatgcccacgtgtcagcctcacagactcaggagctgtttctattcattgtaaagcagaccagatgacatttcaggatgaaagaaatgtaagtcatcattacata

SEQ ID NO: 36980 - DNA, 355 bp, Homo Sapiens
cgataggacagcagtaaggggatgggtcattcgtggcgaaggtgtggcgcacctaactggagaggtgaggaaagccctgttgagaaagagacagacttctgagccaagacttgaaagagggccgggagggagcaatgcagatgagtatctaggttctggaagagcaaccccagcagagaggacggctgtgcaaaggccctgaggcaagcgcataccagatatggggctggagaggaggaatgaggaggagagctgtagaaagacagggcctcaggggggctctggactactgtatgtgtcattataagacaggcgaaggtaataagtactaaaaacgcagcaccttctaatgact

SEQ ID NO: 36981 - DNA, 431 bp, Homo Sapiens
tcacagcttcctgatgttgtctacttaacaaagcagaacagatgaggcaaaccgtaatataagaaaaatccagatttctcaggaggtaattaatcatattacaaaaggcttcactgttgggtttctttaaagtagcttaccttcctaatgcttttaaaatataatttgatgtagaaaatacatttgttgcataaatgaggtatatttgtgcttatatggctgcaatgggcctactcatctctaatccatctaatatcattctgggttcctggttttcagcaaacctgtcctggacttattaaagacaaggtcccagattagtatcttctttctgataaaaacacactcaaagacaaagagaacggtttctgcaaccccaaagcatttccaccaatattcttcagacgtcctcaaatttgccctgggtatcc

SEQ ID NO: 36982 - DNA, 474 bp, Homo Sapiens
cgactgagcagtggaaaaagaagacatggtcgattatgaatactagccataacttagagtagtgatgtgctgatatgcaagccagattgctgttatttgtattacaggctatgacaaggaaggaaatcacagacgcacagaataaatgttgagtacagatttggaaatcttggttttatttattttgtttaactttcatttcaacctgtgtcaagataggtgattattgatctagaatccctttctggacttctagtctaaataatcctcatcataaaataaatcttttaagtgtttctttttcctaaatttctgagtatttttttcttcttgcccctaagaacatcgtttctttttaagaatcagaactcaaagcatctggtgtgtaatgggacagcccttctcttgtacttacagtcagtttcctgctgtagatgtcactgtaatataggtaggtacaggaatgctttagta

SEQ ID NO: 36983 - DNA, 443 bp, Homo Sapiens
taactgacaacagatacaacgcacacaatcaccaaatgtcagagatggggacggttgctatggaggacagacaagacacaacacacacaatcactgatgtcaggattggggatggttgctacagaccaagaagagatgaagagggtgcaggcttgggggcaggttcagtgacagcagagtggagtgtggatcattgcaatgacgagagagcctctttaggccactctgttgacctcgaacattcccccaaggagactacacactgtcaatgtgttcaaaaacagagatgacggctgttgcatggaacagacatacacagactcagcgaacccccgggggcccctcgaaatgtgtttgtcaggctgactccacgcaggccacaggcatggagcaaacaaaagctccagcgaataggacaagcacgctgaagggaaaagggggtt

SEQ ID NO: 36984 - DNA, 419 bp, Homo Sapiens
acagcacgggtcagtgatactaaccgtgtggaaatagaactcctccagattacagggcacctgagaatttcttactgactttgtttaataattcaaaaacacatcaaatcaaacttaatcagaggcaaaagctgtctctggagccttcttcgtgcttcctggagtcaagctcttacagaatcacggcagcaacccctccctagctcacgaaggaagctggaggactccacagctgcttcaggaaacagactgtccccagggaacccttcagagatcttgggaccagacaggatgtacctggactcctggaattccctctccagcctccaggtcccgtgaggatgtgagctggagcagtacgggcttccctgatccttcctgtgtccaggtgagcagcctcctggcacagagctgccctc

SEQ ID NO: 36985 - DNA, 435 bp, Homo Sapiens
caggatggcgtgctttatacaaagaggaataattttgtattttacctcaaggtgcttatcaagaaagccaaaatcataaaaagacagacttgtggaattttggcggcttcctcttgaaactagaacaaaaactctgttctaggtacttgagtaggttgttctgaggggcatgtgggtatacatgtaagttcctggtgttcccatattagatattactgactctcagtccagttctgtttgcatcccattctgcggcatcccacagttatatggtgctgtgaattattgcactggggttgttagggtagagaacactgaaacaatgagtcatccttgcctttcacttttcctaaattgaccacaagctaatgtccccaactccgtatttttcccttacagatcattctgagtattgctgctgtaacaatttcctta

SEQ ID NO: 36986 - DNA, 389 bp, Homo Sapiens
cacttgcgcttctcatgccctgtactcactgtaaaacctggcatagggctagtccagcagcctcctctcacactcccaccccagccttctggcacagccatcagaccccctctccagtgaccatcacaacaggatcaagctttctaacctcagctgagcctcggttgctgcttgatagacttttggtgtcctgctccattttctctcccagtacccataacagcaattccaaaccttaagcatggcaatgtcctctccactctccacagagaaacctacctgcttctgaggagagacctccagagagaagcatcagcttccccagccccacacctactagcatgcttgcacccagcccatctttgttctcctcactccaggtagacggg

SEQ ID NO: 36987 - DNA, 350 bp, Homo Sapiens
ccactatcagtgtttagttggaggcctgttttctcatctagtaagaataggacataatgttgtattaccaaactccttttctactaatattaaaaccacatttcatctaatctaagatgccacgtgactatgagagatatgttcatataacagcaaagaagatgacattttaaaatgtgccatcagttaaattatccccaaacaccaaagatatccccatgatgcatagattggtgaactagactcttgtggctttgaaatccattcagatgaatttggcagcttctcctgcccttggttgtgttgcttggcatgaaataggccatcctttttgaatgttctcaataaca

SEQ ID NO: 36988 - DNA, 387 bp, Homo Sapiens
ttaaccaattccaaaggatgggcaattacatgaggcctatagttatgaaatgattgactagaaaactaaatacagcctgccaaatgccgcttgtttaagaaatcattttccgtatgctgacatttcacaagcatcacatgaaaatgattttactaggcaaatatatacacacgtatgtatctgactccagagtagaaaaagaaaatccaaaccaccaaactctttttaaaagtctatttcattttgacatcactttccattttgagcagaaaaacaggacatgttgtcccttgataaatcaaaacctcaataggcaaagtcaggaagagagacttaaaaagcagctttagaaaaaatgtcactgtttatatttctatcaaaacaaca

SEQ ID NO: 36989 - DNA, 423 bp, Homo Sapiens
caggacagcagactttgtgacttatgggaagtaaagtcaaagaagtggaagatgatagccagatgtctgatttggtgagaggaatgaatgccttcagcaagacaggaagtggaggagtggagcaggttgggagttaaggaaagaaggttgaactccattatgattatgctgggtttttaatgcctaagaaacatcaaaaggaaagatctctcaggcaacccagcattggagtcaaatgtttatgagagttctggattgaagaaaactagaaactattttgacaaagcatggagatggtaactgaggccattggagtgagtgaggtcacccagaagagtgggtagagctggaagagaaagaagcctaagaaagaacatttaaagatgggcagaagaaagggaataggaaacaaagaataagcaa

SEQ ID NO: 36990 - DNA, 384 bp, Homo Sapiens
cgatttgaactgcgggagcaggttttaacgagaggtaggaatggatccgggcttgcgctttggagctagctactatttccctcggagaatcggctgctttcagcagctgtccctgggccagagtccagtctggtgattaccattatcagactattctcacagcacctataaaacttcattatacttatgtacctgtccatctttctattagactcctggtagacaaggatcgtatgtatttctcttggtactgaagtgtccaatataatgccccagtagttgctcaaagaattatctgtggaacacatcaacatccttatttaatataccggccctggagttagaacaacaactaattataaccccagtcttgcgtcttactag

SEQ ID NO: 36991 - DNA, 406 bp, Homo Sapiens
gaggagtaggtctctgaggaggaggaagcagtgaaacggggcttgacacatgggctgagaacagctgaggcctgaacataaggaacagctggagtggaggggacacagaggaaccctcactatcatgcatgccaacccaaccactgcctgccctttcccttctggatttagctcgtgtctccaggctcctagtcctgtaatccagggacccatcagcgagggattcagggaagcagaggcagctctccaggaaggaggaaaatccctgcctcttccagagagactcccccattgctgtctcttgtgtgtgtcatgcacaaggaaggcttggttgtgtgccgggataaggggcacaagggcctcgggtgtggccagagaccccatgcttaagcttttatggtatagg

SEQ ID NO: 36992 - DNA, 401 bp, Homo Sapiens
gtgcacatgataaggcaggtaggttgagctgcatggagaaggaggactgctatgggatgggagtcagcgagggcttcctggaggaggaggcctggcacatcgtggcaggtaatgcatggggcaagaactagcaaaagccaaggccctggggcggggaggagcctggtatgttcaaggggcagaagggaggctgaagcagagtgatcaagcggacagggcaggcagagcctcaaatcccagactgaggaacatggtgaacgaggacacttcgggggtccacacataaagacggagacagagactcagggcaggaaagtcacatgccctgggacaccccagtaaacagagccaaactcaaacctcagcctgtctgcagctgacataggatgaagttgaaggac

SEQ ID NO: 36993 - DNA, 417 bp, Homo Sapiens
gaaaaagctattaccatgaatcgagattcacgtggcgcgacctgttacactcctggtatactcacctgacctgagaggcccggttcacgagtgtgagctatcgaaccagcctggtgaattctcgcgaggcccagtacacttgtatacattcctcagcactagaaaagaataggtaggttggtccttgactgaggagaaagacagaatatgctgaaaaacagctgcaacattggggcacactgagaaccgacccaactctgctaagagctctctccatcgtctcctgagcgatcctggcttcagatctttctgtaattcagggcaaaaattattatatatgagaaaagttataagcttggtggtcttcaaagggtggactctggacacaaactgcccgagtttgaatcttggctccac

SEQ ID NO: 36994 - DNA, 473 bp, Homo Sapiens
acagcgtattaccattacttaccggtttactgggcgcgtctgtctttgatcccggcacaacagctgtagaccctactctgggtgatgtacgagtggttcctctttgctccgtaatagagttcttacatgtgctggtcagtgacacctacatcattggacgaggaaagccctagacatggcgcatccactgctccccttcctcaggcagatgtgagtttcaggactctcactacctacctacatcaagagaccaatgggattgacatctagtagaattcttctctttctgctccaccatccccttcaccaaacccttaacaaaagttctgttgttggaagaaacttggtccttatagtagcttatttcttcactcaaaggagtatttggtgactatagtcacctttaggggaaaactagaagtcagtctgagtttcccattagttgtgataatctctctttgggaaagatgatt

SEQ ID NO: 36995 - DNA, 502 bp, Homo Sapiens
ggatttctcgctccaaagttcttaacaactgttcccttacggtacttgttgactatcggtctcgctgccggtatatctttggttgaaaattttccagacatttaaacctggggttagtggataggattcagggagtctgaaaatgtggctgtgaaaaaagtgacatgattatttacatgaactctaactgataagttaaagagtttcgtccagttaccaaggtagagaacaaaccacaggtggtttttagcagaatctgtggctttgtcatcagtcaaatcattggtattttcacatcacattgcagttgttgcaggtatccccaaatactagttatcctcatccctaccttgaaattatggtggttattaggtgtgctgctggatcttgttatttaatgcattaatacagaagcattaattgataaatcacaggttgcagtattatcgatatattttatagttctttttattctatttttatgaatttaaaaacatcgtga

SEQ ID NO: 36996 - DNA, 510 bp, Homo Sapiens
gggtagggcgcgctatacacccgggaacagtttccacggttgaatatggacttccctgtgagccactcctctctgcagtacaagacagtatctaccagcacactgaataaatatcacccagccttctgtggcgctctactggtttcctgactgcagctacagacctcacctcaacattcactgtttccagttcctcagcaatgtccacaagtgtcactccatctgcccccagcatccagaataaagaaatctcaacacttgtgagtacaaccactaccaccagtcccactgagagaatgactctcacaagtacagagaataccccgacaagttacatcctgaccacctgtccagtgacatattcattttccccttccacgtctgccagcagtgactggaccactgacacagagagcatctcctcagctccagccatcaccagtacactccacacaacagctgaatccaccctggcacccactaccaccaactcattcacaacatccgcaa

SEQ ID NO: 36997 - DNA, 396 bp, Homo Sapiens
ggtcctgtcgctatttactcccagatcgagcttttccctgccctgtggttgtacgggctatgggatgtgagccgctggccttttctgatggtgtacatctccatagacatgtgtttctctcatttttctccccctttcttatggccctgccctcttttctttttgtgtctaaaacagaacccagtgattggccgcttcttccacgttgtgagttaatagtgtgcaggtttttctaatttgtagagaaatcccactgataaagcagcttcctgaaatatcttctttcccctccattgagctacatacattgtggccatcaagggtggtctttgggttcagatcactcagttaagttatatttatgtttctgaggaaatttcccttacctgtttctat

SEQ ID NO: 36998 - DNA, 353 bp, Homo Sapiens
gcactgacagttgttgcattcttcatatttgtaatagcttttgaacaaggggctccatgttttcatttctgctaggcctctcaagtcatgtacctggtccagttggcaccaataagaatatcaaactactgtccaggtggtcacgcaaggaggtgatgcacaagcctaatttgggcagatatggagtgttcaagaaaggacctggggttggtctagatattatttgggaatctgggtggagatactatttgggaatcttggtggagtcgaagaaaaaacacagatggagaaatatgtagtattgcataaatttgtgactctaagctcatctgtcagtaaactgttggggacag

SEQ ID NO: 36999 - DNA, 456 bp, Homo Sapiens
cggtcggacctgctgtgctcctcctcggcaagtgtccacgaaaccagtggttgactgcagcacaaaaaccagcactctgaggagcaatttggcttttcattcaccttcaaactaggaccgcataccctgacctcaatctatttctaatcatggtgtcttaggaagcttagagatccagctaacttcatgaggccactcacagtatgtctctcccgtgtcagctcaaatattcaatttcaagctcctatctgacccgtgctgcttaactgagagccgttcatcttcttcatgtttaggaaactgcaagctcagtataaatgtgccatcctctggtgtctcttaaattctgtctggaagaacgccacggggaaagggtttagcatatctccttcagcatttgggagctcagaattcacagggagattaacacatatgctgtaagtcacgaggaggaga

SEQ ID NO: 37000 - DNA, 424 bp, Homo Sapiens
agtggatctttctaaaactcaaatctgaccatgtcactttcccctgcaggagccattcaatgcctccccagtactttcaagataaagtcaaaactcttaagcacagaactggaggcccttgggaatctgggtcctctagcttcatctctcactattcctcactggtccagtcatgctccacaggcctttgtacacactgctccttttatctggaatgcccttccacacttactcactcaccctttaagattaatcctgtcacctctcctaggatgcctttccagtcacctattctaccatatacacatatataattacatacatagatcttccctggctcccacactgtcctgtgcttcctgtattacggtactgatgaactgcattctattaattacccattttcactgtcacctctttcatt

SEQ ID NO: 37001 - DNA, 403 bp, Homo Sapiens
tgttctctcctcgcaagctctctgacgattccacacaacacaagagttagcagtcatccttcgactgatcctctgccctgctttggctcacttctcacataaagtctcattgaagagtcttccaaaataaagagggctgcatctgctttttctcagctctgccactacttcccaagggcaagtcatcaccatttctggcccatattactgcgcgaaagcagaaaggtgttgataataaagacagtaacagaaggtggtcatcttaactcaggaaagggtcttcttcaggattccagagaactcagtgtcctcagtgttggaaggcatgaatgaatgaaggatgaactgtcttttgaagaaatgacagaatgaagacagtaaagaatatgacaacaatggcagc

SEQ ID NO: 37002 - DNA, 413 bp, Homo Sapiens
cggtcggtacctgctgttctctctcgctgtacccacagcactgtgggcacgcggacatactgcctgttcttgccttttgctcctttcctcccccagctcccacgcgcttgctggcttccgtggcaggccctagcccacctccttctattacgtggacatctgctcctaaagctgcttttcagtggctgcaggcaatgccctaacttctagccatttttctaaatgaaaacttgattccagccggctgtcactgtgaaagtgctctaggacggtccagataaccagattctagcccttcccgcgactcattgggtgactttggacaaatttcctcaccttgggccctcctttctatgctagcttttgaaaggaagcatgcagacagggccatccttcgaggaggagaagcagca

SEQ ID NO: 37003 - DNA, 368 bp, Homo Sapiens
gtagcttctccggccgcccgccaacctcgtgccaggcacctcaccatgccggatgttagagcttgccggatggcgcagttgcccgtggtgggttgccagtgtgcccaggcagcattccgaggatgttacgttgggcaggggaattcagagtctggcagaggaggccctggggtcgcacgcggatctcctggctgctggtttggtaaggtccaatgtccgggggtaaaggatctaggccgtgtggtgagggttccggcagcttgtcctccgggtggcagaatctgatatcacggaggagggtgtgctggtcgggacttgttccctgttcccggagggagcgctttgggaactgacggttcagtgctgag

SEQ ID NO: 37004 - DNA, 425 bp, Homo Sapiens
aaagtacagaggcgatactcatctttattaaaattttatcaatcttttaacacagatgaaactttggatttgcttttgcttctcaggaatagagcattcattctcagttcaggcttctacagcttaaaacttgtttctgacataacttgatcagtttataaagtcccagagctttaaattacaatgcaatctgagatattcccacagcaataacagcgattacatttgttcacagcacttacctttatatttcattaagcttccaaatactgaataaaggtaagacaaaccaagaaaagagacttctattaaccctgacatcagcaaattgtctcaaattatagtgtaccttctatttgtattctagacatattgaatggtttttgtgagatacatattgtacctcacctgaggttaggagaaaa

SEQ ID NO: 37005 - DNA, 402 bp, Homo Sapiens
ccagtgcatgtcctaggtgcagatttgttatctcaaacatcaccctgcaggtgcaccaagatttcctaatgttagtcagagatctcatctccagaatttgtttttgaagacccgtttgaccagggaaagcaacagggaaaaagtagcctttgaacctggcagaatgaataagagttcactgcagaaaagcagtctgcaagaacagaatgatgccgtaaggaagcctccttgggaaaccaccttgaattggttaacaaagttgctgagagctgagcattgccttggtctgttgtacagccatctttataaggaaaaagaagcagtcatggactaaacacagagcaaactgaaaggcctggagaaataactctccctcccccactttttctttctgtgttcaat

SEQ ID NO: 37006 - DNA, 356 bp, Homo Sapiens
tgactattaatcttaaaaagggcgagaaaggaaagattaggtcagatcagaaagtaaaaatttgccctcccattcatcaggctaggaagtcagacacagatgaaacattaaaaagaaacaacgtttcttcaaagattaggtcagatcggaaagtaaaaaatctgccctcccattcatcaggctaggaagccagacacagatgaaacgttaaaaagaaataacgtttccttaagtgactccttgcaattataaatgtgtcataaggatacccttcgtgggtgactacttattcttactgagaaaaattgttttctaaaaatcacagaccatcagaaactttgttgtttgccattgtg

SEQ ID NO: 37007 - DNA, 429 bp, Homo Sapiens
agtgctgcgattacagtacatgagcatcacacccagcctactattcctacttttgtaaatgaggaaactgagactcagagatggaaggggatcggcatctctgtgtaggtgagcagcacctgtccagactaaccagcccctttggccaagaacaaagtgttttctgggccaaaagccattctgcccaagggagatggatctcataaaccaatttagtgctaaagttgtgactaaaaaattcttgataagatttttagataactttataaaacatatatgtaatatttttcaagctgttttaaggtattttgtaaattggtctcctctatttctgttcctttttagcatgcttttcttaaatgacatgattatctagaaccccttatcagcaagaactaacattgtttagcacattcctagtaactttcc

SEQ ID NO: 37008 - DNA, 401 bp, Homo Sapiens
aagtgactctctactctattccattcatgctccccaggacataccctgacctttgtcattccctccacaattacatatttacctccacaatcacaaatttagacatctcctatcctaccaatcccctgtccttgccaaaagcttcccaccccaggaatcattaattctttcacctgttaactgtaatccacagattctcccattttcttcccaactaccagccctcttatcttcactggcttcttactcagcttaagatttaagagccatcaccatcctcactctcaagcaatcctctgcaaatcccctgtcctctcccctccaaaatgcccatctagcaaagctaccacaggaagcatcattcacatttgctcaacttggacttgagggtaccagtaggt

SEQ ID NO: 37009 - DNA, 395 bp, Homo Sapiens
atatacaaacattactttgcgcctactgttcaccacaactactcgtcaaggttagccatgactttaatgttcctaaatccaatggtcaattcgtagtcccctcacttgacctaggcagtgaccattctctcccactttcacacatgttcacttgacttccaggccatactcttagtttccattttacctcactgcctcactcgttatcatcttccttgcctcgttcctcaactctctatgctagagtacttcagggatcagtccttgatcctctccttttctctatacttactcctttgagggtttatctagtctcacagatttaaatatctttgatatgctgacaactctctaattatctaattcaccctgcccccaatccaagtccagacctg

SEQ ID NO: 37010 - DNA, 403 bp, Homo Sapiens
ttctcaaaggctgagatattggcgtgaaccactgtggcctgctgtggcttggttagcttttaagcggtgattttgtcatatgctacctgaaggtacgcacttgatggttgctttctctattgactttttctgtattgctagcaggacacttagggtgtgaaatgattcacaaggaaatgtgttacccatgttttcatgtatccaaatgttggaattgaaccactttgttatatacaagttctttccacgtcatgtgcaacatatgactgattcgtcttaagcaatgctctatgatgttatgtaggaatgcgtctaacatttttagctatacttatgctgcctttgattgaaatttagggtacttttttcatttttacatgttttacatgtatgagaagctgtg

SEQ ID NO: 37011 - DNA, 373 bp, Homo Sapiens
ccccggtcgccacagcttctctctgtgccacaagaactgctgagtttgtagttgtgccccctcattgttctggtggaggtgctaagtccagacaactcccagtggcagaagtgaggtcaggcctggcccatccaccagccatagtgatgtttgtggattgactgctagtgacaaaatgctcttccactcagcctgcccaggggcaccagcacacacgttctccagcttcccttgtcccagctaagtgagcagagtgtgcagaagtgcgttgcagaagcacctgcagggactggctttggacacattctttgggcatctccattagcacatgggagtgtggacaccagccacagctggccactgcacggctgaa

SEQ ID NO: 37012 - DNA, 506 bp, Homo Sapiens
cattgtgtatcacgaaagtatgagtcctgtgagtattcctagcaaataaaatctggaaggggtcttgaggactccagcattcatttattatgatttctaaaattgtgtacgtaggtccataaaagtccatgttgattttcaggccaagggtctgtcagtcactgtacttattagctttctgttgttgtgtaaccaattaccacacacttagtggcttaaaacagcacacacttattatctcacagtttctgttggtcagatatctgtgcgtggcttaaccagatcttctgcttagggtctcacaggctgaaatcaagatgtcagctggactgcattcccatctggatgctatgcatctacgctcactcgggttatgggaagaattcacttacggctgtgtacggagggccttggcatcttcccggctgtccactggaggctgtcctcaggtcccagaggccactttggagtcactaccaggagtccctgtccataggcatttcaca

SEQ ID NO: 37013 - DNA, 397 bp, Homo Sapiens
tgcattgtggttcagaggagcttaaggaagggttgctctgtggtgtgggcagatggaagtcactgggcaggagcaagtgtccaaggcctggtggcagggaggagatgatgattgtggacctagcgagaaagtcagcatctgtgtggtggggacagagccactaccagaaaccagtcccgagccaagggagcccagaagagacccctcccctctcttcccatgggctgggccaactggaagcatctgcaggggagcagaggggatgtggtgcagcccttagcatcccctgggcactgagcaagcagagaagggcagaaatggaggcagggttggggtaagcagcgtcctgggaacagccagccgagggtgtggtaggggggttgcagcttgttccaca

SEQ ID NO: 37014 - DNA, 474 bp, Homo Sapiens
aggatacgcgatcacgtgcattgtgggatttaaaagattattttagggcagttttaggtttacagcaaaattgagcagaaaatacagagttcccatataccctctgccctcacacatgcacagcctcccccattatcaacgtcccccatcagagttctacatttatcacaatcaatcaacctacattgacacaccattatcacccaaagttttccattggcttttaccttgtgcatgattcttcctctgtcattgaagtagtatacaggtgaatttaatgcttcagaaagtatgtaacagtcattaaaaattgaatttagtggaagacacacttctcctttctcctgataaacaaagccttctggaattcatttacagggttccactttccttgatgctagaaagacatgcctgacatagaacctctgttatctattaagtccatagaacctacgaccaccatggcacgtggat

SEQ ID NO: 37015 - DNA, 484 bp, Homo Sapiens
atcacgtgcattgtgtacataaaataccagccaggatacccgtaggaaggtatcttatctcattattctatcgctcctgaacacttgggatctgaatcagtatttcagcatgttattagctccagtcttacactgcaacacattgctttagggactttttgcacacatttttttgaacccccaaaacccgaagcaaagtgctaacacatggcgtttccactaacagttgacttgaatccattatcatccttgcaataatgtacaagaggaaactccctaatagttaaaaatcataacgtcccactggacatctcaggcattcatttctgtatctacagcctggaaacaggaaggtccagaagtcaacagctggacccaagagtgagcctggtcatccttcccttcacagcatcccaacaaacacagaatacatggttaaagttaacatgaattccactcttatcaaacataggccaaggcttct

SEQ ID NO: 37016 - DNA, 454 bp, Homo Sapiens
cacaggatctcaatcacgtgcattgtggagctggtagtattggccatgaccataccttaaagtttcatcacctatcctctgggaccatttctttccttaatatatttaaatcaccaaagtagcttggacaaaacaggtgaggcctgtctgaaatatgctgaagcccgtgctgctttgtattaactcattaaaacaaggaacctggatcacctgcacctgatctgcattctagtctggctttagaaacacattagacttaaattcaaacgcaccagaaatgaaaataattgatatataattgtttttgtatagtgaagtagaactttctgagtttttgaaatttccttgtttctcaattattcaggcattattcatgcattttattatagcgtaagttaaactgaaataggcagttagatactccattctgtaactctgaacacaatggcacgtg

SEQ ID NO: 37017 - DNA, 459 bp, Homo Sapiens
gcgatcccgtatcacggtgcattgtggaatgggccaaaatgtattcctgctttgtgctcagaaggaaaatgaagcagatgagcatgtaacagcatctctgccacaatagtattttccccattttacagatgatacagagaggtcctttctgaacaaagggcataaaactacttggtagagatcatagaacctaggttaccttagatctgcgtattatgtgctcacgcgtctaaggacacattgaagtaattgaaaggtatttagattgtacatctagtagcattgctttctttcacattgggcattaaatgtcttcatctcttcatgtctgttattaatagactttaaatagattattaattgacttacctcataaggaatagtcaactttaaaattttttcagtggtaattgccattttaagtaaagatgacacaatggcacgtgatccacgtgccat

SEQ ID NO: 37018 - DNA, 444 bp, Homo Sapiens
ttctaattagtgactgatgtatgtactgaatgatggtcactgccatgagtgaagttgagtccatccttacttgtcactgtgggaaagataaagcagcctgggtctttgctaaggaaataattgtacctgaaagaagcaaaagcaggctatccaaaggtgctactgtgagcatccatgaagaaggaacagttaccatctctcagctcctacacacctggtctctgatgggcccctgactgctgcactctctcagtggggcaaggttggagatgggctaaggatctgtatagtagtagcaggtctcagtggctttctattcgctcaggttcccttgttctgtggtcctggtcgggagcaggccctggagctgtggatgaagccacttgagtggcagtagccggcccccctttcctctgccttccctttgcacaatggcacgtggat

SEQ ID NO: 37019 - DNA, 510 bp, Homo Sapiens
gatcacgtgcattgtgccagcctagaaatacgtgttaaaaccactgagagaacttggcataaacgtctgttgcctttgccgtctctggccgtggaattagtccagctggtcaacacaggggcactggaacctacctctgggggagcttcttcaaatatggcttgcaggagattccggctcagcagatgtaggtggagcccccaaatttgcatttctaactattgcagggaccccactttgagaatcactggtcaacgtcaaccctctctataagcctcataagagatggcacagacttagtgcccaagacaacagcattcttcctgtctatcacatgggggataagaatgtggacatgtttggggccatattattctgtctcccacatgggattaggacgtggacatctttggggccattatcctgtatacctcatggggactaggacgtggacatctttggggacattatactgactaccacatggggataaggacggtggaaatctat

SEQ ID NO: 37020 - DNA, 356 bp, Homo Sapiens
gctgggtgactctagcaggatcctcatccacgtgcattgtggatccacgtgcatagtgtgaaatgcctatggacaactactctgtctaccacagagccttcccatgccaagtatcttgctcagcaccgaagctgtctaggaaaggaggtttggaacctttttcaggcccaaaggaaacaacgctggagaggaagttgtggggagctgactccctctgtgaacccccagccccatccatatatgcaaggagaaggacttgcaggaaacggtggctggctgagtttctctgtcaggctggttggaaggactgggagccttctccacaaggagtaaccgctgcacaatggcacgtggat

SEQ ID NO: 37021 - DNA, 422 bp, Homo Sapiens
tatctccccttgtacagagggtgcagttggggcccagaatgatgttatcgcttgcaaacgtcacatagctagttagtgaccatacagggactagacctgagatttccctgaccctcaggacttgcagtgactgccagattctggtggctcccagtgggctgctccccagaccaccttcactacagcccagacttttgatgagaattggactacagagtgggttaagctccggatcaagtccagatggtagcctccactggttgtagcttggggccagacctatcttttcagcagtaatttagaagaagcccccaggaaaatccccgttgccagtttcctttgcacccacctcatctttttgctggcagggaagtcaggaggttagaaaccaatggcacgtggatccaccatggcacgtggat

SEQ ID NO: 37022 - DNA, 374 bp, Homo Sapiens
tggtgactcaaggatctgatcacgtgcattgtggcagcatggttgttaggtttataatgttatatcactgctcacaaacagaatttgttcttttgttatggagcaggttcagtaataagagttggtgagtattattcagaagagaagctgcctcttgggttgagtaattaataaagtgattcattgggaggtagttttttgtctgtaagaatctctaaggaatgatcacaatgataagttttaggacatcccgttttaaaaactggactcttacaaactttgttatctagatagcattaggtataactaaattggggagacaaaagtgaaaaacgattaaccatataagggtggtttcacaatggcacgtggat

SEQ ID NO: 37023 - DNA, 363 bp, Homo Sapiens
gtacacaggtaataacttctgctagctgagcctgggaactgttggaaatacagatggttggtgtctcccatttgtctcttcttcttacacttaagttcctttaccatttaagacttataaagtttcaccaacctccgatgagtgattctcagaatcactgaacatataattgaaaacactttataaccccaaagagcaacaggtagagaagttaatataaagcgtgccatgttacacctagagactaacaaacatgaaccactggaatggagttttcttttcagaacagggccagcagggacaagggaggaagttagctcctctcctgccatcgaatattaaacgcgcgcgcgcccgcgcaca

SEQ ID NO: 37024 - DNA, 395 bp, Homo Sapiens
gtcgactctagcaggatctacaaggacatctggaaggagtccaccatacctgtgtgctttcccacagttctagagtttaccaggctcagaatttcagttttattattaaaatccctctggctcctatttgcctttttgaaggtgcctgttccagactacaagtcagctaaagccaaaagccacaggggcagagcaagacccgaataagcgcacgtcatccagggtgagcgaggcctactgccccatttaagctgccacctcagtgaccagcaattcccctgggaggaactggggacttggctaatggcaacccctggtccctggacacagggctttcttcccaggaacaaaaggcaggtgagatacaaccagcacccgcacaatggcacgtggat

SEQ ID NO: 37025 - DNA, 446 bp, Homo Sapiens
gatcacgtgcattgtggagagtcagatatctgttactatccaggtgaatgaaccctgggttttttgggtggtaacaggacctgaggggctgcagagcctacctgtgtaaaggagatagctactactcaaccccagcccatagctagcacgtaaaaattcaggcttcgtgttgacggagtatctaaatgatctagaagtccagaatttttattttcaaatatccgagttttcagctgttggcaactgtggtcttatgatacatactggtttttgtctaaggttcctggctcacaactcccatagcccttgttacagtcttttgttataatgttgggtgtgtcaggccttaggagccagcctctggaagcagaatctctcgaccttctctagtcctcctttcacctgccccaaggcaccactcttatcgcccacaatggcacgtggat

SEQ ID NO: 37026 - DNA, 355 bp, Homo Sapiens
ctgacctagaggacccgatcacgtgcattgtgataacatgctgcccctcccacacctactgtccatcagaattcagtcctcttttctctaaacgaaggctttctgcacaaaaggtaaaagaaatccaactgtttggcccatttaaaatcaagtcactgaagtttctctgagctcaatcacactcttcatctctgaggttcatctctgttcttaccacatgataacgtgaaaaaatagtttcttaaagagctggccccatcatctccagaaatgatgttagggaaggtccgtggaaggcacaggcctgcagtactgaaggcagaggcataactgccaaccacaatggcacgtggat

SEQ ID NO: 37027 - DNA, 443 bp, Homo Sapiens
atctcaggactgaatcacgtgcattgtgtggctgcagcagttactagagagcctagaaagcttttcctaaagagttaattcagttcggtgagttcagtgagcagtatgggctgagagagccctcaaaattcaacgtagcactggctctcccagcagcaggcattgttcaggtgagacagaatggttgcctgaggaagtagtgtgctggggagactgcagggattaaggtcatcctcttccagattttcattaagtctgaaatgctctccttggctccacaagagatcctcttgctattcctactgtggtgtacggacagcttatggtttacttcttacagtttcctgtttcagataaggggaagcatggccaagatggttctgtgagtcaggcccagaagggtaatggggttgttttcttgggaggcacaatggcacgtggat

SEQ ID NO: 37028 - DNA, 532 bp, Homo Sapiens
aggatctcgatacagtgcattgtgctttactgcacagatcatctcatcacccaggtactaagcccagcatccgcagctattcttcctgctgctctccttcccctcccccatgccatgaaacaggtgtccagtgtgtgttgttctcctgatgtgtccatgtgttctcattgatctgcttctgctaataagttagaataataataggtggtgtttggttttctgttcctgcattagtttgctgggagtaatggcttcaaattccaaccatgtccctgcaaaggacatcatctcattacattttatggcttcatagtgttccatggtgtatgtgtaccacattttctttatccagtatatcattgatgggcatgtagattgattacatgacgttgctattgtaaatattgctgcaatgaacatatgtatacatgtttatttaaaatagatttatattcctttgggtgtatgcccagtaatagtattgctgggtcaatggtatttctgcttctaggtctttgaggaatctccacat

SEQ ID NO: 37029 - DNA, 423 bp, Homo Sapiens
tatacccacaatctcattatctcccattattctgttccattaaacaatagctctgcttttctctgcccatcagcccctgataacctctattctactttgtctttgaatttgtctatcctaggtagctcataagtgaaatcatgcaatatttgtcctgtgtctgacttattatactaagcatgttttcaaagtttacccacgtcatagcatgtgttagaatttccttcctttgtatgtatatactacatattgtttatgcactcatctgtcaacaggcgcttggttggctattatgaatgctgttataaaggtactgtacaaacatctgtttcaaaccctgtttttgattcttttagatatatgcctaagagaggactgctgggtctatatagtagtcctatgttgtaacctttcgagaaactg

SEQ ID NO: 37030 - DNA, 370 bp, Homo Sapiens
tcgggcgactctagacgatcccgtatcacgtgcattgtgggcagagaatcttgtttaagggttgagtgtactgggtctggtacatggtatgaggtacatagtatcaggtgtacatggctctggtgcatagtcaggcttgcctgtgtatacatgaatgtacacgattatctggtaattagtagtagaagagattccaaatgccttattttttcaacgacactgcatggtgtgcattaattgaggggcaggtggtaaaatcaacatgtaggcagctgtgtgtcctatgacaaaaggcttccataactggtttctgagttaatgggaattggaaatactgtgtctggcttaggatactttgtcactcagtgta

SEQ ID NO: 37031 - DNA, 436 bp, Homo Sapiens
tgggtcactctaaggatcccgatcacgtgcattgtggatccacgtgcattgtgagggcaattccattagccagtgggaggtaaaagtttgtaagaaataccatgccagggactggagaaagacccagatgtcattgtttctgggtggagatcctgtgtgagcggtggtggtatatcctaagagggggcataccactggatgattaagggtggtcccacaaggcctggggtgaagaaagacctgaatggataataccattaatagctgttggggaaaggaccagaaaaggtgaaaaagtgaaaccttggactggatggaggggacatcgctgggcttttaggaggtaccctgactggtactctgatcacttgtttctttttgcgggggactctgaggtgggatgaaaagctatagtactgcacaatggcacgtggat

SEQ ID NO: 37032 - DNA, 522 bp, Homo Sapiens
atctaagatctgatcacgtgcatggtgtctgggatggtcatgctgtggggtgccacctcccacggctaggagtgggcacatagattgactgggcaactggatctgtccccagagttttggatggagagaggccagagggaaaagcagctccgattcgttccttctgtgcttgtgcctgagaaaattgcgctgtgccctcgcacctgcctcggttcctgtctgtttctgaccctggttcttcttccctgtgtaggcttctccgggtctgttaatctcccaatacttgctaacattacaggtctgtttcccgtgtgtcttctctgagccttgttcacattgatgtgcctgacgaatgtctaacatattatggcatgcagcagaagggtgatctagcagacctcacaaacctagagttgtccaggtcagacaggaagataaatagcggtggctgtctgcagtgttagtacggagagctgggggctggagccaaccggagatgtgtgcctcatcaaaggggacatg

SEQ ID NO: 37033 - DNA, 360 bp, Homo Sapiens
tcgcgggcgactctaaggatcccgatcacgtgcattgtggatcacgtgccattgtgaaactaagaccaaggatggaacaaatgtcatccttcctctgtaatgcttccctgctttacctctcctagcagaaaaaaatcatgtacctttctgggctccacagcacttggcgcatcattctcatatggtgcatggtatatacatctttttaaaatttaagattccatgtctgtctcctacactggaatgtgggtaaaatgagattaccttcagatcctcagtgcaaagtaatttatagtctcttctcataagaggttatgaacacacttttgctttttctaacccacacaatggcacgtggat

SEQ ID NO: 37034 - DNA, 422 bp, Homo Sapiens
gcccagtgtgtgcttgcagctcactttgttgaacttctctttattggaagagatatcatcctacttctatcggaagcatttttcagttctgagcattttcgaaaccgttatctgagacagagtttaccatgtgtaaaatgttcccaccttccttcatttccctcaaatgaaatcacacgttctttaccaccatctggagggaagtatttgccatggtgcttactgagtctgtctttgcagtgtcacctgtaaagttaaaacttctaccttacctggtatttcctttgtttgtatttctgcttaaatattaatcatgtcccctatttgtgaacataatcctttttggttcaaacatcttgcaggtagaatcttaatgtcttcaaaaatagcctggagcccttaggagtaatatgattccacaa

SEQ ID NO: 37035 - DNA, 432 bp, Homo Sapiens
ttatccagtgcattgtggaaaggagaaagatgtagtacgttggtggaaaggactattggtgagaaagtcctcaaaggctgatttaactccagtgacccacttctgttcttacatgagtgatcctgaatcagtttctgcaccctgttgttgatcagatagtactagataaactcaccttgggttcacacatagaaaaacaaatgtaacctttgctacatgtacaaaagtttaaaggttgtagtaaataccattaagatctacgtagcctgattgttaacctaacagaagcatgagaccatcagaagacttgggctctggcatagctgaagggtgttggccaatctaagaaatccacctagttccaaaagctgtttattgacattgtcatctcagagataagagatgggtggcatacacaatggcacgtggatc

SEQ ID NO: 37036 - DNA, 389 bp, Homo Sapiens
tatcacgtgcattgtggtttaatttgcatttcctggattagtgatgttgagcatcttttcatatacctgctggccatctgtacattttctttggagaaatgtcaattcaaatccttttttcgttttttaaccaggttatgtgttgttctgcttttgagttatagaaattccttatatgtattttggatattatttatcagatacatggcttggaaatattttctcccattctgtagattgccttttcactccattaatcatttcctgtgctgtgcagaagctttttagtttgatgtgtccatgctcttcttatattacccctgctcagccctggagttggtcatttctccaaggagccatgactccttagtgcacaatggcacgtggat

SEQ ID NO: 37037 - DNA, 495 bp, Homo Sapiens
ggatcccgactccacgtgcattgtggttcttgctaactttcccatagatgcccttcctctccattgcttttcccctgcctgcccgttcctctgttaactctgttgagtttctcctgaatgaatacctcacgtaattagctatgggtttgggtctgttcctctcagcacttgggccgctggatccctggttaataccctgaccccttttgtgggagaatggaggaaagagaaaataaggtcatctgggagagcaagatgaagggctttgaaactagtgaagaagaatgtgtttaccttttctcccttgtgaccagttcttcagccctctcgacaagttcatcgcaggcatcccctggaagattcatcactgccctagtcccgcacatctggtctctcactgagttactgctttttgaaaattcttcagaatgtctactgcatttcacccttttctctccatcacaatggcacgtggatccacaatggcacgtggat

SEQ ID NO: 37038 - DNA, 502 bp, Homo Sapiens
acgtgcattgtggcacctttaaagtgttatcttgaaggggaagtgagtgatttgctcatgtctctactgaactaacactgttaacacccagtccagttctaccttaaacaagtcggagaaatacagacataatcccatacttgttatttgtcaagactaaggtaaaataaggaaagttggaactcactcatatcctcttatgactgatgtactgaaaacaatccatctctcaccatttcctaaatagcatagtcacaaagagctctaccctaccaagtactctgcaagtcccactctcaaaggaagactcacaggtgactgagaagataaatttgctattgtttccattatccttcagttcatctgacacctttgaagaaatgcatttggataagactcacaagtctcagggccccttctttatgaaagaaatagctaagcctccatactcagaagcatcagacttttcacgaatgcttccgtcatgtaacaacgtatcaaa

SEQ ID NO: 37039 - DNA, 350 bp, Homo Sapiens
cggatgtattcccctgctgcacgtgccacctgcagccttctccgtgcagtgtgcatttgccacagttccccgtgcactctgcaggcatgcatgtgcgtgggagcctattgcgtgcccaccagagttcttttgctggcagctgcatcggagtgttgttgccagtggaccgggaacatctcagctccttcagagcagtaggtacttaacctcaaggagccagaaaataatttccacaggcctggtcccagcagcacaaggattagagcatgtagcccaggagtgctctgttgagccttggcctccctgacaagcatcccacaatggcaccgtggactcggcgctaccgagct

SEQ ID NO: 37040 - DNA, 556 bp, Homo Sapiens
atctgaccgatccttttctgccaccacagcagaagaaactgtatgcctgaagcacagcttcctgctgaactgtgataacagtacctatgtgagaatagaccttgattgttctgagtcatggggacctggaatatgctgcagttagcctaccctaatgcaaatgtcaaagtaatcagcttcagttataaatgatctagatctgctagctacatctaatattaaatactaacatcaagctatgaatattctacataagcagcatttaccttatttccatttgcctcaaagtatgtgtagtgaaaacaaatagcaagagttatttttagtgctctacatcacaccaaaaacacagagagagttgatctagtggagtgaagagcttctgcctgtttgcatgctaattcctccttcaggcctcccctcacactggcgtcagtctttcctttaggatattttactcttgtacgtatcccttatatatccccgatttcagagcaagtgtcccctgggtacctcttaaatgtggtggctgtgggtggcagaattgggtaccgag

SEQ ID NO: 37041 - DNA, 450 bp, Homo Sapiens
agctgtatctgcacccacagcgagaaagtccctagggagtattctgaccaaagtcttggtccttgaaggagaggcatagtcttctaattgctttgatgaatcacagaccaaacagtgattcagctctgaaaaaaaccttagagatgggcattccaaggtctcatggggttagtagcagaagcaggactggaacccagaacccaagttggaccactagactggtgcctctccctaagcccactctgcctcttccatgtctgtgaatgagcttaccactcctagctatgcaaaactgcatagaaccatttcagcaagaggctcaggtagcattaaagaagttcccacctcaacgatgtcaattttttgttactgttgtcttgaggaagcatgtttgcttttaaacgctcccaaattaaaagccattctcagccttcctacaattgtatgtgc

SEQ ID NO: 37042 - DNA, 436 bp, Homo Sapiens
tgatctataaaagtcttttctgcatcatacatttgtagatcaagagcagtctgaacagatcattggagcataaaagactagggaacagattcggactctaaaaagcaaagttaaaggaaacaaacatgacaacttcatgatagttataaagaaaaaaacgatatgttatcttaattatgtaaggccagaaattactgcaataaatatttcaactccgtggacaatttcctagtgtgatcaaaagatgaaagtaattcactagttcagaagtccatccagtatagtgaccatcattctgaaaggaaaaagaaatgtttttgagggaaatgtaatggaacaatactcatttttaggcttgagatctgcaggagaggggaatcaatactagagactgctacgcattttggaaatcaaagtacagttaagccactttcct

SEQ ID NO: 37043 - DNA, 370 bp, Homo Sapiens
gtgactctgaggatccgcatctgcaaccacagcctcccccactgcagcggttgcggactcagaggccaaatttggtacagactgagtgttactcccccatccctcttatattctgactgtcttaagctctttccttttgttcctgtctgtaactccctatctttctgcaattccccttgtgggtatctgctctgactatattctccaagtaccccaactttcttagctccaatactcttacattccattccttgctgggatttgacctcctgtcctccattccccccctccaattgcccaacttctttggaatgcatcgcaggaatgtattgagggaggaggagttccctgggagggggacacggcagtg

SEQ ID NO: 37044 - DNA, 466 bp, Homo Sapiens
tgacatgctggtactagaacaatggcggggctgcccacgttttccttcctaaggcaaagccacgacgtgcccttgttcctccccgtgcagttcctggagctcctgtgggaaccaagcttccttcgttttcttcctttctcgagtagctcaacacagacaccaccagccactgagggtggggagtcgggaagagcgggctgcagcctcagagcctgtactcccagcccgaagctgtctcatgacgcatgggcccatagtgtgcgtgcctgcgagcgtgtgtgcagctgggagggcgcggtatgcgtgactgtgagcatgtgcacgcacacatgtgtgccgtggctgtgggagcatgcagggcatgtaagggcagtgctgaggcctcaactgtctgcttccacataccctgcactccacatgggttattagctggaataaatcataaatacttcattatacatcatgc

SEQ ID NO: 37045 - DNA, 508 bp, Homo Sapiens
aattctgcttggtacattttggaacgcttggaccatgttctctcaaagtctcactttaagtgtgtgtctataacttaacatagggtccagatatgctctgaaagacttaacctcaaatgggatactgtcattttattaatgtatgctggagttggcttagtttcaatttgaggaatttcatgtgctgcaacttcttttcctagaaagtaatacttttgatgtttctcacaaattataatttctaggactctgagctgcctacttctacttactcctttttagttagggttgtgtgtgtgtgttgtccttactggttactgcttttacctcctagggtctttttttcaaggccattttcacttaaccttagctattaagcccaagtggaggtgctaaggtgatttgcaaaatggaaatatcttaatttaaattgcacaaaccaacactatcgtgcatatttgagaagtacaatacaatgtaaatgggggcttttcaggcaccatgttac

SEQ ID NO: 37046 - DNA, 428 bp, Homo Sapiens
gtgaaggaaaacaactttaaaacactctttggtccttctcccctctttgaactcaaaagggtataaccatccccgggagagagcactccttttaaatggggctactcatcctggcttggctaatggtgaacctaccttgtgggttttaaatcaaccgtgacatcaggtggtattgggtgcctgagctggcattttgtgtaagtccaggagcccttgatagtgtgcgtcactggggttattgatcgtgggaagaagacagcttggctggcatctcaccttttcctctgagtggagaagctgacttgctttaagtgcccaaagcaaaattctgagtaagggtagatttgctctgttattgtttcttggaatcttaaggcaagagagtgtctacttgttggccgcagcaaccccccaccaaaccacccaca

SEQ ID NO: 37047 - DNA, 417 bp, Homo Sapiens
caattcttgcaccacagcaggctgatcagtctctaacccaactgcatagagtgtgatacagctgttaatgctttttggaactctctctagggattccctgagagaggggagttagaacggggctttgggaagcctatgttgtagaatccctcgtacccagagtgggagaagattacacccggggcactgcagggagggaaccaggagagatgaagtagtaagctgaggcatgcccttctggccaggctggcgtctctgggcatggccacatctgttcacagtctgagacttgagtcctggggtcacacaagggcactgggtaggagatgtctatcttgggaggaggtcttgggaagcaaccacagataggtgggatgatgggatggataaagggtgaaactaggagttcttaatata

SEQ ID NO: 37048 - DNA, 539 bp, Homo Sapiens
tgagtacctagagacatctgcaccacagcacaataggcattatctcacagttctggagactgggaagtcaagatcaaggcactggcaggcttggtgtctgtgaaggccttttttccacttccaagatggtgccttattgctgcatcctctggaggggaggaatgctgtgtcctcattaggcagaagggcagaggaggcaataagggacaaactccctctatcgagccctttttttgaaagtatttaatcccattcatgaaggaagactcctcatgactcaatcacctcctaaaggccacacctcttaatactgttggattggggattaagttcctgcacgaattttggaggggacaaaaaccattcaaaccatatcagaggccaatgttgtagcctggatgagagattgaagtggcttggattaagatgacagtaagtgaatatcatagtaaatgtagaccaaaaggtagagatttgaagtatattttggaggtagacttgaaaagacttgatagattccatatatggaggctgtgggt

SEQ ID NO: 37049 - DNA, 422 bp, Homo Sapiens
agcagctttgccatatgccaagtgaccacagaggactttgtctcaggacagggtggggctcaaagtgtttttattctgcaccagcagaaaagtgcatgctgagaagtgggaacatcttgctgattatgctgagaaaggcaggaacacgtgtttgtggagaggcggctgggccactcaccttggcagaaacaaaatgtgctgtgaagcaggaaagtacatagcatcctgtactttcataccgctcaatgcatctctgcaaggcttatcccaagtgctgcctcatctgatctcaccacaggaatcacagcaacatttcagataaggaaaaggaggtcaagggcttgggtcaaagtcaccacagcagttagtgggggtcaaagattgcaatgagcatttctcttcttcctgccccagatgattgg

SEQ ID NO: 37050 - DNA, 402 bp, Homo Sapiens
aatgacaacaaaaacccgaatgaaaacaacaacgatttaagggagagaaggagtaggtatgggtagatttcgagagtcagggaacaggtttcatttgccctttcaagtttatataaactaaagcaaacaattaaatttgaagcctgctgacactgtaatagatttcaagtaagctggtagaatttaatgaagtgtattagatgtcagctatagtattagtagcattttaacaatcagccaataaaacaagagcacagtcttctgtgcctgcaactttgtagaagatgttttatagtggtatggtactgcaagataaaaaaagtagaaaggattttagcccttgatccttcattttgtggggagaaattgctctcatttagggaagtgatacgttagtaatag

SEQ ID NO: 37051 - DNA, 380 bp, Homo Sapiens
cacttgtagggaaactactatttagagaagagtatgcaatgtttctgataaaattttgtcaacaacagcagaactgtttaccaggaaactgtgataaatgtacgaggtacctagggaggtagatttttttgcactacctgtggaacttagatttttacctgcacacctgtacaggcaaatcacagtgaagcctcttcacaggtgctgagtaaattgaacaagaacagctcctccaacgctacctccttaggaggatgcacacctattcagtgacctcacaattttgcacaatcacttgtgaaagtctctttttaaaaatgcttctagaggccacagcacattctttgacagaacctcaagagtagcaaattttttcgggg

SEQ ID NO: 37052 - DNA, 357 bp, Homo Sapiens
ccccaaccctgccacccacagcctactagtttttatgatggcaagaaatttttgtgaccaagctagaaccccaccattcagaggcaccttaaatgtagccatcttacccacctcctgagggaaaaagcaatttcaacatggagccagtatggagagattgcaagattacctagaaagttaccaaaaggctatgctctggaatgtctttttatattccaacacttcaatgatggaatggtctcttctcattttatctaacaacagtttagttttataaagaggtatgagctacatttggctttatttcctataaatctatgaacgtcttcaggacacatgctgactttctgaggcata

SEQ ID NO: 37053 - DNA, 381 bp, Homo Sapiens
ccccaaccctgccacccacagcggcccacacacagtcattcaaacagccgttttcttatttctctttggattgttgtttttggggttttgtaaccagaaacaaaatgagacgttctgttcaggagctctgggtaactcatctggttccttcttcctctagctttttttctgattagtatagatgaggagaggaactagaatttgggtaattaattttctttggtcgttggtaggaggcagtgtgtaaatgtgaataacatgcttttggagcccgatagactggtattataaaatattagttttgctagtttgtaggtatttaaccttgggcaaatctttaatctctctgaacctcagattctttacctatgaaatgaggaa

SEQ ID NO: 37054 - DNA, 436 bp, Homo Sapiens
tgaggaccccaacctgccacccacagccaatgcgtacactagctaatttagtagttttaggtggacacgcagacataccctacagaaatattgggttcatactccattctggtggcgtcacatgtttagaagttcacatgtggtctctgttggcggcccgtcatggcaaatggtgagtgccatgtggctggggaagagatgctgctgtgttcaaggagccggcatgtgtgttgccactggagtttcgtacttgagagatgagtttgctgtttttttagaaatcagctccacaatcagagatagttttaatgcccttgaattattttgtgatttagctcgtactatttatcacatcttttggatttgaagttttaaaaaatgggcagtttgatcaagtatggtgtagatagaataaaccaaaggttccctgtgaaag

SEQ ID NO: 37055 - DNA, 421 bp, Homo Sapiens
ccccaaccctgccacccacagcaagggctgggaaacctccctccctggcttttctctccccgcccttcccgtactcccaacccggacattaacagccagagatttcctatccaacacttgagtccaagtccagacagccaagaaaacagagggccaagatttcaatcaggatttctccccagactgtgagccgggggcctgtaaaactcaacagagccaacatgcctccaccggaaagctgggactgctagggttatttacgtaaaaggtaacatcagtattaattaggtgagaagaggaaaaggcacagaaactaaattacagggcccaaaccaacatgagaaaaatacttgctatagcctggaatctttcactcaagttttatttggtgtgagacttgtaaattatagctttgatcctt

SEQ ID NO: 37056 - DNA, 382 bp, Homo Sapiens
ccccaaccctgccacccacagctgggcaacctgccattctcctcctgccatcacacctgttcagctactagggcaaagaagtgcggtgctagacacaagcagatgcttctctctaccaagagaagataatataaggaaggataaagaactgaaacaggtttgaggctttctcttattcatcatctagacttcagttttcttgatttattattccttcatgtcttgccagacacaacagttgcacatgtgttcaagttggttctaggcacaaagggagataccagagcttctgtagctacgagattatcatctgcgtgagccaagaaggggtagtgttgaaacaggtaactaacaattcacagcagtatgtgattaagggcta

SEQ ID NO: 37057 - DNA, 451 bp, Homo Sapiens
ctgaggatccccaaccctgccacccacagctactgtgtgccaagcactggagtaagtttattacaaatttcacccctactccccatctctataaaatgttatcctcatgcgacggaccacgaaaactgagaccgagggaattagccgcctcactgacagtcacatgctgagtggcagacaggactcaaatccagatgtgcccaactgcagagaccatgttctgtggagcaggcagccgcctctcagctctcactcagtgtttatgtagctggcgctaagtgccaggcagccagtgcaaggtgtggggtactcagagggaaccaaacagacaaggtccctgctctcacagagctcatatgctctgtccccagccctgtctctcttcttccaagcctggaagagggcaggaaccctccagtcacagggggttccactggcacaaacaaggaat

SEQ ID NO: 37058 - DNA, 406 bp, Homo Sapiens
tgaggatccccaactctgccacccacagctcagttaatttttcaaaaaagttaattgttttcttcctggcttctagaattgcagacttttagattaggagtgggtctttgagattgtgctgtcctcacacaacacaatcccagaaaaatagtggcagaaacagaacaccaagccgggttttctcccttgcctctcagtgtccttcttaaaagtcatgctgcaggagatcccgggaaataggcgatgggcatcctcttctccccttctgttctagactcgcctgtgtcccaggggtcttttgctctaaaaggtgtgttatgtcggtcagtcagtgcccacagcacccagggttagcaaggtgatgaatggtagcagtgctaagcatgtggatgagacgttcatcctg

SEQ ID NO: 37059 - DNA, 397 bp, Homo Sapiens
ctagttgagacagtcacgaagccccaccctttttcaaagaaggggacagagactccatttcctgaggtgtgagtggcaaggttctgggagaccatgtggaatggaaagcattattgcaaccatttggggaaaatacaacttgctgctggcaggaaggtcatttcaggcagagatcttcattgatggtaccttcagaaatgcatttttaggaaagaaagtggtttttacagacttggcattgctaagggaaaacataaggttttagaagtatttactgagccatcttcaccaagacttatgagaaacatttcttcgaagagaagatgctgaggaagaggaagatgacttttgaagtggactccaaggggcagacaggaggcttggatggatggcagct

SEQ ID NO: 37060 - DNA, 423 bp, Homo Sapiens
tgaggaccccaactctgccacccacagcttggaagagatagagttgaaatgcaaattctagttgaaatttaaaaccaacttatctgattgcaaaaccagtacagagcaccgaggcctccatttgataggctatggagtttgaatttaattcagaagacagtggacagccactgatagtatttgaacagggcaatgataggatcagtgctgtgtctaggaagattgttcttgaaatgacagagagctttagaatggtgaaagactaaagactagttagaagtctgctgtaatggttccaactccagagacatagaaaagataggtctccaaagacaagtgatggcatagtctttgctcagccagagtctctaggaaaatggtggtgctgttaactgaaataggttaagttaagagaggttattg

SEQ ID NO: 37061 - DNA, 401 bp, Homo Sapiens
agccgcttaggataatcgcggcgaatgttgttgccatctgttgcctgacttcccgtccctcgcctccatccgggaacctccgggaccacgcccgtggccgtgaacctcagtcgcaggaccgtcggctcctaggaggctgctgtccgcgggtccccagaatgcaacctcagcatccagcgccttctgtgcagagcccccctgctgtcctcaaaactgtagtgtggcgtccaacctgggaagcccctccaggtgacctggccccccaggtgacacccctgggattgacctgctcccttgcactgtccaattgctgtgtgtggacgtctcccgagagctctgcaccccgtgttcttctgcagaacacggcctcctttggtgtcccagcatggcagtgagcaaga

SEQ ID NO: 37062 - DNA, 395 bp, Homo Sapiens
acccaaccctgccacccacagcctgggcaacaagagcaagactccattgttattaaataaaataaaataaaaatcacatccctgggtcaagaactcaaagaagagaggtttacccgaagaaaagaaaaaagaagagagatccagactctctaagcaacaagaagggctggcagagacgttatctatgctggagtccctggaagaggccatgggagtcaccccatcacaaggagcttttccacaccagccaggcagccaagagccaagccctgctgctcccttccccaggagggcttgggtcttagggcagcgctgttctctcccctccactcaggcctccagagctgccaggccaggttctcccatgttgactccatccgagggtccctgaggcc

SEQ ID NO: 37063 - DNA, 410 bp, Homo Sapiens
ctgaggaccccccccacccacagcccactgaatcaaatgttaatctcctttggcattatcctcatagacacatccaggatcaatactttgggtccttcaatccaatcaagttgacactcagtattaaccatcatactagctattgtaaaaggggttgagttcttgatttgattctgtgcttggttgctgttggtgtatagaaaacctactgattggtgtacattaattttgtatccggaaactttgctgaattcttttatcagtcttaggagctttttggaaaagattttagggtttacaaggtagacaatcatattatcagtagacagcgacagtttgactccctctttaccaatttgaatgccttttatttctttctcttggttcattgctctggctaggactttcag

SEQ ID NO: 37064 - DNA, 389 bp, Homo Sapiens
gggaccgatgcctggtactggataggaacttcatggaatggagctaatgggccgtagggcaggtttgagtcgtgccaccctggagcagaaggtggagggtagggataagacctcattattgcacagttgagagcggcttgaaaccaaaggcttggagaatgtgagtgaaactgattcctgtggtggagaggcagtgaaaaagcattaccttgtaggtttccaggcagcctggacaataggggcacctaaacccacattgaaaagccttcacatcatcacagctgagtctcatagccttcaactttaccagttttggagaacagagataaatgcactggccagaaactagaagagcagttgctccaattggctgttggtggcagaaatgg

SEQ ID NO: 37065 - DNA, 434 bp, Homo Sapiens
cagcgtaacatcataaagcttcagtagcaacataaataaaatcaagtcaccagctgttactataacaccccaaaatggcttcatgtgaaaacaggctatacggcatagaaaatattccctctgggagccatgaaaaactagaaaagctgaaactaagctgcaggaggcctgtgtaactacatagcaggggaaacacgagccccatattcagacagggctttgggcggcccttgatgaaacagtaccctgtggttatcttttgccgcttgccaagaaattgcagttctccctctcccgggcacttagtagcgttgcacctccctgcccccttgcaggtaagcagtgtcatgtgacttgctttggccaatcaagtgtgagtgggagggagctgcggcatcgcatccaaggagaagccttcgcagccaccgctgcca

SEQ ID NO: 37066 - DNA, 363 bp, Homo Sapiens
cgtgtggctactaggacaggcttgtgcagcagaatatggctgcaggtagctctgcagcagaggaggggagcagtgtgcagctctcagaaggcagggcaagtcacacaacccaacagctggccaccacaagcaccaattgaccagagttgtgcgtgtgaggcagtgaaggaataagtgtgtttgggatgaacattcaaccccttgcccagaccatgagaccgagcttgaattaaaagtaacttgttaagtgctgctggtgccaggcagccttttagaccctagagcccagataccagcaaatccgagctgcccactgagagcttacagtctaccatgtttgcagctgaatcagaaataaactcc

SEQ ID NO: 37067 - DNA, 425 bp, Homo Sapiens
catgtctagattcgggagccctttcgggtactctggtggcatacatcacaggctttatgaactatgtcataattgcctgtttgagtatctgtcccccaattggagcatgagccctctgagattagggtacctatctaggcatgttcctggttatatcccaagacctagcttgatggcaggggctccctaatgatatattaaatgaatgatctagaaactatgaagaaaagaggaaagaatggagacacttgatacctccttccttccccaatcagcagtgactgaccacagaaggatgggcctgcatggcctttactcgctccctccttagaacctgagctgagccttctattactctcttcattatcacaacctttcatcacaatggggcaatatgtatgtccagtccagactgaaacaggcaa

SEQ ID NO: 37068 - DNA, 362 bp, Homo Sapiens
gggtccggttggtatgcgggtgaggtggagcgaatgtcgttgggtggtgcatagagagggagtgggtctctaatgggagtttagtataaagaggtgtcactttgatgctggcaaaagcagtaagaggccttgttttagaatgcatttttaagtgttgttctatttgcagagtgacagctgggacagctgaggaggagagtgccaggcgaggcagggacactgtccatgcaggggaggtgaaaaaccatggggctgatgaaaatgcacatggatgtcaactccagggatgtcaaggtcttaccctggcagcagaagcacgagcagccgtcacagcctcaaggaggcagggtggatggacgagc

SEQ ID NO: 37069 - DNA, 357 bp, Homo Sapiens
cactcagaccacccatgatctgtgggtattctgggcctttcgtacaagtcctgcaacaacaggacaggtgacaatgatatctggggtacaaggaccatcttacaattgcaacacggacagaaggcagccgaaggatctgaggctgtcagtgtggacaaaaaggctccagccagtgagtgaccataagtgatccgaccccaaactgctgacttactctgcgaatataatcagaaagtcctggcgttgatccccatgtccagagggaacgcgcgggcttggacacggccaggacggccgcgtggcacgctcatgggctcctgccaatgatgtgctgggggccaaagcctggaccagcac

SEQ ID NO: 37070 - DNA, 397 bp, Homo Sapiens
aagcaactcttagcaagggaagactccagtaatggcaaaaaacaaaatcatgcaaagatgcactgactgctcaaatcaccccaaatcagaaagtggcactggctgctaacagaagcctgaagtctcccaccagtgagaagtccaggcccaggaaacaaggcctaaaggggctggcacagtcttcatcctagccaaatgcaatcactccaaaggaagtcccacatcagagatcaaaggcctgctgagtaaggagggacaggccacaggctgatatcccattgccaaaggaagactgtcctttgcaagtgtgcctggtggagctctggacccaagtaataggagaagctccaagtctctacaagtagacctagcagagctggctgagtcagcaccccac

SEQ ID NO: 37071 - DNA, 369 bp, Homo Sapiens
taaaattgacagaaaaccatgtacaattttatgtcattatgctggaaagagaaagaaaacctaaactgtacaaaagggccgaaaacttcagaagaatgtggttacctgtaagtacaaatggggcatggcggggaaggagcagacaaggattactatcacttttcattcaacatatcctgtagtgtgaatttttaaaagcaatcccatttatttatagagatattaaaattgtaataaaaatattagcacgacaaatgtaataatgcatttttgtaaatacaccttgactaagtagggtttattctgtgaatgcaagaatgacttgacatgaggaaatctacagtgaatctacaattcactacgttaaga

SEQ ID NO: 37072 - DNA, 416 bp, Homo Sapiens
gcttagagaggggcaggcacagggtcttccctcctccctccacccaggaggctggcccggcccaggtgggtgcttcagtagcaccgtgggtgacttggcagctgccagacctgttagcccagggcagggagaccagtgactaaggccaggccccagctcaagtgagcccctggggcggtgggacgtgccatcgtagtcacaagaggtgcaacctgtcagggaggacacctgtggccctgggagctgtgcggtggctgcagcccaactagaaatgggccagtccagatgccactttcggcacgcggcaggtgtgatgccaccagggctgggccctcacacggggcctcctcactgccctgtccccacccaggggcaagcacccatctagtaaggccctaatctgcaaggaacccacg

SEQ ID NO: 37073 - DNA, 397 bp, Homo Sapiens
cgctagaggatccgcgtggtgctgcagaggtcccagagcgctttgttctggtagttatcctgacaattcttgcctgttctcactctcactccttggaataatacaaacagacatcaaagctagcttctgctcagatggctgtagaaaagagagcacctcggaccagagataaggtgacccatgtctctgtggggccagccaggtgggctgtagatggcagtgctgtctcaggctgttcctcagggcccaggtgtgtctgggcggcacaggtggaggaaggacaagagcgcttgtgcctgggcgctggcccccctgtttgccatcctgtttcttgtggggggaatacaggtcaaggctatttctggtggagaaatgggctgagggtctcaagcggggg

SEQ ID NO: 37074 - DNA, 432 bp, Homo Sapiens
agtatagctaagaaattagtatgtgctagagtagttggtgaaaagtatataatatttttatactggcctgcaaaatagtcatttatttgtggtgaatagagacttattctggaaccccgcagtgggtagaattacatgtaaggctggttagttttccatttgacataaggggacctaactatagtggtaccagaaggacttcatctgaggtctactctaccagcttagctagttcttgcagtatggtatcatcacctgagaacaattctctggggccagaccagataaatagaaaataaactcatttgatttaccttacagaatatattccacctggcgcagtggaatctatccctccatcttcctgttgatttgctagatattttcaagtctgtgtgtctacagtgctgtctgcaagaacccacgcgcttc

SEQ ID NO: 37075 - DNA, 530 bp, Homo Sapiens
ttcaaaacagaatatttaagtttatcacaatatcctatacctccctaagaattcctcttctaattaaacagcacagtcatttacccagttacacaagtcaaatactgagaagtctctaacttctttcctgccctcatatcctaatgactcaataaatcttgatgactgtccccaaatggagggtgaggggctgcattccttgccaaagagaagcataaattcagagtaagaacaggtgctgtagtcaggaggcatgcttgggtctaacatcagaaaattatgtaattatcaaatttaatgctaaaaatattaaaatgcataacatgatttagaacatttcttcaaatttcaacttaatgctagggaactgtgtgctaataactactttatacatgtgattctggctcttggcacaatcatacaggactggggttgtgttattgcatatgtgggaggttattaaatgctttataatgattatgtgaaaggtcatattcctcatacacataacttcacttactattatgagt

SEQ ID NO: 37076 - DNA, 582 bp, Homo Sapiens
aatgcagcggactcggcagatggttgaggcagctccttaggtggcttaagcctgccccatggaacatccttgagggggactctgaccagcccgagcgacgcggatcctgcgagcgctcccaggtaggcatttgccctgctgtgacgccttgccagagcagtgtgtggcaggcccccgtgaaggatcaacgcagtggctgaacactgggaaggaatgggcacttggagtctggacatctaaaacttggtaagactagtctttgaaacttacccactccatttgagtggaagcgtggcctgatcacccacggcgtgccctttattggcactttggttttggttttgacttggtttgaatagcttgatgggactggttttgggaacttgcctgctccatttgagtggaagcatggcctggtcacccatggtgtgcctgtaccagcactctggtttccgtctttgacttgacttggattgcttgatactttggttttggttttgacctggcttggatctctggatactctggtctcggctctgatttcggtctggtgtaccctacaaaagtgtgtgccatttctac

SEQ ID NO: 37077 - DNA, 436 bp, Homo Sapiens
tcgaggactcccgtgctctgaacttagggttgtttcatatgctagctagtgacttgttgttaacagactttttattattgccgtctggagttgtgtattactcatgaacagcagtgttcactgggctatttggtcagtacacttgcacaaatttaacagggtttaacttgtcttcacaggggcttatgctattcttgtatagacaagaagtactgggacaaagattactaacagggaagtgctagtgacatgttatagacacaggaactatgtattcctctgaattttctataatattactgagtattctctagctttttactgtgacccatttcacaccacatcgaacaagtttacagaagaatatagtctccttgcagtctactcttcccctaagttcagaagcccggggtaaccggaggctcgaaatatcgta

SEQ ID NO: 37078 - DNA, 471 bp, Homo Sapiens
ctctgaacttaggggatgtaatagagccaagttttctaagtgtctaaatgttaagtgctccaggctcagtccttggactctctagtctcttctatggtgaagtgtccatttgtgtggcttcaaacaccttctgccatctctctcaaatttatactcttcctgtcggaccattttactgaactacagtcatgtatatgcaactagactattagacacctcaaaataatgtttaaccagctattcagacatcccatggcccagtcaagtagacacataaaattaaccattacacgtatctttcttcaaatttgcctttcttcaaagcagtttacttatgtactctgcatgataccaataggtatatttttgagttgccaaagaaagcatttatgtagaccctatactgggttctaataatgtgacaattaataagagttacaagtggcatatagtttagtataggggagacag

SEQ ID NO: 37079 - DNA, 580 bp, Homo Sapiens
tggctcatctgtcaggctacactcatagtttcctcaagttcaagtttagaatctcctggcttacaaaaccgcttttctacttctaacccaacgaatcaagcattcggtcattcggtcatcctccattcatcggttcactcttttaatctattcaaccatccaggcacccattcaggggtgatggataggctccctagggattctatctgggggatctttaaacttccgggctggctatgaaacaaacagtccggactgatgtggcgagatatcaggatgacatggcgccatgtgcactctggaccgcaacactcacactgtctagtgactcccaaagcaggcgctcgctcacataagcggcatgggctcgctaatagcctcgaaacctggtctcagaggatttcatattattctgtacttaaatccgagacatttcatttagtatgatatgttacaaatcacaatttgtgttatatgttatcaatatgtaaaccgtacaatatgttacgaatttacaaaaaagtattaaaaggttaagaatttgccaaaggtacaatatgttacgaattctcattcgtaa

SEQ ID NO: 37080 - DNA, 558 bp, Homo Sapiens
taacgcccaaactcatctatccacttaaaactgaatataggtcaaaactgttttctcaagtactcatacccacttcacaactgcacatttttagtcagaaccaacatggagaaaccacaagagtactcaagtcaaatgctgttcaatgagagagggcttgaacatgtatctggttgcacagcaactgtccacctactgatatttagaggataccactacgccatattacagacctgtcttttgcccatctgtctatccaacactgcagtcctgtttttaccccatatatctatccaacactttacagaaatactgaatatttcagcagggaactggatgttcttcttgcatagctcattttccaatgctccacccaactgaacccaacccccatgagaatctactgaatatttccatgagggaggggggaggaatggaatggctgggaatatagctgaaactgctataaagaaacgtgtgggagtctctatgtgcgtgtgtgcggatatgggtgtgtggctgttggttcttgtctccctgtgtgtagtgatgtgtgta

SEQ ID NO: 37081 - DNA, 466 bp, Homo Sapiens
aaactcacgtctgtatgtctattaggctctacaccccatgtaaagcggattaatgtgcttcattgaacaagttattggccactttaggggtgatacgaatcttatcaaaacatataggcctatgggctaggctacatgaggtgtgcgactatgatttgaaaaagttgccaaaataaagcatgccctgtttgccttcagctggtcatcattcacaagtgataatatatcattcacaactaatcggttaatattgtcgcccatcacattattatttatttaatatggcctttgcctataataaataatatatgggtgaaattcgttgtgatttacaatgaaccattatcctgcacctgtaacgagacagaggatgtcatctatgcacttaaatagagaatggaggaagcattaccgtggctcattttcaatgccagccaggcaggatatactccgtgtggtaaagata

SEQ ID NO: 37082 - DNA, 711 bp, Homo Sapiens
tctacaggatatctcttaacgccccaaactccactatggccaagaccaaagagctgtcataggacaccagaaacaaaatgtagacctgcaccaggctggaaagactgaatctgcaataggtaagcagcttggtttgaagaaatttactgtgggagcaattattaggaaatggaagacatacaagaccactgataatctccctcgaatctggggctccacgcaagatctcaccccgtggggtcaaaatgatcacaagaatggcgagcaaaaatcccagaaccacacgaggggacatagtgaatgaatgacctgcagagagctgggaccaaagtaacaaagcctactatcagtggctgactaaataattttttgccccactgtacctgtatatctctttacaattctatggtgtcttagcctggcccccagatctgctgtctagccaactcctactgtattgtcatagtcaagccaagcaacaatgtccatctgacaaaaacaataggagttggcaagatggcacaaacaaaccgggcaccaagttacccgtatctggtccaggtcaaagtatcaataagacaacatcacgttactcacttgtcgactattactcctggcggatgttttgctagaagatgaagtaggggggtgctggcatctcactctgtcaatagaggcagagaatggcccagggagggggggctgaagaaa

SEQ ID NO: 37083 - DNA, 486 bp, Homo Sapiens
ctctacaggatccttattacgccccaaactcggtgctccgtctcaaccagagaagttacaggctccagtgctacagcaggcaccatcattcacaacagtcccaatacaacaagcccaaaagagcagtcctggtgtgtaccaacaagtcagagaaatgggggcagggcatatactgtacatgcacaaaccatatggagggttagaagggggagggggtgtcctcattcaacttcaccacataactctttgccctgcagggagcgaacatcaccgatcatacagaccgtgaaaacacacgggagggtaggcccctttaatgtatctccggcatcaagcatttctggaaagggattaacgagtggaggaacaattcttagacgggaagaggggaaagccgaaagaagggaagaggagaagccggaaggaggaggaatgttctaaatgttcaaagaaaagggaccgcgatttgaaaccgaactttaagct

SEQ ID NO: 37084 - DNA, 560 bp, Homo Sapiens
aggactttcttacgcccaaactctctcccccccgtacaaccaattctccctccctctttttctgaatctggtcagaccagttctcagagtcactagactgctggtgatttgcatttctctccctctcagaagggaggaaccattattcacaggtcatagctcagctcaggagattgtgttgcgggccacagattgccttaccctgctggcatcctctccaagagacactcctgctgctctcacccacaaggaggctcaggcccaagcattttgtgtcgggctttagagtaatatgaacattaggtctgactttggcacttgacctgaaagaagatggggatgggatgactttgcgtcatcctctctctcgagacaacaaggtatactatgcagctagttgtagagaggcaaggcagatttaattctgttcttaatgtatgtgcatctgtaatgaaatgaaacatgggtaagactggataatatggttgtactagtcttctttattaagcccgcacctatgtttttaaggatgtgcgtatgaccacaaacgtttctgtaga

SEQ ID NO: 37085 - DNA, 607 bp, Homo Sapiens
tcttacgcccaattcatacagacctacactcatacacacccacaaactcatacacaccacacactctcaacccttttcctccacacaagcataggctcacattctcaacagttggccatcccagaggcccactcaagaaaggtcttgatttacgaacgcatatacagttgcagctgtatgagaaggccggccaagattgtgcaaacaattaaatgggcacgaacatggcgagattttattaaccctagtcacgtcctaaatgatggcggtcaaatgtacacatttgtgcttcttcacctgcattgcttgctgtaaggggttataggctgggtttctgtacagcactttgagatatcagctaatgtacgaagggctatataaataaatttgatttgattttccatgaaggcaccacaacacggtcccccggtattgatcatattcccaagcatctccatgcagtcagacttctgattttgtgccaccagggccacaataatatacccctctctgaatatccgagtgtgaccccctccccatgggttactgcagctagtgactgagctatgttgttgatgtaaattgagaagagttaggggcgtaaaga

SEQ ID NO: 37086 - DNA, 618 bp, Homo Sapiens
tttactagaatggaatgataggcgtcataaacacgtcatatgccactatagagtgtgcacagacaccttcaataaagtgacattcatttgagatgttacaatacagttatgcatgtgcttaataccacaggatgttaaggggtaagccatccaggatctccatgggaaagttggagcccagatatatttaggatttttcacttagaacacaagacaataaactgttgatttttacaaatggtatataaatccagagattaaacatgtacattattataataacaacaacttgctaaaaaacaacaattttcaaactaaatggaagcagatccctctgctgtatcctgaagtccatgatcatctcctttgtatggttgacattgagtgtgaggttattttcctgacaccacactccgagggccctcatctcctccctgtaggccgtctcgtcgaagttggtaatcagggctaccactgtagtgccgtctgcaaacttgatgattgagttggaagcgtggatggccacgcagtcaggggttaacaggcagtacaggagagggctagaaacgcacccttgtggggccccagtgttgaagatcagcagggtggcccgtcaga

SEQ ID NO: 37087 - DNA, 415 bp, Homo Sapiens
tctagaggatcgcccgctgtacagttgcggggggagacgcccccgcgttctcgtgtgcacccgctcggcccttgcactttgctttaactgcctgggcgccctctggctccgttacttcgggagcggtgccgcctccgtgagctcctggtgtccgcccactggggaccggggacgctgctggggcgcacgggttggagaacgcgactcagcctgagcccctctcacggttggggctagggggtgagcgggggcgtttggcaagcagctttccggcgaggactgtgccacccgtcaggctgacgctggtatgcgtggggccaggggtgtggccggggctttctgaataggtgggaggtgggcaggatttcagtccagtgaggacaccggccacctcccctttcgggcgcaattggta

SEQ ID NO: 37088 - DNA, 423 bp, Homo Sapiens
cttaccgctgtacagttgcgggcggggaggttatagaagaattataagatgggggagcggaggtgaggaagaattgggacttgattcagcctgccaggagtggctggggagggggagagaggtcagaggggtctgcagaaaagggggattcaggcgactctgaggttggggtagagactgaaggaacggacgggagagaaagaagaaaaatttgggatgagtcacattgggagcagaggcttgggagggagcgaagtgtaaaaaatgcctggatgcaaggcacctcagaccatgtgcccattttttgacaaaaatgatctaggtcttgtaggatggagaaatcaaaagtgccgttttctggccatttggaaccattgtcaagtttatattgcggccaagcagtcgcaactggtacggcggggc

SEQ ID NO: 37089 - DNA, 412 bp, Homo Sapiens
aagtcttggaataggggggttgaacagctcttaagtatgttcagtgaacgaagaacagaatcatctgttggagtagaaagaactcaaaccagtcaggaggaactcttgttatagaagaccttgggacactgttctggggttggggaacattggttataggaagtgtatggtttctttgtgggattttctgttgttggctgaaatcatttaagcttcttgactacagtctgactcacgttaaccattccttttctgatatggacattgctttcctggtcctttcttactggagatctttcgcagtctttccattgattttggtgaggtgttcttagctcaaagactactgatgagttgaatggtgtagtcttgattttcgaatctggaaacttcacgcaactggtacggcggg

SEQ ID NO: 37090 - DNA, 438 bp, Homo Sapiens
agacggagggctggggctgacgtccccgtgcgtgtgactcgtgcagacggagggctggggctgacgtcccccatgcagtgtgactcgtgcagacgaagggctggggctgacgttccccgtgcagtgtgactcgtgcagacggagggctggggctgacgttccccgtgcagtgtgacacgtgtccctggcctctcaagagagacaacggcacaggagggtgggtagaagcctcggaggctctgggtgaggaaccctgagccctgtgtgtctcctgcctgggtcccctggactccctcccagggtgaagagccaaaggcccagttctctccctagtcccagcttgggtttttggaaatgaccagtgctgactcccaggcagaccgtggtgttgaccccactggatgtgtggtatgtaggcacggggtggcaccgtcacct

SEQ ID NO: 37091 - DNA, 376 bp, Homo Sapiens
tccagtagtttaatgttgcctttacctaaaacttacaaaataccttttgaaaaattaaaacttttaagtcataaaaatgacgtagatccccactacataatcctctcatttatattctttcccgtgtctcaaaattcatcagatctcaagcatttggcaaagctgcagacatacaaaccaagcatgaaacatgagctatgccttcatctacctgagctgtcggcagacattgttactttgacagaatatttaagaaaagaagtcaccaaaaacttaccacagcctaatactggcaatggggggtcttaaagatcagttctcatagaaccactaacaagcacgggtgcagtgtggcaaaggcagccactgtgtttcg

SEQ ID NO: 37092 - DNA, 388 bp, Homo Sapiens
cacaggttgcattggtgcaagtcactactcactcagtgagcctcaacatcttctcagtaaaacagggatattaccgccaccctcaaagagtcattgtggggatgaaatgagatgatggttgtgaagtacagtgatctgtacacagctaatgttcagtatttactgttgactgttttcttactgtttcttttattaaaagaattgatatgtgtgtagaagtgcttaatgcctgacccgtagcatgtactatatgaatattagttattataacttttattatccctaagcaaagggcttgtgcagactggagccaccgatttcactgtgtctggccccagctgatgcctctgcttctcccctccccttagagcttgggaaagtcgaggtg

SEQ ID NO: 37093 - DNA, 415 bp, Homo Sapiens
tgggtgaccttttcactagtgagcccttccttgtctatcgcatattgatcacggccagcctcaggatcaatcaccataacgtgtggcctttatcggtgggccaggaatggcagctggtgacaatgactgccatttacttttcattgtggcttatttaactcagcctctcagcaacctatagatgtaggggttaccacccccattatcacagattaaagaactgaggcccatggaaattaaggaaaacttgtccgaggacttgagctggtgaacaccaggactcccaaatgacagtctctttcctcctttaaccctgacttcctgtttaaactcaatcaaatttaccatcagtatcctcagtactctttggaaacaggcaggatacagattaatagccaggccaggcatatagtag

SEQ ID NO: 37094 - DNA, 418 bp, Homo Sapiens
tattttgctatacgaaggtccgggctcaaatacatttgtgaaaatattaaatagttcaaacagcatttatgtcataacttctggctcctatgatgatgtgcttgtgaagctctaagactggggagatacgacaccccgagcctatttaaccatggaatacttttacttcagagcatttctcagcactggcattccattggctattttttgataaatgctgaactgcagcacagaaaggaatcgtcttgaagagatttcactcagaccaggaagcagcctaataatgaaacgtccatgacccactgaacagaacacttcagtagtaaccaaaatctttcgtctctaggctcctcatctctttcacctggacagggatggattcatatggcaaagtattcttttccaaacccagtttatc

SEQ ID NO: 37095 - DNA, 445 bp, Homo Sapiens
aagctccgtgccggtaacctcggtggattttgacacgtagaaagacttcagtaatctatatctacacactatcacttccttcattaaataagtaacttaaatcctgtacacagttgaatatatattgctggatttgattttcattagagctttcaaggatggtaaatctttcattcttatactgtacttgttaccacatacaaagaggctggcttagttcctgtctgcagctatgtgagattcagtcttgattttcaaaattcagtcatatttttaaagtgaatttatttctactctgtgtcattcacagaagaagtgagacagatattttgatattcgcaatctctcacttagacaaataatccagatcctacctcattgtatagctctgtttcttttgaagaactttattcaaataagttacaataatattttacatctatca

SEQ ID NO: 37096 - DNA, 439 bp, Homo Sapiens
ccgttctagcacgtggtataatcttcgccttctggaaaatcggttacttctttcaaacttccatattacatgaagtctaactttcagctcttttcttaatttagcctaagtattgcactatttttagtactttccttaagtctttacacacatccaattttggtaactaccagccttatgatctgatatcttcctcttccctcttgactcactcttgacaactaaggtattcgaaatgataagcatcaaaaatagcaaaacctatttccaagcacgacctaccctaacttttaaattaatttgcctgttggtttattaccttatgtttacttcacttatgaattctagacgccattacctatacaaagaagccagcagcctccatgtgaccatctcctgttgaagaagccagagcatactggctgtttttgaaaatttt

SEQ ID NO: 37097 - DNA, 397 bp, Homo Sapiens
tgagccactgcgcccagcccaaagtttccttttatctctcaccccacttctaatgttaacagctcacattactataaaattatcaaaaacaggaaataagcattggtatgatgttgttaactatagatcttatttgaaatttattactttttcttttactagtgtctgttttgtgttccaggaacctgtgtggcatttagttgttgcttgtttgtagtcttgtgttctagtctaccagtaatatttccttagactttcactgtcattgatgatcttgacacttttgaagagtgttcactagttatttgattgaatattccttagtttgagtttgtccagtgttctctcatgattgaaatgagattatgcatttttggtaagaataccacggtgctat

SEQ ID NO: 37098 - DNA, 439 bp, Homo Sapiens
cgtttatagcaccgtggtaattctgctcagaaccctggcagatcatgctgccccctcttctgctctcagtcctgctttgcagcaggaactatgggaggatgccagtgtgtccagttcgtgtctgttcacctcacacatacagaaattgctccattacacttctctgcccctgagaccaggtggggtgatgcagtcctacttaagacaacttggaggcacaagagcacaaaccaatcctgaatgtgctttgccctaattttaccaataaagaaactgagattttgaatgttcataaaacttgtctaaggtcacatagcatgtcaatgcgaatctaataaggagaacctgtactccagttctgggctctctttgttgtgctgttgtaatatctgtgacctaggatcggtggggcccagttctctaccacgggggatcctct

SEQ ID NO: 37099 - DNA, 362 bp, Homo Sapiens
actggcagcatcttagacacagaactcaaatgatgtagggaagttaccaaaggctgcttagtgctgggactcagaagctgcaaggacgtatctctccagaaccatcaggtcaggtgtagggaggcaagagatgttccaatctagtgacaaggtcttagagtgagggaatgtcttgttcccaccatgactcacccctgagttcctccctatcctgtatcttcctccagaagtttagggcccagagtgtggctgccagagtcacctagagccactgcatacacaaaggcatcctacaacccacagagcagtctttcttgctgtaaagaggggtccctaatctgtcccagcacagagctcgcctt

SEQ ID NO: 37100 - DNA, 451 bp, Homo Sapiens
attagcaccgaggtataattatcagtcctagggctgaacggcctgggtacccaacgggaggctgctggtataaggcctgcagtacaaagactggagagcctggagttctgatatccaagagtaggagcagagtgtcccacctctaggaaggatagggaggaaatcaccttttctctgccttttttgttctatctggggccctcagtcaattggatagtgcctacccacaatgaggatggatcttccccactcagtcctggttcacacaccatctcctctggaaacactctcacagacatacccagatgctttaccagttctctaggtattccttaatccaatgaagttgatacctaaaattaaccatcataaatagattgctcaaatttaactggtctaaacctaaagtcctgctctttctcttcaaacttatttctaccacggtgctata

SEQ ID NO: 37101 - DNA, 408 bp, Homo Sapiens
tgatctccctacatatagcgagccgatgactgttatgcatttctatgttacaaaatttgcacactttatttagatttgcaaaggacattaaggctcataaatacagttcacctataacctttatcatccacgactttataaatacagcaaaaaaattgatgttactgctgggagaaggatgcgtagaaaacaataaaatgatctgctataatcacttggctaatcagcctctgagctctagccattcaaattaatgggtcagcaaaattacaagtaaatatcatgtcctgtatcttcagaatcgcttaaaaatagtccaaaccattattattaaattagaaaaggtcaagggtctactataatgcctatatttctactttccctcaacttctttgccccaaaaagggg

SEQ ID NO: 37102 - DNA, 455 bp, Homo Sapiens
tgggccgttgggctacgcacgtaggggctccggctgtaccccctgcatactgccaaggtcgcagctttctggcaggcagagctgactgggctgagcagtgccaccacggctggggctgctgggatgtcttgggaggagggttctattgccgtggcgtttgtttaccaaaggcccttccagagggagatctgcagaggaaaagagaggctgccttctcggcttggctctgagctgttcctacttgagacctgtgggtgctagaggaaaggccacacctcatgcctgtggacagacaggcctgggggctggatgcagtcacctttcaggctccatgcgggtctggcttctcttatcccttgcgtccatgcgtgggaagccctgagccctcccacgggacaggaggagccgtgaagggaggaagccccgacttcggggtgatcgtgcgtaagttccca

SEQ ID NO: 37103 - DNA, 467 bp, Homo Sapiens
atgggaccgtttgggtcacgcaccgtttacgctgcatggccctcccagccctcatccaggctggctgcgaagggtttctctggtctgtctcaggaagcctcctgagaaaggggagattcctgctgtctccccaggcctgagccccatgctcacccccagggctgccaggtaggtgggcctggagatttgtatctatacacagtgggaaaagaagcaacttctttaacactccttctgatttaagcacctagttttcagcatgatctgagcatttggttattatagctctaaaaatgttatcagtaatcctaaacaataccatcctcttactatgtggaaagcactgtgttaagcaactgacaaggtggttgcagctatggtaaccatcatcattattttaactgaggctcaaaatggtagaaaacttgcctgaggtcaagcagctaatcacaggcaggacctaaaat

SEQ ID NO: 37104 - DNA, 397 bp, Homo Sapiens
tcgctattcatcggcacctagtaacctggggacacagatccagcccaccagcacctgtcaggcctggtctctggggctgccaggatttgggttctgtctggagcaccaaagtaaggcaggctgtggaaggagttgaagcaagtgctaaattaggtagggtctcttgggctgggcagaggagtcactgggagccatgcaggagcttgttaaacagggagtggcatcagatttgtgccagctgtttgtggagggcccatgagcaggaattggggcagtggacaacaaggcaggaggactgacgcagaacacattgcagcaactcagggaaggatgatgatggcttggactttggtggtggcagttgcctgtgtgtatggagagaaatacatggatttgg

SEQ ID NO: 37105 - DNA, 361 bp, Homo Sapiens
catcggcacatggatggcccttgaggcattggctctgggtgtcatgggctgtgagagtcaagaagggcagtggcctgcctgacttgggttcgaaagggtcactctggccactgcggtgagaactgaaactagccaggccaattctccattgttcctgctcttccaggtaggagaatattagattaggtctggagtcagaaggtagcaggggctgggggttgcagggggatgttgagaagaagtggtcctttggtcagggtgggaagccaacaggatttcctggtgcattggaggtgaaagggaagaggcgctggtggttgtgctttgggcctgagcagccagaagccgttgccatcaccta

SEQ ID NO: 37106 - DNA, 356 bp, Homo Sapiens
gctctgaggatccctcctatcatcggcacctgctcccagcaggagggacgggatatgctctgagctcactcagcccttctggcactgactcggttctcatctctcgccttgcatagtatttgtgtggcggtgtggcttatcgctgccctgtcctctgactctggagggtgggggctgtttctgacttacctcttggtggcagcactcaggatgggccttgcctaatgtaggtgctcagaaaattagttgtcgttagttgaacaacagagacagcacagggaagtggtttccctgtggttaaaatataggaccttgaaggctgggtttggatagagaaacgtggggagggtgaggtg

SEQ ID NO: 37107 - DNA, 422 bp, Homo Sapiens
tgaggatcccctcgctattcatcggcaccataggcaacacacgctggggacgacacacgtcctggaagtaaaatccaaagggacagatgatatgtgctttcgtgatggaggcaggaggagctccatctttactcttcctttatagaacagaggccaaaatgcaggaggcaacaggaccattcgcacagttgcaggtgtacaatcttcctgtgctgctgaacagctggaattctgacatggggcacttccagacatcaccagacatcactgaaccccaatatctgcttgacgtgatctgagctgcaagaagagtaactcaaagggataggagaatgacaaccaaaaaaatataaggaggaaaaacagagcaaagaaaactgccaagggagcaaccagcttatgagacttacattctatatata

SEQ ID NO: 37108 - DNA, 393 bp, Homo Sapiens
ttacatcggcactccagcacagtagaggaatgcggaatgtggctcccaacatttggtgatatcaactgtcctgggagaaaccccaaactcccaagagtcaaacataggtttaaaaaaggagtttttttggggtgggggggtaggttgttgtttcgagtttattagtagtgtttgatgtttccaaacaccagttttaaaagggaagatgggttgggggacctcttccagtaagcgtgtacctcaagaaccaaacatacatgaattaagtccagataaggcaattcaactcatttgtatcttactgaggcacatccaaccaaggaagaatagagacttagttatattaggctctctcccagctctgacatggtgccgatgaatagcgggggatca

SEQ ID NO: 37109 - DNA, 351 bp, Homo Sapiens
ggcaccacccccgcggcaggatgccggggtagaaccagcaggaagcgctcccctaacgtctttcccgctcactgtagctgccacccattctttttaatccccagagagcatacagatgagccccagtgggccatctcagccacataggggacaggccggggagaggatctagagctggcccaggaaaggaggcccttttcattttgagggaggcctcccatcagagaagggtccagtcctgccccgaccctgtccttcccatgatacccacaatcccagggtgacctgtctccagggcagaagtgacagacgagggctaggagactggctgaggcctaagtcctctgcaat

SEQ ID NO: 37110 - DNA, 429 bp, Homo Sapiens
ccagctctggcttggctattcaacttacttgattgtctacacatctcatctcagctccaaaacctctcctggccccagatacctacctggctgctttctacagcatgccaccaggtcctctgggcagctcctgggtctcctggaccccatccgcactacaaggacgctgcatttttcttcccatgcagattgcactttcctacttgtaccctcctgcacaggctccccagcacgcgacagctgcagctaagggtgaggccctgcagcctccgatctatacacaccactgggcgggcactgtccatatgcttagaggtgaagaacccaaaactggaactcttgaggccccaaaatgaagctgctttgagatttccacaccagggaactccatatatacactgagactaccttcacaattgagataagggg

SEQ ID NO: 37111 - DNA, 401 bp, Homo Sapiens
ttacaaccccacgatcaccatactggtcttagtttatttgcagcagtttatccctttttaagaactctttgatcttttggcccttttaatggtgaggctcaaacaaactacatttaaatggggcagtattcagatttgaccatggtggagagcgcttagccactctgggtctttcacaggaaggagagtaactgagtgctgcaggagtttgtggagtggagtcaggatctaggaggtgagtgactcccttcctagctgccctggtgaacagcgcttgggtagatacctgctataaggagactggtctggctgggttactttcacatcctgcctgtactcagagggcttcaggtcattgacattatgagattttaggcttgatccctttttgattggagggt

SEQ ID NO: 37112 - DNA, 423 bp, Homo Sapiens
ttacaatccccacgatcacccaggtttattgaccagaaaagacatatgagactgtggcccgcagccctgcttcctgatgcggggcagggtgagcggaggggtagggaggcaggcgggaagacccccaccctgagcgtctacaggggttcccatatcttctgctcagctcccccaggcccctgggagggagtcctccccactccacacctttggcctctgacttccacctgtacctgcctctttctctcagactgcgattacctgaaggggtccaggcagggtgggttcatggcctggtgcctccaagtgaaggccacaccacttcccagccctttgctcctggggcctggagcagatgtgtctgagtcagcttctctttgtagcctctgtcgggctgacagtgacttcaggaatgctctcctc

SEQ ID NO: 37113 - DNA, 378 bp, Homo Sapiens
ttacaacccacgatcaccaccactactgatgctaattttgccccatcgtaggctggtgtttacttactcctttgtctctgtgctttaaccttctttcttcctcttgtccctttagtactttcttgcctccctccacatcatcccttgtcccccggacccaaatccatctgtcttgatctctttaggctgattttcctatatcatgtcccattctagccattctagcccaggcccagaagctggcccacagttcactacctttcttcatttctgctttttagtgagtgaccactagtgtttgttaacaaaagtgattggaccacgaagtggcaggctgaggcatgaagacccattcatgtagccttaaaagatttcagg

SEQ ID NO: 37114 - DNA, 391 bp, Homo Sapiens
ttacaaccccacgatcacagagaatggtaggggactgaattttgtaagcagtgtgtctttcctgacaggggcagggagcctggcttcctgagactgtcccctgatgccacagcagatgtgtcaaaccatttttcctgctcatggcatgtagtttgagagagcttgatagtgaagctgccagctcagctgtgactggccactcatttgcagactagaatgccttactggcctgggcttgcttaaggtaattgcttctagactcctcactcctgctgggccacagttgcttgaacagtcaaataaggggttggggggtagaggatatatctcaaaaccttctttgtgcttgaagatttgtgattccttgttctttggagaatgaaaatatctt

SEQ ID NO: 37115 - DNA, 392 bp, Homo Sapiens
ttacaacccacgatcacacagaaagtcatgtcttcaagcagaaagtaaaatatgtagtattttaggtggtgataagtattgtggaaaaaaatagagcagagtaaagggataaagaatacaagggtagggatggggttgcaattttaagtatgatcgggggaaaagtcacagagaaggtgacacttgagcagacctgaaggaggtggtgggatgcagatatctaagggaagaccattccaggcaaagggaagagtaagggaaaaggcagaaatatgcttgacctttggaaggaacagcagaagaatccagtatgtctggagcagaataagtgagggaaaaatagtagacgatgaggtcagagttgacttagggccagattgaagagagcctta

SEQ ID NO: 37116 - DNA, 386 bp, Homo Sapiens
ttacaccccacgatcacaattctgtccgccaagcactgcccatgcattgctcacgagaaacgcctctggacggtgctgcttctctccagcctcgacctcctgcctttcctgctttgccccacctggcctctcctgcctggatgacagcatggctcccgggaggcccccacctccagcgtcaacgctttgcaatcttcttcaagtagcagtgagggcacgctttcaaacgggccagtggacctggtcactcccctgctgaatgtcccccaagtgctcttctgccatcctgcctctgctgaagagcccctccatcgtgtggccatgttgcccctgcagcctccctgccaccctgctcccgaccacgccgctggctctgcatccctcat

SEQ ID NO: 37117 - DNA, 379 bp, Homo Sapiens
ttacaacccacgatcactaccaatatgctactgttccctcagagcctaactctagctatgtgtctgttgttttctagaactcctttcttctccattcccagaggttgaactcagggtttcatcacttctttctcttagagattacctgcccaagggtatgcctcagcctaaacaccagcctcattgcccaggagtcagggtatctgctcctgatcaggatgcctctgcctgggaaccctccgcagtcaaggtcttcacactgcaccaccattacactccagcacgtggtacctgagacttacccagcatttgctaaaggaacagatactttggtcatctggacaagtttactgaacacagtgttcagtagaaaccagat

SEQ ID NO: 37118 - DNA, 383 bp, Homo Sapiens
ttatcaacccacgatcaccacagctctttctccatgcagccttctcctctctgattccctgtcctgtggactctgctcctgggtctccccagaatcctagctttgtctccccagttcagggatcctactgggctctacctgggtttcccttggtattagtcagcccagtctgtcatacaaaacaccacagactgtgtggattcaacagcagaaactttttttctcactgttctggaggcttgaagcctgagatcagggtgccagcaagtccggtttctggtgagggctctcttcccagcttgtagatcgccgccttcttgcagtgtcctcccatggcctctcctctgtgcttgcatggagagggcactccagtgcctcttcct

SEQ ID NO: 37119 - DNA, 396 bp, Homo Sapiens
ccacgatcactgtgaggagattggattgtaggtggccactgcaggtggaggcaggagagcagctgaggctgttgccctcttccaggcaggagttagaagtggcttgcctgagggtggtagcacagtagacagggagtagtggtcacattcaggctgtgtttaggaaataggctcttcacaccttcatgatggactgaatagtctgtgggagaaagagaagaggcaaagatgactcctcagggcttgggcacctgagtggatagcattcatatcgttgagatgggaagagccggtttggggtggaggagaatcatgagatcttgttttgccatcttacatttgagatatgagtatgtcagatagtgtgatcgtggggttgtaagggtaccgagctcg

SEQ ID NO: 37120 - DNA, 387 bp, Homo Sapiens
ttacaacccacgatcacatagctactaagtggcagaaccaagatttgtatccaggttgtattagtccattttcacactgctataaagatactacctgagactgggtaatttataaataaaagaggtttaactgactcacacttccacatggctgcggaggcctcaggaaacttaaaaccatggtggaaggtgaaagggaagcaagcaccttcttcacagggtggcaggagagagagagaacatgagagaagtgggaagcactagacacttatcaaacaaccagatcttgtgagaacccactcactatcatgagagcagcaaggggcaaatctgctcccacgatctaatcacctcccaccaggtccccccaacactcttaattttctc

SEQ ID NO: 37121 - DNA, 414 bp, Homo Sapiens
ttacaaccccacgatcaccatgtttgtcaggcttgggttaaaatcttttgatctgagagctaaagggtgagtaagaactagctaagaaaagggggaggagaaaggaacagaaggtctgaggcaaggggaatttggcaattttgaggaaccaaaagaaagttgtgtgactggagccctagggtgaagtagatcgtggtgaaaagtgaagctctgggggaagaccgggtatgattggtagaggtgttctctttaacctcatggcacggggaagccttgaacaaggatttaaatggggaggtgaggtaatcaaatttgttttgaaaagacccctggggctgtgctgccgagtatatccctgagaagggtttgtgaggatagagaaactaatcaagacattttttgcagtgatcgtgg

SEQ ID NO: 37122 - DNA, 368 bp, Homo Sapiens
ggctcccttactacccacgatcacttgatgaaggtggcatccaccagctatttccattttaatgactagtatctttgcaagaatgtgtggccttttgattggtcctgggtgcccctgatactttgtttatggtagcctttcagctagctgtttgacaaagctggcaaaggagaagtaacttttgatcagaaagaggatggtaccagcagtctacaggtgtcatcccagtcactgttccctggtcccaatggtaacaactgacatttatcaccatcaattggtttttcctgtttttaaacttaattggaactatacagaatgtactctttcagtctggcttcttttgttcaacatttgtgagatttatc

SEQ ID NO: 37123 - DNA, 372 bp, Homo Sapiens
acgatcaccagccaaatgttcctgctccttagacacaagtcacccttcatgctgtttcagtcaccatgcccacacatctgtccttctatgaagatctagtcaatgccatctcctcccaaaagtctttcctggttatggccaatccatgatcatctcacacctttgaactgcaaaagcacttcttactgttgattaaaactatcactttttgcctggtattctaggcattcttaaacggagatgacacctcgagccctcggctagcctgtaaacgccttgagggcagcacctccaaccaaacaccctgcacataaaagggttatctggatgtgatgagtgatcgtgttacaaccccacgatcacgaacaggga

SEQ ID NO: 37124 - DNA, 389 bp, Homo Sapiens
gcttcactaccacgctcaccatgcagttcttgtacgaatagtcattactagattaagatctagtgtgttagttaatagtatgaagtgcctgttttgggataatagataggtgatttagattaatttagggggaaaaaagttatcttggccggaaatgttgagggccccatctcttcccccacaaccccacagaagttactgggttaccgtgttttatcctgaaagtttccaattccactagtcgttgtgtgttcacgtgtgagaataactttggctttttcctttggaggtgccaatttcttactagtactatttctttaatgttacatgtttaccctggaatgtttttttaactcatttattgtatatgtgtgtgactgtgaacattc

SEQ ID NO: 37125 - DNA, 452 bp, Homo Sapiens
gctcaccaatgagctcctcgctcagagggaaccaacttgagagcatcgtgacctgctccatgatctgcactgagttcacccaaccggaaggcaggagagtcaaggccagtgttttaaggcagggctatcacgacctctcagtccatggagatggcaaccccaggatcacgggctcactagtgtaatacaggcggccagggctgcaccttcagagggcaagctagccggccccagtactactagtgcatcactcatgctctcatacctccacaaccacgtgatgctcaagtgagggagaggccgtaatggcatctgcaaagtcaggtatgacataaaggaaaggaactggtagtagtcacaggagcctatagcttgggaaaaggctccaggctgtgtcataatgcacaggctttatatgtctggggtcaaaggatgaggaactgaactgctgg

SEQ ID NO: 37126 - DNA, 404 bp, Homo Sapiens
ggcccggggaggttaccgcccaacagtactttttggaccccccaagggtctccttcttctagtcctggggggcacccctttcatcctgcgcccgctacgagaccctatctgtatcccgggagggggagaggagacccccacaagttctttttggacctccaagggctctccttctccgtcttgcacgggagggcacccctttcattccgcatcccgagaccccatcagcaccccaggccaggaggaggagacccccacagtcctcaacccctcagggatacgtcttctgcaccccgggtcggagaaaggctggcttccctccatgtggcagtgggtgggggcacccctcttcattccgcattcccaaggcaccccatctgcaccctggacgggggaccctccgc

SEQ ID NO: 37127 - DNA, 409 bp, Homo Sapiens
ttataaccacgatcacccagtgtgggcagggtctgtgtccagcaaagggagtcctggccacgttccccagagacggtggcacctgggacgccgctccctgcacttttgtccctagggaagaatggatgggcctccaaagcccccaggaagatgctcccagaagtgggctggggtgggtggggggcgtgagtcacacacagaggaaggcctccgtgagccacagacacgcagcaacccttcctcagaaggtgcctggcctgccggcggccagatacaacaaaggcgcagcctgggccgctggctggacagaacaaaggcgcggcccgcacactggactgctgttgaaatttcccaggaccccacggaggcccagcaactgcggggtgagcgcccacggcaggggcctcca

SEQ ID NO: 37128 - DNA, 362 bp, Homo Sapiens
ctgggattaatgtgtaaacaaaaatgctataggggtgggctggagggagagcactgggaggtgatggcattttcaggaactactgttgcactgtttcgtgctctgatggggttggatttctttttcctgggatcaggttggattgatctctgaaagagaactatcctgaggacgtactggtgccgaagaaagcaatgattaagtgggtagttgctttttctgccatcttgttactgcccctgaccctggggctttatgtctagcagggtcatctgagggacgagatttcagagtgaacaccttgaactcttggtggtcattagatggtcctgtgatcatggtgggtgatcgtggggttgtaa

SEQ ID NO: 37129 - DNA, 359 bp, Homo Sapiens
cacccacgctcgtgtcaaaaacgcgagtggatacaaactgtggtccattcagaataagggaatatagatcagcaggaaaaagggatgactacctgacacccaccatgacacggatgggactcaaacgcaccatgctgagcagaggaagctggactctgaatgctacaaacagtgtcattctgtttacaggaaactcagaaaaggcaaacttttaggccagggaacagctcagtgttgccaggggctgggggtgtggagatttggctgatgacaaaggggcacatggggaccctctgggggatgaagctgtgtgttctgtttgactgtggtggttacacagcaagcccatgacctgcacc

SEQ ID NO: 37130 - DNA, 405 bp, Homo Sapiens
aatcacatcatcctctcatggcactccaggtccagtaacactctccatcagcttggcaccaaggagtcccggcccaaggtgacctccagcttcacgtacaacaacttctgcctgatcacatgggacttctcactgcctccagatctcccaatatttcacccatatgtttgcaggagggcttccctctgctggaaatgtgcttccctggcctcttcatctagccaactgtccctgtgaaactcactttaagagctacctcctcctagaagtcttcctggattacccccacacaccagtcccctccccagctgggttctgtgcctcctctggcccctgtcatcactgatttgtggccctcactagtctgagagtgtcatgagggcagagaccacactccctaaacac

SEQ ID NO: 37131 - DNA, 372 bp, Homo Sapiens
ctatcactatcttatcaactaatagtgagcacatgattccaaaactcccaccaatcagcctagcttccagtgtcatcctattttctctatactcctgagtcttcaccgtctccattctgttcatttatagaatcacattatccaaggctaatgagtcctcattgagcttagcacatcctgattcatttctaaactcaccagaatcattgcttgtgagactgtttccagaaacaaatggcttgcgcactgcagatggcacaccacagacagtcccatgtgccacccactaaagctaaaaagtcacctggtaatggagttcaggccgtttcctctaatgacagaagtctatctgtgttacgtctaggtcgggga

SEQ ID NO: 37132 - DNA, 353 bp, Homo Sapiens
agtaaacggaaaacatacatcgatgcaaaataaagtcaacaaggcttctgtgtgcatgaggccaaaaaattacatttaaaacagtctttgtattccaaacatctaaatatttgagaaagtctgcaaaacaaatgctatttggatcaacttctagggggactgatggtatcatccatgtttctctgatgtgttagcataatagagaatgcagcttccaacaatcaagccagtaactgggcacaaacacagccagctccgtctttgccatcactggaaacatgtgctgggcaagtaacataactgactctttgatggccttctggagccaaattgtaatactctgattgttcgta

SEQ ID NO: 37133 - DNA, 355 bp, Homo Sapiens
tgaagatggggagattggggagggtgacgagggatctcggctctgccaccagagggcagaagtgtgccatacacccagaactgcgggattagccctggtgcccaccccagacacacaaccacatactgtgggagcccctggtagccaaccggtccccctgcttcaacaagagcaatggggcatgtccagagccaggctgtgtgttcatgatgggactccttcgcccaccagcatttctcaatacagaagcagctgcgtttcgtacttcattatcgaacactcttatgcctcagagaatagcagcaccctgggaacttggccctcaatgccagttgcacccacacaggttgtgatc

SEQ ID NO: 37134 - DNA, 351 bp, Homo Sapiens
gctggactctctgatcaggtacagatataggcggtgagaaatccctgtgtactcttcaacacaaccctggccctttaggaaagcaggtgttctgtgcagggaagttcccatgactgtcacgatagatgtgttgaataccaggattttcacattttccatcctggactgctttagtgaactcctatcttaaacacatgtgcctagctccatctccatggagacggctgttttaactgactaggacattccacttgtgactcacaccctctggggcacaccagtgagctccattttccacacctgcagcccaggagtactgtgggtcacaaaccaaccaattcaaattggttt

SEQ ID NO: 37135 - DNA, 382 bp, Homo Sapiens
acgtacacagccataaaaaacaaattccagtgcctacagaaacacggacagagccgtagtccattatgaacaaaaggcaatgaacagaaaaccaaaattttcaaaacagctacaaaggtcaattgtgaatattctctccacagagaaatcataactctggagctcacagagatgctagacactgcaacttcattatgatgccacttttacatagatcaaattgtcccttacagcagctggttatacacacatactctacggcaatgaaattgctatcccattctggtaacattcattctcagtggagtgagatgatatctgagtgtggttttgacttctcgtgaggatcagtaatgtcgattcagaatcttttacctgtgtt

SEQ ID NO: 37136 - DNA, 357 bp, Homo Sapiens
atagtctcagctgtcactgttgaaacttatgccattagtttattcacttttgtcttgcgatttattattacctttcctgtttttaaaacactcaatgtcactaaaacctttatcatagcaaatttttaggttatttaatttttcaatattgagtaaatggttatttgtttttagaaggcattctatttaagctccactctattttttatatttttcccaagttcacgttgaacaatccttcaaacattttatctcagcaaatagtcgctataggaggtaagatcaacaattattgacgtctcggaaaggtatttaatataccatacatacttgactcatacgttctggggtttgaca

SEQ ID NO: 37137 - DNA, 385 bp, Homo Sapiens
acacaggaacagcaatgcgggaaatcgaccataatcccatcactcccacaggtcctccctataacatatggggataacaattcagcatgagatttgggtggggacatggagccaaaccatatcaccaaactcatgtgacttttcagatataagcagtacaatgaatagcaaatatagcagaatatccaattttgttattgcatctatacagcctccaaaatactatgcacttaatacagggcaagtcaagaacaaccactccagtcgtgtacctaggaatccaagccacaccagaaggaatgtctttcaaaggtaccaagttttgacatttgctccaattaaaaaggtttctccggatgctctggaggtattccaaataagtgtc

SEQ ID NO: 37138 - DNA, 406 bp, Homo Sapiens
aatttgggagatgtggtaacatacttgaggcgttgatacatagtgcagtgagccaatttccttttcagttgtcactcagcaccataacatcacgaagaacatcattaagtgcaaacctctcactaagccttcagaccaaagtggctttctgatggactctgcctgtctgtctacaagtggagtcagattcaaagtagaaatgtatccatccttgggaaagaaaataggaagtcttcccccactgtaggagtatataaaaatgtctcctggttgcttaattcccaacactcaatttccttcttctaaacacatttataaggagcgagagatggtgcacttattatgaattaatattaagcaatcactaaaagaaaggaatattctcttcctttcaatcagaaaccct

SEQ ID NO: 37139 - DNA, 370 bp, Homo Sapiens
tcccggtatgtctgaatggggttttcttcccatactccaggtacttagggaaaagcacgccaggtttcacagtgtggttctaggctagccctgctggggtacagaatgcttccaggctagtccccagcagagtctgaactcagagctgtgaatcagacactcttccattacttctgggggcctgaggaccttccccttcctttctaggaccctcacgccaaaggctgtttgggcctgagccccattttctaccccatttctccagctgagatgaagctcagaagcattcttctcttctctcccagtttcaaacctatttgaattggttggtttgtgacccacagtactccttggctgcaggtgtggaaaa

SEQ ID NO: 37140 - DNA, 460 bp, Homo Sapiens
agctcggtaccactcaagggcgagctgccccgcccctcaggctctactgtcctatctgtcccatctgtcccccacccacacacttctcccaagctactccaggcaggcatggtcttctctcttaatttcctatctcaccccatagtttttccaccatcttcaaaactcttccctgatctcagcaaaccaagactctcctaattgtctctggcgcccaaaatctgcatgtaccaccctcctacgctcactcctcagtgttttccccaagttactctttccacgctgaccctctccacgcttcactcctcccagcctactccctcggcgtccaccccccgttaccggccccttcttactctcctgggcccttcttccccgccatccgtcggtcaggccttctctaggtcaccgcttgcctccccgggccaaccgcagctcgcccctgagttgcagctgagtt

SEQ ID NO: 37141 - DNA, 360 bp, Homo Sapiens
cgtgctcgaggggagcgaggccgctccaggaggtgggtgcccgcagaggggcggcgagggctgccgggacggttcacgcagcggccagcagactggctgcgtgttgcaatgtctggtggcgtttgcagcatcctgtccgtgtgtgcagctggggtaacctcgggccggcggaggagcgcgtgtggctcgtaggccctgcggccggaggctgctggcaccttgcatctcatttacagctccgggttcagccacaggtcagcggcgcccgtgacatcacggcgtctgtttacccgacgggtctgggcaagaagcggacggtcccggagcgggagggggaccccagcagctcgcccctgagtt

SEQ ID NO: 37142 - DNA, 375 bp, Homo Sapiens
tactgcactcagggcgagctgcccaatgttctggaggatcggggcacttgctgcagcagctgaaggacccctgcactaaagtgggtggccaggagcttcacgaggacaggctgagcgtgtgcggcgggagggcctgctgctccagggccaggaaccagccctccagggtggggtgcctgaggatggccacaagcacctcctccagcgtctgatcattggccaactccagcgaggccacggactccatgtccaggaagaggtcggcttcggcccgggcggcctcgcatctctgctggttctgggcatccagctgctcacagtggacaaccaggcgcctgaggagatccaggaagagctgcagctcgcccctgagtt

SEQ ID NO: 37143 - DNA, 403 bp, Homo Sapiens
gtgccgctcacggacatcaggtgcgtggtggtgacgggcgggggctgagagtgcagggacgtggccgaggcgtgcaaggagagccggctgcccgagagcctctgggccagctcgtgcacacttagcccctgtcaagcctgctagaactcagcattcatgacaggggctaagtgtgcatgaagtgacactgactacagctagaaagccaggcgcacaaatgccccttccccccagggccgctctttccagcgcagtcatccagaaaggcccacgtgcagagcccctgtgtctcagatgctgcttcagttgcccgtcctgtcctcagaggccactgtgctggccctctatcatttgacctgactttagaacctgacctcaaggatatggcagctcgcccctagtt

SEQ ID NO: 37144 - DNA, 419 bp, Homo Sapiens
ggaagaagagcaaatctaccttagcttctccagagccattaagatcccccgtcttcaaagcctaacagattaagcagctctccagttcacaacctgcgcccaagtaaatgccaaagaaagtcctaaacccagccgaggccacgtctctgaaaaaactcgccaagaaaaaactaagaaattgactttacagaagtcaaaccacaccaggctaagtacaaataccttctagtactagtagacaccttctccagatagactaaggcatttgctaccgaaaacgaaaccaccaacacagtagttaagtttttactcaatgaaatcatcgttcagtataggctgcctgttgccataaactctgataatagagcagccttcacctcgcctatagctcagtcagtcagggtatgaacaacagtgca

SEQ ID NO: 37145 - DNA, 460 bp, Homo Sapiens
ggcatgaactaagacagagatggtagggctgatgagaaaggcataagagataatagcaagtaaagctgataggacttagtatatgggtggattcagggtaaaaaagaaaccggaaatcatttccaggtgtttagctagaaggttgagtggatggcagtgccattagcaaggagagatcatgtgcctaggaagaagtctaggcaaaagaggaagaagttttagaaaggttgtatgacaggtgcctgaggtatactccagtggagatgctccatggataggggcataggagtctgaagctcagtaaagaggatgggctgaattaaatatttggaagtcatcaggacatagctattagttgagaccacgagactgaatgagatcacccaataggagtctcttaaatggaacagtgtgagtcaaggacagaaccctggggaaccagactccattagaaatctgc

SEQ ID NO: 37146 - DNA, 350 bp, Homo Sapiens
catgcctgtcgccttttctgcgcccccatcctgtcggccagctctccgcaggccttacctgttagtgcctgttttccttgcaatgcacgtctggagtcggccctgagtgtgttccctagttggcccccttactgcctgggtgaccttgggtggtctgcttcaccttgagtctcctggtgtcaagcgtgagagaatgagtccaggtgcccagcatggaagctgtcccacggtgtcagctccttctctttggaccccagtcccccattttcccaaagtgtgtatctcatctttctcaccctcatggggctgcttccttcctgggcatcttatctcgcacctcctcctttaat

SEQ ID NO: 37147 - DNA, 374 bp, Homo Sapiens
acatacttcaggacgtgggtggctctgcccgggccctctagacgtgcaccagaaataaaggcgaagacccagcccctcggcggctcagcaacgtttgcccttccctgcgcccagcccaagcggggcatcgccaagagagacgtggagaggagagcggtgggacccagcccccagcacgggggtccagggtggggtctgttgtcacatactgtggcggctcccaggccccgcccacctggggccccacatccaggccaacccttgtcccaggcgccaggggctctgatctcccatccatcccaccctcctcccagaggcccagcctggggctgtgccgcccacaggagttgagacaatggccatcctaacacctt

SEQ ID NO: 37148 - DNA, 426 bp, Homo Sapiens
gtccccgtgagcacaggcctgagaatacttgtggggatggcagccccctgcaggtgtggctggacctgggtagagctggtgagggaagcacgatgcctggacctgctaatggttacgggcctggctgtgaaggcccatctgggcagcgtatccaccccatggagcagccacgtttcggtgacattccaacactggcctgatggtgggaacctgctgagggcccacagccctgccccttggcactcaaggtcccagctgtccctcattaggacccggtgtccatgagtcagactgttggtcataggcttccccagcagccctaatgtgcctgtaattagccactgacattttctgtcaccacactactaatactgtatattagagaagcacagacagataagtcaggaatatcagtcactgtaggaa

SEQ ID NO: 37149 - DNA, 471 bp, Homo Sapiens
aagaacggataggatgatatcgcatcaaatacaggaagattccacatcatttaccaatatgctaatacaccgagagaatatttagacaaattcattcttcctcaggttcatgacaggagagattgtaactacgtttattatctaatttttcagccaaatatttaagaatcaaatgaaattcaacctcatgaaggtgtaagagacgtacacctcatgaaggtgtaagagacgtacacctcatgaaggtgtaagagacgtacacctcatgaaggtgtaagagacgtacacctcatgaaggtgtaagagacgtacacctcatgaaggtgtaagagacgtacacctcatgaaggtgtaagagacgtacacctcatgaaggtgtaagagaactagaaatgttgaaccacacacacagaattggtcctcgataccgcaccaccagccttccctacactccccgcagcactcgagaac

SEQ ID NO: 37150 - DNA, 536 bp, Homo Sapiens
cggtaccggacgcgtatcgggggcaggttgacacacaatacacgcacgggcacactaacccgtggcacaggcatgctggcgcacacactggcaaccgctagcacacgctcatcacacgcaggggcacgccgtcatacacgcctcggtcaacacattcttgctgacagccttgttggcatgcacagctcacactccaacacacaccaattctagcacaccctcgtgctggcacacacgtgtgggcatacactgatacgcacactgtcacctgcactcgctgtagcaaacactcttgctggcacacacatcaccctcactggcacacacacttgtgctggcatgtctcaccaacacagcggagcgcaaggccacaccaacactgacccccacagacacaatcagactgatgccctcaaagactggcaccccacaggcacgagctgctagcccaaggcccgctgacacacacgcttcaggccccacatggccagaagtggaaacacacacatcacacagggtagagcgccccccgatac

SEQ ID NO: 37151 - DNA, 454 bp, Homo Sapiens
ggattcacgggcgacgtgaagaggagggaatggagtgatgcgtttgaatcaggcatagtctcgtacgtgtcatccaaggagcccggcacagaacccgtgtcacccccatgtcacccgcagaccccgcgtcacccatagatacgcacaccccgtgtcacccccatgtcacccgcgtgtcacccacagatacacggcccccgtgtcagccacagatacacggcccccgtgtcagccacagatacacggccccccgtgtcacccgcgtgtcacccacagatacacggcccccgtgtcacccgcgtgtcacccacagatacatggcccccgtgtcagccacagatacatcggccccgcgtgtcagccacagatacacggacccccgagtaaaccgcgtgtcacccacagataaacggcccccgtgttacccgcgtgtcacccccaatacagcgacaca

SEQ ID NO: 37152 - DNA, 384 bp, Homo Sapiens
atgggagaccggctctgttaggaaggtgcgggcaacccggtcccccgccctaggattgaaccaggatgaagacatatccaggaaagccgctgtggccagcctgagcgtaagagagactgcgactccctgcccagtggaaatacactatactgcaagatgccaaaatgagccacttgaatcctttttttcgggaagtcaaaagtacggtgaggcacgagaagaaggatctccagctccaagttgttctccctcttgtggctgaacacactgttaccatatgcttatgaaaccatttgcatatggtacaagcccatgtgggagaaatgagagctctgacaacttctacctgtcttctgtcctctcctgacaatgcatctccatcac

SEQ ID NO: 37153 - DNA, 403 bp, Homo Sapiens
gctgggagccagttcccggacccaggcgaggcccccagctgatgacccgcccccatcgccgtgatcctctgggtcgggcttccccgactccacgcgacagtgaccacatccaggtcgccccgaaaacacagacacgtccctgttgacctgatgctaccactctcgtcatctcagggactgtctggcgcccccctcccccggcctgggggcttgtcagccccgtgcagcgacgatctacgcacacgcgcacgcctggctcggggacacctgaggttacttgaccacatagagcccctccccatctcttctgacccgaggattctccctctcgctctccctgtgaccgtgtctgaggtggggggacgggagggggtcccctctccccctcttggcgacagtgacc

SEQ ID NO: 37154 - DNA, 380 bp, Homo Sapiens
ggggtggggtacattgtccgcagagtacgttccccatccctttgacacagaatccagtcagtacctattctgggcccacactttgctcagttctgaaactgcctaccccactccaattaatttcaagagtcccagccttagggccatagtcagggatcagtgtggggtaaccattcagcaaagaacctctgcttcctttaaaggagccaacttaagtatctggagtagacaacccaaattcctagctggctactatccttagagtccaggtcgggtaaaaacaggttagaaaatgggcctaaaattccgaggacaatgaaaagtctattggtggaaggggactggtgctttggctgggaatacattggggagttttaagc

SEQ ID NO: 37155 - DNA, 370 bp, Homo Sapiens
cagctcggtttcctatccgcgttcggggttggcgtgactaccaatcctgtgagcagagtaagagtggactccaacattcccctcgcttacagcacctttcaaatgcctgcacgagctaagggtggtaggattcagagatgtgtcagatatggttcctgccctcaggatgctcactgtggagctggtgtacggaaaaggcaaaggcctctggcctcgcagtcacccatcaccttccttccttattttccccgctgaaatgtcagccaagtcaacacactttcttttggagttcccaaaaagtacagactgtctccagctcactgcctgaaactaggcagttattttctttctctctcagactcattaactg

SEQ ID NO: 37156 - DNA, 391 bp, Homo Sapiens
ccctaaacggggtcgggggtggaaaagtcattacatattccagaccatagactgggttagatcacccaggagttagtgcagataaagagaacccaagactgagcccaaggagactggggagtagcagccaaacagcttttgccatgcagagatcataaacgacctttacaagagaagttctggtgaagtgctgtatacaaacccgtaatttagggtgggttcaaggaagaaatggcaggagaggaactgaaagcagaatatcaatgaatgcttacacaaaatttctctgttaaggtgagtagagaaaggctgtaactggaggggaaagggaattcaaataagtctgtttttctgatgggagaaatgccagcatgtttgtatacagatgaga

SEQ ID NO: 37157 - DNA, 391 bp, Homo Sapiens
tagccagtctttcaggggaccccgggacgccgatgaggcccagggtgcactccttgtcagtcttgcccgttgtccctgtgcattttgctttccgctgtcaaatctcactgtctcgttttcacaccgcatcagtccccatcatcactactcctccccaaagacatacagattgccctccccggcatgaagaagtcacaattctgacccgccacctctccaggggcggtgcctgagatggccacccatcaggacagccagagccggggtcccggcgtcctgagagtccagggcacctccccccattagctgtaaggtttcctgtcaagcgcgactgtcagtttgctggtcttccaataccgaagaaagggtggttgtgacaatacctcttgct

SEQ ID NO: 37158 - DNA, 440 bp, Homo Sapiens
cgcgttcggggttgccaataaaacatttcatgtgtgaaggctctttataaatagtaaagggctataaaaacatcgattatcattaggactaatgatgcagcccttgtcagcagtaaccatctgttgtggctgtcactctcaaaagcaagatgcgaaaatgacccaaaggtatttaaattacgttcaccttgagttttgttcccatatgactgtttttgtttgtttttggtaggtaagctgacactatggttagggtttgagctctgtccttggagccattgaaatgtagagctggaaggcacactagaatcaccaaattcctctcttttaagttgtagcttatgaagtttaactgacttacctaagttaacagagctgcttcaaggtataaccacaaagagttgtgcttaaactctgatttgtataattaggactataat

SEQ ID NO: 37159 - DNA, 431 bp, Homo Sapiens
agttgtaaaacaaaattaaattagtggctgttttaggataaactggggaaagacaatgtgatgcactccaacaatggccacaaattcttcctgtctctttgtgatgcaattttatggctcctcccattagaactcagtctatttctctatccttgaatataggcttgtatagcagcaaatgggatccaagcagagacctagaaaaacatgtgtgtattgaggcttaatctctcttgcagcacttggaaccatggactactatgtgcatgacagtgagatagtctgctggaggatagaaggctacatgtagaaatgaagcactcggccaacagcctgtgaatgccagacatgtgcatgaggccattgtagatcagatgccaggtcacccaccagctaaccacagacatgtgaaagagcatagagagatcagc

SEQ ID NO: 37160 - DNA, 383 bp, Homo Sapiens
tcctgacgtgggtggcggatgggtgcttgacgtggccgagaagtctcgggggttgggggtggtcagagccgcctgcaggctgaggagatgctgccaggtagccccagttcttcatctgacactgtggggatgtgccgcttgtgtttctcagtgttgtgttctgaaacgtcaaactggcggaaaagttgaaggtagcacacggggcgtccattgtccacttcctgctcatggggttccccagacttgagcgtgtcccacggcggctttccctctctccattctaaccgtttaaaaataagtcgcagacgtcaagaccagaaagcctcataactctatacagcctgagagaaattccatgatggccactggtgtttgtgcacctg

SEQ ID NO: 37161 - DNA, 354 bp, Homo Sapiens
gagaaggaatagaaaatgcatatatttaactggtgccaggagagaggtttgtgtacagtacaggcatacctcagcgatactgtgggttcagttccagacaaccacaataaagtgactcacttggatttttttgtttctcggtgcatataaaagttgaggttacactataccgtagtctatttaaagtgtgcaatagcgttacatctacaaaaacaacgtatatactttaatttggttaaggtatggctaaaaatgctaacgatcatctgagccttcagcaagtcataatcttcttgctggtggagggtcttgcctccatgtctgatggctgctgactgatcagggtggtggttg

SEQ ID NO: 37162 - DNA, 383 bp, Homo Sapiens
acaaacgggtaatccgcgtctactcagtgggctctggcaatagcagccacctagaggaagcaggggcatgctgagatctgccaggcgagttgagagggaacagacgccgtggcaagcaggggtgagggaacaagaagcagagaggcggagggaaggcgccgcaaatgcccgcggggttctgtgagggcattggagctgtaagtcctgttcgttctctttcctctacaaagacgacatatgttcagcatatgctgtacagcggattctttcaatctagcatttgccaactaacggcctgcttcccttcatacccacccgatcacgtgccttaagcaccactgggcttaaggtgttgctatcttcattacgcgcatgcacagaca

SEQ ID NO: 37163 - DNA, 407 bp, Homo Sapiens
cttttgtccggcctgtggacaccaggaaactcccaggatgcccttccagtcctcctgtacagccagaccctggccaggaccagacacaacaaattaagcacttaaggcattaacgactagccaagtgttgaagattgaggaggaaggagaatgaaaagagggaattgaaagaaaagcagaaggtccaacccatccctccttccccacgaccagaggagaaaggaggcccgggccaagtggccgagttggttcgtttattcattcattcattgattcattcattcctcggattcctatttacggaagagggaatcccagaagtccagcgcgggccggaacttcagaagtcccgggggaactcaaccaagtgccactgagagggaataaccccacccgagatccgcgga

SEQ ID NO: 37164 - DNA, 447 bp, Homo Sapiens
ccctcagaagttgccgatttccaaagtggcgtgcacatcctgcccctctccacatcaccctgatgttctgttgctaagcaaggagtgtactggcttatctgaggggcatgcattcagcctcttacacagacttactgctcactcattaagtggcaaacctatttctaggttgaaaggaacaagacttttcacttcccagaagtataacttcaaaccctacacacaccaccttggatccctttgcagaaaaactgcatttcttgtggtcatgaaagagtcaagcattggcccagagctactgcagaagcttgaaatctttgctgagcatcaagtactcaaacttgaaaggaacttgtaagtccctccctgactgctcccttgtctggcttctcatttgcaaatggatcaatataaccaaaaaataactaaatggctttttttgttggg

SEQ ID NO: 37165 - DNA, 419 bp, Homo Sapiens
cagtgacctcaatttctttcttccctgccagagccgtctgtcctggctgtttctctcctcgctggcaaacctgcgagcatgaatcaattctagtttcactaaaatcttcctgccctttttccttgctgcttccttcaggaatctgctccagcttactatggagatataatccagcagtgccgagttccttcttcccagagttgctgctgctgttgctgaagtgagccaattcttctctcttcttggccactggttcctcacagatgaaaggaggtatctctttagtagacaagatgggcagcttcccagggctcaatttgtagctagctgtctgttcctcacccacagtcatggagcgcatcatagcaggagctcccagcttcccaggtgtaggactaggcattgggctactaggggga

SEQ ID NO: 37166 - DNA, 384 bp, Homo Sapiens
tatcgtgttcggggttgtggctattaaaccttgataaatttgtgtttatggttaacaaatgtgaaagctattaaacattgctggtttgaattttttacagtgcagaaatgtaaaatgaaaaaggatatttcctttcacagtgttaccgagaagtcatgataatttcgtttgttcttccagatttaggcatatacttatttaatcaataatgtgttaacagctgacacctgtggttgctgtgacaggcactatttgaagtgctttatcatggattaactcttaatcctcagctaccgtataaagtaggacataaccccatttcacatgcactacactgagacttgcctcctctccccccacattgaagatgttcttttttcataa

SEQ ID NO: 37167 - DNA, 370 bp, Homo Sapiens
cagttcccattaaacagtaactcctcaccctcctctctgtcagtccctggcatctaccattccactttctgtttctaggagtttgactactcttgatgtcatataagtgaaaccacatggtatttgtccctttgtcatggcttatgtcacttaaaataatgtcctcaagattcagccgtgttgtagcaggtatcagaatttccttccttttaaggctgagtattccattgtatgtatacatcacactttgcttatccgttcttctgctgacacttgggctgctctcaccttttggctattgtgactaatgctgctatgaacatgggtatgcaaatattgcttgagagcctggttccatcccccaccctcc

SEQ ID NO: 37168 - DNA, 438 bp, Homo Sapiens
gaaagaggtcaaggcagtagcttctctggggtagatgagatcaccgtgggagacagtgcagggtgagaatggaatcttatgtctaatcaaggtatagggacagatggggaggagagccagaaaaacaggctgtggggaacatgggacaagaggtgccacagaagcctggagagaccaagtatcaacaaaatatatcaacaaaatgatctgataaatacagcagacaggtcaagataaacacttaagttttcacttgatttggcaattatacactgcaattttttaaagaacagttttgatggagtggtaagacatgagcctaactgcagactgaacaaaaaccaggagctgagactgtgcacaagataaagagatacttttctttcaagaagcctggttgcaaggtcagggaaattatgcacttgtaagaagaggatg

SEQ ID NO: 37169 - DNA, 486 bp, Homo Sapiens
cgtataacgtgtccggggttgccaccgtgtggcccatatggagatgtgtgcaacgtgttttgcagaaactgcaggaccgtagacctctgcagagctagcctccccaccatcccccacaggaagttctattcttgcatagactccagggatgctgtaaacaatctcttcaagaagctcaagttcattcccatgaaaacttcttgagtagaacagcttaggtatcagtcatattgattaagcaacacactgaatttctccaagtttttctatcagacgtatagatgtttgaaccacggggtgttgagtgtgttggcgagaaaggcagtctgctaaggctatgacttcaggatatatctgctgtcagatgatttcataagaactgctaggattctcttcccagtgccctttggacactcggaaatgatctcttcatcttggaaaggggacctgaactgagtctcagcttactgactcctagcccaaagc

SEQ ID NO: 37170 - DNA, 352 bp, Homo Sapiens
cagagaggctaattccgtcagcgtgaggaacagaaggagtcactcgagaagccatctccaccaaagtaaacacatccttctggaagcttaaattttcactttatcccttgggaactagggacatgagtcataatgagttagcaggtggcttttgtgaaatacaagaggctttgtgaaatgcagcaaatatagccaaaagcatgtgtagtagcttcctatggctgctctcacaaattactacaaattcagtggcttacaacaacacacatgcattcccatttattcagttaggaagtcaaaagtctgaaatgcatatcataggctaacgtcaacgcgtcaatagaaccgcgtt

SEQ ID NO: 37171 - DNA, 449 bp, Homo Sapiens
ctcggtttcctatacgtgttcggggttggggagaaggagggaaggggcttagtgatgcctgccatctctctgacaactattgacctggaaatgacctgggggtttttgacccttaattccctatgagccaacactgagtgcagcttttggctgtattaatagaggtaggaacccagagccagagaggtgatattggtgcagttgttggcagtgctgtgggacccttactgtaggcaagccccaagaaggaggacctgggaagaattggggctaccattctcagggctcaaggccaacgctgcacccacgttccaggggacctgtcctttgtttctaacatcacatattctgcagttccctctccaggagctgagttaataataatccttgccctgaagggtggagaggagtaaggcctctgggagaggaaattctcatgactagaatgg

SEQ ID NO: 37172 - DNA, 480 bp, Homo Sapiens
cagggatagtacccctaagtttatttagtagttccttttaaaatagttatgtcaattcctctgctgtactgattttctctcctgaatttgttctaccccatttatggattaactgaatacatctagcagatttagtctgaccaggccagataagaatctttggctgctttattctaaaatgcactatgcagtgtttcagaaagtacacccagtgtcacataagcttctttagaggccacagaacccatgatctgttaatactttccacataggctatggttggttctgcatccccatcctttacttggtacttgggcttctttgtgcacaaggacaggaccttataactatccctgctgttggattcactgtaattgagggtttgatttctctgtatcactcttcagcattacattgttaatcacagcatgtctgtccctttgatcatcatcttgctctgtatgtaactaaagtatcttt

SEQ ID NO: 37173 - DNA, 457 bp, Homo Sapiens
tatccgtgtgcggggttgcatcctgagtgctctttgttgggttgggagtcagggtgccatgggagagcctgccagatggtctataagatgctgtctgaattttctaaggtttaacaaagtggatttggacctcacccttgaggccagtgtctgggatttgatctttgccctgaggccatctcttttagaatcttttgccagctggaaaggctgggaagaagaaacatttttattctccacccagtacatcctggattggaaatagttcctttaaattctgcttgaaaatggaacagttccttcatctttctcttcccatgtgttaccctaggcagcaaaaagaagccagcttcctcctggaccccttagccagatgcaggagttcccgggggaggcactccatcctccctgtcactgagggtgaccttctttccacttcttcagctggtacacacac

SEQ ID NO: 37174 - DNA, 397 bp, Homo Sapiens
aattctatctactaaccttgatcaggaggctagtgatactggctgtgtaaaacaaaacaagacaaaataaacaagggaaaaccacagcgcatgtggccactttgttcagaaggtgacaccactgaatttagtctgtgaaggtcttgtcacatgaaagcctagaaatagctatgacctaaacatgagagtagaagacaatctggttagaaatgaatgaacacattccattgtgcttgtatagtgtttaaaatctattttggggcaaaaggggtattagaaatactttcccttgttcataactatcataacccaaactttctggctctcaacattttccagtgaccctgcatgcctataattttttacacaccacctgacctggcaagagttatgctac

SEQ ID NO: 37175 - DNA, 360 bp, Homo Sapiens
ggtgcacagctgttcattacaaaagtctaggtgctattgtgaatgtctgaaacatttaagaggcttgtagagaaatattttttcttttaatattttactgcactgaagagaaatacttttgactgaattatcttctggcattctgtaatttttaatctcaaaagaatcaatgtgggcctgacaaaaagggagatttcactgattttggcaagttcctaaaatgttttgtcttctttgcacatcttagtagcaggagttacccccatttgtctgcttcctgctactagaatgtaagctctgagtgtaagctctgagtgaaagcatttttccattatattcagttacactcctacagtctta

SEQ ID NO: 37176 - DNA, 460 bp, Homo Sapiens
gggtccggggttgccaggcactatgagaatataaaggatgatagagcaatttgaaaactaaaaagtgtggtagtttttgagctaaaattttaaatgcagagacaaatacaaaagaagatttgaaatgcagaaatagatacaaaaggacaaatagcaacagaagcagagagaacattttcagcagggtaagaaatggcaggaaaatgtagctcatgttcaaagagcatttgatggtcctgtttggcagtcacagaatacgtgaaaggtagcagtagtgaaagaaaaattaaggccatgtaatttggaaattcaagtgctctctttttctataggtgtaatttcttcttggcagttagtagtgacagcacattgtttgaagtaggtcttaaatgcagatctttgaaatgattcccacagaaaatgtctaaattgggagttttttctatgcccttcctcctcc

SEQ ID NO: 37177 - DNA, 443 bp, Homo Sapiens
ggatactgaacttactgtgttaactgtgaacaaaaggctttgggacaaatttgtctcaaaccacgtggcactgatctgcagagtgtgggaaatggtcaggaatagagctgacaagtgttcccagtcttcccccagaggtaagatgtccgtccaatccacccagcccctgcctattcatgaggacctgagaagacaatttcttccccttctcttctagagcatcttttttacgtttctgtggttaccggatctctgggcccctgtgagtgattatctgtgtcctcacatttcccctcagaccagatgcttaagagcaagaaccatatctttccccacggagcctgagacatctccacccccaccccactcccagcaccagccccaagggagctgcgtgaacaacaccgaccctcattcccattcctttggcttattaatcactg

SEQ ID NO: 37178 - DNA, 484 bp, Homo Sapiens
gattctagacgtgttcggggttgtgaaaggggcgaggaggagagagcagctgggccagggctagcgtttgaccacacccactagccactccctcccagctgcccgcagagccacatcgaatcgaaacagcagtggcagcggcttgccctctgagtggagacgtgcaggaggcccagagctctcagtcctctggatgttctttgcctttcctagtaccttcatttgttcgtttactcattcatcaaaccctgctaaggtctcaagttgttcacggcctggctttgcggagcaacctctcgccccataacatatttagtgatgcctgaactccattcccctctccttcatctccactttctggagagcatcaagagcaaatgccaccgtgaccgttttgctggtagtttcttgagattcgagcaggacccagtgaatcgaagcggagttgcctgcaagatgaatcccgttgccatggcgactcctg

SEQ ID NO: 37179 - DNA, 504 bp, Homo Sapiens
gttcgcggttgccagccttttcatgattacgattatttttaaccaagtattatgattagtgctggtcattgggagaaacaaaagaggttatctaccatcccagggttccagctgccttgagggctgagtggtacaatatccaggcatatctgtatatcatttgagacctacctgttgggacattctgatatgagtggaccttgacttcatctgccttttttcttgaagaattccacaaaatgtcaaaaatatttgttttcagaaggaatactcacattcttgtgagcatacaccaactgtcaggattggggtagtggaagactgaccccaaaagaaattttatgcctttgaagaaactaatgaattaaagtgtcagtgcttctcttgagtggagctttctggctctttgcagatttttatggtggcttagtttcttgttctgggttggtctattaagattcaacagctatgttctgtggctcaggaaggattttaaaaaataca

SEQ ID NO: 37180 - DNA, 368 bp, Homo Sapiens
ggggactgaatacctggactgacaggcacctccatagaactgagacccatgagacccgggacccgcagcctccctgccccgtgccctggtgccggccctcagcccagcttcctcgtctgcatgcagcagctcctctgtccaccagcggaggctcttctagggccttgctgggctgcagctgactcaggagggcaacagcctcttcagagaatttgacagcatggagaaccaaacaaaagcagaaagtgaagcctcagaactgggttcaccatcatcccagttttttacaagctatgattttgtcccatctttattaacaagataaggaagtatgaaaaataatctcgacatctgagatggtgagatta

SEQ ID NO: 37181 - DNA, 351 bp, Homo Sapiens
gtcttcatgtcacagttggaaacacatctccaattgccaaatgaaatacaattaggaaaacaaagtgcaatagaagaacttacttctacttaagacaaattttcatgagtgcttctgttttatgtaccaaggtattcctttattttccagaggttaccaaatgaagagagtaaaaagagctttcatatgatttgacgatggtaacttaagttctattttaatttctattcctcaaatctatacccctccactcccaaagtcaaatgccacctatttggattctacctctgtgtactcaaagagaagctggagacaatgaaagttcaagcatgtagactggcaaccccgaac

SEQ ID NO: 37182 - DNA, 395 bp, Homo Sapiens
gccagatacttgggtagagttaatacatagaatataaggctataccactctgactctttatttagaaatttcactgcttattttccaggcattatggtgacccaaactttgttttttcattcttcaagccagtaagaatgcaggtttctatcatatttagatgctttttatgtctgcaactgaggactgccctcagacagaaagtcacaaaacaggacacttactccgtgttatccattttttaaaagagtaaaccacacccctagtttctgcctgctttcgattgttctccaatgccttcaggccggtgatttttatattttgctcagagttgaaacttgctatctgtgttagaatttatccaataggagcttgctatcaactgagttgtatcc

SEQ ID NO: 37183 - DNA, 426 bp, Homo Sapiens
agcgcggttcgcgaatgcgagtacggtgttgaatgcagaaagaggatcacctgttttggacttctttataaaaatctgcttgaagaaatggttcttccactgtttcaaagatattttaaagccacaaaacattttaaaaatcacaattcatacacagaaatagtgaggtccaggggatataaatgatgtgtgcaaggttgcagaataaatatcgacactttcaaatacgcacttaaaaatatagaagtaggcatcagttaaacccacaaggttgatttcagtgtaaaaagtatttatagtacaacaatttaaaacctcatcttaacaaaagtctgacaaaaaaactaacatttttatgttgcaacaaaatgaactcataccttttatcttcagctgccaggtttactgaatccattatgtttttca

SEQ ID NO: 37184 - DNA, 412 bp, Homo Sapiens
ggttccctatccgtgtccggggttgcaaggagaagcagtgacctagtggtggtcaggcattaaagggcagtccctggcctccaaaggggcctgtaatttggtgtgttcctgtgtcaactgctgccgcacccttaccaccaatcatcccacggcagcaggcttccacccttccaaccctgaacctgtctagaatgtacagagcatggagaatgggacccagagctgggtggttggttggagattcctgatacctctccctaaacgaaacctggcaggataccaggcaggcccagtctcttgttccaactcctttcctcaccattgccaccagcgccctgatcatgaaggctgcagatggggtttcccttgggggcctccacacaagccctgatcacacggcttatcttctgtt

SEQ ID NO: 37185 - DNA, 397 bp, Homo Sapiens
tggagcaagctgggattttgggggtttctgttaagaattagcttcattgaggtataattgagacaataaaattatctcccattttaagttctagttgatgagttttgagaaatgtatatagtgaagtcttgatcatcaaatcaacatatgaacatttttcatctcccaaaaatgtaggagctgttttttttatcttaggagaattgtaatgaaatatacgtggaggagctaaatgtttcaagtttgcctcatattcatatctaatttattggtaactaatttaaaccactttcttacggctctcagtttctgttcctacaggatattaactcccacagatggcaacagatggcaggagtgagaccaaacagtttgcagtgttctccattcacaccct

SEQ ID NO: 37186 - DNA, 384 bp, Homo Sapiens
gggttcatttttgccggatgtgttacacatgtgcatgcgtagtggttttatgtatagaaaacctgcccagcggtgtgggcatgggtgctactcctggcgaggactgcagaaaggcccctggccaatcagtgctctcgtgaaagagggatgctcttgttaaccatcccgggcagggggcatgtgaataaataatcaaagactggggtgcctcttgcagactgagggagggacattccagagaatttgctgcattcttccttgaacaggacgggaaggcgaagataggctggagcttccagatttccatcctgtgcccttgagggaccctctgcaggagcctggctctgcctttgagccctggagcccctagatgcaggatgatgg

SEQ ID NO: 37187 - DNA, 371 bp, Homo Sapiens
caagaaggcagggtcactcctccctatggctaagttttggctgtgatgatgtgcttaggcacacagtgccatttaaacataccttatcttttatctgataaatgattttttaaaaattacctgtattcatcaatggctaatactactgttcacctaaatccagtacaactaattttccctccagctttggaaatagatcagtttttctccacctgagcaccagagaaagtagttgtcccactctcacccccccaagtatatatatttgggggtctttttgtgtgaaaaatagtttctttagaaaattaggttcatcatctgtgagaggtgctcatgctgtggtgtgtgtttttgtttttagtcactttttt

SEQ ID NO: 37188 - DNA, 378 bp, Homo Sapiens
agtttaggtgtgagggttaaggatgggagaggagggagagccccagagggcacacaccctcaggaagctgtgtcctgggacttggagtagtttgttgttccatcctgagtctgccgctttaagcaaactcaacgtataaatttacacaaagtaaatcagatcacctccttctgttaatggattcttgagttttccaaaggaattatttaccgaagaaattacttaagaattcccttacataacaaaaacaaagtcaaactgatcaccacagctactaccggtgcttggtaaagagcttaaagtttgtaaagcactttcccatacattatgatcttttattctcaagactaccccatgaggtactcatggatactacca

SEQ ID NO: 37189 - DNA, 412 bp, Homo Sapiens
tatccgtgtaatttaagagccttctcaccttcacagtctatgattctgagcgcagaatagcagtatgaagccaacgagagtgcaaattcaggaaagtatctggggctccagctcattttttagcacaaaccattacttctaccttatctatgcacacctgaaagctcctgtaagggctccacttggtctgggggcaaggttctcattggggtcttctataacttatgtctgttattgggccagactgtcagtacccactctctgcatacgttcttaccgcctctcacccctttatcctctccactttttagggttcccaccttcaggtgcatgggcttccatagatgtgagtctccacttgccagtgattctcctctctcctgggggagtcatttttcttaactaagatagg

SEQ ID NO: 37190 - DNA, 381 bp, Homo Sapiens
gaaacttggagaaattaaggggctttaccaagtacacatggcaagttagtgaagatactaagataatatataggccttaagacatcagagtctgtgctaaatactgaagagagaaatgaataaagtgaacgaggaacaaacccctgctgtcacagtgctcacaatctcaagggggaaggcagcaactaaatagtttcagaaaactatgtgcagatgagaaacacacaatgtcacatagtagttcagagtattaattacctaactctaccacaagagcaagttgattaggaccttccagagaaagtgactcttgattggcatcttgaagaatgactagaagttcagcgtgtgggcagagaaggcactggcattaccagcaga

SEQ ID NO: 37191 - DNA, 388 bp, Homo Sapiens
catcttctgaaatcgtgcagggaagcaccctctgaaattgtgcagggaagcaccctctgaaatgcctagaaatagctgccgggctttcacttggttcccaaatttcttcaaaggtcaaaaccatcacagtgggcaactttacaccccagtgttcactgtcctcaggccactgcagagccatcctagtggggcagtgggcgcggggcgggggctcctgactccggtgaggtcaccctggaggggagtcccaggaatcagcctgatgttcagaatgccttcctggcatctcagaagtgtactgggggagacgtgaggacctttcagccaagtgtcagcgttcttattgcaggagaacattaaagccacaacccagaaacttctcaggagc

SEQ ID NO: 37192 - DNA, 389 bp, Homo Sapiens
tttcctgatcggggttgggtatctctttgtaagagatagcagtgattttcagtggataattaagggaattagcacttcacatttttttcatgatatttttatgtcacttagaatttttcacgaattattccttgtatgattgtagataattaaagccccatatgctttgcagtagtagcagcagcgcagattatgatgcagatggaattggtaagagcagtaggttttgaaatgaggttgtagacgggctgctgagactgatttttggacagcataaatgaaagcagtattctgatgtcagcatttggagtttaaaaatccctagccatggatcccgtgctgagtcatttgtacttcaggtaaaccaattccaactctatgtaagctag

SEQ ID NO: 37193 - DNA, 351 bp, Homo Sapiens
ggtgtttgctaggaggtgtagcattcatgtattaacggataaatgctgggtagatgaatgcgggcttgttctccatagatagtattattccatgtaaggagaataggctgtaatggtgggggagacatgctccctgcatgtcgtctaattgggaagaggaaccagcagcacgtggcagctgcctgttgattttcagaagggagaggtccatggggtggagtgatcttggttaacattatgagtcagatgagatttgaaccaagccttgaagaagtaggacattattataagcaaggacaccatgtgaagaaatggcaagtggtgcggctgtttgagaggatgtaaattaag

SEQ ID NO: 37194 - DNA, 416 bp, Homo Sapiens
ggcgtgagccaccgagccgggccctaaaaattattttaaaagaagcatcttaataatggtttttgaatggatgatgattggatgagttggaattggagcccaattattttacctcctagttatctttcttatacctcttgtttccttccctgtgagatatcatttatataaggaatttcttaaagttaaaattattttcatgttgaacagccaaaagctggccctaggtgactgtcctgcttccaggaacattttccctttcagtagataatttcctcaacccacaacaatatgaatatggaacacttaccttccttaatacttcctgaccgttgagtagggaaggcctgaggaggaggaatctgtgctatgagtggctgctgagggagctgctgaatgatggtggcaggaggctg

SEQ ID NO: 37195 - DNA, 381 bp, Homo Sapiens
tgtactgggtatctgttatattcttaacagcccatcttttgaaaaatatttcactatttgggaaaatcccacatcatgagttctgtcttcctattgtagatatcaaaacacaaattcccagcctctcttgcagctaagatgtaggcatgtaattagactctgcctaccaggcaccctcataaggcttgactcagaaaagaataatgtagtgactctgtttctcgacacatggactgtggctgaagtgttgggctttctgggagagttgggggggcacgtcaagtgaaactggtgagactgtagtggcgtttcctccggtaccttgatagggcagcacaacatagacactgttctcctaaggccagttttgtgcatgatttc

SEQ ID NO: 37196 - DNA, 413 bp, Homo Sapiens
ctgggaccctttctctccacactctgtcatttcactcatctatgtgctgatggttctcaaaggtatgtttctaaccttcttctcatcatctatccaattgcatagaccaaaaatctagccctctctcttcactccctaaatccagtccatcagtggtcctgttgtttccaccctagaatatattttgaatgcagttacttttcaccatctccaatgttagctttgtagtccatcacctctgggctggattaagcaatagcctttgagtgttcactcttccccagcctccattctgttctccacatggcaactggagtgatcttaagtaatgattggaacatgtcgctcctgggtaaaacccttcattgactttccattgtacttagagaaaatctccatctcttaccaggacc

SEQ ID NO: 37197 - DNA, 432 bp, Homo Sapiens
gcaggtacagatggagatctaggaagaatcccaatgtagagttgcaaaagctagcctgagacagacacttggagaagagctgggtgtcctggcctaagccccttttccttgggcctctgtagttccatctgagaaatgaggacagtaatgcctcagggtgttggggggtcaagtgtgaaatcagcacatagcagacttcaagatgtctgtgttctgagacccagctccactcaccattctgcatccccttccttccagtgcctgtccctagagcctctctgagctaggagcagctcggagtcccctccctgtgtcccatgtccctgagcagctgcctgggatgaagtgcctaccagcctcttcccatgacctccggcctcatactgctcggtacaatgccagcgactagcccattttgcagatgaggaaact

SEQ ID NO: 37198 - DNA, 379 bp, Homo Sapiens
gtttagtgtattgacattgatgccaataagataaaactagacctcagtggctcctcctcaactccacccaatctatttgtctccaaagtgctgttggagtaagtaatctttgttaagagcaaacctatttgtatatctgatgataatctgagggataataatatgatatttaaggagtttctgtccttggccctgactatttcctggccctccttcacgcccagtgatgtgctgttaaatgttaaactctggggggaggggcagcagaagcccctaatttgtagcatttgccaatttctatggcgtaaatatcccactgagccagtttcaaggtaccactgaaacagcgttagtcactgaacaacattgaggaagagat

SEQ ID NO: 37199 - DNA, 393 bp, Homo Sapiens
gcccggggaagccacttcagcatcttacagatgtcccaaccaaattttgcatgtgtaaaaccagatttctcttctctccacatttctgtttctgttaggttcttttgttactccagctaaaaagctggtgtcattctaagctgtttatcctcaatgaggtgtccccttctctaaccccatgatgcctctacccatgcacattgaattgtctgtaagttactgcaaggcaagactggaagggcttttccttcccttttaaactacaaaccaggtttcccccatcttctgtaaaagcaccccccaatattgtgaatttcaagcatgcagcaaaagtgagagttttgcagtcgacacccatatacccactatctatattccaccgataacatttca

SEQ ID NO: 37200 - DNA, 372 bp, Homo Sapiens
cgtatccgtgcccggggttgcatgtagcgactcggagtaccatgtgcagagcacttttgtagcctcagcactgtatgaaagcacacaaaagaaaaccctgccctcgactaccttacacttgctagcagtctaatgacccataccacatgtggaaaatattattttgctttgctgtaatacaacattgttttgacaattcaggctaaatggttattatcaaatcatactatgtacaaggatcatgtcaggctcttcatgtggcccagacttaggatatatttttctccctcagataataagctccaaattttagctcttctcccttctctgtcctctctcctgccatctctgccctttcaccaaccccgaaca

SEQ ID NO: 37201 - DNA, 433 bp, Homo Sapiens
tggagggaataggaaggggagatgataggcgatgatttcttttcattagcttctcaaaggagtctgtacatcccccgcccccactgcgaagattaaaaatggtttcttagaggcttttaggcagggagattttccctttaaaatcagcagaagaagtctggatgcagcatagggaaaggaggcgtcatcaggaagtcctaagtctgaatgtcagctccaccttctctttttctcttatattgtggtaaaacatacataacataaaatttaccatttcaaccatttgaagtgtacagttcagtgacatttaggaaacccacattgttattgggtaaccatcatcaccatccatctccagaacttttttcatcttcctaaaatgaaactctgtacccactaaatagtaactgcctactacccccaaccccgacca

SEQ ID NO: 37202 - DNA, 379 bp, Homo Sapiens
ccagagggaaagaacttagtctaattttaataaaacaagtgtttatttagttattcagttaaaatggtcaatatttttgcactttgttacattttctcctacatatttcaaaatatacactaaattaacttttttaatatgttggatttatggattcttgcacatttccattgcagatcaaccacttaccggcaaaaatgtgccctccaattcttccacattgcctctttgtccaggtgtccagcagcatttcttccctatggtatctctctcacccctcccataagatctggatcctctctccttgtgacttcaggctttgcttcctcacttcacttacatcactgaccttacctctcagtgtggaattctctaatgc

SEQ ID NO: 37203 - DNA, 362 bp, Homo Sapiens
gctcgtctggcctaagggcatgtcttctgggagtagcccatggagctctttcttaggtccaggacatggacattcatggctgattggctggtctggaggtgcatctgctgggaatggatacaggactatttctcaggctttgcaagaatgaatgaccaggctttctctaccctgacagcatcatcaagaggaaggtgagaggtgggctgtgcctgagctctggtgtgtatcggctatcattatgtgatgtggccaagagagatgctgccgcaacaactgttactaagattactagggaggactcggccaagatgaggttagcccaccacagcctatttctttttgctgatagcaaccaaact

SEQ ID NO: 37204 - DNA, 410 bp, Homo Sapiens
cctccttctacaagttctgggccctatttgtccctaataataatgccaccattttatttagcatataccagtgctgctgctaaatcctttaaatctgtgacctcacagcacctctacgaggtgtgctattctcatcctcatcttataggcaagttaactgaggtataaggaggttggttatgtaacttgaccaaagtcacacaataagggactgggagatctgggatttgagccctggcagatggactccatccaaagtcctcactatcctagcacctctctatcccctccctttcctctctcctaccttcttctgtgctgctttcaaacagacagttatctctacccttaaaaacacagctgtgctgactactctgcttagatgccctctcaccccatcagccgcgtag

SEQ ID NO: 37205 - DNA, 397 bp, Homo Sapiens
ggtgttgcctcacaatcatgttggaaaacaaggaggagcaagtcacatcctacgtggatggtggcaggcaaagagagagaatgagagccaagcaaaacgggcttccccttatcaaaccatcagatctcatgagactcattcactatcacaagaacagtgcaggaaagactcgcccccataattcaatcacctcccactgggttcctcccatgacatgtgggaattgtgggagttacaattcaagatgagatttgggtggagacacagccaaaccgtctcagtcagagagtccttcctaggttttataatccacttcaggggagaagtatggggaaaggtaagaccaatgcgccagtttctgctattttcttcaatatgacaagatgccatcttttgg

SEQ ID NO: 37206 - DNA, 405 bp, Homo Sapiens
ccgtgtgggtcagccaccattcccgccaccccgggtccctgcgtcctttagttctcctggcccagggcctccaaccttccagctgtcccacaaaaccccttcttgcaagggctttccagggcctggggccagggctggaaggaggatgcttccgcttctgccagctgccttgtctgcccacctcctccccaagcccaggactcgggctcactggtcactggtttctttcattcccagcaccctgctcctctggccctcatatgtctggccctcagtgactggtgtttggtttttggcctgtgtgtaacaaactgtgtgtgacacttgtttcctgtttctccgccttcccctgcttcctcttgtgtccatctctttctgacccaggcctggttcctttccctcctc

SEQ ID NO: 37207 - DNA, 368 bp, Homo Sapiens
cagcgcgttagtcagagagcagcagtcagaagcacagtatccattcctgtcgtgcgtgtatacagcatgtgcacttcgttgttgggcagcaacctggcccaaggcaggaccagatcccagcagctgggaccacagacagtgctgcgctaggcactcagcaatggggcttacactgacttgtgtctttgagattcgcgtgcaatgcgcctttgaggccaagccccaggctctggggagataagcagacagcctgagactcactctcaaggacactctggtcacccagggcccctgagaatagatacgggcatcacaactagacaggagaaaggtcaggaccacaactgtagcacgtgccacaacatcag

SEQ ID NO: 37208 - DNA, 352 bp, Homo Sapiens
tatgactacgcggctgaatgtttccaacaccaatacccgtgtgaaccacttgggactaagaggatgtttctgccactgccattgtcatcattcacatcaagctggctgccccaggggttcaagaacatccccacccaccccacctactgttgtcactgctggcatccaagtaatctgtctggaaactcaacaattgtcccatctggactcactaacaatggtgccagaccaccctggagcccaaagacacacatactcatcccactgctgccaccactggggctcaaagaccgacctacctggtgttacagtccccagcaaaaccacagcctcatttaataattgcaccctg

SEQ ID NO: 37209 - DNA, 372 bp, Homo Sapiens
ggcttggcaaagtgccctaatgcgaagcggtgaaaacaagctactactcatgcatgcatgcacagtgccagggccgcgcctaatctgacgcagcagtcagacggcctaatgcccatttgctggatggtgaggctgaggtggagggaaggccaagccaccagcctcggaagcccagcgggaggtagcctcggagccctgcctctgcgcaccttctgcgctcgctgggagctgcctgacttctgcacgccgaggctgaggtcggggaggaaacagcaggaggacagctgccgcccccttgaaccccgtgctcacccgggagggaaaggtgggggccggtgctggttctggctgtccccctcccccacttcgagt

SEQ ID NO: 37210 - DNA, 461 bp, Homo Sapiens
caaagcctgtgtcactgaagaccatgagaaatataaaccaagtgcattcctatgaagtggagtgaggaaacagagtctgcactgtgtctatgctgaaagctacaaatgcagatgccctggaaggaccagaatgtgggcaagataacagcttcttacaagggcaactttatgcaacaagttccatggtggccaacagagatgcacttacctgaacaattcagggcaggcctgtagtttatccatgaaatatatacagcagttcttgcctacttcacaaggttgctagagagcaacctgagaaaacactaagtgatacttataaatgtaaagttattatttacgctcatctctctaggggctttgatctcttgcctatattcctcctttcatcaaaccaatactccctgactgcaagatgaaaacaaggatgctactgtcatgttcttacctcaaaatcatgc

SEQ ID NO: 37211 - DNA, 373 bp, Homo Sapiens
actgtcatgctctaccactgagtgtgtgactcagttctggccaatgagatgtgagcagcgtgggtcttctaggaagtctccttccagggaattaggcacacctcctttctcccttccacattccttgctgcttggaatgtggatgtgatggctggagctcttgcagccatcttagactatgaggttgagagccacaccctgagagcggtgaattagttggaaggaagcttggttcctgttgacttcttggtgccttagactgcctatccctggacttcttttacatgataggaaatttacgtggggtcaaatttcatcctgactgatacatttggcagagactcttgtctctcagaacgtgaggatttgggtg

SEQ ID NO: 37212 - DNA, 375 bp, Homo Sapiens
tatccgtgttcggcgttgttgttaagctgaagcatgtctgtgaaaaggagaagagggtgcgtgagtgaggcagagactgacccccaaacagggcatcacacacatccaaacacaaccttatttgcacaacccttgttggcacacagctgtatgtgtgggcaatgccaccaggacagaaagccacccacaggagctggtgttcccggacatacagccattttgcgagcacctgtgctgtctaaagcaatgcctgctgctgcgagtgcatcacaatacctggacaaggtgggcaccacaaggctcacaatcttgccccacagctaggctggggctgagcccagggtcgggcccaagactgcagacttcagagcctga

SEQ ID NO: 37213 - DNA, 361 bp, Homo Sapiens
accattaacagatctgtttgcttatctaatattcccagatcaaattacccagtttccactccgatgggcttgacaaacctgctctctctataacttggtaccctgcaccctttcacacctgctgactcactttgacaatgatcaacgtaattattaggaaaataataactatagttatgggagaataactgcaattatttagagaaaagagtgagaatttctttacatattaatcttgtttgtgagtcatcagaggatcccttaacgtagcagcagccatgatgtcattgaggaaatagaaactttggcgcgttaggtgactcagacggtcagagaaaaaggtaatgtgctttcagaatat

SEQ ID NO: 37214 - DNA, 368 bp, Homo Sapiens
gtatcataattaattttcaattcatgtggactactagctttacaatgatgagattcttgaagagtttttaatttgggatgtttcacattattttaaattttgtacagagactttatgactgcatttaatagtgtgttatttcaaatttaaagttccacattttgcatggaattttgccacatcacatttcataggcaaaattatcctctagtagttgaatactcagggaagcatataccctcattctctcttttgggcctattggcacccagggaaattaatgagttaatctattttcttaaataccagggagagattgaacattatttaatctgtgggctcaaaatggccttaaagttcctgcattt

SEQ ID NO: 37215 - DNA, 369 bp, Homo Sapiens
cattccacccggcttcagtcttcccccaagcgcatggttgtgggactaagcacctcaaaggagggcacagaccccgccagcctgctgggaaaaaggcgtccttcctgctaagaaagtaggatctcaaaaggcctgtcctacccccagtctctccagggaagctgcttagaggcagactggcagcaggcagggccactcccagatgctgggcccagagccaccccaacaatccagcacaggaccccgctcagcaccagggagcccacggcagcccaccagcaaatcaagacaggcttcgcctctctgcctcgtcgtacatcttctctccccacgcaaatgcagttgtccaggccccgctaagaaccgttt

SEQ ID NO: 37216 - DNA, 356 bp, Homo Sapiens
cgattgactacgcggctatctcagaaaagaaagattcctgctgtggaagatgggccagcagtcttttcacttctttatttcccaaagttcgttctttgatggggagtgctagctggtctgtctttgtaggctgccgtcccactggcccccagcaccacccagtacacagctgaggggacaggctctggacgtgggggcactgggctgcgaacccaagtctgattgcaaacctgggctctttctagaaccaggcgctttgtccttgagctgcgtgtgtctctgagtaaaatgagggccctgtccccaaggctggcccactgcccacgaatggacccaggggatttcagcttcatcac

SEQ ID NO: 37217 - DNA, 361 bp, Homo Sapiens
gatggtgcctccctcttagggctgtgctcttggcatagtgcttggcacaaagccaactctgaggacatttggccaaatctgcttttgtaggattggttttgttattccattttccaggtgagaaaactgaggcccagagaggaaaaacttcctcggccagccggtgtggcttcctggtcaattccccatcctacttctctttgcaccacgaatttctagtccttgctgcctcagtttacgcagctgagaagtgggtttggggggctcctcttaccttctgctcctcccagcaggatgtgaagtacctggccatcagtggatttctcttcttgcgattcttcgcacctgccatccttacccc

SEQ ID NO: 37218 - DNA, 389 bp, Homo Sapiens
tgatgacagatttctgtctaccagtcctgatccgttccttcacgaaaatgagcccagcagcccgtccaagccagaaatggacttttagcccccaccccctgccaactctgccctttccctcatccccagttgcttaaaccaaaacggattcctcttcctctcatgatccaaactcctgagtcccttcaccttttgcctacactatcacagtgacctccttgctgctttcacactggagagcgtgggctccctgtgatctactctccacatggcagccagtgtcatctggtaaacctttgctgaaaccctgccatgcccttcagttgccctggaaacctgaactcatcctcagcctggctcgcagagccctcatgccgctgggacgtcac

SEQ ID NO: 37219 - DNA, 413 bp, Homo Sapiens
taagaaatgtggtggaaaggggacagaaccctgtgttaagcagtggaacataaaaccagatgttccaaggatgagaaacttataacacacttgagaagtctcctgctagcctactgctcccctagcacaggtatactagactatctctttgcagaacagtttgtagttaagtaaaaaccgatgtgtataggcccatagtacttccatccacaggccttacagttacacttattgccttacagtgacccagatgctgatttcccaaggtcaaggatgtctgaagacaatgtgccaatgtgcccagattcttctagttaaggatctacttgagtctcagcccttatgctgtttttcgttttccacagctgggatatgaaaaagcagaaaacccaataggggaccattaatccaag

SEQ ID NO: 37220 - DNA, 403 bp, Homo Sapiens
agcgtaggttcagcccatctgcagggctcctgggagtcatgggggcctgaagggatcctgatccgacagctcagtcagaacggcctggctgggaaggcagacggaatgtgggccagcctatgcccaaagcctgcaggggtcagctcattggctactttaagtgaccaaagaccctaccatccaaggacatttctgtatccttaccatcccttgaggattaggtgggcatgcactttgctgtgggctgtagggggcggggtatgcagcgttctatttggcctttaaagccatgggaacccagatcaccagatccggagcctgactctagcccctgagccacctgttgccctaacaccctgtctgactctctcccgctgcagcagccagtccctcctgcactcca

SEQ ID NO: 37221 - DNA, 357 bp, Homo Sapiens
tcacttccaggctcccagtgcaagcctcagctcttcttgctttcttggaaatctctgctgtagcagccacttctattccggcgacactcagatctacttttcctgctgaaatctttctccccaggatgggaggtgggaggctgcatctttacctacatagtgcatgattaactcccgttcaacatgccaaacctggtgcccaggagaaagctctatacttgcctatgtcccaggctgcagtcaaagactccccacctttccttatagccccttgttggctttttcctttactattttattaaatccatcatttctactcccaatgctgctaagagcttcatattctcatttgccacc

SEQ ID NO: 37222 - DNA, 408 bp, Homo Sapiens
tgaggaatccccacccacaaaccccctcaaaaagattaagttgatgaatgaaacattaatgatcgagagagtgaactgagtctgggtttctccttctcaatcccttttcagctggccaggccacctgtattatatgctttgtatgcgttaaatcctgctggaaggccagactctctaaatccacagagaatatcagaaaatgttttgaactcaacagtaacaaaaacaacccgcatcaaaatttatggggcaggccttcgtgacaaagactcttagaaaagcacaagttggagaggatctcattaattcaggagagagtatcacacagaacatctagcacacaccacgcttactgatgcattaccaaagcgcccgtcacagcctgaaggagacaaggagcctactgtc

SEQ ID NO: 37223 - DNA, 398 bp, Homo Sapiens
ggccaagaaatcttgaaaatgttcaactgtgtttcacaagttttgagaaagctagaatctgtgatgctcttaggtaatctgaaaggcagatgaacccatcaaagactacctatattagtaaaaggtaagggtgatagacagacgtggctcaggctcaaactagtattttactaatctagagactatgttaaccacaccaatctgtgatatacttcagatgactacaatcgacatattctaagttagggctataaacacatcccactttcctctatgccttttatttaaactgcaaatctgcaaaccatcagattagagaacgggtcaagagggacaaaatgcccaggattcctttttcactgctcacaggttgtactatgacccaaacttcacaaaaa

SEQ ID NO: 37224 - DNA, 388 bp, Homo Sapiens
tccgagatgagtccgcgcgtcacgacgaatatacatgccagctgctatcagaggcatcggttagactcttgcaagtttcaacgtgcacattttggagctgctgtctctgcgggaacctgcaggcacctcatggatgcaccacaactcggaaattacagtaccacctggaacaccttatccaggcaaggagatcattaagcctggtgtttgaggcaatcgattcacttggaagaaggtgctttggtggatttgagaggaacaatccctacatgaaatccctccatgggaaatggagaacatcagctatttcccattgccttcaaacctaaagatgtcgccaggcctcttggcttgttactgaagcagcgaaataagtcagagatcaaag

SEQ ID NO: 37225 - DNA, 367 bp, Homo Sapiens
cacccacaaaccccctcctaagtttacacctatactggctgctgtccgagcagccctagtgactgtcttgggggcaatcagttgcttaatggttaatacagaagtacctgagtaatactttgcaaaaggactttccccgacctgtgctgggagtgtctccctgtaaactttgccaacctcctggttgttttatcagtgagagcatcatttaagtgaaaatataaattaaggagacagggctcataggacgcacattaaaacacctgatcattttgagcacctgctgtgtgcaaggcactgttctaggccaacagtatagatatacattgcctcccatcttttaaggctgataatgaagagaagaaca

SEQ ID NO: 37226 - DNA, 453 bp, Homo Sapiens
acccacaaaccccctctggtaaataggtaaggatggatggagatactcgggctggagtggacttggaagaacaccaaccttgccactcacttcctgtgcccctctaaggagcctgggattctctacagcacagctggaaaccctggagcatatggtggacaaatgccctttcagctacaagatttcatggtccagtcatcactggtaacaactcctctttaagaagagagaccacttcaggcatccatctccccttgtcaacagcaggaaaagccagacaacccagtcatgaattgggatttttctaattggaaaatagttgtaatactgcactcttacagaagataacctaagaggaggataatactcattattgatgaggtttatctaaagatagatgtatttttacatctttcccccacagatacaacccacctccatctgaattgtgga

SEQ ID NO: 37227 - DNA, 420 bp, Homo Sapiens
tcacccacaaaccccctcttctctctgtggtaggtaggttcaaattacagcctaacctcagccatctctgttctctttgctcaagcatatgggtcactgctttgggttcctacaccagtcagacatccacaggctcccagatacagacatgagcctaggatgaggtaatatacccgattaggctctgagcctaaaacacgttccatgaaattacctgagccttccttgcacagtactgtgatctaagatctaacacataatcaagtcatgcactttgtttcttatttgctattgttacatgtgtacagtgtccttaggagtctacagggaagagggataattggcagagattggcattggcagaatcctgggttctccaataaccacctttcacccccagcagtaatctctagagtaaga

SEQ ID NO: 37228 - DNA, 389 bp, Homo Sapiens
ccctctcacccacaaaccccctcaggggaggcttctcaggtccgaaggaggaggaagacttactaggagaagatgagcaaggtgtgggtagagaggattctgggcaaatgcaaaggccccatggtgggagagagcctaatgtgtttgaaaacctaaaaggaaggcatttggcatctggactggagcccagagacaaatgtggggtgagaggtgctgtagaggtaagtggcaccagaccatgcaaggccagttcaagttctgtctattcttatgacgcagctggttttgcagggtgggtgatgtagtgtgtgtgcaatttatttgtgtgtttgagggaaagacagatggtttggagaacagattcgagggggtttgtgggtggggtaccg

SEQ ID NO: 37229 - DNA, 460 bp, Homo Sapiens
tcacccacaaaccccctccctgctcactgtttttcattctgttagatttctcaatgttcccgtctgctaagggaatcctgagtccaaattctttcagggtatttgtaattccaccctgttgactcatccatgcatttcagataccaccatttgagttcttctccatgtcacacacacataatgttgaaagtgacagggctgagaatgaagtcctgaaaggacacacacaaacataaaccctcctcctcctgcctgcatattgatatcaatccattaaatcagcagtctttgactaagactctaattgtactattaactaacctacatattctatcttgtctagaaggattttatgagagcttccacatctatgaagcgtttccttacatggcaccacctctacccaggcaggactggactaatcactctcccatctttcttacaactgaaccttttctca

SEQ ID NO: 37230 - DNA, 411 bp, Homo Sapiens
cgagcaccgctagaggcctgctcttttgaaaggaatggatgtttgctcctttgccccctctctcttcctgctggctgggatgcaggtgcagtggcaggagatgaagccgcccccaggactcaggggtggaagccgtgggaggaaaaggacacggcctccaggcctgggcacatcactaggcccaaccatttagagtttccagtcccccttgtcgtaaggatcagctcagggatgggcccagtcagcaacggagctgggacttggccggacactgaggtccaggggctctgcttcagcaggtgctaagcagaagggacagcggtctggagctgttacgggtgctaggccgaagggacagcggcctggagctgttacaggtgctaagccgaagggacagcggcctctagcggc

SEQ ID NO: 37231 - DNA, 409 bp, Homo Sapiens
agcgagagcatgcggtatgaaacagctcttttcaaagcctccagtgttctgttattcagcctgatgggtgatagtcattccttccatccttcgcctgtcattaggattccatgcagctgacggtatcttcctcctcggagcacctgtcttgcttggttcctgggacgccaccctctcctggctctcttcctactttgtggccgctccttgcctttccttgctagattttctttatctttctggcctccaaatactggcccatgaccagggctcagtgttggcccctctttttttggggctctacccaccttacctgtatgatttcttttactttcaaagctttacgtatctggagacttgtgactttcatatgtacttttgcaacttggatctgtcttgtcctttctac

SEQ ID NO: 37232 - DNA, 350 bp, Homo Sapiens
aaggggcacgtccaattcatctgtttccccagtgcttatgctcagggcctggcaggcaggaggtctccggaagtggtggtggagtgaacaaaggctgaaagcatccggaaggggaagagtcggggcatgttaagtcagttcctgagagcagacacttacctgtcttgtccatctccatttgcccagctcagactaacgctgggaatacagcaaatcctcagtaagtccctgttgaatgagagtgagtgagagacagaggcgcccggcatcaaaactgcagaggaaacaagttttaactttgtgctttgccaccatgtgatccccactctccctgagtgggatgcaaggac

SEQ ID NO: 37233 - DNA, 410 bp, Homo Sapiens
tccgggagccgctagaggccctcagctcagctgcagcacaggctgttggtaaactccttcgtggtgctcatgcagaaaccatctggttgtctcatctttaaaaccatggaatcaccagggacacttctccacagccagagaatggctccatagaaaagcaacttccacattcatgtttgagaacgttcaaggatgaagataaaggaaaatggtgcagtcccctatgaaaagtgctactcacttttagtgcgactgttttgtcaaactcccaagtactcaaagccaacgggagatgtgatctcagagtaaaggtggtcaatctacaccgtataccaaagcagtctaaaactgaatagcacatttgaatagtgagggaacaccacattttcaaagtcctgccggcgtgtctc

SEQ ID NO: 37234 - DNA, 362 bp, Homo Sapiens
aaggatgcgaagtcatgggtccccatgcagtcccgagccaggcgagctcagactcagcagggaagctacccagggcatgggggacctgaggtctagggtgaaagcttccccatcttgtgtgacttcgggactcctgcccacttgaggcatcagtttccctatctggccactgagagtgaagagggggtctggccttttgcccactcttagtaggtgatgtgggccgcttcgtgaccctgcccagggacgagggtgcaaacttgctttgcatctgactttcctagcagcagctagacctggtagacatgaggtaggcagcacagagccagtcacactaggagccaggatatctgctccctgcc

SEQ ID NO: 37235 - DNA, 354 bp, Homo Sapiens
gccgccagaggccttggaagggagagatgggggggcgggttgtaaggggtttccagctctgggcacagcaggggctgggaaccactgtgggactcttcggctttacagggggtcccatcctgctcccatccaggcgccctcgggcttggcagcatcatcacagagaagtggaggggctggatcacaggtactggcagccaccatcccaggcacatgccctcctcagccctacatggtgactttgacccacttcacagggcacagaacagaactaggagagggaatccgagtggctcgtctatagggaaagaaaccaaagagaagtagatggctcccttcccgtgatggagaggc

SEQ ID NO: 37236 - DNA, 362 bp, Homo Sapiens
cctggtggacacccaggcccccaggttattcaaggcagagtgccttctctggcagccttcctgctctgccactggggctttcgctgggcagccataggacactcctgcatccccatccagaggccgtgatgagggaggagcccgctgacctagagcggcccatttctctgttagcttagagttagcagcacttaggagcagagaaactttgttggggtgcaatgcgatttgtgcccaccctaggggcctcggacctctgcttggagtccctgagcctggggaagggaggaggtgggggatgtgagtattaggtgtcttgctgtgtctgcgggagtgggcatccctgtgaggagggcgtctga

SEQ ID NO: 37237 - DNA, 352 bp, Homo Sapiens
attttctcttacatggctctgttcccaccacccagtcactcaagccacacatgatggagtcagctctgagccactccttcctaccttccgatttcaggccatctgagagcccttttgaacctccaaaatgcaccttgaattcactcccacttcaccatctcccctaacctgggcagctacagcctcctacctgggctccctgcttccacaactgcctctctccagttttactggccacagagcagccagagacctcctcctggcctcccacaccttgagcaccggcactccagccggttcattactcctctgcttggcagaggcctcatccttcaggactcggctacaatgc

SEQ ID NO: 37238 - DNA, 398 bp, Homo Sapiens
catgaggagtaggaaagcctcatctacctggctcctctcatcccacactcagtcatttactctggcagctaatggctgccacgaggggcagctgtggctctgagcattgctctttgcccctccatatgggcaggagagagcccgtgtctaggacagggactgccgcagcctctctggccatatttattgacagctgttggtgtctggagtgagtgggaagaggcagggaagccacaccgtgcccttctagagaaggaccaaatgccctcttctgatgtggctgctgttgagcttcctgtttagggggtgaaacagggagtggcaggaacacaggccgagtttagtgtggcctaggagatgccattgtcttggaggtttggccagactgccagccctgg

SEQ ID NO: 37239 - DNA, 380 bp, Homo Sapiens
agtctagagtgatccccgagacgttacacccagcccgacccgatggcgacggcgcagcccaggcctcgggtgcgcagaccacgcgctatgtgtacgacgatgccacgggcctgcagctgcgctttgccgtcagcgccgaaggccgcgtcaccgaataccgccgcaatgcctatggcgaagtcatcagcacgctgcagcaccaggtggcgcgctatggcgcagccgctgcctcgaccgaggccgccctgtcggcatggaacgggcagcagaacctgcagcagctgcagcgcaccgactacgtgctggacttccggggccaggcccaggtcaccaccacctattcggccaccgacgccgcaggcaaacgggctggcggcggt

SEQ ID NO: 37240 - DNA, 395 bp, Homo Sapiens
aggagaatccagcagttagggatattataagtagagtccaggatccttaacaggaaaagagaggggaaaaagtacattattaacaccaaaacaatttaaattaaaccagtactctcatgttcagatcatgtatatttctcatcttctaaattatatggatctgatattttaagagatttgaacttattgcaagctaacttatgtagaaataagtgtacattactaaagcacaactagaagtcatatcattgaatattttaattaaatgataatacgtgggaaaaaagggcaaattcaacaagaacataacatcttcagttttataaaattcaactacagaaaacatggtccaaccatttcacaagactcttaagatgtcttgaggccagacaagg

SEQ ID NO: 37241 - DNA, 365 bp, Homo Sapiens
ggataaaacaaaggttaaaacaccccagcaccactgccacctttcctggagggcaactgcttctcctccattccaaccatgtgattttggtggtgctgccaatcaagtaccctatctgcctagctagcggagcagaagagtaggcacatcacattcttgggtcctatgtggccaatcaaggtacttctggaatttctctttattctagggtgcttaatcttggatggcataacacaggagtcatctgcagtcacatcttttatgcatttatatacagtcatgtgccccaaaaagacgttttgggtcaacgacagaccacatatacaaccatggtcccctaacattacacataatggagcagaaaa

SEQ ID NO: 37242 - DNA, 441 bp, Homo Sapiens
gctggcgctctagagtatcccctataggcgcgtaggtggtgctgaatcatcatggaagtggaggctggacacttggcatttgcggaggtgacttccttctggtttgaatttcaaataagagcaggacagctccttgggatgtctgggaaaaaagaccaggcagaaaagagtcttttcactaggagcgggtgcaaaatactcttgcctgtgaggcctcttcaggtcttcggtttgctttagttggaaacaggaagcagggtcagaccaacttgtattcatttgctgagagctgttggagctgtgactgattctgacagatcaaataccatttataacactcctgtgggggacactttaaccgggcatgttagtgctagcccctccagagactaagtatgtttgcgggatgtgaggacccctggaatatacaaatatgcatgc

SEQ ID NO: 37243 - DNA, 439 bp, Homo Sapiens
tcgaggcgctctagagtatcccctataggcgcgtaggtctaaaaagagaccaaaaagtgggcagggagaagaacctttagggacagaaggggccgcgaattttaggtaagaagtcccttgccccaggacaccgtgtcccgcttcctacttcttttcccctccaattatcggcaaaggggaagggaatgagagaagttcacttaatgaacaattgagagaagtttgaggcggcatttctgaacgcgaacagaagtccacagacatctggctccaaaagcagaaggctacgcctaaagtagggcacctcgcccgccggtgctgtggaggtggtgtcaggatccctcggctccttctctaacctcaccccaaggaccaccgtgagaacagagatgcagcattaagagaaaaacagatggctgcagctccgatttcttaaagc

SEQ ID NO: 37244 - DNA, 376 bp, Homo Sapiens
tggcacgactcgcgatactgaataggtttaacacgctgggccttggttgatggccttagagccagcagaatttcctggtgcaaatgtgagaggagaataaagaacggtgctgaggatttcggcctgagcacctgaaggatgcaactgacgttaactgagatggggaagatgcaggtggggcaggtccagaggaaaagatcagaacttcgattttagaaatgtggaggccaggagcagtgctcattaactggaatcccagcctaatctacatatttcactggtaaaatcacacaacataaaatttaccaccttaaccatttttaagtgtatagtacagtagtagtgttaagtatgcctacactagtggtgtaccgag

SEQ ID NO: 37245 - DNA, 368 bp, Homo Sapiens
tccactgtggaggcaagctgctccaccgcaataccgacaatccttcctgcgatcgctccaaaggacatgctgcggataaacaagcctgatggaacctataacaacaacagaactctttatggagcagagatcctctactcacatgcctgaaacttacattctatgcatttattgctaacactttggattcttttcacattgtattaatatagcaaaatcctagtacaaatagaactaaggcaaaatcttgaaccttagcacttccatgaatacagttacaaaacagaccacattctctaggccaaacagaaaaaaattcaagggttatttgctttagctcaaggtagctcaagggtgccctagtgtca

SEQ ID NO: 37246 - DNA, 404 bp, Homo Sapiens
cgcctctggaacaaatgacttggttcacaggcagcacgcccactgctgaactgccatggcctgacagcctgtcttatctgccaaactgttcattaggtttggcaatcttcacctgtgcctgcagcttatatttcagcaaataatacatatcagtctgcttttgtcatcttctgcagtgagcttccaacactcctttagcatatggtgcccctgcatctgcaatccttcaaacataccttgtatacatgtcattatttttcaactgtcaattcagcttccagcttggaggctagcctagcttaaataaggcaaaaatacaagacagagaatacgcaaagtaagtcctgcactgtaaatattaagtgggctgaccaatcatttaattaacagcctacactagtgga

SEQ ID NO: 37247 - DNA, 457 bp, Homo Sapiens
tccactagtgtaggctcagaggcttgtcttgatttccacagataattttcgtactaaattgacctttctcgaagtgaactacatttctatcctctgtaaagtttaacactggacatcgcaaaatggtaccccgcaagctgaatctagcaaccagatatgttttgtttggcttatactgtgtttagagaaacatttgaacatttttacactaaattgataattttacactaaattggactttctttaaatgaactacactttatatcctctataaactttaaaaccggatgtcacagaatgacaccctttaagctgaatccagctacacgatgtgttttggtttgcttaaaatagtgttaaagaaacatttgaattagtttcatcatttaaaaataagagatctacataaaaatctgattcctgcttctttgaaaagtagatgagttgcaatgccatc

SEQ ID NO: 37248 - DNA, 361 bp, Homo Sapiens
caatgtcatgtgatgcatgacagtacatatgtatctcaactgaaaatcctaaatgtcagtagtgttctctgactcactatttactagtaagtttcctcagaactgtctttgcctgagagtttcacaaccaagcgtctctctgcacagttgattctagggacaagaagtgctaagaatccatgttggcttcaagtgcaaaatggaaaacacctcagtgtcccaccaaccatgtcagccaccttcctggagggcaagctcccacgccctttccccatcgctgtgaagagctcacgtcatctgtggcatttccataactctccgatgccagccatcagtctctcagcacgtgttgaaaattagc

SEQ ID NO: 37249 - DNA, 371 bp, Homo Sapiens
tccactagtgtaggcaactaaaaaagtatgaaggctttagactccaccccacaacacaaggatttagagtgtcaaagacggaagaggccttggggttcacccaactcaattccttcttttcactgatatgaaactaaggtcccacttgctgaaggacctgcccaaggccacacatgaaggtagctgcaggtgttacaggggaggccagttacagaccaatatcaggtgaccctttccaaaaattgagatataattcacataccctaagattcatcctttttaaaaatataccattcagtggtttttgagtatattcacagtgttgtgcaaccatcaaccaccatctaaacacaagacattttttttatcgc

SEQ ID NO: 37250 - DNA, 434 bp, Homo Sapiens
ctccccaatgcgctgatagcttccccgtcgcgtgtaacaatatcacacattctccagtgacacggaaggtatatgctgacaatagggagatgaacatgaatttataatacaacatcagcgtgtcgtaagtcttgagaaggaaaacgaagcagggcaaagagatggaggatgatgagggaggaggaaagctacagtaggcaagatgatcaagggaggattctctgagaagatgacatttgagcagacacctaagtgcaacaggaggcaaaggcatacaaatatctcggtgagaagatttccaaacaaaagcaagagcaaatacaaagatgttgagaagaacagcaagaaaaccaatgtcaacagactgcagggagaaaggagagtgttatgagactaggtaaaaagaagagggctgaatcttgaagagccttgag

SEQ ID NO: 37251 - DNA, 364 bp, Homo Sapiens
ccactagtgtaggcatcaccatttctggatcacagtggtgattactttatacatgctatctctgtgtagagaaattagcagctttccttatggattaacaaaaagctctaggctgagtcacgttttcagaacttccaggcagccaggaactagaacaaacaggtgtccaagatgaagataatgtctgtgacagtaattttagcagactgtatcattcaaatatattatgaaggtatgggacaatgtgcatgtgtgtgcatgtgtatgttatgtggatggcgagctgtagcacgacgaaggaaaatatattccagaaagaggataaacactgaaagtgccaccacggaacaggaacttcaatctg

SEQ ID NO: 37252 - DNA, 523 bp, Homo Sapiens
tccactagtgtaggcaggagcagaggcgatcataaggacacggttccttagggctttattaattcacgctattcatgaagaacagaatacatgagaagcaggcaggagcagaggcgatcataaggacacgtcgccttagtgctttattaattcacgctattcatcaagaacagaaaacaggagacgcaggcaggagcagaggcgatcataaggacacggtgccttagtgctttattaattcacgctattcatcaagaacagaatacatgagaagcaggcaggagcagaggcgatcataaggacacggcgccttagtgctttattaattcaccttcttttcctctgcccctgcccacatcctccaggtggtcactgtggtgattttcattcttgttataagagacagggtctcgctctgtcacccaggctattgtgaaatacagtaaaattgtcatactacactggacacacacacagctttgttctaaatatattttttacaatatacagtagctcatacatg

SEQ ID NO: 37253 - DNA, 391 bp, Homo Sapiens
tccactagtgtaggcccagcctgatttctgagtggaactcaatagaaagtaacaggcaaccaaccagagggaagatgaatcagctactaggattaacgggatgagaagtttaaatctcttaaaattctcaggaatgtttgtgtttgtaccagatgttcttgacagtcatctagtacaaatcaatcatcttgacaatcaaaccagaatggatgcagaagtccctatggcctatgagaactgtgtttgcctggcatgtgcttccttgaaagtcttatgttaacttcttgctttcctctggccagtttctctaccatggaatgattagcttctacctgcctggctctattccctggatactgccttgtgctccttactgtcttcctgagcagaa

SEQ ID NO: 37254 - DNA, 446 bp, Homo Sapiens
tccactagtgtaggcgacatttatttgctcatatatctcaccttggtgagtagaattcttagtccaaatccctgaaaggaatagtgtggctccctagtgcaaatgacctgagagccccttccctcagtatgtgccaagaatcaaatcttggccacttagtgctctgtgttccacatgtgagctcgcgacgcgctgaacggctgtgctaactgagatggatggccctgtcaaacaggaagctggcacaccagggtgcaagcagtgggatacaatgacctttacattcagagaaaaatatccctaaagtggcatgaaaagtttgtggggggaagggaagggagattcttttatttcatttaagtacatagcatgacataaaagcaatggtgcccagtatgcaatttgctcaggatcaaatcggcctacactagtggagggtaccgagc

SEQ ID NO: 37255 - DNA, 506 bp, Homo Sapiens
attgatgagataggctgggtttccaagaagagaagaatagggaggacatgatgcccagcactgaatcagaagcagaacccaatggttatgcaaagctatttgaactattttggcttctgcaaccagtgctcaagaatctatttcatctttcgaaaagggggaaaacccctgccgatcctcaccaacatgcagtcccagtccagtttaaactggatatgcaattacagcttaccaggggaataaactctgagggggatggatggttcggaaccttctttatatgatcagaaaacacactgtggaataagaggaggatcaatgtcgcatttcctcaatgagtcccaattaacacaattcaacaaccttaatagtcctttcagtcgtttaaacaagatactgctggagtcctccaagaagacctgtcatttaccaagatgttcaagtcccccaaggaagaccttttgtcagtaccaagatgctcaagtcatagctaaccaaacatgaga

SEQ ID NO: 37256 - DNA, 426 bp, Homo Sapiens
tgagccggcccacggttatccttaaacacttctaacccattgtgtctctgagacttagctccaccgatcatctcctctcaaatatgtttctgatgcttcctcctccactgatgtcttctccttagcagatgcactcaagtctctccatctgaagatgtctctgtctctctctcatgctcccacacacatacccaaattcccccttcaatacacccaatgtccactgtgaggtaataccttcccttactcactcttcagtcctaggctcctgggaagagtctcaactttctctccctccaacactcctaaacctcctctacctattttctgaaatggctgttgcactgttatggaattaaggccactcactctaaagcactgggcagtcttaacctttctgactttcctgaaactcttctttggatt

SEQ ID NO: 37257 - DNA, 468 bp, Homo Sapiens
cacggtttaccacgacaagctatgccctctgatacatcctacattcattgtcacttacctccctctcctgtgtgaatgcataacacaggttatgaatgccaataatgtccgccagggacccaggcgaaacatctagtcctcagcctccaatcagtcctttctggttccctaaaagatttactaccttattatgaagtgtgccctccaaaatgggacccatggctaacgcaccttagtccacacattagctatcatatactggatgtctccaatatcaattccttcccagatatcccaacctatgtggacaagcatctcagggtctgagcatggtgaaaacaaccctccttatattcccagtgactgtattatgcctactcccaacttgctcatctcagctgatacagcttctatcactgctgctgctaaggccaaaacccctagggttgccaggcacggtggctcgag

SEQ ID NO: 37258 - DNA, 374 bp, Homo Sapiens
actccacaaacaggaaagaatggtaaatatagaaagccactgctttctaattgtactggctgccatcttgtcttctttctactgacaagaaagtatcaataagaggtagtgattggtttgagggggaaacagtttttctagcagtttagtccttaatctgtggcttcttaagacctctgagttccatgttagaatattttaatgtattagtttctaggaaataggagtagctgaaaggagaggaggagtgaacattcttaagcatggagttatgttctaggctgcgattgacatatgcagtctaccactatgcaaggacgaatgaggtcagtgttgtaggaacatctggtggagtaaaggcatcccatcatctg

SEQ ID NO: 37259 - DNA, 381 bp, Homo Sapiens
atgtgcatgtcgtattctgatattaggagaagaaagccctctaaggtgcgagtagacagtccactctcagccagcagtgatgatcatcccgtcacaagctgttcttggggtcagattggcactccagatatgagggccctagggagagcttcctaagggaagctgggagcaaggtggaaccccaggagagcgtggatgggcttccactgcggggagtgtcccgccggtccgtaacaggctttccgccgaggcgccagcctgcgctgtgcaggagacaaaagaaaatcgaggccctgactgagcagatggtgcggaggaagccgggcgggctgcggtgggcctctgaggacacgaggagggcagggggcgtaagggccagca

SEQ ID NO: 37260 - DNA, 437 bp, Homo Sapiens
tcactgagcggcgagccacagtcaggagaggattacaaccggggaacggccatcactcgaaaatgaagtcagaagcagaggaccccaacagaccgggctcctgtcactagactctaacctggagtccacgtcaccaggtccccaggacccaaaggtacacaaagcccacctggaccctcagccggtacttgccccaggccaccctcaggatccacggtccacagcaccactgctgttggctcaggctctgcctcccctgggcccacggcgggtccgtgggagccccccacgagctctgctgtcctcatttgagagtcctgtcctggctgccatggagggagggcccctggagcccctcctgctagtgctaaggagctcagaagccctgcccagcagggtccagatgggaagcagaggctcagagaggactgtaacct

SEQ ID NO: 37261 - DNA, 378 bp, Homo Sapiens
tggcctacgcgctacttccagcccataacgtggtttctgactctgatccccttaacttctgcaagattcatgaaactctttcttagccatcagatagtaacccagaattgaatagtttggtgctagagggaagggaagagggaaggatcaaagcccaggaaagactgggagcagagcacagaggcccagggggaaaaggccaagtggatgcctgtagggagaggaggaggctgtgatcgagaagggcatgcatgagggaaggaagagctgggagactgccaggtaattctcagcctggatattgtgagccgagagagaggaggaggctgtaagacccaagaaagagacagcatgtccatcagcgcgtaagggccagca

SEQ ID NO: 37262 - DNA, 370 bp, Homo Sapiens
attacgcgctcggattcaggcgtgagccaccacacctggctagaatgaggaaatacttacaagtggcaaatggattatgaacatcttattcagaacataaacggtaaaaaaacagctaaaatggcaaaagcagttgggttctggggaaggtggggccaggggactttttgaagccttaatatttgctttgttaaaccatgttcttgcattattaagttgtgtcatactaagaactctattttgtcaagccagattatgatggcttaacatgagtgaaccttccagcttctcatgagatgcaaatctgacaggaatagggactcgtgttactttatggcaggtaaatagcacccttcagatacaaaattgg

SEQ ID NO: 37263 - DNA, 403 bp, Homo Sapiens
gaggagaggataccgtgcggcgttacgcgctcgaggtggtatagacaaaggacgtcgcgcacattatagcgttccccagacatgccaggttctctcgcacccctgagtcctccccagcctgatagttctgcccagacacacttccctcggggcatggctaggtggagaacatgcatcgcccacatcaccttctccagaaagccttcctgatgaatctcacccacactggggttaagtttgtccatgctggaccctcacacagcaccctctgctcagccccgcagtacttcagtagttcatttggactacaagttccttaagggccaggggcccgtctggctgcatccccaactactagcgctgtctctgcgcgtaagggccagcagacgcgtaagggccagca

SEQ ID NO: 37264 - DNA, 368 bp, Homo Sapiens
aaattttcttcaactattttggactgatgttcatttctcttctagttgagtcacattccccttttgatattctgaaatgtagtctaaaatatgaaactgactgctattaatacactgtattgtagacagtaaggaaatgggagaagtgaggataaaaaattgctactatatacacaaatctattcatatcaaagtaaggaaagttttgcatgaccaatgcagtgttcatttctacaactggtcatatcaacttaattaggatttataactacctttttccaccagtcattctattacccctttaccctcagcaaatacctcagctgtttatggtttcttgctgtgtaggatgtcccacatcatcattc

SEQ ID NO: 37265 - DNA, 373 bp, Homo Sapiens
cggccttccatcctgggcataagagctgctggcctgtgtgccggggtgggggcctgcctggcaggcacaggcccacttaagttatccattggcagaagcggcaggtgccccgtcttgcagggctgagcttggagcagactgctgtgtgctgcagccacgcccgggctgctttcctggagggtgggacacccattctcatcctcacacctgcctcccttgagactcggcgctgtagcttttcctcttcgtggagcaccacctgggctggctcctacctgtctggcggccccttcccgtcccctctgccctactcccctcctcccctcttagctcttattgcccaggctggagtagctcttattgcccagggggg

SEQ ID NO: 37266 - DNA, 366 bp, Homo Sapiens
ttccgggcagtaagagctactccacaataagagctacatgaaactcctaatacttgtttagcagtcactacctgtctaattctccctggagaatgggacaattctgactgcctttcctttaatcatggagggaggtgaccattctaacaactactcaggacacatcccacaccacctgacccacagaaccacactgccttctgctgagtcccttgcatgccaggcactgggttaagagctttatagatctgaaacccacgcgaggattctacaatgagaaactggaggctcagagaggtaaagtgacttgcacaaggccacacagctcacaagcactattcttatggcccgacaaccagctcttat

SEQ ID NO: 37267 - DNA, 398 bp, Homo Sapiens
agacctccagtccgggcagtaagagctctagatgctgatacacaactactgcctgacatccaaatcactggcaggcaccttacatttaaatcatttgaactggagtcagctagctcaggccacaaagtccaagtcacctgtagttttctctattttctatcacaccccatagatcagatcatcagtagatcctgtttgctctccctgtataacatatcctgactccatctctttttaccacctttggtggttattacctggtccaagccagcacagtgctgtacagtgctgtgacagcctctcttacccttcctcctattttccatagttcctcctgagtcccgccgagcataatgttttttaaaacatatcccagctcttattgccccggctggagt

SEQ ID NO: 37268 - DNA, 362 bp, Homo Sapiens
tgcatgggcattaagagctactccagcctgggtaatagagctactccagacgttccagatgcgcatcttaacagttctcaatccaacctttaactaaagtctgagttccttttcagagaacgctctcaagattccctctagtgtaagcagtttcccgagccatcttcccaaacactagctttcacctaactcaatccccaaaatgtcacactggactcctcacccacagcatcctgctaattagccgtgcccaacaggtcctccgttcccgtctccctttttgcgcacgattacctcgttcctcacagagttgccgccttaactcacccaacccttcaggagctcttattgcccaggctgga

SEQ ID NO: 37269 - DNA, 400 bp, Homo Sapiens
tcgagctcggccagctgggcataagagctgtgctggtccctgactctctaaggaacgagaactccccctctccagaagctcccacgacaccggaagcacatactaaggacggagtctttgacacgtgaatgttgctgggtgtaaggactgagtctttgacacgtgaatgctgctgggtctgctgtcccacacgctgcatctctttcgttaggatacaagtcatcatagtcaaagcactagctggacccagactgactcggaatttataaaacgtggttacgatactgaccaaagctgccggttcttcgtggcagcgcagagcctggagggtgtttaaagtcctcccaaggctactcagatgcatctcctgagggagcctgggacgggatctggttacagg

SEQ ID NO: 37270 - DNA, 359 bp, Homo Sapiens
gagtcgggccatcctcctgggaataagagctctgcttcagaccccaaatgagcctgttggaagtggggtaggaggaaagtgttgtctgttgtaccaggcttccctgggagttctgagcttctcaggggaattccattccaatctccagcttctttgcccactcacccgccctcctgtccaatgcctctggaaagtttcctagtgatggtaacttccagtgactaacctgtacctttgtagggtaactgggagtgagggaccctctaaaataccatctcctgcatgaaacatttcttgtttccctggttaaaaagagtatctcctgcaatcgcacttagctcttattgcccaggctggag

SEQ ID NO: 37271 - DNA, 426 bp, Homo Sapiens
tcgagccggaccactccttccgggcataagagctctttcgaaaaatgtgtgtcaattataatcttagacataattttaaatgaatcaggtggaaatagtgtaggtaataaaggtagttttattttccctaaatttcacatctgccctccccatccccacctgagaatcacctaagagagaaccggtcttgcagagtcttgccagaaaagtaaaagatccttttactggcatagctaacagctaccaagtgcctaatgcaggcagaccagaaacttacctggcctacacccaaagcactccttacctcctaagtccactcctcccatccttaagccccaccccaaccagctttatacttggcgctctgttgggtcccctgcctggcacccctgcccaaaggacagcttcagggccctcatccagcct

SEQ ID NO: 37272 - DNA, 417 bp, Homo Sapiens
ataactaggactagtcaatgaacttgcccattcttcaaggatgcttagaccgccccgtttagaatagcatctagttggttcaggtctaggatcccatttttaggctagcctcagatgcctccacttggcttgctatggctcagctccaccatgcccccctacctctcacattcccattgcacactcccgacctttcaagaagcaggaactggccagttcctgcttcttgaaaggtgcaatagtctcaacataatgaactcaaaatctcagtgcattgaagggtttgcatgccaagttgaccaacgtgcctaaactgtattaactccctatttgcacacttagaattggatcatcagatttgtctaacccacttgaaaggcttagctatctgttcactgaacagtcattatgatgtac

SEQ ID NO: 37273 - DNA, 373 bp, Homo Sapiens
tcggtccccattctgcttcttgaaacagacatgccaagttccaggagacatcggacagaaactgcccctgttcttctgccccttgacacacccacctttggggtgtgaaaacccaccagttccagccaccatctcatttcagcctcccaaggcctttgctctacttgaaaaagcctcagcagagaagaaagccatcccgggaggatgaaggcagcagattctgctctgttcactgacagcactgatgcccagcacctaccaaacacacagagtcttacacatgttatgggacttatctctattaattcactgagttatcctggtaacctgatgagattaggtcacttatcccatttcaagaagcaggaactgg

SEQ ID NO: 37274 - DNA, 393 bp, Homo Sapiens
gaccccgttctgcttcttgaaaacctatgttgagtattatggctagttccatagttgagttgggaaatgtctttgaggagacactttttcactttgtattcatctgtacattttctgttacttgcattctgtcatgctcaggctattagagcaggtacatttttataactggaatgtttatgtgtagtgaagctctgagaggactttgcattagatctcagcagcataatcagaaggttgtcctttgtctcagcaatttttaagctaatagtagcagaaattgcagtggaaatagactgctttgccacaacattcagaaaatcatttatctttttattgcagttcttgtcaccaaacaatacattttagtacttttcaagaagcaggaactgg

SEQ ID NO: 37275 - DNA, 411 bp, Homo Sapiens
acttcgcgtggtgtttaacctgggatacaagtctgtgagattggggtctataaaacaggaacccctctcgctttgcagagtttgttcttttttaccaaataaatactgctccttactcttcaaagtgtctgcgagcctaatcttttctggtcatgtgacaagagcctggtttttctacaacaatggtagggaaggaaactgaggaggatacttaaatgattaatgaaaattagaaggcacaattcccttccaaaaaatgaaaggatgggtaatatagtaggggttttttgtatagtcattcagaaaataggagtggaactaagaatatataaaaagattgttaagacgtcttaagagcccaggtaaatttagagggcatgagtttgtgagtttgtagtagtaccaatctat

SEQ ID NO: 37276 - DNA, 362 bp, Homo Sapiens
tgaaagccttgatgtgtcacaagaaacggatggaagagagtaatgccaggaaggagacggaggagtgggcacagaggtggagggcaaccaagagcacatgatgggacccagaagccaagagagaaaagactagaaaaatgggacaaggagggagaattagctcattggccgaattggcaaccacagttttagggaagtgaactaaagcccttcatttttcttcctgcagcatctctcagggcctgatgttgccttgtagttgtttacttggatattacatatctgcctgctacagtgtcaggtgcctggcatgtttttgcaggacagtattcacagcacttagaacacgtcttccttataga

SEQ ID NO: 37277 - DNA, 350 bp, Homo Sapiens
aaaccatgttctgtataaactttgatgttaaaggtgcttctcagaatgatgatggctccagatccaaggatgaaacaaggtaagcattcactgattgcttaccacagaatgcggagagatagatttcctaaatattcattttagtgtaaacttcaggttcatgatataagaataaatcagtgtcagaaagaattcagaactcaagaagggaaatatttgccaaatattgaagactcttagcttatcggattagagctatctggagtgtgctagggaaagccaaattgttgatacttcttcagcttgtagaagataaatatactggcaccctttcaagaagcaggaactgg

SEQ ID NO: 37278 - DNA, 409 bp, Homo Sapiens
cgaccgaagaggatccctcttcagagggggtaaggatagagcacagaggaactctgatatgtgtggacgaaaagttagggagggagcctgaggaggggcaatcagcagaggcaagagaacacgtactgtctgggaagccaggaatgagaaaagtttctaaaagaaagcaatagtgtctgttgcagcagagaacaggtagggtgagccttaaatgaggctactgagtcactggtgaccatggtgacagcagtttcagtggaggggtggggacagaagctagactgctgtggcttagggagtcagtatgaggcaaagatgtagaacaaaagacttttttgagaaatatagttgcgagggaaggtaggaaagcgggtggtattttcaagaagcaggaactgggggtaccgag

SEQ ID NO: 37279 - DNA, 377 bp, Homo Sapiens
tcccccagttcctgctcttgaaagaaaatctggtagagttgtaaccacacgactgggatgcaaatatgtcagtctaaatgaaggatcagagtacgaccacgtctaagtggagaaagttagtccggtcatgatcgtacaggcatcagctatattagattatcttttggttaacaataggctgagtcatgtctatgcaagaagtagatcagccaccgcattgggagacaacctgcaagaattatacgagacttatgtcaggacatggaagtacatgctgaaaaactctaaatggctgaatataactgtattggagatgctttcagattgcattctgagtttacctgaaagggatcaaatttcaagaagcaggaactgga

SEQ ID NO: 37280 - DNA, 409 bp, Homo Sapiens
ccagttcctgcttctgaaagtttgccacaaaaaaagaaaggtaatgtcaactaaatgatattggtagattaaatggaataatttgcttaattggacatctttatgcatatatttgtattttataagcttagttttaaattttgaaagctttagaaatgtgttgatggcctaattataaaactgataacctcttttgccaactcgcatatctgtgtagttattctagtcttttaataagtgtctgtacaaaactttctcataggagtctgtaaatggagaagctatgttttagcatctggcataaattcagttgctgttctaccatttcaatctgttagcgtatttcttagctgtttgtacccgttgacattataggtaagggctaagagagagttttttccactagatt

SEQ ID NO: 37281 - DNA, 399 bp, Homo Sapiens
tctgtaatacagaagcgcagtagtagcccaccttcctggtttgatacattggcaggctccaggctggctgcatctgttgggacaggtattctctggtctccacagcctttgctcctacggccagctaacaccctcctctacctgccctctggtcttctgtccctgctgcctgcttctcttccatctagtccattcaagtgttttttggggaagtcacctggtaccttgttagggttaatttgtcttttaaattgggctcccaagggtatctgctagctaccctggctcacaaggctattttgaggctgaggatgtaacaactgtgaaaacagtttggaaactagtgctaagcaattgtttttcaagaagcaggaactggtttcaagaagcaggaactgg

SEQ ID NO: 37282 - DNA, 459 bp, Homo Sapiens
agtctgttctgaaacagttcctccagttcctgaagagcagttggggctctccccaacaaagatatcattctctacctacatgctttatctgcaatgtaacgatgccatgctctaaagacggttctgtatcccaatcgattcaactaatctaatatgaagcttttctccatgacactaactaccatataatcttccactgtaagactgagtcctgatttataaaactacactcttactattggatgtgtcctaaactctttttcaaaaatgatctgtgatgcacagaagaatgaaagggtgggctggtcagtttggttgatttagaagataatcctaatcatgtctgtgtagagaagtcataggtcttcttgcctaaactctggttgaccacctgacagatgctgtcaaaatagagacgatgacacagatgacgggattaactcaactctgtgtctagga

SEQ ID NO: 37283 - DNA, 394 bp, Homo Sapiens
taagagtatccccccagttcctgcttcttgaaatgtctgttttgacatcatagtctcagctaaattttgacagtggcatatctactgttactaaaagcttctgtgtattgaatagtttcatccttcttgcgtaaaagtgagtggcttcttctgtttcaagaagcaggaactggccagttcctgcttcttgaaaccgttcctgcttctccttttgtttatctttgtggtccactctctctgactattgttcgctgtgacccgcgttgctccgtttgatgtatggaggtgcatcacgccactgcatgtttccctctgggcacacgagtaactacgggcactctgtcctctctgggcgttcacggctctaccctctgcgatcggctggcttctattc

SEQ ID NO: 37284 - DNA, 357 bp, Homo Sapiens
gttcaacagatcccccagttcctgcagtgctgtaagggatttctttccctatactgatacagtattttctctgctgtttatacagacagtatcaaaaggctaaagagaaatcctgcctttctggtcctgctattcactcctctcgacctaatctatcctccctgtttcttatacctgagccaacattaattagagaagaggaacgactaaaccgtcagtgctccttttatcatctcttgttggctccattatactttccacgagcccgagtgtctctgatccttgtatgtcatccttcaggcctcaaccggctacttgccctctacctgctgaagtttctgcatcattttcatggga

SEQ ID NO: 37285 - DNA, 359 bp, Homo Sapiens
gcctcacagagccatctgcagctcaagctgcagagcgctgcaacgggtggtggaaagaccactggactagaatgaggatatctgagttctaagtttccagtctgtaaaccaagaggttggataactttacctctcaaggtctttccagctgcaaaattccttaagatacaaaacaaaactgttaactgctgctgagcatgacagaggtgagacatgaacctcccaggggaggcgaggcatgacaagcgccatcctgaggtcagtccaacacatttaacttatttcaccccataatgctgcaaattctgcttagttcctgtatctcttcagggacaaggagagtcgttgttacacattct

SEQ ID NO: 37286 - DNA, 359 bp, Homo Sapiens
gagaacgagccacagagagagcaggtgaggtctcactctgtaagagtgaaattaagagtggttcccactcttgcaaagtcctctgatgtgtccacctgtagctagctgaaggatgtgtgcttgcatgtggtgtgttttaagaacaaaacatctgcacgacagctacgggcagttcatcaacacaggagatcttgaataataatcaaggattaattaagtttaaagcgtatcacattttgtaccagtgtcagaatctgggggaggaagaacaattaaaaaagaattaggggtttttattggtaaatccaaattcattcctaaattaaatgatgaaaatatttgtcgttgttacacattct

SEQ ID NO: 37287 - DNA, 389 bp, Homo Sapiens
tccacctgccttgtgttcacaaatgagttgggattacaggcatgagacaccatgcccggtctacatggaattattttgccttcatgcttaaatgatgagttaactggtaaaaatataaggtttaatgttttccctcagtactctgtcttatggcatttattactactggtaagtttgctctcagtgttatttataatgaaacttttctatctcaggtaatttaaaaaatgtttcttcttagttcttgacgttctgtttcaatctagtatgtctaggacttaatttgttttcgttaggagctctgtgtagtcctttaatctgaggacttttctggaaatattttgccataaactcattttaaatattgcttatctttcatattttatagt

SEQ ID NO: 37288 - DNA, 399 bp, Homo Sapiens
gacagataataactatggacacggaaataggggagattaaatatgcacgactgtccagattgtacagacagaagaacatgaaccacaaaggactacataatgtgtccagcatcagaatgtaaagtcaggttcattgttgtttgtgttagatcatataatgcagagcagatggcctaatctgtgttggtgtttgtccactttcctaaatgtttgtttgtctttccgttatctctatttggttctagctaggtcatgattgcttatgtcaaagaaacaaagaaagtacgacaagaatctgtaactgtaacaatgttgtttaacacaactttgaatacatttttacaggaagcaaagaagtgtgttgccctctaggaaatgtgtgttgctctgatgtaatta

SEQ ID NO: 37289 - DNA, 392 bp, Homo Sapiens
cagctctgaacctgaatgctaagcccagatcattcaattctaagatctggcacgccagcctcctgcttcctgttaggacctcagcaagagagggaaactgaagaacaaagacaaagaacagatgtagggctttgctctagctcagggcaaaaggcagcttcaagatgtttcccctcctctccatctcttgtcaatacctgaccctggccaaactgcagagatcactctttgaaatgaaaagcatacaccatatacatgatggactagatttttctgtcctgattcagcagtgcacaggaggaattttcatccccataaaggaaactgtccaataacgcaactcaataaccattgaatgagcagctactatgtgctctctatttgccctgcac

SEQ ID NO: 37290 - DNA, 440 bp, Homo Sapiens
gatactagacaaagcagatctgggaatgggagggaggagcacaccagcactagcggtatttaaaatcagtcacttccaatgctagtccctgctcagtcagcaataggaatggactttggggaaggagttttgccagcagcctcaacctcaggccagattccaatgactcctggactcctcaaaggcccgtgagtcaatgagagagagcggaagttatgttttcccaaatatacctcatcagggtcctcaatcgactactaaaccaaattgtccatcgaatttattaccacttctcctgaatatacaggaatagatctgaatccagggattttgaactcaggaggtctaattcttacccatcttgttacattggcttcaaaagggaaggacacataattcctcattttgttttataacgatttagtaaaatagggatcaga

SEQ ID NO: 37291 - DNA, 392 bp, Homo Sapiens
aagcgagcactacctaggcaagtaatgctgcaggctagcatttgaacagtggtggcctcataaagggcagacacacccctggcagccagccaggctcattaacagcaacccagagacttgccgaggtccttctaagaatctgatttcatgagtcacgctccatgggcacaccccaaatttctgtttgtttaggaaaactcagttaccctttacaaagaataactcctataaatgataatgagaataattaaagctacatgtgcaaaaacaattaacttattactgatgctatcagcggatgttgtcaactaataaatctgtcaagttggcaagtgaagaaaggtggcatgctttcacacataaatataaaatgtttaaggcagaacaactgg

SEQ ID NO: 37292 - DNA, 386 bp, Homo Sapiens
agctctgaccgagatcaatgcacgagacctagctttggtggaggggctgggagacccctttctgccatcttttggcactgctactgagggtcagcctggcagactcgcatgctgggttaataagcaaatcttactgcatctaaagtcctcttgccaacttggtccaggatttaataattggtaagtttggagaaggtgagtgacgggacaagagggggaaaaggtgattccaaagtctggcttctgtcctcaacatcgtctaaacggggtagtcagctggggttggtggttaaaaatctacacggatatattattgcggggtgtccatctattgggggatggcgtcagactctcaagggcgtgccttttcttggcgcggggcgcag

SEQ ID NO: 37293 - DNA, 512 bp, Homo Sapiens
tagaggagtcccccagctgctgaccgagttcccagaggcagacgggccccacctcatgccttcaggaaaggcgtagaggagcaaggcaaagtggcgcaaccaccggcttcagagaagaaacacggtggtctgggagccagaacacagggacagccctggacctggcagtaactcactctcgaccctggggccgaccatcactcttcctgagtttctgagatcatcaggcccaacctttactttagccaacggggaaacagatctgtcctaattctcccacgtccgaagactttaagtccattccattcaagtaaaacaaacttactatgcaaacctgtttccatcttcaaggagctaaaagcccactaggagggtatttaaacacactatggaccaaatcatgagggagagtcaggctcgttcatttgtgcagccatgggttcacccattcattcaaacatctgctgagagtctactctgctcagcacttgagcacaaagctacacagaacc

SEQ ID NO: 37294 - DNA, 515 bp, Homo Sapiens
gctgagcgagtacgtatagtgggggttaggtctgtcagtcagtacctatagacatggatttcctcttaaaatttgtactctaaaagaatcatctactttatgagtaataagttccaatggtgggaatatggaatacatttgagagttgcgaaaaggtagaaatctaatgttattgatctgtggaacttaaacagaaagtttcaacggactctggccaaatgtcctgctatagaagttcagatcacatgactatggcattacagccagttgtggagaacatgtataaatcatataggtctctgagggttcttgagaactgaattaacttctataaaggctgaatctccaaaaagtttaggaggtgacaaaaatgtcacaccagtcaacatgtaagtgttttggctaatgctttggtttagattttttaggtgaaaccattacattcttctgagtctggagaagtaaaatacttcactctctagtctagaatgactttcaaatcctcatgtggacag

SEQ ID NO: 37295 - DNA, 434 bp, Homo Sapiens
tggggctgtcgccctcagcctggtgctggtggatctggctcaggaccctcggcctgggaggattggggcaggtgtcaggacttgaggattaccccgggaatccctcctgagtaacctggaaccagggctgcttctcatgagcaggtttctgtcctgctgtcactccatccctgtttgtggatggtggcataggtgctctgagatgatggcgttcgagactggggtcacagtgcctcccttttccgtggggcaccctggactcttttctggctgccgctctggcacacccctttttggtggctggtctggtgctgggctccggcccggggagggagaggcccttcggtggtactcaccccatcccctccctctgctttccagacatctgcatctcctgtgggagcctcaatgttaccctggaactcggtcagagg

SEQ ID NO: 37296 - DNA, 493 bp, Homo Sapiens
tagaggagtccccagctgctgagcgagttcaaggattgtataagcaaggccctggagagtcacttggacattcatccctggggaaagaggtctgtggcctaacattgccaggcaaggcctctactcaggagctcagtccaggactgtgggtgagaaaagctctggattcgagagtattcaaatatttgaccatttaagagttaggacaaaggatgatcctgtccccttgccatgtggccagtgcatgtgtgcagtgttcccaggtgcttctgacttacagccaagttggggctgtggttatggatggacagatactgatgccttggtccaggaatggtggttgctgactgtgtgctctgccaccctgccttggaaccagcagggcatatgtgagtcctgtccagtctatactcaccagtgactttgccccttagcccgagtggttcaccctcacagtctctctgttagagaagtgagttgtgactatggggtt

SEQ ID NO: 37297 - DNA, 388 bp, Homo Sapiens
agaggatcccctcggctcccaaagtgctgggattatagatgtgagccacacgcctggctctctttttgtatactttcatgtgtattgactagttccctcttttgatgatctatttttgtaaaatgtcacatgaatttatcattggaagatgaggcaacacaactacatactttactgtctgtgcatgaatggaataacagctgcccagtgaccagtcactgacagacttagaaagaagtgacatacatgattggttgctgatcataatgcacgtcttactgacataatgatctatgtactgaagagctggtgttgttttaccaaatcatggtaactgaagtctgtgcctatcagagctatgcagaaatgaggaactcggtcagaggtg

SEQ ID NO: 37298 - DNA, 692 bp, Homo Sapiens
ccggatgcaaggtctcggatgcaaaggtctctggatgcaaagtgtcctctggatgcaaaagtgtctggttatattatatgtatttcacaaaatgcaagttagcctgagagtctagcatagattaagagatgcaatcaaacacacgctggtagtactggtgaagcagattaaacaggtaacccctgaaaggtgtacccaagaatatgtttagtttttagaaatggtcaacaaagtgaaaagctccaactatgcaaagaggacaagccctaccttggtaaacaagacacctttacaatggtgtatttgtgtatacaggtggaagattgggccagtagcatccgtgtcaaaataaaatagtgaaatgtccatatcttctcaatttcagcgataaaatccatcaatgcgtctccacatggattcttggctaatgacatgggtttaaagattatctggtctatttttcacatgatgactgaaatatctatgcatggtattacttttatatgtaaagttataccgtgttgacagattgtgtagtcttttatatgacaaggcagtatgaaacaaaacctttccatgactaccaaagaaagcaatggggtaaatgacagagctttcctaactatttgtctgtcatagagcacagtaattgcggctgtctcaggttggtgttagaacattctcgattacag

SEQ ID NO: 37299 - DNA, 647 bp, Homo Sapiens
tagattttatttaatcaatggcctcagaaagagaggttcaggacctgccaaggtgccaagggactcaatctcaaatgactatgcttgggtctattatgaagcaaaggtgaggcagccaccatctgagatgggcaacctaagaaaaatgccatccctccttcggctgctttcttccaacttctatccttttatcatcagaactctagagaataaagtatgtggcctacttttacttagctttccataacacactgttcatctatcactctggatgtaaatttgatataaaaatgaccaaattattaaataaatgagtgctgttagacacagcatcctctctgatcccttgggcctggtatcccaagaaggcaggaccgagctgtgccttggtggctgcctttaacggcatttccttctccctctcccttcccagcacatatatttctgagctctcctagtgtttacttctaaccacttaaggaaaatgtagatttcacaaatagcattaattaacatatctatatttccaatcatttaaaataaacattattcctttttctagacttttctaatttgcataatactgacacaaaaggctgctacaatccctttggaatcactgtgatttcactcgacataaatagatc

SEQ ID NO: 37300 - DNA, 686 bp, Homo Sapiens
cctatggtttatacgaagcttgcacataggggataatcagcaaatattaaaaatcccctgctctctctcattctacaattccttgagaagttgaagcacagtgggagaagaaataagctcccacccaagctttggctcatctgtgaggagtcggtctgtggtatcgtcagaggagtgtgaaaggaggaattttcttgagacattctccatgtagtctccatctttcagactacgatcatgtaaaggaagccaagggttttcacatacaccatcaccactccacacatcacctaccgttctggtctggaaaggttgatgtgtgtagcccagtggatgtggagccaatcagagatagaaggagaaaccttaggcaaccacctcttttttccctcactacttatatgggatgagatctgcgagcatcccagaacaaacctcgaagtgtaaacagtatttagtacatccagagagaagggttcaagatagctgactagcgacacctggcacttctgcacaaagaaggaccaaaactgaacaatcacataacaagtggagcttctaagagaacaatggaattcatcagagacgggacagggacatctggggctggaagggagggagcaagcagtggtcagtggatcagtggagcagagaacccccggggagagagtacagaactcgaggaa

SEQ ID NO: 37301 - DNA, 679 bp, Homo Sapiens
ggcgttctagcggtcctctctggatgcaagtgtctccagatactctattatcctggaagtgtaaaggtatagggaaattatcaaagtggtgaccaagtagttctgaaaggattgaccgtttaatagggatggggacagaatgcagatcaggaagagtttttagtaatagattagtttcttgattgcaaaagaaatatctttaatgtgttaattttttattattttaaaatctctggcatacttgaatgataatgttataaaacttaaagtgaggatttggtctagggagattaccccaatagaatcagaaactcttagtcagataataaatcctcatattatgcctgccatgttcagaacctgcaacaaaattccctactaggccaacctctaacgtttaaatacccctaggttttctaggaggccttggaatagttgcaagtttaatgatctggtattctcaaaaaggatgtatctaatgatcttgattcttcaaaatgttatttcttgattagatatacaatgtatatagagacaatatggtttcttgtagtaactgtgtatagagaagtactgtttccatttatatatgaagtgccttataattctacacttttctttaaaattaactttgatgtctgcatatatgctggtggtattacgtgaatttgtacgggat

SEQ ID NO: 37302 - DNA, 703 bp, Homo Sapiens
ggcgatctagaggatcctctctggatgaaagtgtcatgatatggcacatcaaaagatgacccaaaagccctgcccatttttaagagagggatattaaacccattagtgataaattatctagtctctttattttatgtagaggaaccatctgtgaaatatttccaaaagctgaaaaataaatataaagacccctctacttaagaaaccacatgaattgccatttagcaattatgttttagagatttatttaaaacaaagagagaaaaagatgtttcttaatttattttaaaatatttttagaaaattgggcataagaaatgaatcaatatagtgacatataagactagtttcaatttctcttgtctctttccactgcagtctacacttcacactgccaacaaagtgatcttcctaataaagtgtagacctctcagaagagtcttcaaaggctttccaagtccagtgtcaagctataggcatacttttgtccagcaccttgtatcccaaccttctgttatcatgatttctgtttctggcctctgcaatttccaagcttttccatcactttcaaatgcttgttacctctacatccatcccacttcttggcctaaatctttctccacaatgagagtccacttcagatacttccttctttattaaatctgcattttgaacatgctgtttatgaccattgaactttgat

SEQ ID NO: 37303 - DNA, 403 bp, Homo Sapiens
tctggatgcaagtgtcatactactataataaaagttctaaacactctatcttaacccggtgtttatactggtgcagaccagtgttcccaaaccatacctcatacttggaatagcactggtttacagaatcagtaacattaagcacgtaaacagttatttcccaactcccaaaactgagcatttagactacagaagcaaacacttcttaatttatgtcacgaagtctctcaaaatacgtgaccacaatagacatgagctccaaactgtgtagctaccaagcacttatgtaactgtaagcccagtggcataagactgtggcagtagttgagaagagcaagaaatgaatagttttctctgccactccttgcggcttctacagtaacccgacacttggcatccagag

SEQ ID NO: 37304 - DNA, 503 bp, Homo Sapiens
cgagtaggatccccgtcggatgcaagtgtcacgacatggccattctcctaagtagataagaggacatttagaaaaatccactaacatgttgggattatccttagctatttgccgaacttatgataacgtcagaaaatactttttacttggttattttccaaccttgacccagtttcccctgaaaagctgcgaactataattacctgtacgaagaattgcttcattccagtaatgaaataaatctcatttttttctctggttgagtctttcttgggccccttcaaagttgcatacattaacctgacccatccaacccagggctgtagagccaaagtaaactcctaggaaaccatcagtgctggaaaaaagggtctgggaatcctagctttggccctaaggagatacacgaagtgtccctgagctccaggcatgcagtgcctactgctccagaaaagtagctactgggtgggcttgctgccagctcagacagctgagacaggacc

SEQ ID NO: 37305 - DNA, 464 bp, Homo Sapiens
caccctcggatgcaagtgtcttacaaagaatattagacagactgtttactcgtgttctcaaagcatacagtcaagaggtgggactgactgatgctttataggtgtgtgtagggtggtagaggccaaggtgctgccagcaatcctttccatactaggtactggtgaaaattgtttttgtttatgctgtcggcacatttgtgtgggtctctcattgtcccttaacagtgccgcatctcagcctggaagtcagctttaagtcattcaagagaacctcaggctgtttttctgacagtgatgatatgatatacagatacatccacagggtatctattaccagcataatgcattgtaagatggcaaggtggcattttgaaagagcgctgggcaagcagttagcacatctgggcctaccttcagcttcttcatttacaaacttctgaccttttgacactttgcatccagag

SEQ ID NO: 37306 - DNA, 363 bp, Homo Sapiens
tctggatgcaagtgtccagccaatttttattttaataggtattcttctttccctattattttacctggacaggacttaacccagaggatagaggaacctcatcatggatcctggtccgcttttagcttaacagcatccaaagacaaagggtcagagatggtagcaaccctagtgtggttgattacacagtagtggtgttattttgttgtcataggatgcaaatatcaaagttgtatctcttaagatctttctgtgtcagtacataaaagctttctcagtctttttaatgctgcatagtattctacacagggcactattctatactttaaccagttcccattggtagacactttgcatccagag

SEQ ID NO: 37307 - DNA, 479 bp, Homo Sapiens
atcttgttaaccttttcggcttaccatgcctgatctttaagggctcacttgctttgtgcggtgtctgcagctgtggttagtgcgtgagataccagtgcaggatcctataaatagataaattcagagtgttccagagtaagagacatggctagagaaatagtcaaagccctcgcatcatttaaccaagttatcgttacctgtagagtacttttcagagtagaagatcatgtagaaacagttaaatcactgaaatttataaccaagaaggaaagctctagttattctgatacccctcccccactttcatactttctctactctgaaacagatcaacaggctgactgtagtgattgttttccttttcatgaggaagtatgaccttatctgtcagtggatctgtacaaataccaggagttgatgtgaatgctcctgtgcaccattgtatgcttggcaggtcttaactgcactcatctaattat

SEQ ID NO: 37308 - DNA, 429 bp, Homo Sapiens
agaggatcccctctggatgcatagtgtctctgggaccctagagatcaggcttggggcacactatacaaagaacactaacaaataagcatggccataagtacagcaggccataagagagcagctaggattataataaaaggcctggaaaccaaatcacataaggaacaactgaagacaccaggatattaagcctggagaagactacaagaaggcttcagataaatgatatctgaagagtcatccagaggcccaataaacagacatattcagtgtagtttctatgacctagtgagacactacacattactggacactctacaaggcagaaacacggttggagttgtttccctcctatcacacctacacatagtaatccttaccacataagtcaggccactccaatacgaatatatttgctagacagctctt

SEQ ID NO: 37309 - DNA, 536 bp, Homo Sapiens
tgaggtgttcagaggatcccctctggatgcaagtgccctgacatttaatacatctggctcctaggactgattaaagagacattttatttgttgaaatatgcacattttcttcatgaaattggttttcttttttatgtgtgacttttcttgcaaaagcttacaaggcacatgcttttgatagcagtgttacatttttaattaatattttagatgtaaaaggtgacagtttaaaagattgttttattagtgggttatccttaaaagcaagtggcatttggttttattttacaatagagtttaatcttacatgttttttgttaaagtaatgttaccaaaaaatctcttattgaactatttgtggtgaactttttaaggatgtttaagatttcacatgcagtttaactgatcacagatgaagttgtaaattaatacctcatgagcgtatttgactgcagggcattgttgtgaatcaaaaccgctttgttcctgtaaactgtgaaaggggtttaagcatatggattaaaattgcatggtga

SEQ ID NO: 37310 - DNA, 496 bp, Homo Sapiens
aatgaccatcttcaagaacattgttgtgaaagagcatttctagtaagaaaattacaaggaaggcatttcctgcaagaaaattaacaagggacagggctactggcttcccagtcccacaaatcgtaagaactgcagttataggaattttataacggtggctgattttgtgagtgtatgtatgtgtgtatgtggaaaaagtagaggatttgagaaaaaatactttaagctcttttatcagtggacatactctgggattggagaagaggaatcacgttggcttgattatgcttctaggatgatatcctacattaaccaataaaaactctttgagtgtgtgcctactgtggaattgaactgtgttaggtgctaaaggttgacgtaaaaattagaacgaacaaacagcaaagccttgtcttcaaagactacatggcctaactgaggacaccacatgggtaggcagagcaaaagagttgtcaactattttgtcattaaatga

SEQ ID NO: 37311 - DNA, 436 bp, Homo Sapiens
tctggatgcaaagtgtctcgatgttgcagtcacgccattcagagtggtttggtcatagctagctatgaatggactaatgaccctcctctagtgctcaaagaggctgcctcagggacatgcgacacgaccatgtgtctaacagtacccctgcctcctgcccaggaacccaggacttgtgccacaattaaggccctctcagggacatgtcggccagcaacacagtaagctgagtcattggaatattcacttgccacaagcccagaaacttacaatacaaagtgctctttaaactgaaggacctgacatgcccttgctggcttatggcagtgtgaaatcataagaggaaagctcagcccacactccccgaatcaagggccactctcagagccacctgctcaaggggccactgcaggccccagcctcctacagatgggga

SEQ ID NO: 37312 - DNA, 423 bp, Homo Sapiens
agaaagtgtcagagaatggggtgtggagggtcaaaggatggaagtagagaaaccaactaggaggctatgttataatagtaatagatggataataatatttaggaaagttcaggtttgggtggggagaccaggacttcattttggagcatgttaagtctcagatataaagtatacaatgggaaacatgcagtcacaggagaggtctgagctaaagatgtaaactttggatttataccgatgacatgcaaagccacgaacctagatggaatcacctagagaacacaagtaaacagaagaaaagagagttgaggaacgagccctgggatagcctaacattaagaaactggggagatgaacaaaagcaagtcaagaaatagtatccattgagctaaaagaaccaaaagagacactttgcatccagag

SEQ ID NO: 37313 - DNA, 503 bp, Homo Sapiens
ctgctggatgcaaggtcctaggggcacttgcaggactccggggggcagaggatggggcccctgccagcacccccacaggcctgctgggggtatgggttagaaagcctcatatgaatcattgctacatgtggtggcatgacccttataaagtctcctccctttccaaggcccacatcctctccataaaagggtaataacagcagtgcatctgtcaggtggaggtcaggaaggaaggggatcaaaagcatgggagcctgcgggagagatttacacacatacctgctgcaagctaggaaacgcagagctggcctcccaggccttgtgggaggaacatgtaagcaaataagaacttgtccctaaccctagagcacccagggaactagggagctgaacttggttcagagagaacagcaggggcaaagggtaggaagagaatgagtggaggccagggatgagggcagtaagttgacataggagagaggtgagtggagtagggttgggta

SEQ ID NO: 37314 - DNA, 453 bp, Homo Sapiens
tctggatgcaaggtccagtagaaataactagcttaatctaccagacaagtctgagatctacggctgggaggctttttactggtagagctgctctgtgctatatgatagccatcagccactggtagttatttaaatttaaattagttacaattaactgaaatttgaaattcagttgctcagtcaggtgaaccacatttcaagcgcttaataaccacatgctactaatggctagcgaatgggatcgtggagctatgtacagaatgtctccatctctgcagtaaagtccaggggacagtgctgatcttgagaatctagaggtgtttaaatatacacttagagaaagacatactcaatttaatagaatcgttgaattggggttttttggttggttaagtaaaatagagaaattcattatctggtaaaacaagaactccagacacttggcatccagag

SEQ ID NO: 37315 - DNA, 452 bp, Homo Sapiens
tctggatgcaagtgtccagcgggagaagaatggctgcagagaacgaagcagaaagatgagctgagagagtaaggggggtgttagaagtcaacaggggataacaaaaccatctggggttgggatcactacaggaggctctacatggcatggtgcatgaacaacaacaagagtaaatttggctgactctgagcttgaggtaagctccttaaagtctctgtggagaaagagaggcccagagtgtgggctggagattaactgatcccagatgcaaagaaaattagaaaagcataggacatggtgcatttcttggataagctgaatgttgggcatttaaatggtatcatctgaggtgttgcagaagatatgattcctttatcaaatcaaatacaagtaaatggatatccctaaaatggtaacttaaagtaatgcgctaagacacttggcatccagag

SEQ ID NO: 37316 - DNA, 496 bp, Homo Sapiens
ctctggatgcaagtgtcccagccttacaggcatttaataaaacactcaatacttgggattctgtgatgctatcagggtttttcctcttcttcttctgcttctaaagggctcagttcttgggacctgatgagtgctataaggcagttcattctagggatcctgggaatgcatatacccaaacaaaggcctggtgccaaacataaccagcacgtacaccatttttattttcctatgaccaatgacttagtttctgtggtcagttagtgacattagccatgtagaatcacattgaggaagaatgcaaagctttctatgagcccctgacagcttcagttttcctctctaataacatgtatgaatcagaagccactagttggcatttcagaaatattggtggtagttaggaaacatactgcacttatggtattcccatagaaatagagtgtccttgggaagaatggaaaaatggcactgagacatccaccaagatataggc

SEQ ID NO: 37317 - DNA, 390 bp, Homo Sapiens
ggtcagatgggtagaaatatgatccaaatatgagccaaacctcatgggagtcaatcacaagggggctggcctcttcagagtgatcggcctttaatcttttagaaacaagttaacagagaaggaccatattcctggggatttattaagataaaatatttaataatggttatggccggcggcatttatggaatgcaaaccacggataaagcatttcacgtaaattctcatttatcttcatcaaacagtttcaacataagcattactatactctggttacaagtgtataaacctatttccaaatgttaattggttgaaactcttggaatcaatactgcatcagggatgggatgttgggaggattcatatagggaggttataaaggaagcaaag

SEQ ID NO: 37318 - DNA, 493 bp, Homo Sapiens
tgcaaggtcaggctagccagaatagaggtgagatcagagaggtaacaggagactgaaatgacccgctccaggccattcgtagagactgggtttttactctgagtgagatgggaagctattagaaccgggcacaataaaaggtggcagtattattgaaatgtctcaactctaaactggtttgaaaactccacaattatctttttaaaaattcaggcaacttaaaacacttctgctttgggatgaaatcgtatccacttatggcggtgatgatataattggaatttctgggctagcacactgttaccaatgataccagagctgtggctcaggagtttattcatccatttattcagacttgaggataaaagacaagagtgacacatataagaagctcaaggatagtggaggaagacaaatatacataagcacaaaaagtcactaaagcaccatgacagacaactgtatcatgtgcaaaatgacctcacaaaacaag

SEQ ID NO: 37319 - DNA, 484 bp, Homo Sapiens
gggtgttctagaggatccaccgcctcttttctttcctcggggacgattaggaggagggaggagaattggggagaaggaatcaatcttccggtgtagacattttccagacccggagaaacgtggagtagaaagataagtgtgaaagcagtcgtctctctttagatggtgtgtgagatgaaaagcacttgctaatagccccgtcaggtcaaagtaacacatttgacaagataggagcctcaagcgtttagctggtcagtgtccatatttgattggaaatttcaatctgagattcggtgcttggagttttcctagaatttgccaattacttgtggctctggttccagctgacttttagtcttccttggggtactaccactgggtgcagtttgtcatcagtgagtagctcttctctatcgggctgtataaatgtacccctatttaattcattcaacaaattattttttaaatacttatggaatctggg

SEQ ID NO: 37320 - DNA, 426 bp, Homo Sapiens
atgcaaagtgtcatttttggctgagagctctgattcacaaatgggcaccttcccagacaagaccagctgggcaatccagaatctgtcatggattatttgatgccgtggcgtgggaattgatgccggaatagatcttaggaaggtggaaggaggaggagtccttccaaagcataaggttgttcagctgttattggacatgaatgtcacatggagtaagttaattgtatctagatcccacatggctgaaatacttgggaacagaggtagaggagagaaggaacatttatttttgtgtctgaattatacagagttcaatcactgagggaactggcttactttttaagtgaaagcttggagattggcatctgaaaaagtgaattggtgcttaaatgcatgtggcctgcctaggacacttggcatccagag

SEQ ID NO: 37321 - DNA, 517 bp, Homo Sapiens
tcggtggtgttctagaggtcccctcggaggcaagtgtcccaggtggttcttaagcgggaggcgggtgtgggaaatgtgtgaacccacgctcatccagtcttccatgtgaccggcagtccactgtgcgcaacgcgtgcagccatacagagggactacttgaagttagaactagcaccttggtcttgtgggaataagcagatctgagtagagccagctgcagtcttatggttgtttagcagaagttattcttcttagcagagaatattatacggtcattttccagaactgtgaaaactctatcattggttttaaaccagatgatgtgcttcatttctgtcttggacgtcttcagtttcttctcccctggctttacctccttggctatcagttggtgcttgggtttagctgccaaccttataggcttaggtttggcggcaaaggcactagactctggtgccttcttttccttcgttgtcttaagcccttcttttcctctgccctcatgccctcaccactt

SEQ ID NO: 37322 - DNA, 558 bp, Homo Sapiens
tctggatgcaagtgtcggctttgtatcccgtgatgcaagtaaagcagtactgaggggaatttatagggctcaatgcctgtgttagaaaaaaaggtctcaaatcagtgacctcagcttccactttaagaaactaggaaaaaaagaccaaattaaaagtgtacacagaaaaggggaaatcatgcaagtaaaacagaaattagacattaggaagagaaaatatagaaaattaattaaccaaaagctggttctttgagaagctcaagaaaattctctttagactgatcaggagaaaagatagattaccaatgtcagaaattaggtagcttcactacagattctacagatattacaacaataataagagactattacgaataacttctaggaatacatttgacaatttagatgaacccatgcagattccttaaaagatacaagttagtttacttaggaagaagtggaaaacctacatagctctatgaaagatgtgttatcacaaagaaaacggtagacataggtagctttagtggtaaatgttgccacgtatttaagggaata

SEQ ID NO: 37323 - DNA, 510 bp, Homo Sapiens
tctggatgcaaagtgtcaagagtttaatttaaatgtggcccttccctgatgtcagaagccaccttgccacgctaagccatggggaaaatagcacttcctttcatacagcatttttgatgaactataacagcagtagaaaagggtggggaagaaatatatttgtggcataggatttaagttgaaatttgagttcagtgaggaagctcataaacacagctccttacagaaggagagcggggagagggctgttgacaggagacgctgtgggaatcacttcacctgggtcttactggtttgcagatgtgctattctgaacagtcatcgtaactggaaaataagttggcttttcaacaaataattcaaattgtatgaagctaagacacttgcatggaaattctgccccattctgtagtttcccactcctgggtgaggccaaccattagaaacagatttatgaagagctcttcgtttggggcaattccagcgattatggaacatgtgagttaaaat

SEQ ID NO: 37324 - DNA, 498 bp, Homo Sapiens
tgcaaggtcagtgacttcatatctataattacatttctgtatattagcagctgttctagttcttactgccttatctttaagctgattttaaataaaattatattttgggattcaaaaacacatagctaatgattactatgtggcagtgttacattactttatcacatatcattaacataatctgcatgcgttcaaagagatcttcatacttctttgtagctcccacttctttgtacgtctttgtagctcccacaacatctagaacagcacaaccgtatatggagaaaactcagtctagtattcgttgaatgactaatggaaactttagctaataacagaactttcttcattgtacaaattatcttgcagaagaataatgccatagtttaaaattatcatatttaccatatcacaagttatattatctcttcgctagaatttgaaacgttactttaccttagcatttcgttgagcatactgtgcaacacctcgagacaa

SEQ ID NO: 37325 - DNA, 458 bp, Homo Sapiens
tcggatgcaagtgtccgtgcatctcaccagtatttgatgttgtcactgtttattttagcccttctgacaggtatgtgatggtctctcattgtggctgtccttaccatttcccgatgtggaacacctttgtgtgtgcttgtcatgtatgtgtcccctctttggtgacctgtctgtgcatgttgcttgcctgttttctaattggagtctttgttgagttttgagagttctttatatattctagatactagtcctctgtcagctatgtggtttgtgaatattttctcctagtctgtagattgtctcttcatcctcttaagagggctttgcagagcaaaagtttttaatcttcgtaaagtctaattgtcaaatttctctttcatagatcgtgcttttagtgttaagcctaagaactcttttcgtcaagattttcttttgtgtttttctaaaagtttttatag

SEQ ID NO: 37326 - DNA, 394 bp, Homo Sapiens
tcggatgcaagtgtcaagccaggactcacacatagcatgggcctggagcaaaaaggaggaaaccaacataagcacaccatcaaacacacagacaacaaacagctattagtacagggccaaggcatatagacaagttaggtaactgccagggcctcagtgagcacatattaccaagagccacccccaaccatgctataggagaggatttgtgggaacagaagagcaaggagaatgaggcttctgctgtgctcagagaaacctatttcatgaacctgcaggtgagcactttcagggatcccaactgatgaggtctggagagagggaaggaagaaggacagggaagaagagggtaaggtaaagaaggacactttgcatccagaggggtaccgagctc

SEQ ID NO: 37327 - DNA, 418 bp, Homo Sapiens
cagaggatcccctcggatgcaaggtcctcatacttcgatctgtacatgctgtacttctttaaaacctctcagagtttaaattgttgcaatactatcctttagtttggaagcaagtttagttactgtcaagataatcttaaactattaaaagcctttaaatccagctgattctcagaaattcttccacctataaaacatgagaattataaccaaattaacaaatcagatatcagaatgccaaaaattaagtcattaaaagagaatccagtgaaagagccagttgtgaaagaacaggaagtgatgtacactgccattttgtagatgagctatttagaaacataagaagtgccatactaatctagaatcaactcagactaacagctctcagcattttctttctgacactttgcatccagag

SEQ ID NO: 37328 - DNA, 465 bp, Homo Sapiens
atgcaagtgtcacagatgctattatgttatgaagcaaaatagtaacttaacataatgaaggcatggaaatgactgtagagctcctctggtgtaatccatatttacagagatagctagtgatattcaaattggtgaaagggcattgaaatcgtcatgagaatgtgcacagctatgaagggaagtcagccaggtgacatcaaacagccctggacttggagctgggatccccagaggagtcctggatctgtcgcttagtgagtggctttggacaaaccacctgggctctctgggctttagttttcacttcagtgaaatgggacttctctgcctttctcactaggtgaagacagggtgcaagcaaaatgttggatatgaacaggaatgatgtcaaagaccttaaaccatgggcccaatccagctcacagatgagtttggtttggctggcactgtgtcaggttcggctgg

SEQ ID NO: 37329 - DNA, 528 bp, Homo Sapiens
cagaggatccctcggatgcacaaccaactctgatttcagtgcttctattcctgcctggtctttcccacagtcctattcctggtcttatcccagtccactgacatcttagtgggtcattagtttgttttgtctgtattgggcagagcaaaagagaagggtgtatgtggaaatactgacttctattattaataggaaaaaaaccttctgggcaccaattgggggagaaacaattatagatgattctttaccaatgctgccaatattagttcatagtagggtattcatcttaatcttttacctcttctcccaaactagtccatattccaggtttgacaatggttttgtggaacacaaggtggcactctcataactaaatatggtagaagcacttctgtgaggcagggtgttattaggacaattaccaaaggtagagatgattcaggaaccagagaatgatagaacacagaatattagcactagagaggcacacaaagcatctactcctacttggtctgcagtgtgtttgtg

SEQ ID NO: 37330 - DNA, 386 bp, Homo Sapiens
tagctgttcagaggatcccctctggatgcaagtgtcagtgcctaagctgaagacgatcgaatgaggccattctctcttgattatgtctccatgctcaacatgaatttctgtgtcaatagagaggtaccaaatctgttccaggtgcaggattttgggtcacagcatcaaagtatcctgtctctatggtgaacaagagtcatgggtctggtgcgcatatctgtggactataatgggttactatggtttactctccagtgtcagggtcacttttgaggcctctgaactctcctccccacaattcagccaaaggccaggtagaatgttatggctacctcattctatgcttttttttatattttattccctttacctgaaaaccggggcct

SEQ ID NO: 37331 - DNA, 532 bp, Homo Sapiens
tagcgttcagaggatcccctcggatgcaagtgtcatttttttctttgatgtatagtgtttctgaggttttaagaaatataagaaatctttgtctaccctgatggcctgcattctgaaaggaaagaggctaattcagggcagcctcattcattaaagtttcaacaaacatcagagcatgagtgccttttccagcctttgacattaagcccctgggctttattttcctataatggtatgagcaaccctcaaatgcaatgtggcagagattgtctggcttgttcagaaggcagagtttcatttaatctggtctctatagaagtaggattggcccaggccccaaaaaacagacagttaactgagaggtccccaaacccagagagaacctaagagcaatttcccgatagtaggaacttgctctcattgcccattttcagatgtgtcatttacacaagtgaaagcaccgtcttataagataagtctttatagggattctcggcttgccccagttttattattgagtggggaaaaaacg

SEQ ID NO: 37332 - DNA, 512 bp, Homo Sapiens
tctggatgcaaggtgtccaattcaaaatgtgtagttcactcagtaaacggttcagtgcttcatatttatttcctctagtacatgggaataattactattcccagtatcatctcacaatgataacctatataacattaatccacttgagaagtgctctgaacttcttagagaaaaagggcatgcagacaaggaaaggagtgcactgaggtacacggtctaaaaccggagataaaatcataagagggtctgcatcaaattccaagagaattcacatctgcatttgtgctacttattttttgtgccctggagcaaactgcaagaataagtgatttagtgatatactttacaattcaatgtctaaaagttccaaatgtataagcagctgtgaaaaatttaggacgtgacactagagcattggttctctggctgacgttagaatcacctagcaaactcgaaaaggaaaaggccaagctgcgcctccagattttgattcaacagttattttcagcagc

SEQ ID NO: 37333 - DNA, 484 bp, Homo Sapiens
tctggatgcaagtgtccagattcccccagcaggcaaagcaaccctggcctccaagttgcaagggaataggtgactcaggaagtacctcctgcagccctgctggtctcaagactcccaccttccagggcctggtcctgtgctcagaaacccctctgcatagggtgctgatgagtcctctgcagctccctcacccaagggaccacactgggaaacccagtagttgtctcggccatggcactaagacctttgcaccctggccatcttgttccgggacagccagcatctgtggtgtggtatagagacaaagctgccacctccaggacacttgctccttcctggccttcctgctgccctgaaacctgtggcctgtgtgttagtggaaacattctcagtttcattgctcagtaaaccttaggttatccaaactgcaaataaaatgttctctactttctagatttttataacttgctattttgagagaaag

SEQ ID NO: 37334 - DNA, 499 bp, Homo Sapiens
tctgggatgcaagtgtcaggttaatcataggcaaacagcttaatgagttttatacagagtctacccagacaacagtaaccataccagtcattttaacagggtgaacttaatataaagaactgttaaccagtgaggaattgaatatacagacaatggcaagaccatattcaaaaatagaactctgatcaacaacctctgcagtaaatggccaaaaatggtcagggcttggtcaatgatgaccagtttccctattttttcctctgctttcaactcaggaccaaccagaaaaaggcaactatgttctccaaaccaatcacataagatgccctcttctagttagtccacctccagctttcttatgctaacaacctgcaatcaggacatatctggagcctctccctttttttactgcaaaactttcccactcacatgcctgctgacagcctctaccaaatgcaagtaatggtgggtgactcaatccaattaacaagctctgaat

SEQ ID NO: 37335 - DNA, 431 bp, Homo Sapiens
tctgggctacataatgtctgtttcctggaagttgaataggagcaaagattgaaagggttctagcagttaactaacttaaactacatagaaatatcaaggataggataattatatggtcacctgggagctgggaaagagcataggatgatacatacatctctcaatcttaacaataatcctaccgttacctcatttcatttctgtgtcaacagtggattgactgacctaagaccattacccctcaacggcaaaactatacagtttatgaaaaccaggtcttcagggaatagagcttcaatttcaataagtctgtacagaaaaaattcctagaaaacatcagagcccaaaaatgtactgggatcgtatgtcagatggctagtaccagttgctgtcattaatgttggggcagccggaaaggataatacttggag

SEQ ID NO: 37336 - DNA, 460 bp, Homo Sapiens
tgttctagaggatacccgtctggatgcaaagtgtcctgtggttagagggtagggtgaagagtgtgctccatacctggggaaggaattgaaatacatcaacatagacaactcttgaggagttttgccatgaagagacactttgcatccagaggacactttgcatccagagagtggcttccttggagtagtgggtgaaagtctgcttaaaaagagggcttaggagagaattgggggaaggaattgaaatacatcaacatagacaactcttgaggagttttgccatgaagagacactttgcatccagaggacactttgcatccagagagtggcttccttggagtagtgggtgaaagtctgcttaaaaagagggcttaggagagaattgggggaaggaattgaaatacatcaacatagacaactcttgaggagttttgccatgaagagacactttgcatccgag

SEQ ID NO: 37337 - DNA, 446 bp, Homo Sapiens
taccaaattatttgcctgttagaactgggttcagctacaaattgcagaacagccacctataaaatggcttaatcaaaggtggcttctcacttatggactacagtagggcaagaatggaagcaggacggtcagttaggaagctctctctcaagtagtccagcagcatcatctactactggactagatggtttagtggaggtggaaagaagtcaaagactcaggatacattttgatagcatcaacaggctttgctgaaggatttcaaggtcaacgggatgagataaatcaaaaacagctcgtagaattttagcttgaacaacagaatgagtaccagtgacatttactaaaatgcacaagactgagagaggtgcaggtttgggggtgaaaatcaagatctcggggggacacattcagtttgagatgccagtctgacattcatatggaga

SEQ ID NO: 37338 - DNA, 458 bp, Homo Sapiens
tgagctagttaatgataaactgcataggtaaacagtgacgggcacttatagagaaagcatagctctagactagatacttgatcattcattcaaaattataaatcatagagtgacaccacaaaattcagtcaagcagggttaaatttcctcctccacagatagtaacccgttaatctccaggctacagtgatagcaatgcttgatgtagaatcttctttttcattcactgtcaaaataaatggaattttctcgacaacccatttaacccattgaccataagtttactggccaccacttgacataatagtttatcccacctctaacaaaacctctagatcatactaacaatagaaaaaacaatgctagctttcgctccctcattagttcgtgcacgttacaaataacgatggtaacaaatttatatctcaaacatgctgggtgcggcggctcacgcctgt

SEQ ID NO: 37339 - DNA, 409 bp, Homo Sapiens
gcacttgtagtgacactgtgcagagttagcttgccgttccaggtggcattgtgaaattgacaatttgtcagatccaaattagatatttagaaattagaattttcaagtaagagtatgggggtcatgtaatacttgtcttaaggtatttaacacattaaaagactatgtcatgaaggccagagggtctctgtcatttttatccttctatgtgatgcttaatggagtgtcaagcacatagtaagtgtgtgccaaatagaagtttattaaatacatgggtgaatgaatattgagttaaattgttctttagagctaatatccaaagtatattaagtttcgtgccgataggacatccatgcaaattagcttcctgcacagggcagaattttatcagattattctgagtaccaaa

SEQ ID NO: 37340 - DNA, 484 bp, Homo Sapiens
cgaagtgtcagagattgacttcacagggtctgagtcattgtatagctgactacggtgcaggctcagacatctgcaacttccattgtccccctggaacccggaggaaaagagcccctccctccattgggcatccgtatatgaaccatgcagacctctcctccctgccatagacaaggcactgaagcccctagaagaaatggccaccagtagtaaggggctgactcaagcatctaccacatgctggcgctttgcatcactgaccctcttcaaccttcccaaactgtgtgacatggtgacatcaccccaaccaccctgactcacaaggacacaagctcctggaagggacctgaccccgggcagtggagttaggatttgaacccaagttggtggctccagaggctgggctcttctcatcataaggccctgtgaccctcccaggggatgttccccactcagcccctttcctttggggacagccacactg

SEQ ID NO: 37341 - DNA, 444 bp, Homo Sapiens
actatgaacccatgcatgatgtctagtgcctctgttcccgatatccctgctggttcctttctgtgctggctgtcagcagggctgcgagtgtggatgccaggctggagtgagtgaaagagcaaccgatggtatgggccattcgctgggggatttcggcagcagcaaaaggagcaaaatcacaagtaacgcaagcttgggggtcaatggacagaattgtctagcaggcagcggcgagcacttggccaaggtttagaaacgcagacggggacagggtgcatcaaggcgggaccatttggcaaaagtgctaggagagtgggagccagagggaagctgccagaggaggtgcaccagacagagattggggtagagggcacagagaacggacacagtaaaccctcaccccaggacttgtatacccagctctcagattgctcatgcccagca

SEQ ID NO: 37342 - DNA, 414 bp, Homo Sapiens
aggtgtcaaccggtaggtccttaatgtccagtctccgtaaatttagtaacttaagtcaggtatggggccaactgatgtttagtatgtgaaatgtgtaataaaaattatgatatgattcactcagaccccttagatgtcatctagcctaaccctttacccaatgtatacaaatattccctcccagttccaagtttattaagattccctctcagtatattaagtagtactgattatgttcatatttatttaagccacaatgaatttgggggggaagattttacttactactagttcctcatgtcatgtacaccaaacactgcacatgtaagtgttcaaatagtttgctaaatgaatttaagtacatgaatgacaatattcatatgtgttcatatattcagtggttaaccaatacgg

SEQ ID NO: 37343 - DNA, 408 bp, Homo Sapiens
attctatctagcttaggggttagttgttcttgtacttatcactcctctaggtgtgatgacagattcttaatttgagatctttctaactttatgatgtaggcatttagcactatcaactttcctcttaacactatttttgctgcatcccatagactttggtatgctgtgtctctgtatacatttacttcaaaattcattcaaattactgccttaatatcattgttaatccaaaagtcatttagcagcacgttgtttcatttccatataatcaagtggtctccgagagatctgcttgaaattagtttctatttttattccactgtggtctaggaatatggttggcatgattttgattgctccaaatatattgagactcactttatggccaagcatgtggtcaatcctaga

SEQ ID NO: 37344 - DNA, 539 bp, Homo Sapiens
gaagagtttaaggtgaagtatataacaggaacttcattgcatttgccctccccatactcttctatatcctgtggtccagaagaaacattaaatacacccgttatacccaccaacaaacgaagaagtaaaaactgccattaagccaacttcttgaatttattttgtatgttgtaaaatccagatagctacatatagatgtgtactttttgaaaatgtatcccatcagccagtgatagttgtattccgatggagattattccagtcgcctgtatttgaacaattatacaggatctgactgtaattagaaaaaggagatgggcccaagtcaacctagtacgagtttggatttcacattttaaatcattggttaaataaaaacaaagtgaagatgaaaatgtatcttttgttaaaaaagataagaaaatataaaattggagcttttattaatttatacatgtctcagagaaattatagtcacagagaagtcgcagacagtggccatgcacttattagcttctcacattattatattacactgg

SEQ ID NO: 37345 - DNA, 445 bp, Homo Sapiens
atcagatcacacccattggaccctaaggcacctgccagattccaggttcagatatgtggtctggaaaatgtgatcactataacttagaggtaagcaagaagacaatggatttactgagttattactctacaccagaccccaagcattgcttttcatgaggcatctcactccctcctctttgccccactgggaggtggctacaatgacaacctggcttcccatttcagtgaagagacagacaccatcagaaagtgcttctgcaagcccccactaccccttctacgccggctcatcttcccacccatccttcccacctaaagccagccctctgcctacgcaccagacattggcttctgcctactcaaggatgtgtccagcagggcttgcttctctcgcctgcattgttcatttcccctttgcaggatcattcccatcagatgcacgg

SEQ ID NO: 37346 - DNA, 394 bp, Homo Sapiens
gcccattgggagcgcatagaaacaacttacaattattttattaatcagcttgagtaatgatcttactatctgtcccactacaccatgaactccgtgcaggccggagccagggccaccttgcttcttagcatctagtcaagagcttggcacacagctggactcaactgtaggttaaattaaggaagaatgaagcactcacaacatatggctggtgtattgtcgtactaaatgtgagtctatatccaaacttcaaactttgaatgttactccagatgtcacaattgtccagtgagttcactgcctgaatgcttgagattccgggcccctggcatagggccttgtgcatagtaagtgtgcaggagaagcctgtcgagcatgtggatgaatggctgac

SEQ ID NO: 37347 - DNA, 469 bp, Homo Sapiens
ttctcagatgagtgagatttaacattgtaacgtatcaccaaataagtaaagtaatgcactacagactcttaaattgtcactatttcccttaaaccccctcaaaacacagacaaaaaataataatttaggaaatacgagaagtgtgggcgaggggtctgggcatgttacttctatcacagatttggagagatgttggccaattgtcaacagtctgtttctgggtcctgtggtctagagtcccccaagagcaagccaggggtctccctgagccagcccagcctcaggtgtgtttccaccaggttccaggccaggccagtcttcctgggccagtgtggaccatgtacttcctgtggttagctggggttctctaactttcccatctgagtcccctggggagctggtgaaaactccctcagggtttctgatgcgataggtctggactggagcctgataatttgcatttataatt

SEQ ID NO: 37348 - DNA, 507 bp, Homo Sapiens
gggcggcctcaggatgaagtgtcatagaatgtggttttttaaaaaagcagcatttccccttaatgcatcattttaaatggtcctgccgctgaaaaatctggtgtggttttatttctaacacatttggctttctgttagtttatgggcatggtagttccccctctagaaaaaagcatagcttagttcctacctagagtgacctgaaaagacacattctagaacagaccaggtgtccttggagatgtggaaggtgctggggaatctccctcgtggtggccctggatggagactctgtttgatgttccttaggagctttgtgtggtctcctccccgagatgtaactggcacatatgcactgcttcagacacgagccctttaacatggaaactggaatctgccccgttgtgggagggggagagggaggtagccttgacctgggcccagggtgctgtccagctccctgtcctctggctggattgggactgaggagcagtgggcgtaggcttg

SEQ ID NO: 37349 - DNA, 456 bp, Homo Sapiens
tcatctgtttagttacccagattcattatctatattaacaaactgcccttccccaaacttacccccacttcctgtactctgcttctcagtaaatgaagatctacccatctggaaacttggaagtcttcctcccttgacttctcaccattaccccttgattagattattacagtaggctcttaactggctcactgcttccatccatgcactcctaggcactcttctgtaatcaatagtatgttgctaaatatttaataaatgttctctagggagggggaaaagccctgatttgtagtgtttccccaccttctatgatgtaaatactactaccaagtctagtttcaagctatcaatatgacatcactgattatggagttggaaagagatgtgcagtctcacactattttagtatttccaccatacagatacaacagacaaccttaagagtaaaggtaa

SEQ ID NO: 37350 - DNA, 462 bp, Homo Sapiens
agcccacgggctccttgcagaccaggtggaccccggaataggcaggggctatagtttcattttcagaagacgatctggagccatggaaggggccctactctctggcagttctaccagccaccctcagaccacagcttccctgaaggctgtgcagctgtggcctctagggaaggcctgtgtggtcaggtttttcctttgtgttaatttccaggccgggagctgactaactgcacaggtctacccacagccacatgagatgaagtcaggcgcaacgatattttccctaagtgactagagttagtgccacaagcaaacgaatgaattcccaggaagctcatcttctcacattggtccacaacaagccgacatcaaaaacaagcatctgatccaaggagaagagggtccacgactctaccagccagaatgtagcggctttcagggtgaccgtgggtattgagggtg

SEQ ID NO: 37351 - DNA, 485 bp, Homo Sapiens
atgatccccgcgtggcttccttgcagacgtgtgggtgtaagagcgtgtgtatgtgcaggagttagacggagagaaagaaagacctgtgcattccagaacacccttcttccttgaacatccgattacccagagcctaattttaaaaccgaagtcgatgccttcttaagtctgcgatggcccagctggcctccttaagtctgtgatggcccagttctgttcttgctccaagtctacgaagccagcttcccctgctggggcttgaaagggacccctggccaggagcaagcagggcagcaagcaaagctgttgggggcactgtggggactcccccaggtggccaggcttctgtgtgcccgtgccacccctcctcaggaccttgtttccagttccggttgggcaggggctggcactggagagaggcttatgtgtcaacaccataaagcagccagcaagccctaatgaccacgctctgcaaggaacccacg

SEQ ID NO: 37352 - DNA, 376 bp, Homo Sapiens
tgacccccacagccagtttgcggtggaggctccctgtggtctgtccttttctaccttttgggaagagcatgaaccctgggccctcttgcttgactccagcggaagccacctctgcagcccaggcccagctgaggtcacagctcacagccatcctttcgtttctcactttctgacaattgcaaagacaggatgtgggggagtgagccacaagggcccctgggtccttcctccaaacccagatgggaactgtttgacctgggaaggcccgactggctgccgggtaaacagccacccaatcaccctgggccccctcacccaagggaagggaggaagcgcctcttcctcatgcccctgaagaacaatcaagggacccacg

SEQ ID NO: 37353 - DNA, 453 bp, Homo Sapiens
tcgacttagaggaacccccatcggaacccaatgagctgggattataggtgtgagtcaccatgttctggcctcttgctcacttttcatactaaaagaacaaattacaggctgtagtttaacctctctactgcatgcataaatgcagtgtggtacgagtgcctctgtagcccataacttcagtttccttgttgctagcagtctgtggtgacactatactaatctcacatgcagcaaccaatgaggattagccagggacacaggaggagtcaccttgcattcagaatgactcaagtttagtctcaacttgaccattagctctctgagtgatcttgcccatgttaattctcttgatcttagtttcttcagagccagtgagacattgcttgaaagtgacttagcctggtatacccaggtctgtcagacttatagtctggtgctcattgggttcctatg

SEQ ID NO: 37354 - DNA, 413 bp, Homo Sapiens
ggggtggggggaatagtaattgagagaattagtgatctgaacgatgactcagaagaggctctagaataaaacatgaaaaagacaatacaggagagtgttaagagacataatatagttaaaaggtctattgtgtcttattaaagtctcaaagaagagggacattggggtataaactgtatttaaagatattggctgagaattttccaaaagtgataaaatcagactttagaattaagaagcctaatgaataccaagtaggattgagaaaaagaaacctacccttaggcatgtcatagtgaaactctagaaataaagacaaagtctcaaaagcaaccgggagaaaacatttcagcttcaaaggagcaaaaatatctgaccatgcatgccacgtgggctcattgggttccgatggg

SEQ ID NO: 37355 - DNA, 403 bp, Homo Sapiens
agtaatagatggcgtagtggtgctggtgtattttgtaggatggcatagacagaggagaggtgatggggtagatgggtggattgtgtagacagcccgctggtatagatagggcagtggggatggtctagacaggaggatggtgtagatggaggggaggttgtggtatagacagggtggtaaagctctggatgggaggatggggtagatgacatcctcaccttggctgctgtaccccacacagagaccacaggaaacccgtctcctgtgtgagctctcacagcagctggtgtaccccacacggcgaccatgggaaccctctcttctgggcacgtgctcaccgcagctgtcgtacggcaccactgagacgacagggaccccctgcccttcaccccgttgggtggag

SEQ ID NO: 37356 - DNA, 413 bp, Homo Sapiens
cggatggatggatgagtggatgggtggacaggtggatggaagatttttgggagagagaatgggtggcaaacctaccatgtgcatgtgaaatatgcactccagggccagagaaatgagcagtgtttcagcgcccagagagacactgtggagaaggtccaccaggatgcctacctgccttacacaagagcctaactttggcacacctgtggcacacctgtggagagctgttctggccccggttgtctggcaggcctgggctactccgagcagggtaactggggcacagaagctgcacctccggctataccctggtttttccagttcctgatgcccgcccctcaggtggcagcatgaggtgactcagggacagacgcacttatcgtgacgcaagtccaccctgtcgagtggagcgc

SEQ ID NO: 37357 - DNA, 407 bp, Homo Sapiens
gactctagtggatcccccccgacggggtgctgtgaaacctcctcattggactttctgcttctctattgtcttccttctgatctgttttctattttaggaaatataagtgaggtcaggccattgcactgtgcgaaacccattaatgggttttcactgtacctcaaatgaaatccaaatgcaagctctgcaagcactagtctctgcatatttttcctccttctcaaaatgccccagttccaagaatgcttcttctgatccttggagctgtcctttaccatcttgaagttgtaggcctgggtgcattcagactcctctgaatgtcccaaaaacccacaaccatgacccgccccctcctctgaatgtcctacccgaaaacccacaaccacgacccaccccgtcgggtggag

SEQ ID NO: 37358 - DNA, 438 bp, Homo Sapiens
cacccgacggggtggtaaaggaggactgtgtgtggacaggtcacgtgacatgcagacgggcagctttctgtgtcttgtcagctgagctgactccctggagccacactcttgcccggaggtggccctgctgctgcttcgtgcagatcccgccttggcttggccccctgctccttccatatctggactggggatgacccttggagaagatcatctgggtgccatggattcggctttcagggctgtctggctgcccttcttcgttgggctctgcctgccttttgggatttctgcccttggtcttcaggcaactccttcctctctctcccattcttttcagagatccctgcacactattttgctctctcattgcatatgtgcccactactcttggtaagtgacttccaaggctacctcaagaattcccatcccacaccagcg

SEQ ID NO: 37359 - DNA, 360 bp, Homo Sapiens
cgtgcccacacttttacacaactgttctcctggaactcaaggacaagagctcggcagcaccaggggatggcccaggccgttcatggggaagccgcacccatgacccaaacacctcccaccagacccacctccaacactcgggatcacatttccatgtgagatgtgggtagggcaaatatccaagctctatcagatgaattaaaagatgttctgatgggtacttggttgaatgagttaagttactatctgaaggcctggaatcaatagaaaggagtgtctgggttaagagaaggggctgtggagaccaaggtccttattatgtggatgaaatctcataggtgtccacccggtcgtgtggag

SEQ ID NO: 37360 - DNA, 461 bp, Homo Sapiens
ctccacccgacggggtgggaaaggggggatggactacaggaatagcttcaggaagagaagagcgcccagggaagagcagggacagaggaactggtgttcaccccccgcagacatctggggcaggcaaagggaaaatcagacaggtaggcaaagacaagggctgcaaccataaggagtccagacttgatcctcgggagcttcgggcaaaggagtagcaaacttggatatgcgttttggaaaaattacttattttattaaactggagttggcaaacattttctgtaagaaccaggtagcatatattttaggctttgtgggccacacagaactgctgagtactatttttaagcattcctttaaaagtgtaaaaatcattcttagtttgtaggccatacaaaaacagtccacaagcccagcagtgtgcccacctttgttagataatatcaaggaatcagagctaa

SEQ ID NO: 37361 - DNA, 526 bp, Homo Sapiens
cgtaccagtgcgcatcaaaacttcaaaattacatattatatgtcgactaaactggtcaaacttcaagctttaggatgttttaaatgtacaaaacgattctcaagtctactagacaatcgtgcttcttctgaggcaagctggaacaaagacagatctgtggccaacgcgcgctcttgcccccatgtattttctcgcgacatccactctttcgccttgcaaagggtcaaagcttgtgggatttgcacaattaaacgctgtactgaatgaggacatcgagtggaagacatagaaagtatctccagatccatagctggtcgggaagggtgggggcgatgacgtcaaagttgccccaacttttagtactccaaaaatagttggggagatcgcctgccctgtgagttctgctaaacttacagacataattcaaacagttttagaagctttagagtgttttctatccatatattagcaattttggacagatttcttttccagtttactatgggcacgcaactggtacggcggg

SEQ ID NO: 37362 - DNA, 355 bp, Homo Sapiens
cgttatagcaccgtggtagattagcatccaagatggaagttactttagcctcatactgtgcctgtgaatttctttgaggaggggatggggtggccccacacctcttccaggttgtacatacccaagtgctaggcagttcctgtagctggtgagaagcccaggggcaggaagtgagacatccccagagcaagaggcaaggttcagccctgcttgaaactggttgccacagcagtgactttagtatgaaggccaagaggattggaagtgacacacaggaggtctcaaacactgctcttataaatggcctgtgtgtcctaatgccatcagaagtgataaagttggtactaggatgtgg

SEQ ID NO: 37363 - DNA, 396 bp, Homo Sapiens
cgtttagcaccgtggtagcatagggactctctggaatacccttatctcttctagagattgtattgaatgtcaccaaaagtacttttctacgtagtatttcattatgagatcagttggtcctcaggtattgttgctattcccgttttacacgaaaggaatctaatgtttaacagtcatcttaaatgacttgctcccagtcacacagctcattagcggcagagctgggataagcagccaggtctcacaaagtcctaacccagtgttctactacacaacactctctcaaaattattgggaattattttaggctcatccaaaacgaccagaatggaatgagttatttctgtcccttcttaactccaccacattatcttgggctactttataaactgtgcc

SEQ ID NO: 37364 - DNA, 411 bp, Homo Sapiens
tgccggtcacactagagaaccccccgttatagcaccgtggtatatgaagtttttaacttttagccattatgtaggtatagtagtagatatcacacggttttatttagcatcttatgactaacaaggttgagcacttttcacaggtgtatattggtcatttggaaaccttcttttgagggatggctacttgagccttgctcatttttctattgtgttgcctgtcttccttattggtgtgatgagttctttattcaggacaggagtgctttgtctaatctgtttgcaattttttttctcagattgaggtttgccttttcattcttataatggggtcttctgatgtacagtgttcctgattttaatgtaaattccaaatttacacatataaatttacaaaagtataaatttacc

SEQ ID NO: 37365 - DNA, 408 bp, Homo Sapiens
cgtgtctctagcaggatccccgttatagcaccgtggtacactctctgtgacaaagatctttggttttcattatttacatattcccagtttctatcagtgcaaggcacagagtattcctagactgaactcatctactgaagttgtataggaatattttctattttctagaaggctttcttttcaaaagcatgttttgactgtaaggtgcatgcattagcacacactaaaatatgccttaactttcaagataaatcagtcatgaccagataaaagctgaaaaccctaggttttattaccaggctaaagaatcaataatttccaaataggtaaagtactagcaaagaagtttgaagctgatattccatgacccatgtattaatgtgttctcacactgctaataaatacata

SEQ ID NO: 37366 - DNA, 381 bp, Homo Sapiens
acacagacctgtgatgtcttcagaccagactcaaaaggcattactggtcctttaagaacagtaggaatctgctccctacaagtcctgaaacaaaaattttctgtgacatcttaagaaggacaccaagaaccttctctaggcctttcaataagagaagtccaaatcttcctacttcatctctcagctaaacagagtagctgagaagcactgaaaaagcagctgtttcctccagttaatagctgaggacctgagaggagaggttagaggcctccttcagggaaagggctggcttgttcccccaccaccccgagtcatttcagtgtcacaaggtctcttttccttgtgacaagagagttaagagagttaagactctcttaactg

SEQ ID NO: 37367 - DNA, 430 bp, Homo Sapiens
tattagtataaaaacgaaaacacaagagagtatcaatacatacatagtcccttctaggaaaaatattaagaaagaataaagtaaatgctaagtatctatccttgtgtttaatttttaaatttaccatttctcagtgtttctgattatttaatcaattccacagcagctctaatagcaattttatcccacatatatgcttcaaaaaatggaaaagtaatgaaattcaatttaagttctgctctcaaatcaacttgtgaatgaaaatctacatcacagaaaacctgagctatacatgagtgaaatgcctcaaaaaaagttctcagacactgtaaatgaaatattaaaccataacattatagtatataatttacttaactgaaaacctattatgtaaatggcataaggtctgaaactgtcccaagacagcaaa

SEQ ID NO: 37368 - DNA, 355 bp, Homo Sapiens
acatccagatcacacgtagatatatctgtaccatcatgatgtgtcatcagacttgtatctcctaacagtattgcttttgttaattaaaaattttaaatagaaaccatttagaagaaatttattttagttttctagtctagtcaatttgtagaatattctgtttccaggtcttttcattaaagacatttatttggattggtaatttatcattggttaagttaggctatgctgatcattatcacaaagtatacatcgtatgtgatgctttacaatttccctttagaagaagctaaatattcttagttaagtaaataaatatctaacttccagcttttttcttgcttaatatcagttt

SEQ ID NO: 37369 - DNA, 458 bp, Homo Sapiens
tcttaaaaatctataacagcagttggcaaatgggcaagatataagatgaatacaaaaatattaattgcaaaatgtacactagcaaacaaaaatcgtatttaagcatgccttcacaaataatagacatatatttctatctctgaggtagcaaagtagagatacaaagacttgtgaatgagctaaatacttccctaaaagtaagaacataaaggaccacttggtatccgcagccactcagaagaggtggcaaagagaaggctttacactttgcctggaggtgacggattaaccagagcctgagggtggcctgctcaggttcaggtctcctctcccggagaatgaaacccaggctaattggctaattaccatgaaacaccaacaaggcccaacagagtaaagaggaaacagatgcaagacaccctgtgacccaggctgatgggcaccagcttcaggtaaag

SEQ ID NO: 37370 - DNA, 418 bp, Homo Sapiens
ataccccacgatcacatcatattcaaatccagatcatctctgatctaccccactctgctccttctctggctttctctagctcagtaaatagtactactattgctattatctcagttgctcatgtcaaaagcctgagttatctttgacaatgccttcttctttactcactgcatcccatcattcaccatgtccatcattcactaactcctatcaatcccacctctttaatagttttctagtctgtccactattctccatatccgctgtcaccactctagacacaacctccatcatttattttcaatagtattgactatcatcacctgtctcttcaaactcagtctttctcctatgcaccaacctgttctctacatagcaggcagaacaatatttctacaaggtaaatatgttctcttta

SEQ ID NO: 37371 - DNA, 351 bp, Homo Sapiens
aactcagtgtgcgagctgcaggtgggaagcccatcgggccagagcacaggtagacacaggtttgtgtatagatctggctagggtgatctgttcatggacttacaggtgaatacatggaatgcaaggcatcaagggcacgaagaaagtaacagaaggcctacgatggacagacgggagacaggagtctgcggggagtgagggtcagaggactgaatgatgcagctcaccagtaaccaaaagcggggcagggaaacagactgaacagagaagcaagaggccaggctcctcggggtaagtttattcgcctctgtgacagcagctcgcccctgagttgcagctcgcccctgagtt

SEQ ID NO: 37372 - DNA, 387 bp, Homo Sapiens
acctatgacgtaacacaggagagaaggaagaggcagggctgacgagagaaaaactaggaagtgctatccaggggattggtggggaaagccaacggttggacattaatgaaagtggggtgtagagagggtttctacatagatttagggcaaggtatatggagaaggtatgggaacggttggaacagaggaggctggtttgatgtgtttaaatagagcagagttgaaaacaggtaatatttgacagctggcaagacagggaggaactgcaaattgttgtaaatcctattgagaggaaggaaattaaaggaataaaatatcaggatagttgataggatctttaaatatttggaatcaaggaaatggcccttacctgggaggtgaagtata

SEQ ID NO: 37373 - DNA, 360 bp, Homo Sapiens
ctcccaactcagggcgagctgctcaaatcattccaccggccccctcggcttgggacaggtagtgtaactcccgatcccagtgtcctagccctgcacacaggtggcttcccgctatcccgcgtgggcaaaacgccctgcacaccacgcggtgcttagagcttggccatgtgtcccatccacatgcctgcaccaacaccacctccagagatgcagatgctgggcaagtggcacgctcaaagcgaacatggaccatggcgctatggcaaagacatcagcacacacaccaacccaaaaggcgtggaccccagtgcccggcccgatggtacccaagcaggtggcactgcaagctcgccccatgag

SEQ ID NO: 37374 - DNA, 411 bp, Homo Sapiens
cgatctagaggctccccgctatttacaactatcttaaaatactcagcctcactccttaatgagtgcttgctgaagggagaaaatgccagttttaaaaacgtattcactttactgattactgtgcaatttgaattaagtcacgattctttagtaaatggaggtgggaatctcagattcaaattgtcagagaccatgatttagaagtctaccaaacacccagtttccttccactgttttagggtaacaggaaaacatgaagatagttgtaaatggcggccatttacaactatctgggggacagagtcacctggcaggacccagggtcaagttaaagtcatctgaggttgctagggatggacacaagaagaaatatctccacacagtcaacttcattctcctttgcagaattaa

SEQ ID NO: 37375 - DNA, 358 bp, Homo Sapiens
cgccatttacaactatctccattcaataagatagttgcccggactgcacaacttgcatgacttcagcgtagttgtcttacttttatttctttatactttattattcattttgttttcactaagttgacaatatttaagagtatgagtttggaagaagtaagagaatgggaacagaaggtaatagaaaaggagaaaaaaatactaaaaagccttaagatgtctagctcacaaaatacaaatctaaagcaaattcttttcactgtcattgcagtatatcattgtttattaacttatatcttcttcaatttctttcatcaatgttttatagctttcaatgtatagatgcttcacctccttg

SEQ ID NO: 37376 - DNA, 374 bp, Homo Sapiens
cgccatttacaactatctctaggaaagactcagactcattaaatactagagctggaaagaaacttagagagtatctaagggatttcctttatcagatagaaagttggacaaaatgacctctgaggctttagcggtctgcaaaattctttttctatttgcagttctgattgatagaaaaggaaattcttgttcaatttttttgcattctccactgtgaattatagtctagttcagaatctcaaacctcagatactacatttctatgtcttttacaaaaccatagcttaaaaaagcattgtccatcctgttcatatttcttgtccattcagtattcataaattcatcaaacaaaatccagatagttgtaaattgcg

SEQ ID NO: 37377 - DNA, 391 bp, Homo Sapiens
cgccattacaactatcttcagtcaattgtttgtacaatgtttgtgcctttactgagctagtgttaaaatgcccctttgtacacacacgtacataataatacaaagatatacatacatattgtttgtatataatggtattagagtattcttttttaaatttttatgggtagatagtagatgtatatatttatagggtacatgagatattttaatacccacgtacaatgagtaatatcaggatgaatggggtaaccatttatcctttctttgtgttacaaacaatccaattatgctcttttagttatttcaaaatgtacaataaattattgttagctgtaatcaccctgttgtgctattatcaaatactagatcttcttgattctatccaact

SEQ ID NO: 37378 - DNA, 359 bp, Homo Sapiens
cgccatttacaactatcttaaatatttttataactccagagcttggcaaatattcaggtaatgcttatatgagtttaaagggagaagccaggatagtatagaagcaaacattttctaagagtgcaaaagaagccttaaaagcagtgcctatcttactaggaataagaaaaactattacctaaaaggcaaaatctagagaaaatagaaaggactttaatatcccagagaactaaaaatactggttctgggatagcctgaggtaagaagcaaggggacaaacttaaactataaaaaatctatcttagtgacacgctacggcaaaataagagcaaacatcaaatagattgttgtaaatagcg

SEQ ID NO: 37379 - DNA, 441 bp, Homo Sapiens
cgccattacaaatatctatagcaggccagaaacaaatttggggatatatatataaacttaaaggtagtagtatatatatgggagagaatggactatgcgataaaataggtgttaggataactttaataaacacacaaaaagatactaaaatttattaacagaatagatgaaaaacagtagtagaatagctttttaaagactatctatttgccaaaaatttaaaaactggcagttctggaaagtattatctaacaaaaaaggtagcacaagggtgaaaagtagcaacaaaaaagataacactacagtctcgaagaggaaaaagcatgctgaagttcctgtatcttttccaagaccatgtgtgcgtgtttagtatcagagactggagatagttgtaaatagcgagatagttgtaaatcgcgagatagttgtaaattgggtacc

SEQ ID NO: 37380 - DNA, 467 bp, Homo Sapiens
gcactggggagacagagcttctgccgtgaactgatgggttccagaaaatggtcttaagtccattggtcccttgaatcagcagaagtgacatgatgcaggcttccctgacacgtcatggggtcaggaaaagtccttgtgtttttttcttggcctcctgctctttgtgcctatgacacagagaaggcagctggctttccccaaacagggagttacactcagaccttacgtcttttctaatcaatgtttaatgtgaatcactgatttttttctagtagactgatttctaatactttcaatctaggatgcttaggattcaactaattgtcaggaatcttacttttttccccctttgattgatctgagtgaaaactggtttttcattgttaatcagaacgtgtgtggcagttttctttgcatactgtgtggctgtgttctttgttatatgagcatctggccttggctaagta

SEQ ID NO: 37381 - DNA, 387 bp, Homo Sapiens
aacgtcatcacaaaactggccgccccaaagggacacatacagccaaatgagaaacaagagtctccaactgggcatgatgggggacccagaggcgttaagtgagcaccacagagagcaaaacagcaggagcaaaaagctctgtttccataagatgcgaggaacaggtcacgtatggagggagcaagctctgttttccatcaagtacaaagaacaggtcgtgtatgggcctacccaatttaaggggaaggacacagacaaaacataatagtgaaaccttctgatttctaaaaatggaagtacatctccctggctgggtctcccgcgcaggcccgacccacccctcactgaggtcaagagaggagacctggagcccacctaccctccggg

SEQ ID NO: 37382 - DNA, 354 bp, Homo Sapiens
ctagcatgagcacactaagtcagagatcggacagagccacgtttcttcctttcttactacaaaggacagacttggtcagcaaggagaaataggatcagtgttaatatctggacaccagcaagaggccagacgacttgtggcttcatacaaaatgttttcatttaaaactttacttgtaaaatgtccttactgctgaaactaaaaccattaacaggttctactgcttaagacttagaaatcttcaaagatttccctaaatcaaatcaacttaagtattaatattaacatttctcccctaatgccttgagttctactgggataacagaacaactgatgccctaagtcagaagtcag

SEQ ID NO: 37383 - DNA, 405 bp, Homo Sapiens
aacgctagtcaacaggcctcaaagtgtacacatgaagacacatcttccttcatcctctcgccagttgacaaattaatgattacacgttcaggcattttacccagatgcaataaaattaagaatgacatcttagaaaatgtggttcaagagaagacatacgcagggattgacaaaatccatcttacttcctttcgaatctctttgatggttacttggttctcaaacacagatcactgctaacaggactcaaaaacaccacttgggaccatcaaccagtgctgcttcgggcgacccgctgggaacacccccacctgacccaagcgtccaccactccttgagcacaagctctgggggtgacctgtgcctgccggcttagttttagaccctacgggaacagctgacatc

SEQ ID NO: 37384 - DNA, 478 bp, Homo Sapiens
gattgctgcggtcgttctagaggatccctttcttgccacgactcgtgtacgaggagtcccaagtaagaactaaacccgttctcctggaagatgataacaggttggcctatttgtacccatctgagctgtctggagaataggaccaatgacaatccccagcagcaatccttgattggcataactggaaaaccagaaactggtactcattatgagattttctgttagcaacacactaactcattcattctgtagccacgaaagatgtggttgtactcctggtattaacactacatacaatgaatccaagggtgaggtattaagtgtatttctaacataattagaaaatccctattccttttcttttgggagtaatgcttctccctcttttcaaaggttgaaatttccttggaccccaacaagtgtgtctggaatacagtattctggagaagaggtaaaactgagcaaggttaactcttag

SEQ ID NO: 37385 - DNA, 424 bp, Homo Sapiens
tgctgcggtctttctagaggatccctttcttgccaccagagtcgcctcatacccaatctatcaaatttttcctcttactgaaaccttccatccaaaatacttccaaatcatatccaaaaactatttatatccatttatctcacactacccagttcaagccatcattttctcctgaagtattctcttttgctataatccgttcaagacctaagaactgtaaaaactaacaatgcatcacgtgactcctctctaaaccagcttctcattcaccttgtaattaaaccaaaattctgtactttgatgacctgcaaaaattccattcaatttaaatcctttcctctctctccaaccttgtctaatactaaactactctttactcatactagccttttatctcttaaacataacaaggttggctgggtat

SEQ ID NO: 37386 - DNA, 524 bp, Homo Sapiens
agctgttctagaggatccctgttttgccaagactcgcagtggggggttggcacagtggtgatccctgaggtcccttccagctctggcagctggagctcctctgatgatccatccttcagggagccaaggactccccgtgtaggtcctgcagggatgcccaagagttgggtggctgggaaacagctcaccgtgtgttaggctgtagacctgagtacctggccagggacccaatcgtccccagcagtcttgtcattgtgaccggccttcatctcacaggaacccaggctgggctacgtaaatgaactgagctgaactgccaggtgctggggttcaggcagagactggaggctagaagttgaggggggccaagtactgcagttgggctgggggacagtacttggggcagggttgagcttgggtccccacaccaagagctccacagtcatctcagggacccttcaacaatagccctgagggctatgcatccatttttttagaggaggacatgatggggaggcacagtg

SEQ ID NO: 37387 - DNA, 352 bp, Homo Sapiens
ttttcttgtttccaagactgaggaataatgtcaagtatttgtagatgaccctgtatttaaatttatctgattcttttcctcatgattagtctgggttatgggtctggggagcaagaccacagagttaatgtaccatctttatcacatcctgtcaatggcatatactaccaacatgatttatgactgttcatattgaccttgatcacctagctgaggtcatttgtcaagtttccccagagtaaagttactctgctcccctccctttcctccaccctcaactttccattctacactcttggggaggaagtcactatgtatagcttacactaaaggagtaggaatttatggtccc

SEQ ID NO: 37388 - DNA, 412 bp, Homo Sapiens
gggttggtctttaggagagcatagtgtcctgccctggagtctcctcattcctgctgtgtgcccttgctccggggttgttccaggaagcctctggtgtggggggctctgttgccaccagctgatttcctgccccaggtgcgtgggtgggggaggagagggttgaagattacctggagaaatcgcccgctttgcttccgtttcacccctcttctagggaggacagcagagtgcacagaggttctcttctaatcctctcacccccaatctggtcctccacaaccaggctagagcgtatctatgtatctcgggaagccagggcttggggaggagtggactgacccgtgttctgtgaaggtcaaggagggcccacttcgattaggatgagtttggcagggagcgtggtcctgctcgc

SEQ ID NO: 37389 - DNA, 397 bp, Homo Sapiens
acttgatgacatgtgtgatatactagtacaagtctcccctaaacacttattattacaagggcaagagaccttatagagagagttaccggaccctctagtgataaagtaacactcatacggtataaatgaatcttgtgcattgatgcatgcactggagaaccagcatacttctgtgatatcctcgccaagtatatatcttattaatcagaagaacatccgcaaccccagttagggacattcacaagaagacatacgtcttcagtgtcagtctgaaatcaaggaagactaagaaaaatccgatgaaggaaactaaagagaaccaactaatgcgtatgtgattctggctacaatttttactataaatacattatcgggacaatggcacactgaatgagat

SEQ ID NO: 37390 - DNA, 435 bp, Homo Sapiens
gactgtttctatgcatcttaaatacttgagtgctgtgaagtgtatataatgaagtagggaagaatgggctcccaaggggtttgtgatctggtggggtgttgaattaagccatacttgggagacgttccatagtgcaaggtgtccgtgtggctcaaaagtaaatcttttactccgagtactctggctgggtatactgctgccatttcaggttcagccatgtctccatttcagttcccaatatcatagttttccttgtcagggtcagaacctgtcgcgtcacttttttctcctcttcctcaaatccatttgctctcattatgtctcttgtgtccgcctttcctttccattcctccttcaggcaccctgatttctgccccaacttactacagctctgaattatggcaggtgctcctcatctggtcccggcataacttg

SEQ ID NO: 37391 - DNA, 545 bp, Homo Sapiens
cgggcgactctagaggaccccacagtagtcggggacggaacagaatggttttcgagaaaaccacataggaggtaaaagcgggatcatgagattggaggaaggaaaataaaaacccctggaaaagataggagggagaaagagaaccgagccttgggatttggcctatttagggagagaagccagggactgaagacagagaaaggcccgaaagtagtgaattaaaaattagtaaaaggttccttccatccagggtcacatcagaaaagaacaccagattagtcttggaaatccaaagggtgtagattaactgggattggcccatttaaacatacaacaataaattcatttgatattaaagggaactcattaacatgaaattaccataagcaaaatcaaactggaatttctagaatgaactgcacttatcttctacttaattcttccattcagtattgactcaagatctatcaaggggaaacaaagacagttataagggggctatataccataacaaattctacttgacgtcgttattgtccgtcatt

SEQ ID NO: 37392 - DNA, 443 bp, Homo Sapiens
tccccaagataagtcgggacgaagggaggggctgaccacctgctgaggagcaggcacatctgggctctggggtgacggcagccactgagtaccagaatgagggcccagggccctggcgcaggttaatgcctttgctcaaaacccccaaagctcctgatgccgagctggacatgtggaagcattcagccaatacttgtcagcagtggtcaggtttgtacaaatttatctgggtcagattatatgaagaaagtgctaaagtttcagaataagctcggtagggctctgattcgtaacagacttaaggaggagacatgggtgtggtcgccaggatccacattgcagccaaagtccggggggtctttcagtctagaatggtaactatgaacttccttgactgagggatctattacagaatcaccagattaacagaagaggggaacgtg

SEQ ID NO: 37393 - DNA, 464 bp, Homo Sapiens
ttaactagttaattaattaataattgtaaaggaagggtactaaagacagcacttgggcagaagcatgaagcatagtgtttccaaaacctagggcacagattgagtgcctaaagggcctgctggctttgttatttttgaagattccatggatggtgtatcttctgtagaagttaagcaattctgaaaagcaccatacactcccagtttgcccagatgagagaataacaaggggaagggcccaagaaggccagttttggtcctttttcaagtcaaaccacatccatccctaccgcctccaccaccaggggctttaaatgtattttcttattggatccccaaaaaccctaaaatggaactgcctatccccgtttcaaaaaccaggaggcctagcctcactgaggttagctgacaatggagactgcactctgcacacaatccctcctgcactttccacccctgttctg

SEQ ID NO: 37394 - DNA, 590 bp, Homo Sapiens
ggaccgaaagaacgtctcactggttcacctgcctctttgtctcctgaaggacactagggttcggagagccaatggtccaatcaagtggccaggcctgtgtcctctcttccttacccctcagtgggcacactgccctctcttccttaaccctcagtgggcacactgccttctcttccttacccctcagtgggcacacagcctctgcctcgggatgctccttctgctttggcttcctttgctttggcttctgctgattctgtcctttttctccagcttctgctgcagtggtcaggtctgttgttctgctgcagtggtttggtctgctgtcctgctgcagtggtcaggtctgctgtcctgctgcagtggtcaggtctgctgttctgtgttctgctgcagtggtttggtctgctgtcctgctgcagtggttgggtctgctgtcctgctgcagtggttgggtctgctgttctgctgcagtggtcggatctgctgttctgtgtcctgctgcagtggtcaggtctgctgttctgtgttctgctgcagtggtcgggtctgctgttctgctgcagtggtcaggtctgctgttctgctct

SEQ ID NO: 37395 - DNA, 450 bp, Homo Sapiens
tagcaggactcaagtagtcgggacgcgtaagtcgggacgactacaattttaagaggtcggtcagggtaagtctcactgagaaggtgacatttgacaaaagttttaaggaagtgagggaattagtcatatgggtatctggagaaagcatactccagacagaggacttagctactatgtgcttctggtagtcctgtggctggtgcagagtgagcaaagaagagtgtagaagatcagattcaagaaccaacgaggccccagctcacggaggtcttgatggtcactctaagattttggcttttactctaagaacaaagaggagccattacagggctctgaacagagcagtgactgatatagttccaatgaattcgctgttgctatgctatgtagaaaacagacctaagaggggaggggtgaaagcaagtagatctgagaggaggccacagcagt

SEQ ID NO: 37396 - DNA, 377 bp, Homo Sapiens
aagttatgtcgggacagcaagttaaagtcgggccgtgagcggtgtcctcccacaacccacaggcaatgacgcttcatggcccctggcagcagggctgctgggacagcaggcagtgagaagagggtgtggacagcgtgcgtcactgagaaaccacaccccactagctgggactctccccagagttacagcctgcagtgattccagtttcctcccttccactacttccgagccaaaacccaccctgaaagcttccccaagagtcgacgccccgggccatgataatcagcccaggcactagttaagctggtgaaggacgtcactgagccaccatgacgtcctgtccccagcctgctactgtctagaatgccccgagaccc

SEQ ID NO: 37397 - DNA, 376 bp, Homo Sapiens
ctgagacgcagtagtggacgaacgaaggagtaggtgaaggagatactaggaagcggcacagagcaagcagcgtgagcgtgcatacatgcgagcagcatagactcttccaagctcttcgagaggcagtgtggggaggtggaaatgtagggatgaacacccacactatgtgtggaggtatgtttcactttaggttttgatgaactaagacctaagaactatcgagttttcacagtagttacaaacactttcaaatacataacctagtggagattgtttagacaaggtccttgccttcagcatttgatgattctatttataattgagaaatcagaggtgaatctatcgtctcaataattatgacaggcgaagttccatt

SEQ ID NO: 37398 - DNA, 368 bp, Homo Sapiens
gcctggattcacacagaggaactttctcccaaaagaaccaatcaacttctaactgttgtggttatttgcataactcaaatgagaagcgagggccttttggtttaacttctgtgtcatatgaggtctggaatgagtcatatgaacactggaattgtggaattggagaagagaatgaggacccacacactatgataaaagttaaaaagcaagtcaaagagttccttctcttgtactcatatctgcaccacgtctagaacaacttcccttcccaagagaattaaaatacattttttgtttttccctgcaatactctgtagtactactgttctggaatttcagttctcatgcaacataccggtcccgattga

SEQ ID NO: 37399 - DNA, 410 bp, Homo Sapiens
actgggcactgggcacagaactgtaacgggccccccacccaatgaccaactcttagacgaggcctgcagggcagcacttccctcttgcctcccaccaaagcttctaaagggaaatgtcgactgttttcacagcagtcccctcactgcggctgagtttgtgggctcagatgatagctcacaacaacctgattcagtccccactgtggctgagagtggggggtcagatgacaggccaccacaacctgattcagtcctcactgtggctgtgtgtgggggggcagatgacaggccaccacaacctgcttcagtcctcactgctgctgagtgtgtgtgggtgcagatgacaagccaccacaacctgattcaggattcagttgggcttctagccagtgccataaggaaaaccattc

SEQ ID NO: 37400 - DNA, 394 bp, Homo Sapiens
cgcctggcctcacacagaggaagggcaataggactaaagcagttttcagggccaagtgggtttaaaagtcctgcattctagtccttggcctccaactccttgggcttctactgtgaggaccaaatgacccagcactaagatccttccctgactcagataagtcagtgcccaatatggccaggcaccgaggtagccactggcagagacaatctctgctctcaaggaaagtctgccatgtggctgcagcagagctccttcccacttacccaaagctttgagctccaataaatcatctcaggaatacctggaaaatggaagagatgaggcgctctccctgtagaggggaagaaatgggagcacagaaaggacttggctcagagcctctttctaggaa

SEQ ID NO: 37401 - DNA, 484 bp, Homo Sapiens
aagtcgggaccggaagttatcgggccttgactgatttatgttccacctccgagaaggagacagttcggcgggactggccgctcccactaaagatcccaggcgcctgcccttcactcgtcacttctacgtcccttggagggtggccaggttctctattctcatgccccagtggcactgttcctgtagctgcctcctgccctgaaactctctggtccatgatgccaatgacctcatctcaggtacagacctctggttctcacatgggggtcccaggttgaagaatcaccccccaccatgttaccagtagagggtcttgactgcaagttgtccaggttcttggcgttttgaacaaagaattggacaaagcgcacagcaaagcaagaaaagaatgaagcaacaaaagaacgaaagcagggatttattgaaaatagaagtacactccacagtgtgggagcaggcccaagcagtattcaacggtctcgac

SEQ ID NO: 37402 - DNA, 360 bp, Homo Sapiens
agaagattaaccaggaatacgtgttgtctcttctgtatgctaatgcatgtaagagcgtgttacaggtgtaaaaagttgcttagttgcacacattctctctcccttactcagtgtttcctcagtgtatactatgtgtcagccactcttttaggtaagcatgtaagaaaatagctgagtaagatatgaagacaaatgctgggctgctaagaacttaagattagtgagaactgagcataggctctgggtatcttgacaagagttatagggatgaaggatgaattggagggggcttaaaaaaggaagagagaggagactccacgagcacaaataactcttttagggtgtctgtctgtaaaagag

SEQ ID NO: 37403 - DNA, 408 bp, Homo Sapiens
aagtcctttgcctcttttctcctttcctgtgccagtttctactccagagggctgaggaacttccaggaacaacctaggagtcccagctactgagcagcggcaggagtcttttgaaggattcattgctagaatgtgttctccttcaccagatgcgacttcttgaactggaagtcaaagaaaagaagaggagttgtccagaaatagcagatcttcttcagagaaaaagaccaaaacaggtgaatataccaaaaaaacactctgataagcaacaccctggaaaggacctgcattcctgatctgactgtcctgaaaaccagaaaagcaaagaaactagggaaactagttctttgggtaatgaaccaattaaaagtagggctttgaaaaaatacgtttctgtcaagaaagaaa

SEQ ID NO: 37404 - DNA, 416 bp, Homo Sapiens
ccacaggatctgaaggctggtctgggtcagtcatccttctttccttctctctctctctgtgtctcatgtccaaataccaagtcatatctaccctaaatacctctatttcttcaagctggataccgaatttcaacatgggagtgctcaaagaatatctgctgctgggagggttacagggctgggggctcatttcctagccgtaggagcatagctaaacactgctttgaatttaactttctgtttattgaggtgactttcggaggtgctttgatcgagattatgggaagtggttaaagacccctaacctctctgccatcactgttccttctctcagtccctgccaccaccatacccctgagggaggcagggcaactacacagcctcccacacagagtccctgccttcctgcttctact

SEQ ID NO: 37405 - DNA, 367 bp, Homo Sapiens
tattagacgacccttttttttggtacactggagctgtctgtgcggcgtacttggagctgtctgtgcacactggagccatcggctgcgtcactggagctgtctgtcctgcatcacctggagcccgtccctgtgccacaccctggagcccactcctgtgccggcgacacctggagcccgtcctgtgccggcgacacctggagccgtcctgtgcacacctggagcccgtcctgtggcggcgtcacctggagcccgtcctgtgccacacctggagcccatcctccgccagcgtcacctggagcccgtcctgtgccatacctggagcccgtcctgggccttccttcacgtgtgacaagtctcgcggttaaaa

SEQ ID NO: 37406 - DNA, 481 bp, Homo Sapiens
ttaaagggctggctgggtcccacagagtcattccccaggcagccctcctgcctggaccaggcgcccagtggctgataagccacaggactgcatgacacaatcccgctctgatcttctgcccagccgagcctctgcccccaccccacccctggaccctgtttccatctcctccctttctgggtgggaccaacgccccggcctggtgtcattcatggtgggctctccagagagccagcttctctgtgaacctctcagctgttgaggtctccccaaagtctaccctagccagagggctggcagcaggagacccctgcagagggaggacagtggcctgtgccacccccacctgccgggtgggggtgggggacttagggcccatcttggcccctgctggcctcagcatccccacttggtacaggaccagctcggacacgacatgaggctgcgcccgcgcaggggaggacgctaactgggctctggc

SEQ ID NO: 37407 - DNA, 622 bp, Homo Sapiens
tcgaaggctggtctgggtcaggtgaaaccacacatgccatctgaagtcagagctgtgccttgctggcccgagcacagaggcctgtgctccctttctgcgccctcacacagcttcttctgcccgggccccgtcctgggatgcccatgtctgcccgtctgtccctctcccacttagctctgccttgtcctgtctggtcttgcttgcgtttttccttttccatcttcgaggtcccagccaaggtgctccatttcacttcctgcccctccggccgtctgtttttcaaaagctctgcccaggatttcacagtgagccaagttctgagtggccctctccactaggaatgtggcatcagccactatgtcctagcagatctgctagtgatgacatttctttaacagtcaaaggagcaggtgggattggctttagactgacttcacatctctgctcgagcaggtccctgctcaagggcctcgtaaccacccatggccactggctgctgccctggaccgtgcaggccttgagctcccagggccatcctggggcaggggctgtgccaggcaccaacatggcttgttctccaaggtgcgccacctggggcgctggctgctgactcctggcccat

SEQ ID NO: 37408 - DNA, 419 bp, Homo Sapiens
tacacattgtatgtcattcccttaattggtttcccagacagaagctcagagcccgatatctgtcacacctaatcctgactcccagttccccctataccacgactatctttcaaatactgactgctcacttagtactaggtgcatggcctgcaggaggaggtgggaacactgggaacaagatctgattcttgactagagagccgaaagaaaccataaatcaaacactacaggaactcagagggaaaggagccccattctggctggggtttagtgggaaaggagagattagtgagtatgagtgttgagaagactgggatgggttggatctctgtttctaaatctgttaaaaagaccaccacccatcacttcatgagtcctaccctgtcttgtggaatcagaattactgaatggagcccagg

SEQ ID NO: 37409 - DNA, 519 bp, Homo Sapiens
atcccgtaatagcggcttcgggctggcgggcagaggggtatcagcttttcgcttaatgaagggagagctgaactcttgaaccgactggatgtatttttcctttgttggccttggcctgaactggccaagaagcagtgggcggatggatgtcactgcctatttcctcccagttgtttttgcaggcctacattttagaaggctaattgttagagtcctcatttttcttccccacaagaagagggctttgttcaacaattaaatcaggctgtgtcagaggcaaagcctttccatttttgaccaaggttgggctccaaacataaaagaaattttggctctatttcatttagctgacaatgtttcctccctcagagcctgaaccgaagttttctacccaaaagaaacactggccccaccgtgacgtatcctaacatccaaataccaggaggtgagatccctggtagccaagccgagaatgaagacagccgtttagacatcttgcttctgcttccagtgaatgaa

SEQ ID NO: 37410 - DNA, 355 bp, Homo Sapiens
ctggtagcatttatttgatgaggttcattttagagattgcgtgtgcatgggagctctacacatctcctattcatgtaggagattagccggagcattaaagtctcttatgagcaagaattaaatcaggtgtcataaaatctttccatgggccagtgaaagatcggaagttgctcaagatggaaccaattggaaatgtgctccgaacaacccaggggcagcacagctcgtggttgccaggaggagatgctggttcagtttcatggaccttctgttttcttaagacaacatggaaattcaaaactttttaaatgtgaaaaatttcaatctcaaatgttagtgactaattaaaattttc

SEQ ID NO: 37411 - DNA, 446 bp, Homo Sapiens
acaaagtgtaaagtcagggaagaagcaatccattttcaagggaagcaacatttttcctggcaccatttgctggatgacatttcacatacggatttatttttgaaaaggatttaatggattttgacccaaagaaaaaattttacagaagatgttaaagtacattaatatggttatttcccaaggtaccttggtttgtaagccaaagacacaccaccttggcaaattcagggaaaatctaaaaccatgggaaccaaatttataatctaacttagtggttttcatatatttaaactgccaccttcaacttaaaaaatatgttttacattgcttttacaatgcacaaacacatttcaaacaaatatttctccaaaaagtatttcccttacaataagcaaagcatgttgatatgttctctatattgtacttcatttttcaaaatgtttttg

SEQ ID NO: 37412 - DNA, 475 bp, Homo Sapiens
atcctcccacctcagccccccaaagagtcaggaccacaggcgtgagccatcatacccggcccctatttattccttaaataccgacagaattccaagtaaaaccctctgttcctgaagtttcctttttggaagaatattaactattccttcaatttatttaattgataaccttaggtcacatttggcaagcttccaaattacccacgtggtgatggtcttatgattcatggtgaaccttttgtccttgaataaggaatcctcaaattttattgtcagttcctcacacgattgacatatcgattaacatgtaaacaactgacacacagacactgctgatttgttctagaatcatgaaagtttactgattgtcttgcacacagacattttagcctgtatgttgcaatctcttgccaatgatcttaacctctgtattgtaccttccggggaaaaggacaactctgatatgaggaggcac

SEQ ID NO: 37413 - DNA, 412 bp, Homo Sapiens
agctgcagactggagctgttcctatttggccatcttggaatggaagcctgcatcaatgttcttagctagatctgctggataacttgcagcttccatatcagcacttgctgctttagtgtgcacttttatgttacagagatggctgttttccttaaacctcatgaatcaacctctcttagtttcaaacctttcttctgcagcttcctctcctctctcagcctttgttaaattgagaagagttagcgcctttgtgtggtttatgctttggcctaaagggaatgttgtgactggtttagccttttatacagaccactataactttattctgattaacagtaaggctcttttagtttcttatcatgggagtaccacttttaatttccttcaataactttttatttgcattcacaac

SEQ ID NO: 37414 - DNA, 367 bp, Homo Sapiens
caaagggaagaaagtttcgttaccgtgaaatcgaaacttaagcagggaaggggacaagggtataaacttataaggtggataatgaaacttaggtgactgggcagattgtaaccccatagtacttgatcaatgaggaactaggggagggacttgcaggctaggagataaattacatgctgaagctgccccgagtatgcctgcctaccagacatccaatcttgcaagaccacttttaaaagtctcactttcactgttctctgtgcctctgagtccattctttgggtttggatgggtgagcctgtttctcacattagataactgaaataatacagtatgtaaccttttggggatggctttttttcactca

SEQ ID NO: 37415 - DNA, 463 bp, Homo Sapiens
tacatggtcgcaagtccatgcaacacagaaagtatacagtatgtggttataaatgcatattctgaacttttatttctttaatcccatagtatcttatttctatctgattccttttattgttttccaaatcttctcttgagaatattttgtttgctatccatttgaagatgagattctcagaagggtgaatgcttcattagagggtaggtgagcttgcaaggtgaattctactttgaagaagtcatcagtgtctgaacttgagctatttagtctcaaattttgtcgacatagagaatgaagccattcaggggatgaacttaactttgtccaggctcataatgtataaaagtggtatataaatccagaatgctgatatattagctatatgatctcagcaagtgaccatggttcatataaatgttatttcttcaaagtctaatcctttgaaaatttactctgtata

SEQ ID NO: 37416 - DNA, 505 bp, Homo Sapiens
atcatgtctagggagcggtgatatgaagactcaggctgcgagctagtaatgtgtgaagatgggataactatgcagatagtagcttctgaatctcagtatcttcttctgtacagtatgacaaatagtacctcaaagaggtacagctatgttcgataacttgcctgaggctcctagtgtctcggcacatagcaggttctcactataggcattattaaggtgaatagggttggcatgtagacacaaaggtccctgaagatctaaaactgcataagactgtgttcttgctcctttcgttcatagcctctgatgagggagactgtcttttcacacgtattgagccaggagtgctgagatgatcgcagagacagttgagagaagaccaggagaaaggtgtgacgagcttgcgtgatacacagaggacccttggaaatgtaagaactatagtgtgataaatcatgtctctggtccacagtaagggccaaagtttattcgtgcatagtgcagc

SEQ ID NO: 37417 - DNA, 470 bp, Homo Sapiens
ctagacctcccgtaactggtcgcaagtccaaccacccccaatgttgatatgaaggaaaggttgcattcaggcaggcacagaagggctgcaggttggacttgccaggcaaaggagtggaggtaggaaagtattaatagtgggtagtgtggagggagtatcgagtgttacagtttggttgtattgtggaattcatgaagaggggcagccggaaattatggcaacgtggtttggggccaagttctggggcacctgatttgtagataattgtaagtcattgaaagttttggagcagtgaagttacatgaagatgaatctggcagcaagataacaattgagggaggcaggcttattggccaggctataataagactttagacaaaattaatgagcatttaaatgagtggcataagtgaggaagagaggttgaaaaataaataatggtaggatgaacagtataaagcagttaatca

SEQ ID NO: 37418 - DNA, 513 bp, Homo Sapiens
ctaggaccgatctccgtaacattatttaccagaatgtgttggtagaaccctgatctttacaagtacatataatggtcacaagaagtttgaggatggtaccttatattatgccccttttcgagattcacaatgaaaggctctgacgttctgccctaaagaaacgtcttttcctttgttactcatggtgtttcttgattctgtgaagcccatttaaaaaacaagatagagaaaaacttagatctaagaaaacttaacacttcagggagtacagttatctaatgatacctactttccaccccgaacctcactaaaataagttgttctttggttataaaggagatcatggtttgaatgagcaagctaaacttgccaattgtattcttccttttggagagaatactctatgacatgttatgcctacgtgaagggcttcactatgaatgtcttggcgtaagaagggatcttaaaggtcacctaaagcagcattggagcctgggcaagattctcttgtgc

SEQ ID NO: 37419 - DNA, 482 bp, Homo Sapiens
acccttacaataacaaaaattaaggtagtaacacaggaaatgagaaaagacatatctcacaagaaacatatgaaatagtaacaatgaggtgatttctgcagatcagcagacttagtctttccccctgctggctgaggaatctgggcagtccagatgtatggagtttctcccagtgaagcacacccccttcaccaagaagcagccagagtgccttgttaaatggttcctgaatcctgtgcatcctgactgagtgaggaccaccccaccaacaggcattgtaagacaacttataaagaagtattcccactgtcatcagctcagtgcccatctgggataaagcttacagatgaaggagcaggcagttctctctgctgttctacacactccagtggtgacagctccaggtgtgggagaaacccaggcaaataggatctgaagtggatcccaagcaaatcacagcggccctacagaagacgggcctg

SEQ ID NO: 37420 - DNA, 581 bp, Homo Sapiens
agtcaagtcagcgatgattgttagattgaaattaaaatgtgactaaagagagagtatgcagtttagtctatctatgaaaccttcctctgttttatgtgggacacctgggcacccactcttggctggaacttacataaaacactactgtgcacgcacatgtcacctcaagtcccgtggctctgaaagtccagtagaagtgacagccagacatcccagtcctccctgtagggtattctcagaactgttcctttaaggtctcaggctgctggaagggagggctgatagcagaaaaagtggggacactgggaactccaaagggaagacgcgcatggcctgaaaccgagttctttcgctttctggagcctggtctccctatgtggagggtcatgctggcatggctggcaatggttaattcaccgatggccgtggagtcccaagttggccatattattgcggtaaaagatacattaacccagatgaccttgccgggggacagaatagagcccgtgaggaaggagagcaaggcaggatcggccgggaggcgagagggattttgttgaggagcaagtcttccacaggac

SEQ ID NO: 37421 - DNA, 497 bp, Homo Sapiens
aaacagtaaacgaggtatgtgacgcattcccagactcttcagccaactgagcatcagcttcttcacagcaattgggtcctgattaatgtcctcccaagacagacttcattggatccacgatcaagaggactctgccaggtttttctgacccctctacattgctataaagtgccaaggccttaagacttgggtacgtgtgttacaacggcaagagtgccagcgccaacaaaagacccattggacctgtcagctcctctgtttcaccaagcagacacaataaccttaccaacaaagcagagtaagccaagtgcctctgtgtgacaccaccagcagctgatgacgcataagaaaaatataactaatttagactagggccctatctcttcttgagaagctgggatttgaaggagctatcctgagatctgtactgctagtaagtgactgataacattataaactggatcggtccctgagttcagagactgagttgcaattga

SEQ ID NO: 37422 - DNA, 543 bp, Homo Sapiens
gatgctgggtcatctaaggatcctagctggtcgagtcagctgataattgtcaataaaaaaaacagatatgtctatgaaatttctatgaacttttatatgaacaaggtgaaaggaaatactctaaattagggttgggttaaagtggtggactggggtattaatttatcccattattttgtattttaaaaaaattgctttaagctcaaatgtgcaatgagaaccaccatatcagctctgacaatttcttttgtctcttcttgcatggacttttaaacaaatcagtatattttaaacaagcatgtatgataaaagaacaggagagataattcttataatcttcctgagtagcacacaaggaggtgagaagaagaggcagaggttggggagtgtaattgcttcacagatccccatcctgtccctggtgaggcaggccaggtcatacacatactggtgggagggtcacagagtctttttcagtgcacaggagggagaatccagctccctcatactggctaaagactagttctttgccaccagctccca

SEQ ID NO: 37423 - DNA, 512 bp, Homo Sapiens
caagaacacattatcatttcatttatttaaactaacatctctgaataaagttttgtaactttctttatactttccttgttagatctattttatatttttatgctgttgtaaataatatttccttttctaaaccatttgttgctggtggagaggaatgcatttggatttttggtgaatgtattctgtatccattgactttgataaacactcttactaattctgaccatttgccatagattatgttggaggttctgtgagtacagttataccatctaaaaaaatgacagtttttcttcctttctaattcatagtcctctatttgtgtcttgcattactgtattggcaaggatctccagtgcaaatgttggtagatgtgatgtagggggacatttcttttctccttcacagtctcccacatcaagttctcaatgtttcaccatttagtggttgctctggaattctgtaggtattctagaacagattaaggaagatcccttctattccaggattgc

SEQ ID NO: 37424 - DNA, 517 bp, Homo Sapiens
cactcagtagcagagaaattccttgagattggcattcaacccattcacagggagggaggcaggatcaatggagtccctggtgggctccagacagagggctctggctaaaacagacagaaggaaatagaaagtgtttaaaaagcaggaagaaacacaaagggagtctgggggaatgatgtatcaaggatgctgtcagatgataacatttagtggaaaaataaacagaaaagcctagaacacagaacagtgtcaatgctgtgataacaactacctcaaattatgtacacgcaggaaagactgacagggatcctgggggaaaaacactttaatttgatgcattgagaagattgtgggtacatttttatcttctgttttgatttctgttaacattgataaatgcttatgcaagagtaattttaaatgctttcagagataaagaaatcacaaagaagaacaaagagtttgactacataaaaattagaaacttcacatgtcatctaaagcagaaaagaccaaa

SEQ ID NO: 37425 - DNA, 535 bp, Homo Sapiens
atagcctggtcgaagtcgagtggatgtagtgagaatgaaagggaatgaacccctgtggcaggaaaataaggccccagaatccggctccctggtgtgccccctctccttttggggcctgcttttgggtttccttctagaagggtcaaagtgccctcctgccggtgcagctcttccatggcccgctctgactctgggccttcacagtcatctggcccctgctttgacactccttttgctcaagtcacaatgggcagacccagacccaggtgtccagatcacgtaagaggtcagggtcatgcaagaagaaagacagtatccctggcttctgggccttttcatagctcttagggaatcatgccagcagctatttataggtagaaagaccctaacctgctcctgtagaaagaggatcactcagcaaaagagtagcaaaatacaggctattagcccagctctttcgctctcactagtgagcaactttctgatttgtatgataagtttgcctaaatagcccccctcactcaggaacaataca

SEQ ID NO: 37426 - DNA, 484 bp, Homo Sapiens
ggcatcctgtgtgaaccgaaaagcgatcattcttatactacatggttcctatttgtataattaccaacactgagagcaggatttaataatgtgcatgacaaatagtctgcattttaattacatcatggatattctgagatctaccaaagacttctttttaaaggaaaagtctactaagtttaaacaaacaaaaaacaccataaatacctcattttaaattacgtatagccttcaaagcaggaggaaatcaaaagaggtaaagaaagaccatagaggaaaaaagggaaaagtaattgtaaaccatgatggaaaactgattaaggcaaataaagcagatttaaaaacctaggtttcctaaatctttctttgttctactaattaaggctggataaaaaggtctcaatgttattaaaatgggcaaatgaagaaggatagtggggaaaacaccaaataagaaatcagcaaacagacacgccagcaggca

SEQ ID NO: 37427 - DNA, 503 bp, Homo Sapiens
agaggatctgtacgcctggtcgcagtccattttgttgtcttaagaaaactgacaagcataatgtgtcagaacccctgtattaggtaaaatcttacatgcacgtgcctgggatgggacccaggatagtgaacaataggattgtactgtgacatttgaagttttcttttttgccacttctgtattctaggctctcatcaagtttttgcctggccttttgctgtagacttctgtctggtctcccacgttctactttaaatccgtccaacccaatattccacagtactatcagtggaggtctttctggggggaaaataaataaattaattaatgaagagcaacctgctgctgtatgtccttcgtttaaactttcactgactgctaagaggccacactcaccaggtcaagcaataacttatcatcatttagttcagaagctagtaaatataaatatggatagtctgtgttatcaggatgtcactagaccagttaattcattaaattca

SEQ ID NO: 37428 - DNA, 537 bp, Homo Sapiens
ccggtcgcaagtccattctgtcctctcctcttcatgaagagtcaggtaaaataagtaggtgctcctagctctagtgaccaattactaatatttcctcccaactgaatgtggcatattaacactgagagcaaagaacttagtgtctacaaaataaagttagggctagataaagtcgaatgatggccagccaccactaagagtatatgcctccttctagtggcatgctcagtttccatttaatagagggtgatattgaacatacagtgaccacggatggatcatatacaaacatctgaccaggttgaactctcaatttaacatctcaattttaaatttttacaagttgagtttgacagtattttttgttcaccctgtatggtataaaattattttcagaatttattgtctattatcaaaactaaaagtatcctttgcctttgaggaaaataggaaccgttagccaccatcttcagaataatgtaaaggctgattgataatcatccatctggtttttttcctgctgtctggattccaggg

SEQ ID NO: 37429 - DNA, 633 bp, Homo Sapiens
ctagaggatccgtacgctggtcgcaagtaggggatggctggctgtcccttttccacggagggggcgctgtactctgtcccagccagttaaacacatttgcatgggtctgtttctggttccctggtctgtcccattggtctccatgcccatgcccaccaatcccacactgttggtcactgtagctgtctcagaaggctggacattggggatacgtattccttccccctcaatcttctttttcaaggtggttttagctattctggagcctgtgccttcccatataagttttagaattagctcatttatatctataaaaatccttgctgggatttggatagggattttactaaacccaaaggtccatttgggaagagtaaccctctgattttaaagtctcacaaattcgcagtgtgctgtgaccatcgtgtagtgggacagagacctctgtttgcagtgtagacagaagcaggtgacgccctgatcctggcatgcctcccgagtggcagtgagactggctggagccctgcagtgactcactcaagggttctggtgatcgtttccccttcagacatgcagcccagatctgcaatgggttcctcacccttcagacacacagtccagatctgcgatggt

SEQ ID NO: 37430 - DNA, 445 bp, Homo Sapiens
tgcagggtgacctgatgagtctctctccccagtggccaccaatgccttccctaatggaatgataagggctgccagcaggcttatacaaggagtctcaatcctacaagctcacggaaacccaggtaggtcatctgggagcattctacaatgtggggttgggggagaatgcacccacagaatgggccaggggtctccactgcagctcacactggctccggggcccacctgacccctctgctctcccccaagcccctgagctctccccttctagacatagacaagcatagaggctgggcatggaggtcacctgcagtgtgcctgtggatgggccaggacacagaggaaggacaccaatgtgcagagtcccagagagctcggggacacacgggcacatgcagagtggcacttactacgcaccctgaaactaaagcccacaagaacggat

SEQ ID NO: 37431 - DNA, 603 bp, Homo Sapiens
ctggtcgcaggtcgtaactaatatgttgattaaattaaataaagcaaacaatcagcaagactcattttcaagagctctggcaaatgagttctctgggatatgctaggaaaaaaatttgtggcaaaagtgttacttccctggtgtccaaactccttggccagtcctttattagtaactatagttgtttttccggtccctggctcaaaaaatacgaaaacttgtcattattctgagaaatttcaaattgtcaaaaagctcacctgagatcacacaatacttaccaaggtcccgcccgcccacaccctaccatggtttttacattgcaacaaaccttgagcaaaccactttatctctattttcttaacacccttaagtagaagagcacaaagctcaaatatcaaatctggaacattctctagagtggttagcctaagccatggagcaccgtaattttaaatttctcaaataactaagtcttcactaaggcagcagttcaaaactgttccaggaattaaaatatattcccatttgaggagtcttccttcacagcttcaactcctcagccttaagtatatacacacacacccaaaagcctccatactt

SEQ ID NO: 37432 - DNA, 398 bp, Homo Sapiens
taccgtggtcctctccgtggtatcgtggtgcatgtctactacgaaccgtcagggcggttcatcagtcaatgtggcgacctgacttattaccctctgtaagatgcaacgcccctataggcaccactgtccttgctctatctccttttagacagttccagcggtaccacacgatcagtgctggtaatcctaggtcttctctcctactactgatgggactttcattccagacatctctgttggacattaccctgcatcttgaatccataatgagggagttccttaccttcgcaaggagcggacccgtcaattcaagccgccgctatcagctgtacacctactctcaggtggtcgtacgtgtctagttacacgctgggcccttatcgccatatgagtgacga

SEQ ID NO: 37433 - DNA, 529 bp, Homo Sapiens
gatcggcgctgagacagggatacggcaacttgacttcgacgggtcgtcaccttgcatagacgccaaatcggtctcagttcggaagtacggtagtagccgctctgttacttgaagcttagttcccctccttctctgatagtgtagcctttcgacagtaaggtcgctgtacagtagtagcagaagacctgacagtatagtctctaaggcccatataggaggagttagtagcaggctggcccttggaccttgatgttatcttgggtgtgtccttttgcaacatacctgtggtggagacaacataggaacagtctttgtagttggtttaagcttttgccatccaagggttgtcagaatcctttagcagagcactcttgagcctgcaatcaaattagtcacatctgcgactggcatcctttgtagcaggctcataagcatggacacttagatcaatgttaataattagtgccttcagcagtagcatatgcaaccggcattgtctctctggatggctgctgtttgtttcgagcac

SEQ ID NO: 37434 - DNA, 521 bp, Homo Sapiens
tgaggtaacggcaacttgaattgacgggtcgcttgaattgacgggctcgcgagctataggcttcaacacagcagtcaacactgagttcatcgtcttcttgtgaggtccattgttctagttcaaagtccagcctactgtagcctctgaggagcacttccgctgcaccagaggttttgtgttctcaacagtcccctgacacgagtaagcaaaaggttgtggtctatctcactcacacttaaactcgtgtttagcttctcgaatctgcgacctgcactagtgaaatgaaatattcaagactgtctctctccaaaaccccttagcgtgcacctttgtttacttgtcagaggttacatattcagtctactgggctgtatatgtagtttttatctgtagagaatgaggctccctggacctctagttcttcgagttcgattcgcacctagtagcccctacctggcgatcaaaccttctgccgaactgctgggtctgttcgcagagctcttgtctggcaaccggaccgt

SEQ ID NO: 37435 - DNA, 352 bp, Homo Sapiens
ttatgattctggcgctgagagcaggttaacggcaacttgaattgacgggtccgcatcggttcacctcctgtgaatccatcatagcaacgcccagccctgtgtatgaactcctacaaacgggaccattctcgagcgcgtgacgggggcacgctcgtttgccgccgaggccgctcagttggagttggccggcgcgcacgcccggtcgtggagggtacccgtggccacacctgaccgccgtgggcgcttctccggtacccgttaattcaagttgccctgttatcagctgtatacctactctcatggcggccgcacgtgctagctaacatgtgggcccttaacgcccatatgagtg

SEQ ID NO: 37436 - DNA, 426 bp, Homo Sapiens
acggctatatgaatgacgggtcgagggttacacgatctacctatctagcgcgactctattaatgtagtcgtggctaaaggcatccaattgtgtgactatgattcacccgccgaatcccgcgcaactaagttaaacaactcaaagtctaactgtgctcagggctgtttactctacgcgacttctcccgccgcgggccaacgcgtagcaaagaaatttaatttctgacggtaaccccaggaccgctcctgaacattgacggtagcatggcgccggccgtggcgtggcgtccgtgcgtggtcccgtcaattcaagcggacccgtcaatccaagttgccgttaacagctgttatacctactcttcaggcggccgcacgttgcctagcaacatgtgggcccttaacgtcccatatgagtgacgataatctt

SEQ ID NO: 37437 - DNA, 587 bp, Homo Sapiens
cagttagtcgggacgcacagagcatgtgggatggtcttgatttgtgggcctttatggcaaaacatactcattcctaactggcgagggaaccgccagttcatatattcatttactcttctgagtccagcaacaaccttaagaggcaggtgttacctctggtttctgtttaaactgatggccagcacggtagggcaatttgcctaaggacacgcagctcctaagctactaaacctcccgctcgcctggaagagaagacaggacgggcctatagtgaatcatgagtgcagcatgagagtgttaaaggtcacaggacgcctcttagtgccaagggagttcatagtggagaccccttttgcctgagggactggggaggtgctagttatgaactgggacttgaaggacagactggggtaaaaagcaagaggagaagcttgagggaggaccggtgtgtgccaggacggtgggactcagagggtggtgaggggcacatccactgtacccttccatcctgcagccaactccctgaggtggcatttccttgaatgacaggagatgagcttgaggacgggaagacttagtaccggtcc

SEQ ID NO: 37438 - DNA, 482 bp, Homo Sapiens
atacgacatctgcacagagcaatgctccacctatcaactccacttgtcaaatcctactcatcgtcgagataccaggcacaatgccactttcttcactaagccttccctggttccttgaattagacaccattgcttcttattttatacaggtccactctattagggtcctctggtcacatcttgcatctagcagtacacttagttactcacttggtcgggcccccaaaagaatgtacattttttagaggacaggaaccctgtcttattcatcttactttgaactgtatgtaccatgacatcacaagtagccagggccatatgtttaggatgactgaatgcagcaacttatttctcacaaagtctatacaacctgacttccccaaccaaaaacaacagccatggagcagcagtgcagtgatagagaattcatgggagggagcattcactatgggctgacatgcccatggtatgtatgatggagg

SEQ ID NO: 37439 - DNA, 460 bp, Homo Sapiens
atcttaaatgctctattgaggatgctgcatgcatgttatattaactgtagaaaaaatagacaactgaaaataacttgcagcaagatcaggaaaatgttaatggcatagtaacttactctagcctgtgatatctaggttcgaatatcctccgtgttcaactggctgacggattaagggccttctaaatagagtatctacactgaactgggatctatatagtgattcttagaatacttgggcagttccttgtgagagcaaacgcaagacgcttttaggagaacacattgacttatactggaaccgcatatttatggaggttaaggctctgaagaacattaaggaaaagacctagctgatgttaagaatatgtattcatttatttatatataatttatgtagagacagagtcactatgtttcccaggctgatcttgaactcctggcctcaagtaatccttcta

SEQ ID NO: 37440 - DNA, 534 bp, Homo Sapiens
aatcaggcatcataattttatctgaccatctcagtcaggtttaacacctttcccaagctggggggtcattatcctccaaaagaacacaaacctataaaggacaggtaacgtcctgtgggacagccatcctttgccctatgctgagaaaacaggtttgcagagaataaaaacgaacaaataaataaacatttaaaaaagcagttgtgtggggagaagcacaaaagagaggccatgagactccataattcagcagagatgaactgccctagttcttaatggcttgttagtcctcattccagtcttccacagggtgtgacttggcttccataaaataaactcacggtcccatgatcattttccctctttgctttagcaagaatctttaactaaaacaactctcttttcatttccactgtctaccactctagtctcaactctcatgagtctggaatattgcaaaagcctgataaacttgtcacatgattccagtgtctacccattccttgtaagtaaccaagatattcttgcctgatc

SEQ ID NO: 37441 - DNA, 582 bp, Homo Sapiens
agcttatcttggtacgtttgtaacaattgatgagccaacattgatccattattattaactaacagtcaggattcactcttagtgtaggcactgaatgagtatgacaagtgtgtaatggcatgtatccaccatagtatcatacagattagtctcattaccctaaaaatcctcggtgtactgtatatatatccctttctgcccccaaaccgtcgcaaccactgatctttttgcttcatcgttttacctttttcagaatgtcgtatagttaaaatcacaccagatgtggccttttcagattggcttctttcacttagtatgtgcatttaaggttcctccatgtctttccatggcatgatagttcatttctttattgtgataaataatgtctcattagtgggtgtatcattgtttatgcattcatctattgaagcacatcttggttgcctgtaagctttggcaattattaataaagcctctataaacatttgtgtgcaggttttttcgtggacataagtcttcacctctggggtaaataccaaggagtgcactttctggctcgtatggtgagagcatgcttaaaga

SEQ ID NO: 37442 - DNA, 353 bp, Homo Sapiens
agcggaggatcgggaccagttcacctcaggtctcccattcactggctggacgtggcttgcgtccatctccatcccttcccacgtctggctgggatgggagggccggcaccctctacttctgtttctctggctctgcttgtgttttctgtcaggtctggctatagtcacttgagtgcttccaggtaggtttggggcagcacgctgctctgcttgctaccctgggactggaaaatgctggtaggatacagcctcctctgtcctccagacatcagcggtgggattggctttctgtactccctgcaaccactaaagtgtgtgccaatgaaggcatttaaatggtcatgtatgctgaa

SEQ ID NO: 37443 - DNA, 435 bp, Homo Sapiens
aactctctggaagtcggtggcgtcaggtctcatcttggcgacaggatctgtcccgctgcatgattctggggatgtgttagaagggggcagtgaggatagagatggggaccatgagaataagccaagcaaggccatcaccaccatcactgccaagctacacgaattactgacaaacttcaagtctgacacccactgtgctcacgaagactctatcttataggggataaagccgcccctatatccacagccaaggcacagtgactcaggcacaccacctagtaaaatactgaaatacctccagtgagtctagatccacagccccacctccacaggtccagctccaccactaatctctggggtctctccctagatctgccacccaccccgcagaatgactgactgcccaggatccatccagccaatgattgactcttc

SEQ ID NO: 37444 - DNA, 506 bp, Homo Sapiens
gtgataaagtgtatagtatgtatctttagtgaacatatgtatgcatttctgtgggggtgtacctgggagctgaacatactgagttacacagtatgaacagggggacctttaatagacactctcaaacagtttagtagagtagtttccaatttagacttccaccagcagtgtatgagagttctaattgctctacattcttcctaacacttagaaaacagtatagtcaggttttcttgtgggtttctttattgtagccattttggtagtggtaacgcaatgagattttaactagcattttctttatatctatcgagcctgagcaccttcccatatgattactggctatgtggatactatcttttgtaatctgcctattcaagtattttgctcattttaaaaactgggttgtctgcctttctcttattgatttgtagaggctctttatatattctaaacatgatcctttgtacatgctgcaaatatcttctccctctctgtaccttccc

SEQ ID NO: 37445 - DNA, 365 bp, Homo Sapiens
agaagtgggatggaggatggggctgtgtgggggactctaaccagaccccatggacatgagctcccccagaccaaagaaagcagccactgtggtctggtggcaggcttccaccccagcaaggggcaggctgctggtgggctcattggactggcccaggctgagctgatgccactgctggaataccatcacctccaagcgtgtgctcttgctcctcctgccctgtgtggcctcgtcactttggctgccagtttctaaatggcactggctcgtggctgatgagccattcctgtctcctccggggcagcgcctcacattcatctcccctctagatcacttccacctggcttcagcctccagaatcaatg

SEQ ID NO: 37446 - DNA, 358 bp, Homo Sapiens
tgcagagtatcactgatgacatttccctctgaggacgttttctgggttagggtaattaccacaacccagaaggtcatggagtctaagttaaagggcgtcacgtgattcagctctcagatgagccaccccactgggatgtatgatggtataaactgcaattaaatcttgtgctgtatttactgtgtgattggaaggacagaagggagatttccctttagtcattcttacctagagcaaaactcatgtttttttagtgtaatgtgatttcttgagaatggtagatgttagtgaagtggggcagggagatggatttacaaatcttggggtttgcaaaatatgacttgaccttttgttctta

SEQ ID NO: 37447 - DNA, 398 bp, Homo Sapiens
tgggctcaggggcaggtcatgctcaggctacggcctgctgggcttgagaagcttcgcctttgtgcctcggtttccttctccggtgaaatgggagggggcagcgtggtgctaacgtctgtgcagccctgggcacgcctggctccggaagcactggccagtggaggtggcagcaagggatctgcacctgtgcactcgctggacctgccttggggagcagcacgtgtgggtccaggctgcgaatcccgaccggattctcagggaggggttctgcaaggtgcacccggtgggggttgggagctcctccggggcgtgtttccctgtgacgtaaaatgacctctatccctgagccctcccatgtagaaagcgggaaggaggctggccgctgtgtgtgggtgtgg

SEQ ID NO: 37448 - DNA, 383 bp, Homo Sapiens
tgtagccttatacttcgtttctggtaacagcctctgacgataattctgaggggtctgctactcgtgggaatcgtggtgtctctggggtttcagttggccctattgtttggtgagggaaaccatagtgaacctcagagaggattcaatagtaataaaaacaacagaaacaagattcatatttccacagctgttttcttatttggagtctcataacaaccctatgaagcagacattgtgatcatgttttacagaggaggaaacgaggcctcaaagaggttaagtatccccaaagtcgtatagctagaaggtggagtaaaattcctggcataagataatcagattgcacaaggaacctctaaatctaacttctaattcccactggg

SEQ ID NO: 37449 - DNA, 389 bp, Homo Sapiens
agggtataaccaagtagaactgtcctgtcagacgggcagaatacggaactcacatagatatcaagctggaaaatcacatctgttcttaaatctaataatagaataaatataataaggaaataaatcactcacttcaaaaaatccactccgaaatactgatttaacaggctatctgtattataaccatagcccaaaagaggctctaaaataaggccttaaaagacaatcagttataatacacttagatgttcacaatccttacatctgttcaaatacagattttataatttataatcataaatttacaatctagtttctgtttgattcttgaactcaagaccagaattttaacttaaaccattagattaagtgtatgaggcacgttttca

SEQ ID NO: 37450 - DNA, 481 bp, Homo Sapiens
gaccttctgtcatattgcatgggagttttagggccggtggaatgaaataaatcgaggagcctggcacctttttaagatgtgaatgtcacacaatcacagcatactcccatgtgcttaagagtgatactctcagtatctgcctatcttgtgtccctttgtaattttttaaccccagaactctattccctccttcaggatgtcatacattatctttttttctctccatgctgctctgaaatcctgcttagaaaactattaggaaatggctgcagtcctgagctgtgagcggtaaacacagcctttgagagcaggagcacatttccctttcatgacatcaggtagggttgtatgactcccgactagttttagcatctgagtcttaccttcccccccactgtattgaagaatgttggtgatcttttaagaggtactctgtatagtttgtcattcatacattttaccatgtgcagttttagctgct

SEQ ID NO: 37451 - DNA, 353 bp, Homo Sapiens
gcaagagccagcccagtggctgggaggggagacagggcaggacacggccatagaggcagctgcccatggtctctggagtgcatgagggctgtgcctcttcggtggctagctgctccttctgaagagtggcctgcggtcggcagcagaggcctctggggagagctcctgatttcactttcatgctctgccgccactgagaggagttaggaaaataccacgggctgcgtgatttaatcgccctgctatttgttaattagtctgtgtgaagtgccaatccgcagtgtgcgtgggcgtgggggcaggactgcggtttgcagggaagccagccgctcggagcagaggcagttggagtt

SEQ ID NO: 37452 - DNA, 365 bp, Homo Sapiens
agaacggcattcattgccttagtagctagctggatgaatgtttaacttctaggccaggcactactctgtcccaacaataagccctgtacattgggaaaggtgccgagacatgaactttggtcttctctgcaatccatctggagcattcactgacaacatcgactttgaagttgcactgacctggccagccctgccacttaccaggttggctctgtatggctaagcgttttctcctaaaatcccttgaaaactgtgagaagaccataagaagatcatatctttaattctatttcacaagtcacacaatattccaatcaaatacagatggttgagaaaagtcatccatcttccctccactctcccct

SEQ ID NO: 37453 - DNA, 380 bp, Homo Sapiens
ggcacatgtactaagtaacttatcccctctttttctgcgtttctctggttttatttgagtattttctctcctgtattagcatatcagtcatacttcagaattttatagtgattgttctagagtttgcaatatacatttttaactaaatttagtgtttaaatgacactgtattgcttcatgtgtagtgcaagtccctcagaatattctcagttcatcctttttgtcccttatggcatggctgtcattcatctcacttatctatatgctataatcatccagtgcattattattactttaaacagttgtattttatatcaattaacaataagaaaaataattgatattatgttatcttcattttttccttttctgatactcac

SEQ ID NO: 37454 - DNA, 452 bp, Homo Sapiens
ggcgaacataagggatgtgtgtcaggggagacaccgggtgtcagatcaggaagccatcaggtaatatatcacgttgatatattgagaaggagcaggatctacctattatatatatagagatagcactcagatatatcgattagaaatagtttagaaaatttagacatttgattattcaggaagtagatctgggagtattggagaaacagggtgggggagtagactgcatggaaagctctttcttagtttgtgatttttcatttatgcacataggtttcttacataacatggaaaattcaattaaagaagaaacaacattgtgttctgaggtcccaaaggtgtagtgattaattagaaagactcacaaaaccgagtgaagctgttttactcatagtttatcacaacaaaaagatacagattaaaatcagcagcagaaaaaggtgcacaggtca

SEQ ID NO: 37455 - DNA, 468 bp, Homo Sapiens
cgagtatctacgagttgctctgatgaggagtatagataagtttagatgaaacttcctcatatagaatttataatctctctctcttctcataattcctaggtctttttgtctttttctatagatattgttgaaatcttagaataagatgtatagaattttagcatgggacaagatataagagataatgtagtctctgattttagaggaaagaaaacatactcggaaagaataaacatcctttccacgatcacaaagataatgagaatgagaatcagagctttccagatcaaagctttatttgttatttttcaacagcaccatagaaaatgtagagtagtgaatggtattttccaaaatatcttcttgaccaaagtcgctaacaattgacaaggatgaagtctacacagagattgctttttattgcagtcattccctcagtagcccttaacccgagcgctaccatggtag

SEQ ID NO: 37456 - DNA, 451 bp, Homo Sapiens
tgtacaatgaggagcaggccagcctccccgcctagacctgggagtgaggtttgtgaggaaaggggccaggcttgctctgctaagtgcgccaacaccaccagcggctcaaagaaggtgctaaggttcccagacaaggacccagagtgaggccgaggcaggagggcaggcagcaggcaggggtggggaccctggattccccggcaggggggaaccccaaaccccaggccctttccagtgtgaaatgggggcccctgcttcagctgatactccatccctggagagtctggggctccactgcaggatgccacctcctggagccctggtccaaacccaaagggtggtggggtctggccaccagctgggtctccaaccaaggccatagctgagagcaaccctgcaaaaagggggaaaaagcccatcagggacaccacagggcagaacgagcagatcc

SEQ ID NO: 37457 - DNA, 405 bp, Homo Sapiens
cgtaggatatcaccagtgaatttacaacaaagtccagacttgcctttataaaggtcactccagttgtagtggtatagaagaatgatttacttgtttatatttggcagtggacaggtagagaaaaaccattcaactgctaaatattaggatatttatcaatattattctatgaacagccatgtatagttattagaactgcacaagagacatatgatgaaagaggactaaggaggcaatgtaggaatgagctgaagtatttaagagttagaatttaactgcatgaaggataattacacgtggggcagaagagagtgaaaagagtctaggatgtgtcccatgtttctggtctgggtggttggataatggtgctattaacaagacaaattaccagacgtacagcaggtt

SEQ ID NO: 37458 - DNA, 428 bp, Homo Sapiens
gctcgggttagcaggtgtgactcctcggtggagtgcatcctatttcctgagccccactcgctgttagaaaccaaggtatagagggcttagtgagagtttttcaccatttcctgctgctttaggtcctcctatttccagttgttttcttcctactccagggatctcctcccttccccagggttgaagcaatgcacactgaagtattaatagtagtgatcagcaccttcaagacagcaggacccttctgttgccttctggctgtggtgtgatgtcctagggcctgtggtgcataagcaggtggaatctaagcactgaccctggtcattctacatataagaggaagaggactaggaaagctcgacaaatgctgttctcctcttcatggcaaagccttgctctttggaatccttatctgcatttaaaatgtg

SEQ ID NO: 37459 - DNA, 418 bp, Homo Sapiens
tggtagcgctcgggttatatctgggggctgaatcctgtctggatggttccccatcaggatggggggcaaaacaagtgacacacatcctcgcaggcccgtatccttacccatgtgagtagggaggtgttgccagtctactgaatacccaacaggagaacagactcaagcagctaaatggaccaattagtgaccacccaggagcaaagacatctgccaccgacctggatagccccctgccccactgctttgctcagcactaggaggggagagggggcactcctcttatgggatctggcttctgggaagaggagaaacatgcctcacacagtacaggaaggagaggtctttcggaagtgtttattaagttagtacgtacgtatggggatggcaattcatcttcatctttcaccaggcaaag

SEQ ID NO: 37460 - DNA, 405 bp, Homo Sapiens
tagcgctcgggtactgccaacttagtacagctggggaattttagcgtgagcatattagttgaacaatgtgaaaaatcagcaaaactgctgtgccatgagcagcgagtccctgaaataggctctcatttactttccatttcttctgctttccagtctcttctctttgaagcagctcttgattagtttctttttaattgccatttaattgggaaacaaaattagaacacttatttgatatcagtgatgaggtttctctttccattctgctttgatctagttttgaaaaaccaaaagttgaagggagaaattaaaaaggaactaaaaagatttcttatttccaagagctagctgcagctataagccatcaaataaatagggaaagaacgactcttggagaagctgaag

SEQ ID NO: 37461 - DNA, 435 bp, Homo Sapiens
gcgccgggttaatttattattcgaggaaaagttttcttaataaatttagtacagactaagtgtatggggtttctaaagtctacagtagtgcacagtaatatcctaggccttcacattcactcaccactcactcactgactcacccagagcaacttccaggcctgcaagctccattcatggtaatacaggtgtatccttttttatctttgccagatggttactgtaccttctctatgtttagatacacaaatacttattgtgttcaaattgcctacagtattcagtacggtaacatactgtaccggtttgcagtctatgagcagtaggctatcccatatagcctcagtatatagtagcctgactatactatctagtttgtgcaagtacactctatgatgttcaaacaacaatgaaattgcctaatgatgcatttct

SEQ ID NO: 37462 - DNA, 429 bp, Homo Sapiens
agacatctctgagtattaagagatcctgtgattaaggtcaatgggaaactacaacagcttaatccaggcaggactacaaatggcccagacccctcaggaatgaaggttaggtcactccaccaggaaaaacaccatgacctgctgaggtgcttgctgaaggcaaagtgaatacagaatggatagcaaaagaaagtagtcatcaatatctgctatgaccacgtgaccagctgcagaagcagggactgtaatggtcatgagtatttcctccttcttttgctaaaaatatgtttgtgcatgtatacacttgtgctaaggaaatatctttatttcatttccttttcctttatcatatgacataggatttattgacctcacataagcattgaagtattgttaactttatgtaatagtatttgggttggggattgg

SEQ ID NO: 37463 - DNA, 356 bp, Homo Sapiens
agtcgacggagactctctattatgaagtcatttttcccccaagttaaaatgtatcataatagagaggctctaatgaatcaattaccaatagtcatttctttcttatatttgaatgcaagttacaatgactttacactgtagattctaatcttgtctgatgtgtgctggtgtgtatgacacaaactcataagtctggatcatgcttgggtacagtcaatgaatcaaccgagtcactttgaggaattagtttttgtccaatttgctctgtgctcaatcccatgaattattaaatttacaatgtttgtccccaaatgaaaaccaatataaatgaatgatgttttcatctgtactttatg

SEQ ID NO: 37464 - DNA, 368 bp, Homo Sapiens
agttcaagagactctccaggaccctggatccgccgtataggctcgtcacgctgcttaagctgcgatccaaaatgtacagaacataaaccaatcacattgatgaagaatcagagactgttggcccgggccgagaagaaggctgctggcgtagtgggacgtcccatcgaacagaccacgcatgtccttccgagcaggagttaacaccgtcaccatctaggtgagagaacagtgagagctcagctgatgttgatctgcacacgacgtgtatccatctacctggttgtcttcttgcctggcctgtgtcttactgtggtggtccctacctggcttatctggggagaggacagactgggacgtctagtccccat

SEQ ID NO: 37465 - DNA, 367 bp, Homo Sapiens
agttcgggagactctctacttcctaacattgtttctatatcacattatattaatatttcttttctatgccccagagtttacaataatgttcggcacataataaatgctcagtgtatcatgccgattttgatttcttaaagtgttttgtctaacacactgtgaagcatgattccatattttcctttcatatatttagttatacttttgcacctacacagatgacatatggctggtcatatagcactgctctgctgagaactcaatatgtctgcatttcttctgtcatccttcttccatctctccccaatctgtgcgcttaaaaataaaggtgcagattggggagagtctccgtcgaactgggtaccga

SEQ ID NO: 37466 - DNA, 359 bp, Homo Sapiens
agtcgacggagactctccgtccgggtgggcccacttcggttgcctcaacagccactccccaacgcttccccaccttcctcaagatcccctgttccacttgagcacccaatactcaggtggcaatggtggcactgacgaacttgtatgcatgtgcaatcatcttgatctccttcgccagacagtcagaaaaacaaaaggtgtccttcctctctgtgaggccaggtcccccctttttgctctggctctgagctccttcagcaccttcaggcccctctgcaatggatgggacactggacccagaatgggggaggggcagttccccaatggaacatcaacatgaagaggggctcacatgtccc

SEQ ID NO: 37467 - DNA, 360 bp, Homo Sapiens
agtcgggagactctctccatccactgcagtcacacgtggccttcctgctggtctggcctcagcaccttggttcttgctgttcctccagcccaggatgctgtctctcttctttcagtgctctgcccagacttggcttccccagagccgtcttctctgtccaccctcactagaacagccttcttgccatcgttggactccttaccctgcttgatttaccttctgaacatttccctatgtgactaatgctagtaattttcttatgtttaccttggtgtctgcctctctactagcaaggaagctctcctcttgttctctgctctgcttagaacagcactgggcagagagccagaggagagtctc

SEQ ID NO: 37468 - DNA, 386 bp, Homo Sapiens
tcctgaaaacctgcatatcagaggggtcaccaagagaatcttacggtcttacagggcgttgtgaggaggatcttcagaaaattcctctaaaaccggtctgcaaggggggattctgaggtgttagtgaaggggagttctacgggatctgagagaaaaaccatgaggaaagttttcaggatccttaaacaatttttggagcgtgtgatgtgggggactggaaaagatgtggagtatgtaaaagggattttggaagaagcttttggaatatgatgctgagagtcctctggagatttcaggcaattgctggagatttttagaatgagtgggggtggggaaggggatcccggtgaagatcactgggctacatgagggtgatctctagggca

SEQ ID NO: 37469 - DNA, 397 bp, Homo Sapiens
tatcccctctacatgtcactgtgaccttggacgtgtcctttaactttagttgtctttcctaaatggggtacaatacatctactttagtgtgttcagcataattcttagcataggttcttaactatcgtatatggcacaaaactgttcagaatttgaatttgtccatgttcacatttcctaacttctctgaacctcatttccttcatttgtctagtggcaattaccacttggagggttgtgtattgtttcattgagattatctatatcaaagtgctttgtagattttcagtgctatctaaatcttatttttggctgctgttattttgtatagtatttttttccaaagacaaaacttctggagttactacttacagagtctagacctgagcaagccagg

SEQ ID NO: 37470 - DNA, 402 bp, Homo Sapiens
cctggcttgccaggtctcaaacaatgtagaagaaacccgaaccgtcattaacatagcactattacacatggtgggaaaatgggttttaaagtaatatatatggaaaggctttttgacactgaaaggttgggaatctctgtgatcttcttacacatgggtcaggctaaacaatttgcttcagggtacatgagcgcaactggttatttagctagtgcatgatccatactcaaatgagtcattattgaatgactggtgaaatgacaaaaagcctcatgttctactaaggctgtggatagcacagagcacactgggggcagaggctgagcgtgtttgtgtaggagcactcaatactgcatatgtttcaataattaactagcgtatttaagaaacttcattctacgt

SEQ ID NO: 37471 - DNA, 377 bp, Homo Sapiens
agatctagagtatccccctggctgctcaggttatacccgtacatcacacctgcacacccccacagctacccacacgtttacatcatcatagctacacatacctgcacgcaccccaactacccacaccagacacgcaacacctgcacatacgccgtctacacctgcactcacacctgtatacacgtctacacagcccccagcagccagcatggagtaccctacacccgcacacaaccccccagacgtctgcatcccacatccaccccacacctgcacacacccacactaccagaggcccaacacctacactcccccacgccatgtctacacttgcacattcacccacacagctacccgcactaccatgtctacaccca

SEQ ID NO: 37472 - DNA, 400 bp, Homo Sapiens
agagacaggtctcatatgttggccaggctgatctctgggactcctccgggagtagctgggactactgcaactgggctctggggtttttctatgcagatattttactcctttctaatccttatactaccttttaatttacttgtcctagcttagctgtgctggccacagcctctgtgcagtgtgtggacaagcagggattcggatcttggtctccctctgattttatcaagcctcaagttggttggtagtcgatcatggttggactctggtaaatgaaagaggctgacttccttcctagttggcttggagcttattttcagttgttaaatcctaaacagggttgagatctatctggcctgctcctggcccttcatctctgagcctctgtcctcttgcaggc

SEQ ID NO: 37473 - DNA, 448 bp, Homo Sapiens
tctcacagaaaacgtttgaggtaggtcttctttaattgcatgcctatcgtacagaatagtgattatagccctggacacatggatttgagtcctaactctgtctcttagatttttgtatgcagttttaggtcttatggccagagagatttgaagatatttaatatctctaagctgcaatctttatctgcaaactggggttagtaatccaatcaaccttattgcggatattgtaagaaaaaatgagatgacaagtgtaaaaactcagaactatacttacataggcaagcagacaaaatatgctattgttgtgattgttttctctctgaataaataaactctgctgaagaatttattagattatgtttctcgaatcgagaattcagttccagctctcatttctggcactgacatattggccaaatatgattcttatacgataatcagctgc

SEQ ID NO: 37474 - DNA, 350 bp, Homo Sapiens
gtctgtcccctgcccaaggcattaaaaagagatgggaaccactccagccgagcatgtgtgtgtggggtgagggggtcctaacccacgggactgctttgctggggaaacagcttttgaacaagacccctggcacaaatgagatgaggttagtgatcgcagtttaattctcaatagggcacagcgtgctctgtggataggaaatataccatatggggggaaatggagtcctttctagaattagttttacctctctgggtaaagaaggtcagaggagaatgaaggcataaactgcgagctaaagtaaacccaacagaactgagcaagccaggcctggattgctcagagtctct

SEQ ID NO: 37475 - DNA, 394 bp, Homo Sapiens
taactagtgggagccaatcataacatgtttgaatctcattaatcaagacataaaaggaacgagccggttatgatccaggaggaaccactcttatctggtttaagtcattcacaactagtttgaaccatccagaactggtttattcccatgaataaatgcagcaacacagagctctagaatctccaccacgataccaaaactacctagaatcatgggcaaaccaggactccaggaacacttaaggtgtgtttatgtcatccacatgccattgtgccaccagcacctggaaccactgggcagcctccccgagccttgaggccactgtcacccagagccctagggacagcatcatggtagaagaccttaggaagccaggagacctgagcaagccagg

SEQ ID NO: 37476 - DNA, 428 bp, Homo Sapiens
tgccggtctggtgcacagttcatgggtctctagtatctgctttttatttctgtaagattagtagttatatcccttctttttctgattttagtaatttgaatcttctttcgtcttagctgatgtagctagaaatttgtcgatttcattatcttttcaaagaaccaactcttgggtttgttgactgtatttttctgttttctctcttctgtcatctttgttactcctgtctgctgcttaggggttcagtgtggtcttcttttttctagtttcttaatttgaaaagttagtttacagctgtaaacatccctccgagtgcagccttcgctgatcccctagcgtcatcatttctgtttgtctggaggtgtttctgattccctctgatttcttgttggagacctgagcaaggcaggagacctgagcaagccagg

SEQ ID NO: 37477 - DNA, 466 bp, Homo Sapiens
gtcgggcctggctgctcggtctccggctgggtcttgggccttccactgtgctaagcagaacgcaagggctccacaggcttgtaggggggccgtggatgagtccttaatcctcatcgtgccagaagggaaggctgaactgccttctctcatcagactcattcctcagcctcacgagcagacctccctgacaggcgctcacaacactgcctctcaagacgagtctgtctgacctgttttctcatcttgacctaacttgctaaatgctcctgggcaagtcactccaccctcggtcagctcagacctcttcaggcctcagagaaagtcaacagtgctgcgccatcccagcttgcttgcaaagggatcccttggttggggtgttggggaaggcagggttttaacggaaatctctctccatctctacagagctgcaatccttgtttgattcaccagacctgagcaagccagg

SEQ ID NO: 37478 - DNA, 428 bp, Homo Sapiens
aggtctgtctcgaactcctgaaggattaccacaattagtctttccaccttggccacccaaagtgttggggttacaggtgtgagccacctcatttagctcagtctattctttgtgtgctaagttacatgccctcctaaaaatacaaagtcacagttccaaaaatattgttttgccaggcaccagtagcatgtgcctgttgtagttaaaagctactctggagggtgaagtgggagaaatacttgcgcccaagtctgggttgcattgccatatgtcaggtaaccacgctaagttaacatcagtacggtgttgtcccaggaagcggggaccaccaggttgcctgaagagggtgaacaagacccttggtcagaaacggagctggtcaaaactcacatattgatcaatagtgggattgcacctgtgaatgcttg

SEQ ID NO: 37479 - DNA, 387 bp, Homo Sapiens
tcatcgagctcgccccctgttttgctcaggtctgtaggtcactgtggctgcactatgctagctgggctcaactgtacttggccagctgtactgtgagttaggttccagtctacgcgaggtgtctctcattccaggacccaagctgaagaagcagcatatccctagggcatgctcttctcagatggatgtgccacgcaatagaaacccagcacacaccatacaatgactataaagcctcaaataaagattactgcttacctcatgtctgtgcaaaccccatatggctcaaggaaagttacatgatgaatcgtgagacgcgatagagaagaacggaacaacgatccaaagacctgaggcctcccctgagatcctgagcaagtcaggtgg

SEQ ID NO: 37480 - DNA, 359 bp, Homo Sapiens
ggtctcctgccttcctcaggtcttgacagactcagatcctcataccagcgccagatcctaccttctcagatattgaaagatccagatcctccctcctcagatatggacagacccagatcctcatagtcatgccagatcctacctcctcagatatggaaagactcggatcctcataccagggtccagatcctaccttctcagatatggaaagagccagatcctccctcctcagatatggacagacccaggatcctctatagtcatgccagatcctagctcctcagacatggacaggccgtggatcctcccacagttattcctgataccacacctgacccccgagacctgagcaagccagg

SEQ ID NO: 37481 - DNA, 360 bp, Homo Sapiens
ataagtttggcattggatagtcagagtgtcttcactgagaaggtgatgttatgagtaaagacttaggagagaggtagttagccatattgctgtccacaagaagggcattccagactaaggtatcagtttggtgcagaggcattaaggtgagagtgtacctgagaagcaacaaggaggccactgtggccagagagaactcagtaggggaagaagagtataagaggaagctggaagagtatcagtggttaggtcccttaacctaaccatcgtttgtaaattggacattttaaagacttcggcttctttctactctgagtcagcggagggttttgagaacaggatgacatatctgagttttag

SEQ ID NO: 37482 - DNA, 443 bp, Homo Sapiens
ggtcgatctgaggatcccccggcttgctcaggtgctcggatcaggatttctcaggatgctcattgtgcctttcacaagtacgtcgcaggtagtatgtcatgtccagagcagtcctggtactctcctagaacaccacagctcaacatcctttcggttcactgtccagaggcctagcatgctcatttcctctctaaaccccttgactctcagaaatgtccctaacacatttacagtttacaaagtattttcacatgtcatttaattcttgcaagtactctgtgagatgacagagactcaatcattcatttattcagcaagcactaatcaagggctaggtaccatgccagaccctggggagacagaacaagctaagatgtgctgcccacacttgaggagctcacagaacaccaagggaaacaggcaatgccccggcctagctgcca

SEQ ID NO: 37483 - DNA, 378 bp, Homo Sapiens
cctggctgtatcaggtctgtctagaatatgttgagcttttgaggggcttacgggaagagtgtggatagacttggccgataggcggcccctccggatgtggacttccaggcagagctcggaggggcagaattagagacgtcagtagctcgtggggctgggggtgggattaaaaccaaggtgggagcaggtgccccaaacccaggagaggtgctcatgcgcaggatggacaaaccagtctccagcaagagcccgaggaagtcgggtcataccccatttttgcggagatttaggatagagccctgtgaaacccctaagtttaggatacaggtcaaacttaggaggtcccgaagagggcagagaagacctgagcaagccagg

SEQ ID NO: 37484 - DNA, 401 bp, Homo Sapiens
cctgggcttgccaggtctcagaaagaagagtgttaaacatggaacaactttgaagcagtttggtaagttgattttgtttgtatgtgcacttaaaaggttttgatgacatatattacttaattgcttctacttgggaagagaaaggataccaggatacagaactgagtttacaggtgccatcatgctatgcgaggcttggacactgagggagaaggtcaatctactgagagaaaagtcacaaaataaagcaataaacaccacatctagaacaggagaaattctatcacagctttcgcataaagccttttaaccattaaaaaccgtatgaatgtcaaatagcaatcagtgaagacattcagggccataggtatctttgactatacagacctgagcaagccaag

SEQ ID NO: 37485 - DNA, 366 bp, Homo Sapiens
cctggttagctcaggtctaaccttgggtttattttttgtttaattacagttctgtcttgtaatatttgtttctgtaagttttgtctctttcactagattataagctcttttgaggtgagggatcacattttaccaatcttgctagcaccaagcagaggactttgcaaacaaaacataaatgatcttcaacaaaagtctgctgcattgaatgagcatctgggatgagcctaaacccaaagcaatagaccgccacctaatatatctgtattactccccctggggaggcaggtagccagcccagtgggtagccctgccctctatttttgaagtaagatctttccctgtcccagacctgagcaagccagg

SEQ ID NO: 37486 - DNA, 415 bp, Homo Sapiens
cctggcttgctcaggtctgtctctgccaccctttgatattccagatgcaagggcctagagggaaggacccacttccagttttctgttcttacagcattaactatcatctcttcttctcctctttgcaccatttttgaagcttgggatacccctacctcttctgttacagaataagattggttgaggggggccatggctaagtggatgggacaggaatgaatttgtgtgatagacatagcagaggcttggggattggaacagcattagtggaccaagtgaacacagggagcagtgctcacagatccatctgcagacagcaggcaaagggcacagaaaccagtggaagttggtatcatggtaactgggcttcctgggaagaaatatgacctgtgttgatttgggaggggagatacag

SEQ ID NO: 37487 - DNA, 432 bp, Homo Sapiens
ggggatgggagggaatgaggacaaggatctgaacaggagctctgtgagtggtgggattctgagggctgcaaggagaacattcttagaagctttctgaggccagaacctgggactgccttatcctctctgagtccccactgacctacacagctcctggtacatgtaggttctcaataaatattgaaaagcagtaagtagtaattgagtgttccaagaagaaatagttgagagagaagatatggaagtaggagagcagactggaaggcagctttcatgtaggcgaattccactttagggttggagccatgtgagagggagtgaggtggtgtgtacaggtcagtgtgagccgaagctccagttttctcatagtgctttcttcacctccaaatggacatttccaaaacatttttaaaaggtttcgttgattttgtt

SEQ ID NO: 37488 - DNA, 399 bp, Homo Sapiens
tacctcgggaccgtctttgatgacagtcggctaaggagaagtgcgcctgggtgcgggaggctggagaagaatgacgactggggtgcgggaggctggagaagaatgacgactggggtgcgggaggctggagaagaatgacgactggggctgcgggaggctggagaaaaacgacgactgggctgcgggaggcaagagggcggaggaatcaagcatgactgtcaggtttctggcttgtgtaagtggcagacggtgccatgtatgaaaaatggggaaaacctgggaaaaatatatttgggggaatcaagagttttataatagaaatgatacccttgaaatgcttactcaagtggaaatatcaagtaggctattgaatttacaaatctagagctcagaggacag

SEQ ID NO: 37489 - DNA, 421 bp, Homo Sapiens
aggtgggagagacctcacgggctgaatggccaggcctcagagctaggggcttgttggtgagggaggtgaccaagatgaggtccagagctctggtggggcctgcagaccatggggcggtccctgagaccaggtccaggaagaggagcaggtgtggggaagacgctgaggccagtttgggacatgaagagtcaagaagcagtctcctttttgcctgttagcttcattctgatgcttcccttgctgattgggtcaccctgtccaccctgacatgcaccacaggccccaggccttggaaccaggcccagccttggcctttcctgcccccatttcaccttgagttctcagaatgagccctgagcctgtgtcccctggagtatgggcctcagtcccatgttgggagcaggacaggctgaccaggctg

SEQ ID NO: 37490 - DNA, 393 bp, Homo Sapiens
tctgagatgacagtcggctgttatgcgttccacctctgattccagaggcagagatgttcagctggctgggcacacacagccactgttgtccatttcagtatgccagccgggctactacatggctgccctaatctgggcctttctctcaggggaagtaagaggcaggcagaagatacgaaagtgatctcaaggtggctcaatgacctagagctggcccccttgttccactactgttctaaactgtaggggctcctaagtggctaattcacttccaggagtacctggcagaatatgctccagtcctcacacgtaaggagcaggcaggcaggctctgtgggggagcttggagccaccatactccctgtagtagcaagagctacaacacacctcgtt

SEQ ID NO: 37491 - DNA, 379 bp, Homo Sapiens
ctgagatgacagtcggctactcgcgacaatattcctgagcagtgaaacgggtgaacagagagcgagcaagcagggctgagaatcagtgagaggaaaaatcaaggaacaaaaccggagagtctggtccagcattaagaaaacggagcaaaggaagagggtgaaacgcgaggggagggaaaaccgagagtcggcagagaccgtggtgccgcgaggttcagagcagggctgggtccaggaagagtcagacctcggcagcccagcgagcttcccattcctggctaaagccagcgaagaaaacggccctggggagcagacaatgagccaccgccccagggccgactgtcatctcagcgctgagatgacagtcggccttggggaa

SEQ ID NO: 37492 - DNA, 385 bp, Homo Sapiens
tctagaggatcccgctgagatgacagtcggcctagtgttgctgttgcatctattactgaattggtacaaacagctacctttgtggatgcttagccagaaatgtgtctaatgaacttctcctacagcagggtatagataaaaaaattcttgcacgtctgcaagcccttgaggcgccttggaatatgtaggggaacgacaagatgcactggcattccaacagcaattaaactgcgactgggaacataagcatatttgtgtcacctctctaccacggaatcaatcaatatgtagttgggatgaggtgaaacaacacctctggggaaccttacatgataatttaacagcagacataaagcaacttaaaactaaaatgcaagaatcccta

SEQ ID NO: 37493 - DNA, 414 bp, Homo Sapiens
gctgagatgacagtcggccctcatctcaagcggggtctaccactccatgtaagcactgggtctggccctcggagcccgacaaacaacaccaggtagagccgaggcgtcttagcaggtgctgctgagctgattgagaccctccacccgccaggcccgcgctgcctccacggacctgcctcccaagaagcacccctcctgccagcacccaaccccaacaggggcgcagccctcaatccagcgtgtgcaccatcagatcacagccccctctccccggcgggtggggctggctcttggccagcggatcccacagacgccccgttctctgggtgttgactgccctccctctccccagaaggaaagacagacaccatcttccataagcagctcagtgtatttctgctcatttccccgccg

SEQ ID NO: 37494 - DNA, 415 bp, Homo Sapiens
ctgagatgacagtcggcccccacggattccctgtgggcaatgttttctgacacactccacgcctgtgtcctggcctgccctgctccctgcctaggtctaaggcccagagtcctgctgattagcgcgaggctctaagcagccacccaggtggggtttgctgaccacctactgcgcgctctgtacttcctgccccactctgacccctcccccaactgtgggttataccaactctgactgcaggctgaaccccaaatcccagtttcaggttgtgccctaccctggggccaggcatctcagccagccttgctcttgctctggggagaaactggatgaggagaagaggtcctgtccctctagagaagcccccatcactgagggcgtgctgtgctcacaagaatctctatcacaaagacct

SEQ ID NO: 37495 - DNA, 402 bp, Homo Sapiens
cgtgagatacagtcggcgctgaaatgacaggcggctcatgtgttaatgccaagcaggttccatgggtgtccccccatcatggtgttgggtgagaggcatgtggagaggccctgccaggcgacatttacacggcactggtcaagacctgtgcaaaactggtcactggggcaatggctggaacaagaggtgaggccgcgggcatctgaaatggcacacaggatacgccccctatggacagggatagctacagctctcgcctcataggttactgagaagactaaatgatttaatgtatgtgtttggaggagtgcccagctcttagcagtgaccatctacgtggtggtaaccctgccctgacatcccgtctgcctagtggacacctcggaggcctgtcatgttcaa

SEQ ID NO: 37496 - DNA, 413 bp, Homo Sapiens
ctgtagagacagtcggctctaggggttgtgttctgagggaggaaaactaatctgttctctttccactgcattctaggaacagtaagaggaccttgtgcatgaataatttgtttccacactacagagtgggtaataagcagattagtaaaaacaattctgcttcacttcaataacagcctcctccaactcattttttctcaacaaacttatttttccagcagaagaatcccagacttcttagagaacccagtgactttttgcaccttaaatctgtgaaatcctcatgttttcttctgccgtatccatagttcaaacaaagatgaggcaaagctagacgcattcctgaaggaacccaagaaattcctctctttctttctctggaatgaaatgaattctctagaccaccagttcta

SEQ ID NO: 37497 - DNA, 391 bp, Homo Sapiens
ttaatgacagtcggcacgtaggtgttgcgctggatccgccgcctgagacacccatgacgtctcacatccgctacgaggtggacgtctcggccggcaacggcgcagggagcgtacagagggtgaggccagcccctacggcccagcccccaaagctccactgactacggcccagccacgcctctcgaggtcgcgcccggtgccgctttcagggccggtccgtaacatcccacatcccattaccctggtgctgaagaccgttccacgcccacagacacaccccctttcctaatgtcctcgcaagcctgttgaaccccaacttcttctccctccggcccgtaaccctagacccctttagcgcccgggtccctctacgagtgctagcccagatatt

SEQ ID NO: 37498 - DNA, 395 bp, Homo Sapiens
tcggcatccagtcctgaaacagtaactagtctttttgacagagggaatttaatgccttatgtgggtcatggaagcccagagaggtcaaacaggaaaagagtggcaacccagacactaaaaacagcagactgctgctactctccctgggctgcagaagcagggctcagaagccaggccattgggcaagcaccaaaaccacaaagtgaatgacacccagtgggagctggagtcagggaggaaacacagccaccaccagagatgctagaagaagaagcatccaaccttccaccaatgtcttccactgacaaaactcacctagatagcagaggacaagggagcctggaaatgtggttggctgtaatacagagtagaataaaagaagggcaggaaatgga

SEQ ID NO: 37499 - DNA, 352 bp, Homo Sapiens
ttcatgcagtatctagagcagcccccagcggatcagagcagatgcatgcctttgcagggtgatcccagtcagggtctctgagtgcccctgcatccacctgagagcacactcacacctgcttctgccccgcaattgctatatataactttgactgccagtgtcaccccaggtttgtgcctctttagcagtgtgacctggcacaaattccttagctgcttctccctctagctgtaaagtaaagcgactgtcatggagccacccagccgtgctgcaagttggctgcttttaacaaaccaatgcctgtccagtgctcagaaaaaggtgtggcacccagcatactaacactcaccat

SEQ ID NO: 37500 - DNA, 393 bp, Homo Sapiens
ggtcctaggggttaggacttcaacatctcttttttgaggaaacacagttcagcctgtggtgatggggaaactggactcacacccctgtctaggagccccccgaatcccctgctctcagcctggctgagctgctctgctgggagtcaggtctgagtgctttgctcaagttgttagccaagtccgttacagggttaatagcttcatagttaggggtcctcagaggtaacgggtccccgtggcacttgtcctatttccaaagaaccccacggcagctccacacattcccatgggaagactgcacagtctacccctgcaaacatcttgctcttagctaaaattgtgtctgtcagtgtagtcactggttatcacgtgggaacgggactcaggacccat

SEQ ID NO: 37501 - DNA, 350 bp, Homo Sapiens
cgcaaggggctgagatggcaggttagccaaggacaccacacgcgtgagctcctggcagactctgggtgcgctacagcaaaaggcagaagaacttcaaaacgtccagcagacgacagagaatttccaatgacttaggaatagggaagagtttcttaaatgtcatagaaaaaaatattagatataagctatgactgctaaactcaactatattgcaattgagaatttctgctcatcaaagacacctcagaaagagatcaaagaaaagccaaggtgggaacaaaaaggtacactactgctgacagccagtcagtaaccagtaaccagaatatagcagaaactcccatggaacg

SEQ ID NO: 37502 - DNA, 419 bp, Homo Sapiens
gggccatgtccagaacttagctactagcctgagctagctgcaagagagaactgaatatgtcatctatagctgtatggctatgtgtatacataaactccagccaccctgatacacaatgagagggtgaatattggaggacagtcaggagtctgccacaagacccaagaaataagtagttaccctatggcctactgacagtgtcttcaaagcaaggacctggtagcttttccatcacacaataaaaatccagagtcatcacagacttcagggttcctacttattaaccctgtctgccccatctgaagtagcacccctgccccactctgctgtcttactatgcattctttttcttcataacctttgtctctacttaaccatgatatattttgtcttctccattaaaatataagttctctgaa

SEQ ID NO: 37503 - DNA, 374 bp, Homo Sapiens
tgtgggagagaagaatctagatgggcaggagtatttggccacagtcccagtgagtcagggtctgcagaccagagcccctaggcttgagaaccaggacagtaacatgaaagcagcattcctagacccagaaaccttgcgcaggcaggtcaaggagctgggcttgcggaggcaacaggaggaggagaccagggtcagagtttggacatcttcacctcagaccgtaactcagggtaaatgtaggcaggacagagaccacagcactgctcggatgaccattcaggcctcctgaattccattcggttgaattcagtttctgaaatctgtaaaccattctccttccctaagaatttcaagtgtcattcgtgccatcatat

SEQ ID NO: 37504 - DNA, 398 bp, Homo Sapiens
gcactggcaccaaagtctgtcagcccagcctgcccacctgaatggtgggggtggaggtctgagaactctgtgtatcttgttcagcagaggatcagtttatatctgtctagtaatacttaacttagggagtccacctgaatatccatctaacaaagatgtctgtcatcgggtgggtcagtcaggtggtcactctggttgcactggttctatcaggctgttggctggtctctctctctctggctcggggactccctatgtgccacctgctggacctgtatctctggaggcctttgggtgtttgtccatgtcggtgctccctctgtctgtctgcctatctggcggtctctgtatctgcctgcctggggttggactgagtccgctgtggttatgcctgcctg

SEQ ID NO: 37505 - DNA, 361 bp, Homo Sapiens
catcagaggatcccagttcgacggagatctcaaaggaaacaaggcgctcggacagaatgtcactgctcttatacgtttgtattggggcacataaatatcgatctgattttatgataatggagggaaaatgaacatagcgtaagggaaggctacaaaatattcagctcatttggaggccaggtaataaggaagcttctgaatggtaagcagcttttctatcaagtgtgggttggtagccctgcttgacttacaatgagtgttacagctgtcgggaaacaggaaatggggctggattacacaaagacatccaaaactaacacaaacacacatggacttcctggtatgtaaattctttttgaga

SEQ ID NO: 37506 - DNA, 364 bp, Homo Sapiens
agttcgacggagactctcggtcctctgccacttgacaggaccttcaaacctcgacagtgatgcaaggacacagagagtaccagataggtagcagagaccaaggcgcagggtgcttcagatgagcaagagaacccagtcgaaccagataccccaggtgggccggagggaccccagaccttcagagggctgccctggtgttctccacagtgcagtccctctgtattcccagagtgggatcggggctttcagccccaccctgatgcctgccctccaggatggctggtttagtctgggtccatgtcccagacccctctattctgctccaggacagcaggacttcaggtcttcctgggggtggatatag

SEQ ID NO: 37507 - DNA, 358 bp, Homo Sapiens
ccagtttgacggagatctccctacgatgccagagaaatatgtcatttcaaggcatcgtaggtagagtcacatgatgtcagcagtttttcccattcctggtgatgttaactttgttcacttggttaatgtttgctagattgctctactataaagttgttattttttctttgtatttaaccccagaataagaaattaacattgacgcatgatccaatctatagatggctttcaaattttgctaattatatcatgatctatctctggcccaggagtctatttatccagaccacccccatcgagtgcggagagagtgggagtgctcagggaaagaaggtgatttgtatttgtctccccgctg

SEQ ID NO: 37508 - DNA, 363 bp, Homo Sapiens
ccagttcgcggagactctcctactcacccagtgtgctctccgacaatcttactcacttgtctttctgcctcaatgaggaggactctcaaatctgtgtttagacctgacttgtcttctaggctctgcaaccctgtttgtaacttcccaatgagtgtctgtaccaggatatccaatagattttctcaaatttaacacttgtgaaaataaatgaattatcttttccacctgctcattctgtattccttatcatattgaatggtgacatcatcttttcagtcacccaagctaggatcctgttatcttcaagtcctctttattttccatcaatcactcaagttctatctataccttctaaatgcctta

SEQ ID NO: 37509 - DNA, 372 bp, Homo Sapiens
ggagctcggcccatttgacggagactctcaaatctgcacttctttggtttgtctcaaacatactgggtttaaccactgactatctgcaattctgaattgcctttgacaggctatttaacatctctgagccttaaatgcctcatggaataacagatgtcaagtcagcacctactaagtgttctattacaataatgcatctattactattcttgcccagcccactgccatgactttaggagtatcaatgcagcccagattactgccatggcctcactgttatccctgctctaaacagcactccagtctactctcaccaatgcagccagaaggatctttcaaaaatgccaatgagatgatgtcactctcctgcat

SEQ ID NO: 37510 - DNA, 389 bp, Homo Sapiens
ggtaccagtttgacggagactctcgatggttatcgagatgttgtgccttgtacttccccagagaggagaatcagccaagctggtcagcaagagcctggggtgggtctggaaggagagcttcctgcagtgaagaactccgatgcttccagggccacctgccagatatggggcacagtccccgcctcttccaggtggagatgaggtgttgaactgggcccttctaagaggagggcagggggcagtgccttagcagagcttctaacccacgtaagtgccttcaatgccttcctttcctgccacattaccaaaaaatatactgttattgttgatgagctagcctgtctccccaccgtaagggcaaccgcaaaatggtcgttttctctctcctg

SEQ ID NO: 37511 - DNA, 372 bp, Homo Sapiens
cagttctgacggagactctcatagtgtgaaattgaccaccttttctgtctcctttaactcttacccccctgtgagaccgcaataagtactgtaaactgtgtgaagtataatgactaacgccaaataattgggtttatctgctcaagggaaaaaggtgcagttgaactagaagtacattaagcctttcactcctgaaggaatgtgtttattctggcaagaattttccagtaaatttccattaagatagcatgtgcagaaaaatgcaaggtcattgagtaacaccattgttacataaatacaccatctatatcaagccttgctttcaaaacatgcataaacaatcactatactctctccccagtagcaaccttg

SEQ ID NO: 37512 - DNA, 372 bp, Homo Sapiens
cgtaggagactctcttcaaagttgataagacttgagagagagttcatgagggagttccccgatcccttgcacttcccgggtgaggcaacaccacaccctcctttggctcgtcctccgtgggcttcacccgctgtctaaccagtcccaatgagatgagccatgtaactcagttggaaatgcagaaatcacccaccttttgtgttgatcttgctgggatttgcagactggagctgttcctattaggacattttgccagccactccactattttttttcattattacttcatcatttagtttttctatttaagtgatgtttatgcaccacatttacagtgttatattagtctgtgttttctgtctccttactatt

SEQ ID NO: 37513 - DNA, 454 bp, Homo Sapiens
aggacacgatgtccgtgccgaggatctttgtttgcatcatgtctatttatgaagtcacagaaacaatcttgaataaaggacttattcgtagaacatcaatccaggaaactttgaagctgttataagattggagcctcataaataggaatttcagagatctgtcctccagccagttctatgatgcatgaggattagtccttggaaatactgagaatcaaaatggtattcagaaagccttttccataatgggaaagacagaaatgatgataataaaaaaggaaatgtgaatggtaactaatacagatatgcttaaagtgaacagaaagtaaaaggcattatttattgatgcattacataatgtctgacaaagtctagcatatgagcatattgttcgtagattgttgatagagaatgtgttgagatcagttaaattcattgagatagactgggtacc

SEQ ID NO: 37514 - DNA, 366 bp, Homo Sapiens
aactgattcttctgcattacagacttctgataaggcatagcttttccgaattttacctgatcaaaacaatgggtgctccaagccatattaacgacgacagacatcgtgatctctcatggacatcgtgatcctcacggacatcgtgatcctcacggacatcgatgatcctcacggacatcgttatccttacggacatcgtaatcctccaggatcacgatgttggcctgtctagtgtatttactctctgaattgtacagtgcaaatgcttcttcagctccctcctcttcctccatgggcggtgctagcgagtcctttagcacctcttccagccctaccattgattctacctcattcacccgatggcaa

SEQ ID NO: 37515 - DNA, 583 bp, Homo Sapiens
ctcgcgaacgtgttatcccccagcctcccagagtgctgggatgacaggcatgagtcaccacgcccagcctattaagggtttaatcttagattctatgatagttcttaagatggtaggatacaatcccaaccagaagctaactcttggaaatttcacagctgataaatagacatctctgcttcagaatctttcttaactgaatgttttcaccaaatctttctgagctactgatcttcacttgatcttaaaatagcagactgatctgaaccttaatgagctgctgcatgagctggtgttgctatacgggtaatgactgatgcaagtagacacatgagtgatgagctgtgacaatctatatcaatcattacacaatctagttcacttactgcacataatcatggtagaaaataaatgaaaacaaaattttaaggtataaaaaattagtgtacctcattattatttctgggtaaattttttgtcttttaaaaaatagtgcctaaacattgtcttatctatgtgacattcagtgactactaattgatggttattgtgttgaattatcctattaatgtgggttcacata

SEQ ID NO: 37516 - DNA, 429 bp, Homo Sapiens
tcgcgaacgtgttatcctttggccattttccagagccagtcctttttccagcaagtgttaagcactctattgtgtgtcttgagctatgctaggcaagagataccttggtctggcttctgccctgagaaagctcacggtctagaaggggagatggatcaataaactgacaaaacagtgttcgagaagtgctctgggagatcactgagtattgtgagaactctaatgggcagcttacctagatgggaactgagggcggccaggagagcttctcatgagttaggtttgagctagatatgaaagacgagcagaagttaaccacatgaagatggtaaggaggggatttctgggcagagggaacagcatgtacagagaggcacagaggaatgggaaagtgtgctgaattaagagaggtgcaaacacaagtccata

SEQ ID NO: 37517 - DNA, 429 bp, Homo Sapiens
tcggaacgtgttatcctaacaagggctgagtgaattattctgctatagagatggagcagtatatggaaatgctcccacggtacataaagtggttgtgttttctctttctagaagagaatgctgtgggtggaccatatacagattaggttagagaggggaagcggggactaactcattcaggacgttttacgtgatagtcaggaagatggctgtagttctaagtacaaggagcaccgattttaaggagagacattttatgacgattaacattttaagatgattgtagctgctgtggagatgtttggaaagggtcaatatataaagtcggctgacccattaggaaatgtcggcagagttcaaatgagatgatagacagctggactagcctggtattggtggagagggatgtatgaagtatgtcggagaaga

SEQ ID NO: 37518 - DNA, 427 bp, Homo Sapiens
gtcacctattaggatttctgcttcccgagggaaggtgcatgcctcacttggatgcatggcccatccccttctgtgtgcagttggttcgaccagcctttgaagatggtctcacatgaaagtcttattgggctcccattttggataacacgttcgcgagctaccgaaggtgttatcctatgaaggttctgtcagtcacgtttattagagtatgacttttgagttatttgcagaatgactttcatctagcctgtcttattggtatgtatttatgattgtagtagttatccatcgttatgtaacaaatttaccccaaattttaacagcttaaaataacaaacatgcagtatgattttatacaatttgtaagggtcaggaatttaggagcaacttagctgagtggttctggggttctggttcaaggactttc

SEQ ID NO: 37519 - DNA, 432 bp, Homo Sapiens
ctcgcgacgtgttatccccggtcattgatagcgcacgcatctgccgttcatctgcaggagcctctccattgggttcatccattccaggaatagagtcatggccatcaaacaggcagtttgatctctcctcttcctcctggaggccacaagattagggccgagagtcggatcagacaaatcgaatctacaatccttaagctcctggcagggcccagccaaggccttgcttccatgctaacgactccttccaagatggccagtcccagcatgcttccaagcaggtttcttccgtgtcctctggaccctcatcgtcttaagagctgccgcctataagagggactattcttgagatcctatcctctaacatttgtttccacacccaatacaaaaaatctctgggtcaaaagtctagaacgcttaggctgtcagaca

SEQ ID NO: 37520 - DNA, 484 bp, Homo Sapiens
tcgcgaacgtgtatcccatcttctcaccttcccatatgagggtacttaccccaaggacagttaatccatggccatgaacctatatcctggttagaaaaggtaatctgtgccaaataagacgtcttgggagtctgaactgaaaatagggaacaacttgagcagtttatagtaggacagaaagaaatgacatggaattcggttgagctatattaatagcagagaaccagagagaagatcctgctatgagctcttaagctgtcatgaatccagagctcctttccagctctggtcttcagggttgtcctatggcagctccaggtgtccctgttatcctgttcttattattccatagacatctacataagtttgctagggctgctgtaacaaagtaccacagactagacgaacttaaccaacagaaatttatttcctcacagttctggaataataagaacaggataacacgttcgcgaggggtaccgag

SEQ ID NO: 37521 - DNA, 401 bp, Homo Sapiens
tcgcgaacgtgtatcccccatgttggtttctcttttctccatctcagatgcatctcagggcatggactgcccccagcccccaaacatgcacctgagcaaatacagccttgctctgggaagcattactcctagaagagttccagaatttctggagcctaatgtcctggagttccagatttctggaacttgccccactggtgccctgaggctcctgccctactgcttcccagccttcctttctggcttgcactggtttgcttggaggagttattcggtttcctatgtcttcctccatcctctcccagactcagctcagaatgcccacaggcttgggtcacatcaaacctgagagaccagcagcacctccaaatgtggtctctcaagtccgggacgcgcccctg

SEQ ID NO: 37522 - DNA, 513 bp, Homo Sapiens
tcgcgaacgtgtaccataagtcaggaaattctgttggttctaccttcaaattatacccagaatctgacctcttttcaccaactacattgttactaccctgtcagaatcactgtcatctttcacctggaacacagcagttatattcaaactggtctctctccttctacgcttaccctactactccaccctcaagtctattcttaacacagcagtcagaatgatgctcttaaatttaagtcagatcatgtcattccagtcctgatgggaggaaaatgtgatgctgttgcttcttctggccatatggtgtatgagcctgttgtgattgcaatgcaagtagtcctgggttactttttgctgggatgattgggaaacatgggaaattatggatagttatacatataatgtatgatacatttcagcctgctgagagtaaagggagtagtttaactgccgtttgccacaggagctctgtaatttattgtatggtgtgaatcaacaactaattttatcgtt

SEQ ID NO: 37523 - DNA, 565 bp, Homo Sapiens
ctcgcgaacggtgtatcctttcaaaaggtagaatgaggattaaataagacgatttatgcaaaattacctaaaataatgcctggtgagtagtaaatgctcagtaaatatgtgtgcctttctagtatcctttccaatattaggtttgccttgtaaaaccgaccattttaataggagcaatagggttaaataaagtgaactgttgtggagatgagtcctagcacacaccaagagaaagttctagctcagcatccatccagtgcatgggaggaaaagtaaacctgactcgatttttcagtattcttatacttagaacatcaaaaactagattctaacctaatcccgatttgaggcatatggattacagaagacaaattaaagacaaaaacacataaatagtatttattcccttgccctaagactccacagctacgtcttgagactcctccttaaatcttcgctgcattagaagctggggtgctgaacttgaacgggccccgtgcttagagattgagtcaggagctgcatctgtgcctcccgagcacctggtggataacacgttcgcgag

SEQ ID NO: 37524 - DNA, 577 bp, Homo Sapiens
ctcgcgaacgtgtatcctgcttttaaaagagggataagcaagcaaggaactttccagtgcttaagggcacaggtggggcagaacatcaaagacagattccatctgtgctaacatttcacctttactccactgaaaattttctaagatgtcacctttgagacacactaaagcttatttttctagacaattaacaaataaattacatttactccaaggacagtgtaatattaatctataaggatattttagattttagaaagcatgagttttgaattctagtttattatgcagtatggtctgtgagccatgaattgtcttcatctttatgtccagcagataatgtggtaaggacttcttaaagctttttgaataattgaattaatgaataaaatttataaagttttctatcatctactaaacatctgcttgtgaattttaaagaagctcattttctataacattaaaaagaggctgtaaaacatcgtttttactaacaatttcattttatacattgcagttgtccttattgataaaagagaactttgtggtttgatgcataaaagacaattactattca

SEQ ID NO: 37525 - DNA, 562 bp, Homo Sapiens
tcgcgaacgtgtactgggcacggggatgggcacccaggagggatagggactgcaactctgctgcagggagaggagaatggtccccagcgcctgagtctccccttcctacttgggctaagaggaagttagaagtccaacgtgcctggctcggagtacacattcacacaatcttgtgggattaataaacagatgaaaaagttgggaacaagaatttgaatgccacctatataagtctatgggggaggggtacagtttctcccagaatcgtgagaagaataacggcatgttggggaacattcctaattacatctgcaacaatcagtccaggtgccaaagggtgcagagggaaacatcagcaatcattcctttccttaagaagtcaagggagaagaatatgggcagggcagggccctcaagcctttggcctcatgccaagtaaattgttagcccacatcacctgtctggtatgtttgtccatgcggagaggggttgagaggaggtggttggaagtacattggttccactcttttgaccggaaatgggtatcaattctcatcagtct

SEQ ID NO: 37526 - DNA, 565 bp, Homo Sapiens
ctcgcgaacgtgtactcaccatcaccccataccttgttttatatcctgtcaacttctgaaattttaattgttcacttattagagatatgaaactcactttgttgcaccttacatgccacctatattttctggttaaaatatatgtataccaacacacccccactattcttgtttataaatctccacccttccagagtctcgtgacgacagaattcatttcaatgaaattatttataggtggaagaaagtggaaggagacaatatgtatgaacacagtccctaccttcaaggagtttgttttctggttgggaaagacctaagtgtggaggttgacttagaacaagaaacaggatgtacctgcttaagtctaagtaggtgaacttaggtactagatactttggaacaagttaagattgttaagataaaaagagattttgctttgtgggcttgggaaccctgaagatgaaatataggatattgttactatagttgtttcactttcagatatttcaaatattaagattttttgattcagctatgtggagatggattacacgttcgcgag

SEQ ID NO: 37527 - DNA, 576 bp, Homo Sapiens
tcgcgacgtgttatccatgactgagtttagaagtgtgtctataaactccttgaaattgtacgaaaaatgttagagtgtgtatttatttttatcaagaaaggatccatggcttcagtcagattcttataagggtctgtgactccaagaagggtgagaaccactgagtcaacaggtgcttgcacagcatcaaaaagtagcaatagcagaagctaaagttgggtaagactcagaaaatgttttcctaagtcccctgtagaggagtaagagagaagatgctgggggctgatcatggcaagggcttatagctctaaaggacctactccagggaatatggttcaatcgcatataaatcaggagaacttgttcccagtaaccacagggcccctttatattagattctgttaatgatttaatatgctacctctctggggtggcggggaggtgagtgcctaaacccagaggaatgaattcacagtgactgggcctggaggtctcttgaagacttgacaaaatgaggtagaggtggacatgggggggctcctggtcctgtacatgtcaggctgcttgtctgtgtgg

SEQ ID NO: 37528 - DNA, 576 bp, Homo Sapiens
cgaacgtttatctgaagaatgattaggagttagagtagggaaataaggaggctgggaagataacaggtagggcaggagaaggagataagagacacatttgaagcagagaatgacaacactaacaaaggcatagaagtagaggagggtatcataaccaaggtgacaccagagtgagctagtgttgaagaatgggtcaacttcctttaaagttggtctgttttgtcaacatttctgttaaaatatggggccccaattgaagatactaatcaaagtgtgatccatctaatcaacacagagcacaaaaggactattaacccctaggacctatggaaactactctcaatgtggcataaggttgctttaccttttctttttttgcatgtcaaaacattgtcttctcattttaaggacagcatattctgattatttttatttaatttatgatattagcagacagtttatgaatcaaaactgaaattcatgagactgatatatgtttccttatatagttgaatttagctactcatttcaacaaacacaaatttatacctaaaactataggtctcaatgatactg

SEQ ID NO: 37529 - DNA, 524 bp, Homo Sapiens
tcgcgaacgtttatccaaaggaaacacctagtaaagttttgaacacagtaacaaggcaataaatatgttgaaaaaaaggaatctaaattgccttttaaaatcatttatgaatgacggcacagcaattgcaaatgtaacatatcaggctacaataatataaccaagcctccatatattcatttaatcaacaaatacctattgaataccttatagatgccaggctgtgttttaggcactgggcattcagacatatgcaaaacagaaagagttgctgacctcatggtgtttacacatcagtgacaaaggcacagcatatctggacaattacctgaattaatatgtttaacattctctaaagaacagatattttaatgatttttcaaataattgcaccatgaatacaccaattgactaggtatttcacttccttaaggattgctggctctggaaaagaatgcaacaagtcctatcagattatgccttaaaaatgtgccaaatgtttgttgtcagatctggctgtacat

SEQ ID NO: 37530 - DNA, 500 bp, Homo Sapiens
tcgcgaacgtttatcctgaaacagtcctgtgaggtagggtcgcgctttttaaggatgaggactcaagcacagagagggcaacttgcctcaagatcatatagtctaacacgctgtagaccacaactgcaacctaggcagcctgtgcatttaaccgcaacgtgatgccgcctcccggcagtgcccaatgaatgcatgatgacttagccatgtgctcagggtcccttgacaccatgcccctgcacatctcacacctccctgcctctgcacacgatactccctttgtctggaaggtctgagccacctggtccagctgacagacaccctcaccttcaaccctcagttcagacacccatgttgagtgttcccaacagtcaccccccgagtccctcaggcatatgggtttagaattctaaactccacatgctgggcccaagggagcctggacgcagccctgccacagcacttactgcacatgtgtgtcatgtcttgtccctagcctt

SEQ ID NO: 37531 - DNA, 447 bp, Homo Sapiens
tcgcgaacgtgttccacttaattccctccacaagcctgtgaggcacacacttcagtacattttgtagatgaagagactgaggcacagagaggttaagcgatttacccaagtttgcacagttaacacatggtgatgctggaattcaaatccacagtttgatttcagagtctgtgatcttatctccctgcatagggcatgcactaaatgaaggtacaaacgacgtagctatgtatgggaaaacaaaggcacaattacttttcactgaggggatcagtaaaggcttcatggaggaagaagtgctggtcccttctattaccttttgacctaatctctccagatgcctggaaaggatgacaaatagcacatagccacaaaacttgaacagagtaaattcacattgttacatgatactgttaagttagaaatacattcattttgctagtttag

SEQ ID NO: 37532 - DNA, 524 bp, Homo Sapiens
tcgcgaacgtgttcccctcctccctccctgccttcaggaacaggattgaaagcagcattagcctgaagaagtcgttctatttagggagctagagcagagggccagtgattaggcccttatctgcagcggggcatttttgagtggtgtggggcagggctgcagtgtctgtcctgacacccacagaggctggacttttctgtcccctggttgggttagaactgtgaagaaccaatagaagggctgggccagctgaatgaaaaagcccttcattgtgtttcttccacattccagtgtctggtacaattagccaagactcggaaaacaagttggacaaacaagcaggcagccttctactgatggatgacaggatttctggcacagctgagttaagtgcactgactgtaaagacagagtaggaggatctgggaagaagaaggggactttggaatgccattcctggctgtgaggggaaagaatggagcaacaagcaaacggtatttttgaagctgataaaatttgctgtg

SEQ ID NO: 37533 - DNA, 353 bp, Homo Sapiens
cctgagagacgtatgagaccttgctcttcaaaaagaaaaacagaaaagaatcccagactggccccaccccaggcaccctggctgtgctctggctcatcaaagcccagttccctgcagtctggaggcctgcactgggcaaggggcaggggctgtgactgccattggagaggagaggatgactcagacaggggcaggagcaggggaggcgccgtcagctgccttagttcccaacagaagggcaggctggcactgagaagtggctcttagctcccgcctcctggcccttatcctgccctaccggccccctgcccactccatgccaccatgtgcccctcagctcaaccacatccccg

SEQ ID NO: 37534 - DNA, 448 bp, Homo Sapiens
gcgactctaaggatctccccgggagcctgaaccctctgtgaggactgagcaggaaatgggcggaaatggttcagcacagtgagtgctcagtgatgcggttgtcattgataatccatctggaagggattgcttgtcagtttcaggaaaattcaaagaaccactccctcctccaggaagtcttccaggctttaagtcttgggtgggaactcaaactgtgggtgagttgaattggattttcctttccacaaggtgtctgtccccctgtgactctcactgcctgtctctcatcatgggcagggactaggctgaattcctctctgcatcctaggactctgctcagaccctgtcacaaagtcggttttgggagctgttagataaatgaatgaatgaatgtcttgaggactcagcactgagcattcctggacacgataccattgttctgagagcc

SEQ ID NO: 37535 - DNA, 587 bp, Homo Sapiens
agatggaaaactaacttcagtaattatttctagaaatagagcgcaatgctgggtatgtgagcgggtgggaggtaagggtaagctggcagatgaacggcaggagaagaggaacttctagacaacaggagcagcgagggtccatatgtgggcctcctctcagtcttactggatgatgcaatccgctcaaaactgcatgcctgggaagaaaaagctctatcgtaggggaggggaagctgagcttccaacactggaatctcagaaccatctggcttaacttgttgtttacagatgaggaaactaaggcccagagatgtgaggcaaattggttatcaaccaaccaactagcatctagggaggagccatcaatctctaaagacttggcttggggccatttccccccaaaggctatggcttcgttccctgtaagaattgatttgagaatcctccaaagccaagagaatattgtttcctcacactgggctatagaacacagctttggtgtttgagaggagcaagcattagaagtaatgaggaaagtgagtcatgttttatccagaaagtcagctctgactattctagttctctga

SEQ ID NO: 37536 - DNA, 454 bp, Homo Sapiens
gaggatcccggatgactacgggggaaggggaaaaaggaggaaggaggcttgcctatcacctctactggatataattctttgccatcagaacattgattctctttaatttccctctatgtcccctagcatcctagagtctttcaaaaatgattgctgaatggatggacagatggatggatgaaggagggagggtgggattgtgagaaggaaggatgtacggacagatgaacagaaacagatcagtctggaggagacggagtgtgctatcccagaagcctagcagcagagcatcccactggcagcagaggcttctgggaccagatgccaaatctcttcccctgctgttgcatctccccctggctctaagctcctgtgctcctggccagcatcagtctgctctcaaggtggaatgagtagaagctcggggcagctgacacccaggggagttccagct

SEQ ID NO: 37537 - DNA, 364 bp, Homo Sapiens
gtgtcatcccccttcgtccttctgaggcctggaccaagaaggacgaagagaggactccgagcctcatagcctagctagccccacatggctgaagctccctgtggtagggagggataggaggggcagggcagggcagacatggtgtcgctcacaggcacaccgtgctactccggttcggcacctcccactgacggatcagggtccctagggagtgggagatgaaggggagccccggaaggcacccggtcccgtgcattcacttttcacaaggagaaacggggaccagtatggtaagcgtgctcagatttggagcccactgtagggcattaccttcacgaagggggatggacacgggtaccggagc

SEQ ID NO: 37538 - DNA, 390 bp, Homo Sapiens
gtgtcatcccccttcgtcattgagcaggctgggcaggagtgaggagctgatgggagccaggttcgggttctgaggattagggaagagaccatctaaggggacagaatgagggcaggaatggggccccacgtagggaggaggtgagaaccagtggaagggccgaaagggaagggagaacagaatttcttcttatgtctctcccttctttccctctcctgcactcccacctccaactctatctttctgttgagagtgtgactgccaaccaacaggcttagagggctatgaaaagaggagaggggttaggggatgggacgagggatgatggcagaagtatgcagggggctgatgaagtaaaacgagaataaaatcaccaacgaagggggatgg

SEQ ID NO: 37539 - DNA, 425 bp, Homo Sapiens
tggggtgatctagaggatctgtgtcatcccttcgtagagtgggatggatagagatatggagtctgaacaatactttaagtaagagaggcctagagcctaaactgtaggacagggtggatggacactggggagacagaatgggtaggatttagtatctgattaggtatgagggggttggggacccagaggcagaataatttagaatggtttccatattcctggcttagaagagaaacaggtgtgtaggctagaataactggatttggacattcaaccagctgtggatcatacaggtagagatatccatcaggaatctgcagctcagcaaagaggtctgggctgaaaataaaactcgcttaaattatgcacataaaagtggtggtcacagaaagcaggtagaagaagaagacgaagggggatggaca

SEQ ID NO: 37540 - DNA, 365 bp, Homo Sapiens
gatcccgtgtcatcccccttgtggggaggattgctccagcacggggaagggtatgctgtggaaggaggcagatctcccccagctgtttcccagctctgtttgaaggggaagggagagggataaatgactgggtgattgtggcacctacagccagcatctttcctctccacattctaggtcacaggcccacacctctctccctagtcaaagagagcctctgtgagggggttgaagggtgtcttggatctgtgggcaggacttgggatctgggcacagagaggttggggaattaacaaaggtcacacagccaggcaaaactagggaatgtggggagtcattctagacaggacgaagggggatggaca

SEQ ID NO: 37541 - DNA, 532 bp, Homo Sapiens
agcatagaggatccgtgtcatcccccttcgtcatggaggtcactgtagccagagtcagggtgtggggattggaaggagcgagactggcgctggaagcaggggctagaatcacatgggaccttgtaaatcagggtggggagtatcaataactgtgacagttgacaatagctgttggcaagatttgagttaagtagattgaaccagtgtaactgagacagaggtggtgtgaagcggccacattctggctctgttttgaggtagaggtgatgttatgtggacatgagaggaggagaggagtcagggatgacactggggcatttgtcctgagcagctgtgtcctggaggagcccaaccgggggatgcaggagcaagaggtgggttttggccagtgtgtcggagaggcccgtgagcctcccagaggtagatgctgagccagcagctcgggccatgccggatctggagctcagggagaggctgagtgaggaggcatcagcacgtggatggaattttaggtcacgaagggggatggaca

SEQ ID NO: 37542 - DNA, 431 bp, Homo Sapiens
cccccttcgtctaaaatataatgtgggatgggatcaagaattaaatctttgaaaggcacttcagccctcattttgtccaacctgtatatggagctaggatctctttctgcagtattcacaagtaccaacagtcccatctttgtctgcaagcacctttccactgattcacaggtctgttcttttgttccttattttttctttatatcaaacttaaattctctatcctccaattctcaaaccccaatcttagttatgcatcatgaggcttttggagaaaacctgcctaatggtctatctcccttcctgtgtattcaacctccccttttcagctggcattttgcatgagcattgaatcatggtcaggtcttgcagcttgctggggaagctccttacaccccttgtcctttcttcacctctcaccttctctctcc

SEQ ID NO: 37543 - DNA, 354 bp, Homo Sapiens
tctatgcatccaactttcaaattttcagttcacaggagagagaatctgattggcctggttggggtcctgtgcccacttctggctgtcacctgtggctttcttccctcagttgtagaccacactctggatacctgggacccctgaaatctcctgcccagacaaccccaagcttctcaggacttttggtgggctgcttccctgttctgcctgtgcagtgcaggccttgtcacaatgtctgaatgcttaggccagagacgtgggggttaggtgagaaaggatgagctgggtagctacactcaagtgctgagccaccagtattgtgggacagagccaggcatgggaagagaagtgggc

SEQ ID NO: 37544 - DNA, 409 bp, Homo Sapiens
ctagaggatcgcgtgtcatcccccttcgtctgggagatatatatggccacatcctcaaagaccatacaatcctgccaaaattatgacacttcagtctatgaacaacttcttattctgtgtttccttagatctgtatttatctacttaaaatctaagaattggagggccaaactaacagccaatgtttttacatttcccttgcgatccagatcccatatgctgaaccactatctaatgctcatacatgattatttctcctgtcctaatcaacacaagccctgtcaccacacaataagggataatctcttagccctaaggctgccagacttatgcaaaccactgagttttaagctcctcatcccaccctgcatgccttgcctgccaaaaacccacgaagggggactggaca

SEQ ID NO: 37545 - DNA, 370 bp, Homo Sapiens
cgtgtatcccagtctacctcccccttcttgagttttggttcatagattttcgggttagatcctgtatttttccacagctctaaattttgggagtttccccgggttggggcctgacctttcttctttatatccatatttaatccctgtgttctcatctagttccagagctttaacatcctgtattagtgaaggactctaacactgaacctccatcactgacctctcttctgaagtccaggcttatgagtcatcagaattcgtatttgacattttcacttacatatccacttggcatctcactcttaacatgtcaaaacagaaatgattcaccttcctttagcacctgcccactgctcccccaccccacccg

SEQ ID NO: 37546 - DNA, 385 bp, Homo Sapiens
atgcactgcttcggatggagcaggagctttaggtcattctgctggtggtgctggctcagaccaggcctgccgctgtcccccggcgcttccctgggtcctcagcctgtgcagatgtggtggccgtgctgtcacagcattagttcaagtcagtcttttgataggtaccactcggatggccagcctgccttggcagctttattccaggcgcgctcccaaatcctcaggttattttcactggtgaatcttgatactgcatgacagcggggtcggagatttaagcacaggatttgattgatgaccctttcctcttctagctaaaatagatttccagggagccagaggctccttcctggaagtcagggggcttccagtagcaggttattga

SEQ ID NO: 37547 - DNA, 368 bp, Homo Sapiens
tcgagcgaggtgatctggggatctacagcaaaagagcggaactctggcggcaagaagctctcacatttctggggagagaagacatggggtaggccaccaggggccccatcaccatgctgaagagtgaggtgcagagtggtagaaggcaaagtcagagaggtgccaggggccagatcaaggcaggtgttctggaccacagggtccagtgaggaggaggctactgcaagagttcaggcccccaatccttcttctatatcccttcaactatggttgccagaatcaccgtgtccagtctggctcctgttaaatcagtcctctatggtgctgtaaccaatctaacacatctacctacaacactcccctgcttc

SEQ ID NO: 37548 - DNA, 355 bp, Homo Sapiens
gtgcactgcttcggactgtgttcggacgtttcttccttcggtgggttcgtggtctcgccggctcaggagtgaagctgcagacgttcgtggtgagtgttacacgctcttaaggcgacgcgtctggagattgttcctttcctccctggtgggctcgctggtcctgtatggcttcaagacgcgaagccactatcactgtggttgagagcactcacagacacacgtgggcttcttgacgactgtcttcctgacaaggcatgacgccttgaccacctggactgccgacccacgccctgtgcggcatccgacacgcacgttgccggggtacccgacgctcgaacttcgtacctcatggtca

SEQ ID NO: 37549 - DNA, 375 bp, Homo Sapiens
actctagacggatccccttgcactgttcggatggggacagtgctctcatggccacagcagtcactcgggactgcgctgccacccagtgctggcttctgctctgtggtccacgttccatttcttgccgtggtcccagcagcgtcgctgtgggtctggcctgggttgcgtgtgtttcgtatgtgggccgtgctccctgcttggttcccttttcctggaacgtgtcactgcctccctgtctcgctccgtggacatttctgggaggtcaggccgtggccacctggccccctgttcaggtctgaggctctcacctgcttaggttcgggaagctcaggagagaggccatgccctcctcaggacatcccatccgaagcagtg

SEQ ID NO: 37550 - DNA, 428 bp, Homo Sapiens
attacttcctggagaagccaaagggcgctcccctaagaggcctggatgtgaaggtagagtgagacgccctgggctctgggtgcaaaggtcggcgcctgccgctttcaacactcaggaggcgcgtatcagccccgctggcccccggccgcagactcggagcgctgagctcccaccggttcccatcacccgactcacttcccaggcatgattagcacccgggaagctatcagccactacacgaaggaggcgccaagcccaaaactcctccccagctaacggcggggtctgtgcagagcccgcgggaggggcacacattgaaccctggcacgcagcctcaggcaggggcaggctggaaatgaccctgccctgcagctgggccaatcagcctagacacctgccccctaacgctataaactgggggtacccga

SEQ ID NO: 37551 - DNA, 499 bp, Homo Sapiens
gtctgcaggctatgctgcacaagagaactgcgtctggtgtaagacggcgagtacttggcgggaggcagagatggagggagggagatcaggacctccaggacctggtgatcaagtggctgtgaggtggctctggcctgggcaggtggggaagaggctccggataggggaagggcacacgcatgactgctcaccgtgccatttgtaccaacagtccttccacctgagtttggtcatttgcatgtgaaagggggtatttcattcggcctgcagtctggctggggacttgacttaggtttttgcagaccggaaggcactaatgacggaccaggtctagatatctttcctacccaccgtctctaaagtctacgtcctaggccaggtggtcctaggtgtggctctgcaggcgccaccctgacatagctaggagacgcatcctaggcgtggaagtgcatcagagacctgcatacctgccttagccccccctggagctgtagactgc

SEQ ID NO: 37552 - DNA, 586 bp, Homo Sapiens
ggggacagcttgtctccttgccatctctctgttttacccatattccccctcctctggagttcagactcctgctgtcctcctcccggggacccatcacagtagtatctcaggttgtcctgagctgctgcttttggggcaaggctgggaagttgggaaagggagtgatggggatgtgggcagcacctctggtttcttgactgtccctgcaactcttctgggctggatcaactttgtgggacccactaagacacttgggagcatgttggcattagcagcagatatggatgttgtcagtggaaacagatagaagcctgtcactggggagagatgtttagctggctttggatgctgtgagttctcccccgaccccctgcaccctggcacttgggattcacgcattgaatgagaaaggagtggaccagattccctgttcagctcctctctctttttccaccctgccaccccatttccctcaaacttccctgggccagggaaggggcctgatgatctctgagcctgctggaggatacctggatagcgcatgccaaagtcctgcagtgagggcactggggcttatgttgggggc

SEQ ID NO: 37553 - DNA, 415 bp, Homo Sapiens
caacccagtggatggggggcactctaatagttatactcagtttacagatgacacaactgaggcacagacagatgcgttaatttcttcaaggttctgtagctgaacagtggaggagggagggtttaagaggagctgcacccgctctgcaatactgcctctcacgagggagtcctcttcattcatgacagcatagggccctcgtcttcctggtaagggcttccttcttgggtcagtgccaggatttctaagggtcatgtttagcaggagcctattctacaaacagccaggagcagggaatgactctgtgatgaagcggagacactacagcctcttgatgcatttatttcctggttgggttagaagcgtagctgcccaagggagcatttcaggagaggcctggcttcctgcttctgcc

SEQ ID NO: 37554 - DNA, 441 bp, Homo Sapiens
cggagccttaaccctggggcggcaacaatagtcagttccagatttggatctttatgctgagtgtaagcaggagtcacggaagggtttaagcaggagagtgctatgaggcagtctattttggaaagatccctctgactggggcagagtggatgcgggaggctgggctgtggttgatcacagaggtgggaggagattcgaggctggagactccagtaaatgacaggctgtggtgatggattagctatgggtggcggcttgggagggagagggaggtgccaaggatgagtccaaggttcttgactcttaaaactgccagtgcaccccacagtggaaacattgggagaacactgagtttgcttgtagttggaagttggctgaagtgtatctgatgttcttgaaagaccatattgatgtttcagtgtcaaagagagtgcagaaggc

SEQ ID NO: 37555 - DNA, 501 bp, Homo Sapiens
cgggagccttaaccctgatagccttctatgtatatttgtacaaataacaaattcaagatttgttttcctcttctctaaaaaactttgtttactcttttgacatgatacatttcctttttgttatagaaatggttcatagtgctgtaccttaccctactaaaactgcaaatcacctggctagctcttgtcatacagcaaacacatattattgttactattagttagtcttctcattctttgataaggacccaacccaagaaaaggctaaatatagtccattatcagtaagaggcaaacaggaatcaaggttcaagaacttctgactcttagttctatgaatacgcatctcacaaaattaaaagcatttttcaatattgttaccatgttgacaccgttaagtttgtgacaacacatttacttcacacagtccactctaagttaattccaatattacttaagaaactttaaaaaatgctttgtttcacaaaagtcttcaacagg

SEQ ID NO: 37556 - DNA, 376 bp, Homo Sapiens
tagaggacgcccgggagccttaccctactcaagcttgaattctgtgaagctttccctggcctctccaataattaggagctctgactcctttactttactcaccgcccctgaattgagcaagttatatttaatagtgtatacaacgaattgcagtgaatgttaacacgttcaccttttattgctaacagcaatgctacccgtgcttccaggctctatccaaactcactgcttccagataatagctggctggtccctagggagaattctttaactctcagcatttgatgctcaattcagtacctcctcatattcagcactgtagcttacaagtgctctccgggttcccttcctctcctccccgacagactaaactgct

SEQ ID NO: 37557 - DNA, 551 bp, Homo Sapiens
cgggagccttaccctatgtggactaaaaaaggagagtctcctttccctttgcttaggcctgattcatgcaactctgaacactcttctggctcaaatactcccttggtcaaaagatgagccaaagctcatgcccaagatgaggggatgggaacagactctgctcccgacctgggctgttccactctcactcaagagcgtgccaaagggaccatcacaaaaaagcgggtccagatcagctcaagaagaagtggccctggcttaaatatggatgactcaatcaccagaaatagatcactcctgagagtctaccaattaggttaccttccacatggtttctccaaaccctgagtataatcctttgccaaagtaacccatacactggatgcagagaactaaggcccaagagatcctgctcccagctaaggaagaatcaccttcaaaatgacttccccccttaacactaggcgcttcgaacaggattcatgcagggaaaagtaccccttctgggggaagactgcttgcgcagcctgcggaaagcataacaggctgac

SEQ ID NO: 37558 - DNA, 395 bp, Homo Sapiens
agccttacctcattccttacgagtcacaaaggactccaccaagaggcggattttgatcaatgggagttttacttggcacaagaaaggaagacactgggcgtattctcccaagtagtggtgtcccccagagaaagagacaggaggttttataaggtgatggagaaaggagagggtgcatgactgcatgtagaggaggggtcccagtgaggtcatgatgcttgccacataggctgcataggttgcataggttacagtcatgaagctatagcttctcccgggttgaagactttagcatggtaatgaggagagttaacttgggttcatctacaagtaacctggggtcacttaggagctgatttaaacaaacagggtgacctcattccgcccagggttaa

SEQ ID NO: 37559 - DNA, 476 bp, Homo Sapiens
aagccttaccctgcttcagcagtatgcagccttgcccagtgggaaaccagacttctaataaactcaggctggttattccaaggtcatgtctttggcccttctgctaaagaataactcctttacaatctaaagactagagtggaagcagttccaaccctcagcagattcagctcactactaaactaaaatcaacacatttggatttttctctaaggtaaacctgaactggggggaaaagagcatagagaagtccctgtcaccctctttattgattatcttttctaaccctaaaccttgccttattaccttttgtggtcttttattgcttgtttaaataaaacagaggcatttgacaaaatgaatattaaatgtagttacaatcaagcaattctgcagagtaataaacatctggggttttttttagagcttaaagagaatgtagtaatgtcaggtgcacgtgtttctgactgtcatgg

SEQ ID NO: 37560 - DNA, 358 bp, Homo Sapiens
gtctattgcaggaatagaagccaggagcaataagaatggtctacccccacacctctgacaggaaacccaatttggccagagtgcccctctagctcagggaaggcaatttcctcttcagcagattcctataggggagcattgaatgctgtcacaggtcagccaatggggcttatctgggtctactctccatttccaccttcaattagtttagttggaaaaataacgtacccacgtacttggagaatctgaggaggatggaagatctttttcttgatatttgcaacccagtcacgccttgggcagatgtacaaaatttcctttgcattttattgacctcagaggagcagagaatggtcct

SEQ ID NO: 37561 - DNA, 410 bp, Homo Sapiens
ctccgggagccttacctccgggagctgtgtggctgtgaacacagatgcagcaggagaagggaaacatgttggggctagaaagggagggttaggaggtagactttaactggtgggcagcagtgagccaagcgaggcactcatttgctaggtggctcagggcatgacacttttcactggagcccgagtttcccccaaggcaaaatgaataagctgggggtggaaaaggccctaagttgatagaattttactttccctgtttatgcggctgccacagagtgcacagcagctcctgaaagacgtggctcagcaccgccgctagcagcttgggcaagagttagctgcagcccagggctggtctgggcctctcttggggggcagggacagcggagggctacaagaaggccagccct

SEQ ID NO: 37562 - DNA, 498 bp, Homo Sapiens
ctatccaggacttacgggagccttaccctctgtctactatgtatactatgaggtactctctgttgtttaggtgatggactggacaatggagtgtctagtgccctgagctacctgttcatggatgtgggggtacacttctgagtggagctgggtccccttgcttgcccatgaaaacccaaatggtgactgtaggtgccaaccctgacaagggtggctgtgcggagctcctggtgaaatttactgaggtgtgtgtaaggttcgagggggctgcactggcttcacgtcttaggcagaaatgtgatgtcttccctctcaaactcctgtcctagcactcataactgcctgcttagatgcacactgtagtttatttccagacatcaatgtggctgagagccatgggaaatgcctatcttgtgactctttgtgggagtggttttgaagaagaacctcctcattcggcccagtaaagatagccttattggttccctattctccggt

SEQ ID NO: 37563 - DNA, 360 bp, Homo Sapiens
cctatcttgcagagcccaactagggagcaggaacagagagctgcccgcggcaccatctgttactgccagcatctatattgggccccgccggttacatctgttgagaagaacagtgtatttaatgagttgttggaacgcaatgtatagtctcccccatcatctctgttagccattacgaggctgctgggctcacgtgggtgtatctatgtgtgcttcctctcaggcctcatctgtctcacttggaaatcagtcactgggagttagttgcagtcagcagggacccaaggcatttcccagtgacatcaattcgtcttctcttgcagacattcaggacacacttaaaattctgatgcgttccag

SEQ ID NO: 37564 - DNA, 377 bp, Homo Sapiens
cgcgtagctgatagcctcctgccttcccacttcgcaatcctgcactgctgtcctcactgatgcacctgcccttttctttccgtcctttatgtggcacacccttaagggagacatcttcctgtctgtgtattgcaccctcttaaaactacattcctttcccttcagcattggcatctctgtccttgtgtattacctgggatgactattcagttaacaaatgctttcttcctaggctgtgagccccagtttgttggatgattggatggaggctatcagcgcgttggaggctatcagcgcgttaggaggctatcagcgcgttaggaggctatcagcgcgttaggaggctatcagcgcgttaggaggctatcagcgcgtta

SEQ ID NO: 37565 - DNA, 430 bp, Homo Sapiens
gtgcatacccactgaatatccgttaaatgctagactgaggatttaacttcatttgttgggagttaacagaaatagatcacttgtgccatgctaatttaagaaaaagatattgtatgcttttgacatatttagggaggtgttgtgaacccaccacctggagagagatatatggccagcagtttgaaatgaaattcatttcatagcagaatttgaggacagaggaaaagatttaggaatcacttgcatgactggtgagggtgaaaatggtgattatggatgcgatgactgagggagggtgaataggcaaaggagaggaagtgtatcaggcagaaacttagaacaccaccaacatttttaagattaaatgagcaagaagagagcagagagatgtagtcaaagaaagaggcagtaggtatgaaacaacagtgca

SEQ ID NO: 37566 - DNA, 483 bp, Homo Sapiens
ttcactgatgtcatacccttatgtgtgatcgtggcactacatttggcctgtagtgggtgtcagtgaacccaaaatagtgcagtaatttaatggacatttttggggtgggacttcaagtagaccttggtgggtattgtgtccttgtttttctgttcctttgcttaccttgcacagtgccagacacactggcgcttagcctttgagtgaatgactgtcttcatgcgcccttagcacagggaattgaaataatggttgaatctagtaaagcattaagtttgtattttccttctactgctgctgatttttccaacagccattttatatgctaataaaaactttactctgggtacagttaagtaaacaaaccttttgtttgagaactgtcagcctaaaatatatttgctaatttctcatttgcatagtttatacatgttagtgcacctctctaatacccataaatgtgtgtaaggattggatgaggag

SEQ ID NO: 37567 - DNA, 380 bp, Homo Sapiens
tgatctagaggatctctcactgttgttcatacctgcactgttgttcatacctgcactgttgtacataccctcctgacctcagtctcccagagtaacgtgggattacatgtcatgcaccagcacacccggctaattatgtattatttaagtagagacaggggtttctccaatgttggtcagtgctggtcttagaactccctgacctcatggtgatcttgcctgtctcgagcctcccaaatgtgcttggtgattacagtgcatgacgccacctgcgccggagcttcatttgattttttaacttcaatgtcaccaaaggtcagtgaaactggagttatggtactgacaaacatgtgcaggcgtaccgcagctcagaattctgt

SEQ ID NO: 37568 - DNA, 504 bp, Homo Sapiens
tgatctagaggatccctgcactgtgttcatacccgaggtctcactcctgcccggttttcatgtggccaccttccctccatgcttgtctgtccctgtgtctgaatttcccctttgtgtgacaccaggcttcttgggttaggacccagactcatgacttcatttcaactccattccctctataaataccctgtctctaaatgaggccacatctacggtactaggggtcaggcatgaacgtatctttttaggaaaaatcaattcattcccaatacctgagaactcgtcttttgcatccttgtaatagtattccccttttatttgaggagtgagagtgggtttccttgcttgtaaccggtgggtctccaccacagtggtttgtgggtgctcacttccatgtgagtgaggagccggggggccctggggtgtgctcccacgggctgtgtctgtccgcaccgcacaacaggtgacggccaaagctgtgggcagaaagtagagaactggatg

SEQ ID NO: 37569 - DNA, 485 bp, Homo Sapiens
agttgtcataccgtgcacggtgagtccctttcagagtgtacaaaggccatgactggatgatgtgtgtagcaagcctccctagggtaagaatctcctattggtgtatccaagctatggcccatggaaaactcttcatctttcgatagttcagaagaacaaatgtttaacagaagtgaacctctttatcactctgaagtttctgcttctcatctatgacgtgacctggtgcctggtaggaggacttattgtgagctatttgcaggactaatattcaggttcactcagattcagtagtactggtttttgatatattacaatacttatgtactacgtggcacgtggtataagctacagctgtggccctggacacagctgctcatcagaccatgagcagcagatagcaggggcttgtgtagcatccatggaaggctccaggggagctaagcactgcccgctttttgatatgaacaacagtgcagggtacc

SEQ ID NO: 37570 - DNA, 392 bp, Homo Sapiens
tcgggggaattgtgttcccgttctccttaagaagctgctaccaatgttctttccctcttctgcagtcagctacccagcctcacctgtgtgatgggacatttgattttgaattgggtttcttttttaacatagtcaagttagctgacacagtgcagctactttgattgaaataggcccctgttgtttggatttcactttttgtgtggccttcactaggaccccaactggtccctaaccagatgtcaccgtcagcacacaaatcatgaccaccctccccagacccaaggcggcctcgctgggatgcaggcattccttccggaactcgccttgggccgcccattctcactcctgctctttcttctgtccatgaagtccccccgatacagcgacca

SEQ ID NO: 37571 - DNA, 538 bp, Homo Sapiens
tctagaggatccctgaccagaaattccaccatttataattccttggtggtgagagatcatatcttcccactaggctcccttttccaataataataacaataatagcaacatgtgcatgtccagggtgtacagttaacccaggactttcccatcccccaccctcataacagctcggtaaggcaggtactgttttagctattttggacgggaaaccaggactcagaggggtggtgggacttgcccagggtcacagagagcagtaggcgactagactcaggtccaggtctgactgcagagtcctggtctcaatcttggtccccctaggcaatggcagcttgaggtggtggtgcctttgggttcctggaggagggagccatcctcggccgcaggcctgcaaggggcccctcctgggttggggcagggaccagttgtatcccaggttcctcgccttttcctctacagccagacatctctccagtctcaaacctggcggaagtttgacaccacagggatctgattcctgctgagggcctcagat

SEQ ID NO: 37572 - DNA, 356 bp, Homo Sapiens
tgtggcgttctagaggatccctggtcgcgtatcgggggctggtgttgtaaaaggaacttaacaggagtgtgggtgtgcagttctccctctgcccaaggttaagtaatagtaacatcctgtgtaaagagaatggaatgtggttttctgctaaacttcaatgttttagggctgtatattagatgtgtttaatcttgggccaatttaaccagtagcagactaataaaataacagatttgggctggctgccagaacaaatgttgacttacccttataatgttgactaaaacgagtaacttggaaagttatggcagagtgaaaccttagccagaaatacagcgtctgaaacagtggtttgg

SEQ ID NO: 37573 - DNA, 518 bp, Homo Sapiens
agcatcctgtgaccgagagggacaccacggctggagatggtgggatggaggatcccccacagcatcctcgatgctcagaacatctcattttgcacaaaaaaagctccaaattctcttgagggctgaagccattcagagttggggtttctgtctctcaggccaaaagcatcctgtcggagcagctgagagcacagcgggaggggaggggcaggagggaacagccccgccacggcgacaggggattctctgactccaagagggcctgcagacaccactacccacccccagccctgaactgtcccctgccaaggggccagaaattcctgggagggggaccacagggggcctcgctcatgagaacagtgactgtggtcaggccacagctcacaagtcagcaactctgctcagccgccgcggtggtcccctcttgatggcttccagaaaaagcgttccaccttctgtcatcagtgtcctgaaatccaagaatattctccaaacagcaactgcagcaaaagcta

SEQ ID NO: 37574 - DNA, 491 bp, Homo Sapiens
taggggtagttgtgatgtgcgggcgatggtgagggctagaggtgtctcttagcactggggaaccaagcgaggctggataaatgcaggagaattttatcaacaaagttgtccttttaatgaggtcactctgattattacaaaaaacaattttacagtcgggaaaactgaggcttgagctaaggattgttccgaggtcctgtggaatcacacagctagaaggcaagtggtctcccatccgcctgaacctctctgtaatctctaagcaggtgaagggctgttatccaggtctatttgcacacctctggtgatgggaaactcacagtgttaacagttcttcctataggacccaattaacagaggcttctcaaatgggacccagctcttccctctagctctgcctggacaccagctgctaccctgccagagtcctattaggaggagcccgctgtgggcggggatgaagtaggaagagatatgagctgtgacggagg

SEQ ID NO: 37575 - DNA, 425 bp, Homo Sapiens
cattcatacacaccagccacatagtaatgagtaataagtccccaattcatacctgctgactgttgtttctatgatctaatatttttccacggacccgcgaaggaacatctgtataagtctctctcctaattgcctccccatggaatcctaaatactacagctgtacacagatataccacactgtacatctgttcaggaactgggatcttcgagagaggccacaaatcactgtaatgcctaagtatttacacccttctaccaataactaattttcactcccttgtcgcgagatatcgccctcactgagaatgcatgttctgatgtatggaaagaaacccagaaaaatgaattccaaatttggtagctgtggggagctgatgaatggggagaaagggcaacggaactcttaacgaccgtatccgcag

SEQ ID NO: 37576 - DNA, 360 bp, Homo Sapiens
gctcatttatagttgtgcccatctcactatacaacactgctatttttatactaagaaatacaagacgtctagactaacctgcagcagaagtacactggagcttgcttttcctccagtgctgtcaccctcgtattcattcattcctacttcttggctatgtgtccttccttcaactctctggtctctgtgcactgtgtatgctgctttcctatggtgctacaccaaccccttttccccagcagccccatcaccatgattgtccactagttctttggcagttggtccaaatatttcatttttctgggaagcctttcttagttcccctgttactccccgctgtctgtactacttaagtctgta

SEQ ID NO: 37577 - DNA, 399 bp, Homo Sapiens
atataataggagggttagctcgtacataggtgccacgtcagagtagaaagaaccaggtgggatgaacagtgctggattggtgcataacccaaccaattagaaatgggggtggaattgatcacagccaattagagcagaagatggaattagactgatgacacactgtccagctactcagcgaagacctgggtgaattagcatggcacttcgcagctgtctttagccagtcaggagaaagaagtggaggggccacgtgtatgtctcccagtgtgcggtacaccaggtgttttcaaggtcttttcaaggacatttagcctttccacctctgtcccctcttatttgtcccctcctgtccagtgctgcctcttgcagtgctggatatctggctgtgtggtctga

SEQ ID NO: 37578 - DNA, 397 bp, Homo Sapiens
gtaaactaaggtactgatactgggtgatgtctagggtacccatcaagctggtcgttgatgcacaggtgcagggatagccagaaagcaggagccgatgcagggaggccactggggacagcccaggctgatgcttgaggccccatgtgtctccaccacctacaaccctaagcaagcctcagctttcccatctggaaatcaggggtcacagcagtgcctggcacagtagcagcggctgactccatcacagggtggtgtagcctgtgggtacttggcactctctgaggggcaggagctggggggtgaaaggaccctagagcatatgcaacaagagggcagccctggggacacctggggacagaaccctccaaaggtgtcgagtttgggaagagactagaga

SEQ ID NO: 37579 - DNA, 381 bp, Homo Sapiens
gtactgactacgcgcgctggagggtggtgggcgggtgtgtaaaggcccaaattccatcattaggtgggataactcctgaaatcttacatactgcttttaattagatgttcttttcacatattatacaagaacatgtacacaacaatcacccagctgtattgcttgagactagagaaacaaatttaccaaaaatctaagtatctttaaaatgagctcaatataacttagtgacctcacaaaatttcagaagtagtaatgccaaaactcgctaactttcatctttagtcacatgcaaagagaaaaaaaccagacggacttctttttcatagttaatagcagaaattattatagcactctgctgtgccaacatttgagtctcaa

SEQ ID NO: 37580 - DNA, 394 bp, Homo Sapiens
accccgtagccgctagaggccccgctagaggcccaaactgagacttgaaagacaggaagaccacgagatcgaggagacaggttagccaaggtgataaaacgaaactgggatagacagcagtgtccagcacatggcgggttcttcatgaacatctgtaaaatgagtaaatacaaacgtgcctaaaccaagtaaatgaagagaccatccaggttatcctgccctgtctaaaatccagtcactgccctgggagtcctgccttgcatggtatcatcgcccctgtttcagcacagggagttcctgtccctagaaaaaccctgaccctggataacccagagacagctgaaatacagaaacaccaaacatcttcttgcccataattaatggcctctagcgg

SEQ ID NO: 37581 - DNA, 350 bp, Homo Sapiens
ttggacatcctcctgctctcttcactgggacattctacttcttgtgtcaaccacaggactccaagtcattttaggcagtgattttagtcatttatttatgtattcattgaccatttctcctcctggctcctgaagccctggagggtagctgttcctttccaactccagaacttggctggtacctgctggtgagtctgtgcctatcaaatgcggaatgaacgaagtgtttagaagtgaggatctcctgagcagcttcttcctgtgactgagatggtggatgaagggctcttctgggacctctgcttttatttccatgcttgctaaagcagccagcacatggctgtactcaa

SEQ ID NO: 37582 - DNA, 464 bp, Homo Sapiens
agcctgtagaaggctctcacagttcctttgtggtctctgacaggctctgcaaaccccctgctgactctcagctaaagagcttgcctcctgcttcacagagaaaatagatgtatacatggcattgctgtctaacccagagaagctcatcaaagcaaaaagctgagagtttctctcaattcctttctctccttcagccagcttcgatcatccaccaggtcctatcccattgtgctacttgggtctctctttagtgggtatgcctctctccatccctgtagctactatcttagagcaaaccactcttatttttcttctgcgtaattgtggcattctcctgaatgttcttttctgtctcgcttgctccccaatttattctctatactgcattctcaaggatattttaaaaatacaaaatgctactttcttgcttgaaactcttcagtgactccccaggtgcattatca

SEQ ID NO: 37583 - DNA, 469 bp, Homo Sapiens
gtatcctaagcgatagaaagggacccgagcgtttgcaccatcactggtcctattctggggagtccttccccaagttacatagggattgacaggctagagctattgtccgctattcagtagcaggtcacaataccttcaatcctgctctaatcagaggcatctctgccataacttcaggaggaattgagggagagggggcagcaggagccctctgtgtactggggaaggacagaattcctggcttatactccctaaagacaggactacactcagatgtggatgaagggcaggaattctaacccctgcccctcaacacacacatccctgctacattccctctttctcactagaaatttgagatgaagggtcctaatcacatcttctgcttgaaacagcagagatttccggctccacccatagtcaatagaaagaaaggggcaaggggactgtgaagtcctgaatgcccagc

SEQ ID NO: 37584 - DNA, 358 bp, Homo Sapiens
gtaggaggaattaatactaggacgataggcatgaaactgtgataatgctccacagatttcagagctattgaccagtagtatacccccggtcgtgtacccgcgatcaaatgtgcttatggtttaaacgtccgagactcgcgatctgtgtataagcctaaggtgttgggacagctcactgactgcaagacgtctctgtgatgtaattcttatacgaatgggggcctacaatcgcggagatcactactctgattgtcaacgtcaagcgagtcgcaaggtcgcccttgcgtactatgaatatactgggggaaagtattgtaagagttcgacacaattcagtcctgcctgttaaatcagagtc

SEQ ID NO: 37585 - DNA, 580 bp, Homo Sapiens
ctcaacgctttatacattcgaaagcgaggacaacactcatacttggaaagcgagggcaacactcatacttggaaatcaaggacaacactcatacttgtgaaaccgaggacaacactcatacttggaaaccgaggacaacactcatacttggcaactgaggacaacactcatacttggaaaccgaggacaacactcatacttggcaactgaggacaatattcatacttggaaagcgaggacaacactcatacttggaaagcgaggacaacactcatacttggaaatcgaggacaacactcatacttggaaatcgaggacaacactcatacttggcaactgaggacaacactcatacttggaaaccgaggacaacactcatacttggcaaccgaggacaacactcatacttggaaaccgaggacaacactcatacttggaagtatagggcgttgaggaagtataaagcgttgagctcaaggatttatagttcagctgcgagcagatccagctaatttggatagtgtaagtagctatggggttcaccgtgtaagccaggatggtctcgatctgctgagcttgt

SEQ ID NO: 37586 - DNA, 471 bp, Homo Sapiens
gcaatgacatcacaagttgtgtaaggattgtgtatgtattaaaactgaagatcacaaacttttgagagcacagatctatgccttcacttgcataagcttaccgagtgcctttatgtggatttattggcatgtgttcataggaaagaagtggtcacaattttaatgcataatgtgatgtgtcagtaagtgtatatttggattatttatttgttaaacaaatgtgtattgggtacctcctttgcctggcacaccattagaaactaggaaactgaaaatcagtatgacacttctgtgccctcatgaaggttatgacctgatgcagaagaagtaaaccaaccattaggagacagtacaacaaccagtgtaatagaaataggcccgggaaataggaagtttccttcagatgaaatgggatctacagagacaactacattgtctgggagaaacctggcgggaagggggcattcttgg

SEQ ID NO: 37587 - DNA, 450 bp, Homo Sapiens
ctcaacgctttatacttcacgtacatcagataagcaagacttaccaactgtaaaagaagcaaatttcccacactgatttaaataccttcacctatgatcaagacctgataaatgcatagttcaaatttctgtaagccatacatgtacaaattttgcttctcgaaatgattgttaactccccaaaaggaacattatccattttacatttgatttcattttctcatggcactctgcatagtgcctttaacacattccccttctgagacaacaaaaaagattaaacttatctgggcaataaacaaggataccaatttatctacatctccttgctaaaacagaattatcaaaaagaaaattaaaacaataatctaagacatagatcccaaattttaagatcagactttaaatgacagtgaaacaaccagcaacctcatgacaaagtttatttaa

SEQ ID NO: 37588 - DNA, 491 bp, Homo Sapiens
ctcaactgctttattacttcacacatttccaaatgtatggagagtatcttgaagagggaatgtgtgagggatggaagcggaagagaaagtagagacttttaattttctgtcatgtatttctatttgaattttttttgaaaataagtgagagtacctgagaagtctgtgtaagtggccaagagcactccgttggaggaataggcagcagaagagtaacctgacaaagagcccgagcaggagctgccagaagagggggattgtggagccagcaggaggaagagtgaggagtagtggagacggacttgctgatgataccttcgagtctgctgtgaatggaaaggagatagggcagggttggtccgggtctgtctcttgtatgatggtaactgtgagaatatttgaaggccaataggcaggtgctagtatacatgttagagatttaaggtattttaggagggcaggagttgtgaaccaagggaagtataaagcgt

SEQ ID NO: 37589 - DNA, 677 bp, Homo Sapiens
ctcaaggctttatacttcattaacagcagtcatgcctaagtaaactatcaaaaacattagtgacagcagcagtatagggcttacacaccagtgtataaatctatcagcaaggcccaacttaccaactagtttactcccaaacaattcacttatttgggtggagagagagccttacagataaaaatcatttctacacatcaaaactaattaaaatctaaatgaaataagtcctgccaacacctacaggtttatttcttaaaatcttaggcattaaaaagtctgtaattctgacaacccacattaattttcagaggaggaaggaacgtagacaactattacataaaccaaaattaaggtatctcaatttttcaaaagaggtagaaaagtatttataggggaaaaaaagctttattgtaaagttagataaacttaggtattaaatgggcaatgaataagaaacatacatagcccagtatcgaacacagttcacacagttacccttggcataacttactgggttctgtgataagggtctaaaatacttctagattaaatttaatttttactttatctttagagggctaaatgctggtccactggcatcaaaatgagtgcatggtttggaagtataacgcgtggggggtacgagctcgatcgtatcgtagtgggagttaaaa

SEQ ID NO: 37590 - DNA, 592 bp, Homo Sapiens
tcaacgctttatacttccatcaaacaaaacaaaacaaacccccaccccacaaaacacagagcacaaacggctcagtttgcatcatgctattaagcatcaacagagaataaacctagaaacagcatacgggtacagatacaggaggctccacggtattttagttcaaattacagaatctaattaaagactaacttaggaaagatacaggtattctagggaggatcagaatgcttcaacactgatacccaacagaaaggcaatttttaattagcttaagacactgaaaagttttccctccccttattctgcctcttagtcttcccaacagggatgctctggttatagtttccctttttcccaattacatccacaagcacggacatagtctttcccctcggctcacctaggatcagtttatctcaactccacccctctaaccgtcctcaaatttctttccccctcccctattttttattcatggcacctgtaatccctgtggcccatgtggatcatcaacataaaggtttacaaaagggatgggggtttagcagagttgtgctaaggaagagtgtcaaagcatcagatgtcttgg

SEQ ID NO: 37591 - DNA, 581 bp, Homo Sapiens
ctcaacgcttatacttcccgtgataaagtgacattctttactcaccacaagttaggaaccctgtacaggaactgtgtagacagggtatgaggccagtttccccaaggggcttttattgggctctgcaagtcaagcttaattccttaagggaagcacacccttccagtcaaagccttggtaaaacaaccagtctctccagttgtgtcttgtggcaaaagaaaagggattcttatggcagtgatacaaataactatattaccctatgttaagaatactcacaaagtttccaaattctgaagaaaccaagcagaaagaaacaaatatactccaaacttggtccataggagtataccttactcaattgttgaaaactgtagatagctcaagagacaaacttccgtgactctgaaaaataaaacaaggatcagcaagtgttaaagcaaaaagttaaaaaagattacttacgttttctataagtccggtctattcagttaactcttgtcctgctggatattcatgaacatttcagctcttcatgagtcctgaatgatttcctttattccaatgtccaatctccaaag

SEQ ID NO: 37592 - DNA, 413 bp, Homo Sapiens
ctcaacgcttatacttccaggattgtcacagatctctggaagtagccagaatgtgacaggatctcaaaatgaatggctgcttcatggaggctggaacataagcctgggactcccagtagccaaacatagctgtgccacaaacatggctgaaatgtagcagtttggtggatccgaggtcagtcattgaaaatgtattgattggcacctattctttgtgaatcattattctgggttctggggtcacaagagcaaatgaaacaaatgaagtacctgccatcaatgagcttacattctagtaaagagggacagaaaatgaatacattttaaatgaataaattcagataccgctaaatgtagtgaagaaaaaaattgggctaaagagagcgaaaaacaatttctgaagtataaagcgt

SEQ ID NO: 37593 - DNA, 487 bp, Homo Sapiens
ctcaacgctttatacttccctttagaaaacatttagatttagattttaaaatgtttagaacatatttttccctaagcaatgtttatctagttttttttccccccgaattatattatgtgtcatcagcgtgtgtgaggatggggaggacagctttaagaagctgctgcatttagtaccaattccttgtacaatggggaggagacttttgaaataaaatattctgtttccccagctcaagctggacatgaaaatcagaaacatggaaggagaaggggcatagccgtgacaggaaggggaaggaatttgatttgaggagcgcctggagaagcctagtctcacccaggacatcacctcccatggtagcaccttggctatcacttagtacattttctgtctggagacggtgaaagctctttaagagcaggcaccgtgtctcctggctgtatttcagtgcctagcacgtatagaagtataaagggtggagggg

SEQ ID NO: 37594 - DNA, 359 bp, Homo Sapiens
tcaacgcttatacttccaatcgtgccctttctgcagctgtcttccctccatgtcacaaatacaatcatgcagccaagtgagtccagactcagccagctctttctcatccatacccagggctctgcaatctgctttcttctccttctccctttgtagcccataattgtgatgatctgccccacacaccaaagtccactgtctcagaacctcaccccagaccctctgggggcccttgccttaacagtcagcttctcactgaccaccctcagctgaggctgaggttccctgacacatagcagttctctgctctggtggtgccctagaatcacttgaaaagattggacaaaacactgaggccc

SEQ ID NO: 37595 - DNA, 570 bp, Homo Sapiens
tcaacgcttatacttctggggctgctcattctccgtccacacttagagagtttaggaataatttttttcagaattactccagtgtgtgggttggcaggttgtagaaagtggcactgcccctactgtctctgagaccagaggggttttcagtgctttgccgggccacagccagagacaggatgagccggggtcaagtttctgtaaactaaacagtcatggcagcaaggtccaactttagaaacaaaagttcattttcaggttctttatgacactgtaggacaatacaacacattttgaagtcggacccaatgtttgttttctactatatgaaatcaggacataagatgctgcttgctaatatcagctgttacaagaagacagagttgtcgccatgaaataaagctctctaggaagcacacagaaataaaaaggtcaccatgcataccaagaacaacccatcagccaataaactaaacactttggaaataaaaacttaacacatcatttcattttgttaaaaataaaacgtatcactaatctgtgagtgtcttgttctgtcacagtgggcat

SEQ ID NO: 37596 - DNA, 574 bp, Homo Sapiens
tcaacgctttatacttcctggaatcccttataattgagttattttctgccctgggggtttacaaggacacgagtgcaacactctttatatggagaagacaggaaatagaccttgagctctaaacctttgcctgaccccctcttctgtgggcctgtgtttctggacaatggggaggtttacagccagtatgagcagagcagactgggagcacctcaatcctcatgcttatattagaaaatgccttagcaatgttgatgggctccttgtagcactggagcatggggagggaacaagctcactgatgtcatttatgcctattgtcttcagtaacttagaacttattatggtatattaaatcaataaaatgttggtgatgaacaatgtgttttgtaaccataaggctgaaagggacttccaggaatatccaatctatttctctcactttttataaagatttgtctaagcaactactctaaacacatatttattatctccatacttaagaatatctacgggaagcatatttgaaaagcatcattggaaatccacctcaatactagtgataggcctggag

SEQ ID NO: 37597 - DNA, 378 bp, Homo Sapiens
tgctgggattccaggcatgagccaccactcctgactttaattttatttttaattgtacttgtttatttacttagtgtcatatctgaatgacttactttttctgcctattttaaggtaacttttacgtaggctgcctctccaggaagaaaatgtatcctggattacaaaagaagagtgggaaataggggaatctaataaagctgtgttaatgagtatgactttgtacttttttagaagcagacttcaattgttttaatacggtttcatggatacgataaaaaatcaaatctggcaaaacccagtcgtaaatgatgctccccaaaatcattgagaaaatctattatttatggttatgaatgacagagtggctgtacgtag

SEQ ID NO: 37598 - DNA, 541 bp, Homo Sapiens
tcacgctttatacttctgttatatgaattaagaaactctgctataggaaatggggagccactgaaaaattgtgttaggaagtaacacggttagatgttgtaggaaaataactctgattgcagttatagcagatggattgcaagaggcataggctgaacgtagggagaccgcttaaggtatcacagtcccactgaaaaatgaagacctgaacttaggcaaagcaatgagattaggggacggggaatggtgaaggctgatttgagacagctttaagagataaaagcaagtattgatgattaactagatgtgggaggagatgaaagatgaggaagataactcaggtttctggcttgcctaagtggagtcccaagcaaaatgggaataacaatagctaacctatgttgagctatatagtaggcgctaccttatgtgcatttttctcatctatcctcagaggaacactaagcagtaggtacaaattattatctctgttttatacatggaagtacagagaggttaaatgacttgctgaagtttagta

SEQ ID NO: 37599 - DNA, 540 bp, Homo Sapiens
tgactctgaggatcccctcacgctttatacttcctggaagttctcggagcttgaattatatgtacgaagtctataatgtaagcacccgagagaggccaacacataagggctagtttatgttgaggtgctggatactcatctccaacagactctgtgtaccaacccacatggcctcctgaggcacagagaaaacgagtctgtgcacaagatggctctactccccttatacagaacaatacttgagttctgagcagccctcctaccccaaagagcagaatcactctatcgtagtgatgttctggtgtcccagcttggaatgggaggaatgtaataaaaaacaagcccattatccccatcagagctcctgctgttggatacttcccgccttaacagctgaagaagaggcaattgctgatgaggaaataggatggggtggaagaagagtcacaaatagcttcttatttgctcctgagccactagtgtgtactagggaatgcctgggctcgaccttttctgaggtcaaggctgctaccgaggaat

SEQ ID NO: 37600 - DNA, 352 bp, Homo Sapiens
gcatatgagcactcttccagtgcttttgggtgccatctcaattaatcttcacaatagttctatgaagtagaaagtaatattcctatcttcacgttcggaaacaggttcagtaaagtgaagttgtagttggtcacatagcgagttagtggcacagtcaagatagatacaatcaggtctatctgtccctgcagcttgatcacctaacagggttgacacctgtgcgtcactgggagtacagagattattaaggtgttctcttcctactctctttaaactgttgggatttgctacacttggtgtggggttcaggggtaatttacttgaccggggtggatacgtaggctctgttgta

SEQ ID NO: 37601 - DNA, 570 bp, Homo Sapiens
tcacctaatttactatatatatactgagctttcttaagaaatatatttcattatctcccacatgaacgccttctttctatgacatctcaacctatacgggggagggggagagacatggaatctgagtattagtatcttttcagcaacacagatgcacttcaaaaagacataacatacaattggaaagacttcagaaaagacatctaaatatttataggaatcgaagtccagactaaataaaagggacttcttcctagaaaaacaaaagctgagagagatggttaggtctataaaattaagtcaaatatcaagacaaatgaggtgaacgcaatcttgtctgccagaacctagaagactaagaagttgaagttcaagagtttttttaaaaaattaccctaaaaacatatatattattggaagtgttaatagaagtgaaaatatagattcaagagaagtttcaattcatgatggttagattcatgaatgattaatgaaagatgttcatttctggtacacataggatgtaattacaacaatttttcacaaaacataccctggttacatgctggg

SEQ ID NO: 37602 - DNA, 440 bp, Homo Sapiens
ctcaacgcttatacttcattagaatataatgatgactaatgcatatgagcaccatctttttgtgccaagatgcttttttgggctgccagctcaattgatcttcacaatgagttctatgaagtagaagagtagtattcgcatatcttgcacgttgggaaacaggttcacgctcaaggtgaagtcgtagttgggcacatagctagtgagtggcacggtcaagatagatagcaatcaggtctatctgtccctgcaggttgatcacctaaacaggcgtgacacctgtgcgtcaccgggcaggtacagagataattgaggtgttctcttcctactctctttaaaccgtagggattggctacactgggtgtggggtcgaggggtaatttaattgaccgtggtggatacgtgggctctgtagtagaaggatcaagcgttgaggggta

SEQ ID NO: 37603 - DNA, 431 bp, Homo Sapiens
ctcaacgctttatacttccccggcgccgtcgcctacgcacctcaacgctttatacttcgtagaagtctccgttgggtacacgggtaacaaatgtgaaaaaatataattctgaggaagggagatacaagaaagctttcatttaaggtagttgacacctaagtcttgctctgtggttgacaggtaacaggtgtaagttgttcaagccagagattactagtttggcttcagaagacatttgtcaaggtagaagagtacaatttagaatctgtgtattcatgataataaaagctctggggaaaatggggacaaataaaaaatagaatcctaacagatactactgggtagagcaagaacatatggacagaaagataatgttggcagtctttggatatgtaatctatttaaaaatacaacttctaagtaagtgtctt

SEQ ID NO: 37604 - DNA, 587 bp, Homo Sapiens
ctcaacgctttatacttcaatagcaatgaaatacacaattacaaatctggtatagatctataatttactgtttcaatatatcattttcactgttagttttagaagctatggaaaagcaaaagaaagcatgaactagaactagtgctccttctattttcacaaacatctattaacaatagaaaaaaactataaggatgggataaaacaaacagaagcaccaataagcttttgaagtacctttaaactgcaaaacagaatacagctgttgatcaggagacattcataactttcctgagcatagtttccatagtgtgacatgtacagacaccagattatggagggctatacagaacagatggtggggaaaggaaagcagtactgatcccttacataaggcatttactaatgaaatagttgctgggcactaaggactagtaaagggcatatatatatatttttaaatgatggtgacaatctaggcatttttatagtcagatgggaacagttacagaaagatattgtggcaagagagtactaaggagcaagtaatgactggaaataaggcatattatgaagaggttagcctg

SEQ ID NO: 37605 - DNA, 557 bp, Homo Sapiens
ctcaacgctttatacttcctctcccctatgattatcatatgtttagtaaagcttaaaaaccaataaaaggctttaccatattcttcgaatttgtaagggttctctccagtatgaattctcttatgtagagtaaggcctgaaggttgcttaaaagctttgccacattcttcacatttgtagaatttctctccagcatgagctctcatatgttcattcagttttgaggattgtttaaaggctttgccacattcttcacatttgtagggtttctctccactatgaatgatctgatgtatagtaaggttcgaagaccacttaaaaattttgccacaatctttgcatttgtagggtttgtctccagtatgaactatgttatgttgagtaaggcctgaggaatagtaaaaagctttgccacattcttcacatttatagggtttctctcaagtatgaattcttttatgttctttcagttttgaggattttctaaaggctttgccacattcatcacatttgtagggtttctctcccatatgaataatcttatgtatagtcaggtt

SEQ ID NO: 37606 - DNA, 389 bp, Homo Sapiens
ctcaacgctttatactatctttggaaactccttgtatcaagcttctctgcagagcagactgcatggaagtttttaggagggtcagaggtcagggagaggggagggccttccaagcagagagcaaagccgaaacaaatccaaggagagtgagagtgcttgatttactccggcaacttggactgagtcacccagtgggccaagagcagtgttttttccaagtgtagtcctcatgccatcttcatccataattccttgggtagcctattagaaatacacatttcaagatcttaacctcatacttactgatttgtaatcttggggtgcagcctgacgacgtttattcataactaaccccctcagtgattctttaaactgaagtataaagcgtt

SEQ ID NO: 37607 - DNA, 366 bp, Homo Sapiens
tcaacgctttatacttccagtctgtgagggaccccatatgtggtggtggtcccgtaagattataatggagctgaaatgttcccatggcctggtgacatcatagcgcagcccgttactcatgtgagtgtggttatgctggtgtaaacaaacctacagtgctgccagtcatatagaagcataggacaaacaattctgcacatacatagtatgtggtcatcgtaatacatgaatgtgttactggtttatggattcactatacagtgctttttattttagagcatactccttctactcagcaaaaaaatacttaattgtaaaacagcctcaggcacgtccttcaggagacattctagaagaaggcattgt

SEQ ID NO: 37608 - DNA, 548 bp, Homo Sapiens
ttcaacgctttatacttcctatgagaagtgttgatgtaatagaaagaacatgtgttgtggggccaggcaaacctgggtttaattctgtttcaacactgcttaacaaaatttatgggaggctatgttttggattgggctcctgcaccaggcccctccggaccaaaccaaaatggagtcactcatactaaaactccaggtcactgaaccaaaactaagttgtttatctgaccttccaagaaatcaggagggagaaaacaaccaaatctccaaacaggccagttttaatcagcgtgataaggaagtcctctcttttttaaccctataaggaaagtaactttttgaaatgatcaatacactttgtattccttagttctgctttctttagcccctttctgactataaagcccacttcctctgctcaacttactgaagcagtattcccattttatagaatgagatgcttgcccaattctggaatcactaataaaagccaattagatctttacatttgttgaattttgtctttgacaacataatagttatattat

SEQ ID NO: 37609 - DNA, 608 bp, Homo Sapiens
ctcaacgctttatacttccatgggcaagtaagactggaaggttttcatcttcttagagtctgggatatatggatgaatgagtgaaatgaggattttagtgagtatctctactaggttcctgacagggatggtttctccagggattcaactgaatcttataggtagatctgatctggtgaaagataaggtataaattggcctgtcaacaggacattcgtactggtagttattactaccatgatggctttaagagattttgggggctggcaagaagtagagtaaatgtagcagaacagatggatgttatagggaaaatatagctgtaaggaacagtgagagcttagtgatggtggcagtagagcataaaagacaaattatctttaactttggctttgcaaaaattgaagtataaagcgttgagctcaacgctttatacttcctagacgtggacagtcctgccgagtactctggccccgagggaagttattcggcttcgccgtggattcttcgtgccagcgcgtctcccggatgttcttctcgtgggagctcccaaagcaaacaccaccagctgggatgtgggagagggaggtctcaatggatggctctac

SEQ ID NO: 37610 - DNA, 405 bp, Homo Sapiens
aatttagtcgtttaaaaaatgtagtggaagaactgctctagatatgggctgctgaaatcaattagggcctataaatgggaatttgaagaattctgaaaatgatatgaaaagcattgaggctcctaaaatctataatgacctcataacatgactctgcaagtattagggactgagaaattcccggtttaatacgttatgataagcggggaaagaccaatttggttatgcctactatcaccacacatagtgataaatataattttcccactttgaactttcacagttccctgtgaacttgtgtttacgggatgcttatgactaagacaaaggaagtcagaattgcttcctctatgaaaaggtaggaatagggagaagcaggaaatatgcaagaactgagattctaag

SEQ ID NO: 37611 - DNA, 569 bp, Homo Sapiens
tcacgctttatacttcccagctgtctgagagatgcattatgtgaggaaatgcctcctgctggcactaattcctgagctttgaattgttggttgggtcctggcaaggtattttgaaaactcaaactgcatataatcaggatagttgactctatcctcagtgcattcattttacaagtgacaaagtggagactgttaatggtgcacaggttttccacgatcagaatctaggctttcttgcttctagtatgttcttactacaagcaggttagtcttttcaaacatggtttggcgtattgctcatgttagagatcgatggtcaggtttgggtgctatgttgatgtaatttatccaagggtcatgaatatttatattgtgccctggcaatacttcatgccctgctttgaggttctgggaggctttctaacttgggactcagaatctacttcatgagaagcttcacaagcatctagtactgcaccctaactcagattaaaggccactgagtccattgatccactcatggatgccgggggtaatgggtgggggcagactggttcagttggagtccg

SEQ ID NO: 37612 - DNA, 584 bp, Homo Sapiens
cgactctgaggatcccctcaacgctttatacattccaaatgcactttcatacattttcaagtgatcaaaacggcacacatttataaagtggaaaatttgtagtattttcctttttaaaatgtgtcagttgaaaggacttaaaaatttgaaagtaggattgtgtttgacataatttatttctgtattaggtttcatacaagtagttataaatagtaaaaattttcatactaattctgtaagaatatatttcctcttgattcgactaatccaggaacttgaaagtggaataaaagatactgctccaaattttaacactggcaaatctgatagtttatatttcatatctattttcttttaccctactttgtcaatagcaattattatcatgctattctgagttctccaaattttctgttctttctggcttttatcatcagcaaaccagattactactactactattactgctgctgctgtcatcgccacctgcagcaagtatttacctactacttgttatatgctagacacaattttaagcagtgcatgcatattaacttatttaatcctcataatcaccctatgag

SEQ ID NO: 37613 - DNA, 438 bp, Homo Sapiens
ctaacgcttatacttcctggcactgtagagcccagtctcatcttgtactttacctgccccaaccctaaaatcagccatttctccaaggtgtcctggttccttctgttggagaagagtattggaaaccactatctggtttctaaatgagcttgatgcactcattactgctagggtatcactgcttctaggccctctcaggggatagttaggaagtaatatatatatatactgacccacacatatcttcgtttacttccgtatctgtctgtatataaatataaacatgagtttatactgatatctctgatgctgatccagcaccacagagttcattctagcattctcttccttgcttctttctctgaaagtgagaaatttggctgatttaatgaataatacatgctaattttttcaactctaatatatatatgaagtata

SEQ ID NO: 37614 - DNA, 427 bp, Homo Sapiens
tagagcagtcgctccacactccactgcactctgggccgcacatctttgcctggattgatcactgcaactgcctcctaatgggcctctctgattctgtcctttcccctgcccagtcttgtccacagagcagctggagagcttttaagtcagatcatgcctcaccttcttcagggccctacaatggcttctcatctcatgcagagtaacggcccgagtccctacaatgccccctgcaagccctgcatgatactggcctgtgacctctctttatttattattatttttttgaaatggagtctcacttctgttaacccaggctggagtaacaatggcgcaatttcagctcacgtgaaactccaactcccaggttcgagagatctcgtgcctcagcctcccgagtagctggaccacaggcgtgtgcaccaca

SEQ ID NO: 37615 - DNA, 518 bp, Homo Sapiens
ctcacgcttatacttctcatattttaatatctttgaagtgaaaaatgtgtaagcaaagtacaatcagtagatgtaatgtagttagggtttttaaaacattagtgaggttccactttaaagaataattaaaatatgagagggaaaaagggaaagtacagaagagcatatataacatggtaacatttatgaaagaaaaaaatatgtgaatatccatagaatattcctggaagaatatacaggaaaccacagtagttgccactgggaaggggaaattattttttaattgtacatcttataaagcaatttgaaaattttttagtgatcaagagattgactaggtgaagggaggagggacattttttgagataaagacttaaaacagatataaaaacctaagtagcagtatatgatcgtgatgatggttatgggctgtaaaatcagcattcagagaagaaagctctttcttggttgggaggggggaagaaagttagatttacgccgatgaatatgatagtgaa

SEQ ID NO: 37616 - DNA, 413 bp, Homo Sapiens
ctcaacgctttatacttcaggaaattgttgacgatctcttcatccaattatattctacagtacgtgaggcggtatctgaatattattcattgaaaatgtatgcagttcactgtccctcttgactagaaggtgagctcatggatggcaggtactacatttgtgacatgtgctcttgggagcccagaaggcagaatagggattcacaaggaataggtgccagtcaatacatttccaatgacggacctcggagtccagcaaactgctacatctgaggcatgtttgtggcacagatagtgtttgggtactgggagtcgccaggcttatgttccaggctccatgaagcagtcgattcatttggagatcctgtcagattctggctacgaccaggagatccgtgagcaaatccctggaag

SEQ ID NO: 37617 - DNA, 619 bp, Homo Sapiens
tcaccgctttatactggagatgctaagcgtgaagaaataaactatggaaaagtctaagttcagtggtctattaaattaatatgagagtcaagtatttatgcttgagatgaaaaaatgtcaccagactaaattttgagtcccattgctaaaacagagatggatagtagtaacgtggggctcttttcaactgaaggaaatgtataaaatatttaaaaagaaaactggctgatgcctttaacctttcagctttaataatccttatccttttaggcttgagtgatagcaattataacttaagaggaactggtaccttcaaattacaataagaaatcatcttgcaaaagagagagaaagtcggtgtattggtgatttcttagcgggtaataatggcaatccacttttccaccctcagtttctcttctgaccggcaactctttccccataatatgctgcacaaggcaatggaatgaccacttcattcctgtgaggttttgcctctactagagatcgtgacatccctcagaacagcattgcttcctccagtcctccttggtaccagcagtgcactacagagtatcaattagctacatggtattcatttcctccaagatcaggctct

SEQ ID NO: 37618 - DNA, 449 bp, Homo Sapiens
ctcaacgctttatacttcctagaatgaattatgtacttgagcacttagaatcatgtcaggagaggcatgaagtaagtagaacatattgtgtagagataataattttactttctaaagcagtgattttgaaactcttgctgagagtgtgctggaggaagtcaagcatttcatcccggtttcaaccagtgctgttttattttgattaattttaagcgtggaagtttgcatagtatttcagttgagcaaggttctgttgtttaaaaatacgatagcctctatggttaccatatttgctcttatcacttgcctgcttaaatccttgctatttttttattgttattacgactgataagacttttctttccctagctccaactttattctttatctctgatcactttttcctttccatgtaaaccctggattctaattctacttaaatcgtgtga

SEQ ID NO: 37619 - DNA, 559 bp, Homo Sapiens
ctcaacgctttatacttcctgaatttataactcttctgcatattaattgggtgcttgatgtcgatcatatgaagatgtcataacgagttcctgttctcatgtggctcatggtgtagagaaatacacatgatatgtctgtggaactgtgggtcagaaagtgcttttggcagggccttgatgtctggttatataatacattgaaggtggtacaaagacgtctttttgacacatgatgagtgaagtattttgaataattgagctgatgatggggtttacatctacgtgtatgtgttagaatgaccatggttatgctgtgggcagaactttgactgtaggaacttatatgacttaatttgtactgttaaggtcgttgtgtgatccaggtgcagttagatggctgggacaattgctatgattactggatagatgcagattctcctgatattcagcgctgtaggctggtgtgcaaaaagaggacatccccttgagtcgcctgtgagtaagagacacgaatagcttgtatcaatgtttccatttccatatgtagccttcttaagat

SEQ ID NO: 37620 - DNA, 577 bp, Homo Sapiens
caagatggtcctcagcttgtcaagatcagatggtcatagatgtgaggccttatttctgggctctctattctgttccatgggtctatgtgctggttttggtacccataccaggctgtttgggtcacggtagccttgtagtatagttggaagtggggtaacgtgattcttccagcttggttcttttggcttaggatggcctgggctatttgggcgttttttgggttccatatgaattttaaaataatttttttctagttctgtgaagaaggtcatgggtagttagataggaatagcactgaatctgtaaacggcttggggcagtatagccattttaaggatatggattcttcctatccatgagcaggggaggtttcccattggttggtggcttctctaatttcttggaacagggtttggtaattctcacggtagagctctttcaccttccgggttagctgtgttcctaggtattttattttttggggggcagttgtgaatgggatggctttctgatttggctttcagcttggttgtggtcgcggtataggaatgctagtgatttctgtacattgacttg

SEQ ID NO: 37621 - DNA, 506 bp, Homo Sapiens
gtcctcagtctacattctagtggttctgaatatttggctggtctaaatgacaccacacggaagatgggtgatacctgaagtataaaatcctagtaggatcaggggtcaaaggctgtattggtttttaatatacatagatatggccatatggccctccagggcttacaaccttataaccgttcattcgttttatgaactggcatatagtgcttacttggtgctagaaactatatcaaatgttttacaaatattaactggtttaatccccaaagctaccggtaggggagaggtattattattatcacagtttggctgatgaggaaacggaggcaggagagatgaagtaactggcccaaggttcacctcaagtagcagagcagagattggaacccacacaatcgggatcggcggtgggctcttaatcacggtgtggaggcggtttttcccaaaccggaaacctacagggatggcaaatattttcacctgtcctaatctgatcagtgaga

SEQ ID NO: 37622 - DNA, 431 bp, Homo Sapiens
cttacatatctaggtcccacagagggctttgggaccctgtagaaactttaaaacatggcaccaaaattcctgacactcctcttgagaagtagggcctatgtaccctctccttgaatctgggctctgtgtgtggttgactgaaagaatatggtgaaagaagagtggctgtggcagtttctaaaccgaggttttaaaaactggcagtttctactccccatctccgggaatgtttactcttgaagagtaacatttagccatcatgctgtaaaaagaaacctaagcaactcatggtaaactccatggtctttagggaaagagcgtttccacaaggttagggagagccaagaaaaatttaaatagtgtattttccagcttcccgtctctacaccgaaattaagtatggacactcacaagaggaaaaaagttatcct

SEQ ID NO: 37623 - DNA, 434 bp, Homo Sapiens
aacgatggtcctcagcttccaccagcttagccaaagcgcctttgtctaagctgaggacatcgttgcaatgatggtcctccagcttgaagtgctgtatacttagaggttctcttcagagtctaataaactatctgaaaagctgccatgtgttcatcaagttcaaggaagatagtgctgtaataagataaccacatcatcaaaggccatgctgatgatggtttggaggaaaggaaattgaatgttaagcaaaattagcagtccaataatgatagagaatccaatattgaaaatgcaaaggtgtacataaatcgagcaatcaagttttctgatttctttcttcttccttcccagaattatcttgaaaaactctagcaaattcagagagaatcaatgcacagattatcgtcttatcctatcacgtgaagtgtggatgt

SEQ ID NO: 37624 - DNA, 506 bp, Homo Sapiens
tcaaccctccctgcttgtctagttctcaattctggtatcatgtcacctgaattctgttcctgttctcatttatacagaaccacctactatgggcaagtcagtggcttgtttctgtttcatggaatcttctagctatggagagctcaggtatcagacttcagaagtagagcttggcttgccttgtgcatggagactttagtctatggccaccactagttaagagcagattaactctgcaaggctggctccatagacacctcactttttcctgagtggtgctgtcctcagtgtcttaacacttaaacacaccatggtattctgatatgcttgatcacaggaaaatgttatattcttttattcaagtaaaaataatggtggggacaatggatagttgagacatgagtgagatcctttgtatagaattaaaaattatagtaatacactaagaggatgtcaaatgagagttgtccgatgaaaaagctatggaattggatggtgctaaagat

SEQ ID NO: 37625 - DNA, 530 bp, Homo Sapiens
aacgatggtctcatgctaaaccaatctagccccaattcagaactataaatatatcttagtagttatggtaaactgtcacagaggctaacagttctgttttcaatctcgatcctcctgtcgtgtaacgaatgacaggtgtgtgcttagggtctcaccgcccacactggcccaagcattcgtgcactaccaagcttagcagcagctttctacattattgtcaaatgagatgtcgaagccattaaagttcactctgataaattaatgtagtgtctttgtggctgcgggatatctgacctgccatgcttcattatactatattattaaaaccgcaggtggcattgttggcttcttttacacacattctctgtcaatactgtgggatggcagtagtcatcctgatgtcatcctagaaaagactgttgtcctgtgaacttagtccagacaagtatttttactgttaactcttttcgtcattctgttttgtgcctctgaagaaagttgatgacgggacatactgagtatgaagagtc

SEQ ID NO: 37626 - DNA, 584 bp, Homo Sapiens
aacgatggtcctcagctaccttctgagcttcctaaggccaggaggggccacatccagactccaggcccacaccctgcagagtctcgctggagagctagaaaagctcagatcaaacgcaggggagggaccccaccatatcccactgccaggcagggcctgtctgcaggaagtgaggggtctgctgaaagagcaaatggcactctctgttcggcagcctggcgctcagtgttgccccagagtgtccttccagtcactccagatggggcagcagctgaacgtcacagatgctaagacagcacctctaggccaaccagtttcccagggagcagaaggaaaggcttggcggggcagtttaatggaaggcatggagactccatgtggtgaatcaagcttaaaaacaacccagggtctccctgggtcatcactgcatcaaaccacgcagcctgctgtggcccagtgctaccagccaggcaagccccatggcccacccagttacaaaggctgctcctcggactcttgccagtgttgagccccaacatgtgaccactgaggccaatgcatgatattgccagcaggtgaggacc

SEQ ID NO: 37627 - DNA, 415 bp, Homo Sapiens
gaaaatattaatctagtacgtcaaaactacagacaaaatatgtctgagaaagggaaaattaaggtaagataacatttcaattggaggacaacaatccaagagccatggtcaaatattcttatagggtatgactattgggtctcattcagaaggacctcaggtccacagtaataaagctttcaacacttcctttaacaaccatctcggcaaatattagttatataattaataagcaagagaggtaataggggagggtaatcaaggagggcttccagtaagtcaagactgggattcagcctctatcactggtaattatgtgaccttggttaagtcacattctagagttcctcatctaaaaattgggaatattaagtcacctcaaaggtactgaggccatatgtgagcaaaattaaac

SEQ ID NO: 37628 - DNA, 448 bp, Homo Sapiens
taagccatcacacctggacttgaaatcctattgcactctaaatgtgtcgatctcttcatggtttttacaattaaatatttcttggcactcaagtttttccatatctgtgttatatattacaaattaatatcactgctgagctgcctatcagacaacaagcttctttgtggcatctatctcctaggaagataggaaggtggcgtgaggcaccgtgcctggccagacaacaagcttcttaagaaaatagagcaaacttctatttgttggtatcccccttactctgtactctacacggtgattgctgagcaaatgctttggactaagactgagtgctgaatatttacccaaagcaagttatttatgggcaagtgtgagtaatggggaggaaaattttttggagatgaatatgtgctgatgttaatcctcgtatttctaaccaggctgagtt

SEQ ID NO: 37629 - DNA, 501 bp, Homo Sapiens
aggatccccaatgatgctctcagttcatgctacacacaagctcttgttctcacctgtaggcacaagtcgggtatcttacactgaataggcacagtgattggtcacagaagtcctcaggcatctgggaatagcttccccgtggtatcaaggctggaatgtagaggctgaagcattcagtcaaggagatggcaagcctgagtccgggtccctttctgagtggcagcatctcatcctcacgagtcggtgtctcagcagagcaggtcgagctgcctgaggggttctctttccatatgtccctgtttggggatccagctgggtctggtaatcttgaaagtgttggtgcgccctatgcctgtgctgtcgtctcaaattggaatatcccaatgcagttggtctaaacagatttgggcatactggcagacatcggcacttacaaactaactgtgataaggatattgacactatagccataaattgcactccaaacaatgacctaatcat

SEQ ID NO: 37630 - DNA, 396 bp, Homo Sapiens
acgatggtctcagctaattttctagagcattaatagacacagctagatttattacattctgatgaacaaactgttattttatcgatttcagctgttactttccataacctaagagcattgaaataagagctccttgtctactttccttttagcattcattaaaatgtattcagtggtttaatacatgttaagtgatattggttttttctctgattaatggctcatattaccactgtcctcagaatctagaagattatcttgactaaatgaatttttacttaaggtttaaatggcatatggaaactgtggatgatataataaaataatagtgttttggctgacactaggaaaccatggatgatatcatagagtaatagaattttgcagctgaggacc

SEQ ID NO: 37631 - DNA, 515 bp, Homo Sapiens
tcagtgcaagaacagccttctccagaagtctcccctgagaactgcaggctggattccctgtgatgggcagtgtaggaagagcttctctgtcattacttcccagtgtctgtatatcgagcttattcaatgcacccagaagcaagcaggtgccatggggcatcattcatttcaggctatctaagctcaaagaaaatgcatgcgatgcacacagcaggccagttactcatttcatgcaatcacaatgcgagctcaagtcactgtcattgcaatcattcatcagaggtgcctgggttcagcatgctctagagccctccattgcaacagtatgcagcaccggtgctactcattcatccccattctacaaatcagaaaactgaaagattagccagcatcccaagaccaggatctgatccaagcagcttagatgcagagcccctcaaccactcacattctctcctttaccaagaaatctccatgtgcggctatcttctcctcagatggtcctgtggaggaca

SEQ ID NO: 37632 - DNA, 634 bp, Homo Sapiens
caacgatggtcctcagtaactagaataaaaaggatcataaaacaatgattttaaaactgaaatctctagaaactcaacatccaagtcagccgcatttcttcattcagagtgtgtgtgtcacacctgccaaggtgctgcgtactctgctaaccgagctagagtagtgagcaaagccattttctctgatcacaagattttacatttttctgggattttgacctgcaaagtagtctcgtaagagcatttgagagacttacttggaactgccttcagaatctatagagccttttttctctttttcctctaaaatgaaaagagcttcattttatgattataacaaaagtgacactgtaagcagttagaacattaagaagtataaataaaaagtaaaaatcatctacaaccctaccatactcagaaggagaaaagaactgtcatgtatgtatacacacatacctatgtaattttaatataaatagaattatgttctacatgctgttttatttcctcaacagtaaattatggacatgtctgaaatgtgaaataaatttcaaaataaggctcagaaagtgtagtaagtaatctctgcattattaaaatagcagggacggctggtattgggtccttagcattg

SEQ ID NO: 37633 - DNA, 588 bp, Homo Sapiens
aacgatggtcctcagtggacaggtggactgtaggtggagctggctttaggtgcctgtagggtggagctgcagggaggctgctgggttgctgagtgtggaggtcaggagaggtctggcctggttgtggaaggtaagggagctatgggtagttgaagttatctgaggctctgggactgcaggaggtcccctcaggagggagactgtggggagcccaccggtgtgaggagactaagaaggagcagctagggagggaggaggacgcagaggaagggggtcctggaggccagtgtgaggtggcaggcaaggactgaggatggtgaccacacggagcaactggtgggctgtggccagggctgctccagtgggcagtgagggtgaaaacccagcgaccgctctgtgctgcacacagagacaggcgctgtggctctccccattcgcagctgtgaaagcaggcacagggtggtagaggaagtaggggtgcacagctagtaacagctgagctgggatttgaacccagaccagccgagcccagagcacactttttaacctctgcactatcctgtaatggagcctgagtggaagcatctt

SEQ ID NO: 37634 - DNA, 460 bp, Homo Sapiens
aacgatggtcctcagctgaggcgggcggggctgcctcctgtgggggccacacttgtagcccaggccaagacccaggccacgcatggaggaccaacccaaagtgctgcccgcctggccggtgtgggccgatgtcactccccagccccgacccagaatcggggactgggcccaacaacaaggtgcactcaagggggtgccacccgaacacagcacgttcgcaggcacccggggtcatcaggccacgttcgcaggcacccggggtcatcaggccatgttcgcaggcacccggggtcatcaggccacgttcgcaggcacccggggtcatcaggccacgttcgcaggcacccggggccatcaggcctgagcccaaagtttagcagaaaggagaactgagacccagagagaatgagggacatctgagatcccagagaaaggccagctcccagcccagctgaggacc

SEQ ID NO: 37635 - DNA, 563 bp, Homo Sapiens
aacgatggtcctcagctaatgctatataaaaataaaggataatccacttcaagtacaaagattcctaaagtgcagagcaaagaagcatgtgttctgaaatcttcaatggaacaaaaggagagtggtgcagttcacagcaatgctgctctcggaatgttggtggtggcatttccctaagtgttgcaggacattttgtaagtacgtttactcctgcatgaagagactaggctgtgctcacacttaaagaaaggtaaaggggaacattatagaacggaagaattacaagggatctgaagtgtcatctatctaacctctatatttgatggatgaagaagcagaattagagaggttaagtgagtcacccatggtttacacagtgagtcagagctgaaaccaagcctgcaacccaagatcccagcttctagtcatctggtgtatttgtttttgctgcaccctcctgacctgtcccaaaggacaaaactaagtcagaaacagagctagaaggtcagttacaagttgagtcaacaatgcggtgatgcatttaccctgggcctggtaactga

SEQ ID NO: 37636 - DNA, 644 bp, Homo Sapiens
caacgaatggtcctcagtcaataaaatgaaaaatattcaccaaacagcagtttcaaacaatattctataaatccaacttcagtgtagttatgagtaagtatgaataaaattctattacaaagttctggtgtccagaaaaaatgagagattaatagggaatttcttagactttatctgaacaaattattttttaaagaaaaataatatcagttactacaattttgaccaaaaagggggtgaggtttttcttctctggtgataacagccagtcttatctaacaagccaaagtaacattgtatagtttcccccacccatctacacccatttatctataaacacatatagttgtgtaactatatcaagaaacagtgccccttggtagtcaacctttcccgcattcccaggcaactacttatctgttctcttctctttcccagaatgtaatacaaatggaatcttattatctacacttttgagtcttgcttctttcacttagtgtaacgcctctgagattcgtccacactgttgcattatcggcagttcgttatattttatcgctgagtaatatcgaaggtagtaggggtggagcacagtttatccattccctagttgttttttttccccagtttttggtgaatattaa

SEQ ID NO: 37637 - DNA, 402 bp, Homo Sapiens
aacgatggtcctcagctcttccatccagcctctgtttatccatttgtacagaaacatgtagtggctgtgagagaaaggagcatcccttttagccagggcttggggagctccttagaggaacaggcatttgagagaggctttcaatgatgagcatgttggggatgtggggctggtgataggcaggacagttagggacatccttccagaagacatcctggggaaagacatagaggggggaagtcaccaggctgacttggtaggattctgcacactgctcatttgggttgcaccaagagctttagttggaattactgggttgcaccaaagagttttagctggaaatattggatgggaggattcctacatattttgttgggggaagggtcgtctagtgctgttgga

SEQ ID NO: 37638 - DNA, 462 bp, Homo Sapiens
aacgatggtctcagctcactgttctcagcttccccttcccccatctgcatccctatgggtgtgatccttgggccaagaaaaacagctggaaaagtccacagatggtggtgggagaaacagtccttgagtgctggggcccccgctggcctttggtctgtgatggtttctcctgtgggagctacagagcaggatctggccccagggagccagaaatgtcctagaccagatagtgtaacagcattagttaccaaattgccagagattataatgattggacattgatttgcatgtaatttagcatatattttgcacatgagtactaaggaacacattctggttcctgagctgctcctgtttttccaggtccatctctttccaggcaggttcttcacaattaccaactggctaccttcatccctgggctggaaacaagggttctgccaatgggatgccttctttttg

SEQ ID NO: 37639 - DNA, 499 bp, Homo Sapiens
ggaggggcgcccacgagctcgagactcctacggccttgatagatgacacagcacttctatagggcaccaaaaaggggctgctgggcctgtctcagccttagacttgggaatagtgccacgtattgcctttgagcaagaggaagtgtgtcgtggaggagagactgtgggttttggactagacagagcaggaatctgcctctttagcttcctaactgcaacctggctggagcaagtcaaactcactctaattgagcccttgtcctcttgtcctcctcttgggcttcatgacactcctgggcagggccatggtaagaagtaagacgccgtgtgtgtgatgcctgcgataagtacctgttagagctggcagtaggagtccaaacacttcttgactgaactgccccgccttccacggaggcttcaaatcgctcattccttccgtccacactcctgctcgcttaatgaaggtgatggccaaatgcctcttccaggcaggcatttg

SEQ ID NO: 37640 - DNA, 558 bp, Homo Sapiens
cggtcgtacactctgcagcgcctctcagctgtaaggacagaactgacccaagttgaatttagtcccggaaagtggtgtctagaaagctctattttacttttcttttgtccagtagaagctctgttggacaagaagggcctgctgtttaggaatctagggaaatctgtttccctgagagacacagatgcagctgtgtgcagctcagcttaagtggacttgtttcttcacctgttaaaagagagcgtggagttggatagcatctaagaatccttctacctcagacattcccattctaaatatggtgggcctgacactgcaaaactgctaaagaagttccacacaaaaatgtgttttagctttaattacttattcagtttaaacaaaaaagaatttttttaaattaccagctcttttgttttcagttctcataaatacatctggtttccccctctctctctatctgataaaagtattctgaaaggcagagtccggagtgccgaggttagaggatctagaaggggaggtgagatgggggtggccggggaatgaggatgcagc

SEQ ID NO: 37641 - DNA, 529 bp, Homo Sapiens
ctgagttgtgattgggggagattagtatatttaggtcagttaaaagatcatcataaagcggcaatgggggtgcagtagcctctggtgtaggtggaagtggtgcaggcatgtcagagtggaagtcctcctttgaaattacgttctcaatttgtgtagtatcctcaggggaaagagagctgagcgcttcctcgacctccctcagaggagaggaaagagggatcagtctccatattgtcctcctgagtctgtaaggagtctaagacagagtgaaccgaagcccagattgagcaaatggtgggtgggataaaatgtccccctttatgagcaattttgaattgtttggcaatctcaacccaatctttaagttctagagttccctcagtcggaaaccaagggcaaagaagatctacaacctcaaatagttcaattaacttttcagtagaaactttaacacctccttctttaagaagagtttttataaaatttaaataagccaaatactttgtactggagctgaggaccatcgttg

SEQ ID NO: 37642 - DNA, 530 bp, Homo Sapiens
ccaaatgatggagtgttggaagaaaggtgcttggagctagaagggtaattagcatttccacagatggcgctgctatggtgttggattaaaggcttgatttcattcctctaattgagtgacttagttcatctttgtggattgatgcccaatatcattgttgcccagctctgccctgaaaaatactttttaaagtctcctttttttggttcaacatgaacgtctcttgaaaagcaaagtaggataagacgctgatgagaagcttagtctaaataacccactggaaacgggtgtatttggcgacctgctctttcccaccatgacttaaagcgtttataaacctccataggaattggcaggatgtactgttcaccgaccaaacctcttgtggaaaactgggttgttcaggtagaaatgagtaactgtacatagagaagctaggaagaattataggtcagtgcatccccaacttcaatgtgttaggtcagtggggtcttgataagatgcagattttgtttcaggagctttggagt

SEQ ID NO: 37643 - DNA, 400 bp, Homo Sapiens
ttcactttggtatgatattttgacccctcaaagttgtttataaatagaatgaacagtggagccatctgttaaaatgccttggctgagtgactcagctagtagatgaattttgacatatttatagcaccatgcattgatcattttagttgtaatataacagctgtttattgagtaccttttatgacataggtcctggagaaccagtggtaatcaaaagagatgatacatctgacttctcacagtgtcatctgttgagggggacaaggatgaaagctgtgtcagtgaaggaggaaaattgagtggtaacagggagggcaggtgctgtggtgagcatgtatgtagcggagtgcccgaactgaacacggaggtggttaggggaggcttaggaagggaatactgg

SEQ ID NO: 37644 - DNA, 473 bp, Homo Sapiens
ggacaaggataacgaagcaatgtaatcacaagcaggttacgtatattctagtacaaaaaataatttcttaccttgaataagaatagatatcacaagtaattcctaggtattaagacatataatgttggtctaacacctagatacttcctaagagtagtgttcacagtaaaactctctgcttttcaatccccagagccttcaaataggggcagttgagatatcacttcagtagcattcgggaattcagtagcaagagggaatatttgcggactcagatgatcacagctggaagaaggactctggaaggcgtccagtgtagtttctattccgaccaccctggacacagcacccaggctttgatcacatctcctgctggcagctctctacttgccacacagtctgctggatggctctaagggatagggttcttccttttctttgagatggagtcttactctgtagcccaggctgta

SEQ ID NO: 37645 - DNA, 528 bp, Homo Sapiens
caacgatggtcctcagctctgttaaataatttttctttttatccaattctgaacagtctgattacaatatgtggggtatggatttctttgtttctttctcttgggggttggctgaatgtattagtttcctggggctgtcataacaaatgactgcaaactgggtggtttaaaaccacagaaatttattatctcacagttctggaggcaagaggtctgaaattcagcagagtcacactccctccacaactattacggggacatctgttccctgcctcttccagattccaatgacttgtgggtactccttggatttcttagcttttggtcatgtcactccaattcttgcctgtaccttcacctggctttttcttttgctcctacctatagtatcagtgcttagctctattattgtacatagcacactgtattgtaaatctgttttcgagtgcttttttctcactgggctgtgagttccttgagatgaggatatcgtgttttactcatttttgtgtcctcagcacctgtctc

SEQ ID NO: 37646 - DNA, 428 bp, Homo Sapiens
cacgattggtcctcatgctggcagagtggcgcttacccgggatggcggtgaagcgggaccgggaggtcatcgtgacaaagggtggcatgaggtacctggccctgacgccctccccggctagacggtccagattgggggtgtccacatcctgatcctagtcccagcggaagccctggaaggagatcagcagcagctgtgagtgctcttcctccctgagacggggtggctactcagtaggacaggcggcagcagctggagggccccgaaccctgtcatcccacgagcacctgtcatgcactcctcacagagatcgtgggcttctccctctttaacccgttgttgaacaacgtccacattaataattcagcccagctctgttgtgggacaaacaacctggagtgtagcaaggtgccgcatatttgcaggac

SEQ ID NO: 37647 - DNA, 497 bp, Homo Sapiens
tacaaagctggagtgattcatcgttcctgacctccaggagcacaatctaatgaagaatatggaaaaggaaaaagaggaatgtcctaagggctccaataaaggcacaagcagatagggggagcagagagcttggcttgaggagtgatgatgtaagggctggagctaagggagagtctctcaaacgtggcactactggccttttagctaggaccatgcatggttgccctgtgtatcggaggatgtacagcagtatcctcggcctcaacccattagatatgtgcactccccctaaaaactgtcgccagagattggaaacgttcccggggggcaagatggctgtctttatagaagcactgagctaaggcctttgggacgtgttcgtttatttactccataacattcttgaggaactgactgcaagacagtggtgagcaataaccagagggaaggacgaagcctcacacgaaggacctcgaagtctgggaggtactagagtg

SEQ ID NO: 37648 - DNA, 403 bp, Homo Sapiens
caacgatggcctcagctcacgcgcggggcttcaatatataaactctttttaattctgaaacaacactactgagtcacaagataagtatccttcccaaggtcaagtaacaagtgcagtgagctgagagtcaaaacttggtactggagttcaagagaggaataaggatcagtgtttaatttgtgtattaagggtgaaagctatgggaagttcaaagagagtagtcagaaactcctaaaatcctacttttgctcaaagtctaaaatatactgagtgtttactgttaggtacatactaaacactttgcgtatacactcagccctccgcatccatagagtcaaccaactgcaaattaatgtttaagggcaagagaagatgggtgtcccagctgaggaccatcgttggg

SEQ ID NO: 37649 - DNA, 486 bp, Homo Sapiens
aacgatggtcctctagcttccaagtgctgggattacaggcatgagccaccgtgccctgcccactgaaacttttaatttatttccatgagtggattttaactaggaagaaatattttttgctttactggcagatctagtggagtgaatggtgcaatttataagacatctatctttaacatagatactgtttttcttgtgttacattttaaagtgtattgtctgtacttttctcatattttgtgctgggggagctgagataatttcttgaatattagtgccttgtagtacaatgtaagatgctagttataagatagttgttgtttgaatcccagagtcctcaaaacaatcttttattgctaggaagccagaatggccttatgcacaggtagggttaaggaatgcattcatttgttcctttattcaacaaacattaattgcatgtctgctgcgtaccaggtattgcattaagagctgaggaccatcgtt

SEQ ID NO: 37650 - DNA, 484 bp, Homo Sapiens
aacgatggtcctcagctcatcgattttgtccttaaatagctttctatagcatggttcattatcctggaataggaagtcaatttaaaatgctgtgtttttcaattatcccttttatgccctgtcaatgtgaaagcttgtgttctacttcagctctgtaaacttttcttttatgactgttttgattgtttcattctgtctgtggtctctttgctgtctgtttatggaactccctttggatactatgttggaatttctacacctatctatctgataatttccaactttttcttcttctgtactatggtttgggataatttcttcaccttagtgagtgtttgaatgaagtgcttttgaaaactgactagaggaacagatatcattgattgtttccggacagtaggttaaatatatttttgctgccctgaggaagctgtccattgttcctgccctggagaattatactagctgaggaccatcgttgggg

SEQ ID NO: 37651 - DNA, 480 bp, Homo Sapiens
tgctgggattacaggcatgagccaccaggctcggcagactattttctttcactctgtttcctgttactaccttagcaatgcaaatgctttcacttaactaagggttacttagcaggatgagtaatacgcaagatattatatagttgtccaggtaaatagaatactttttctccttaagttaataatgagccattgaagtattttggaagggagaaaaagtcaacaacaatgatttgcttcttagaaagttccctttgtctaaagtgggaaggatagatggtgggagtagctgactatagaggagggagcctgggccagagccctgaagccaccagcatggaggctcaccaagagtgcaggagagcaggaaagaggtaggtgggttccaggacaggagagggtgcagggccacatgggttggatctgggacagtgcaaggcttcagcctgtggatcatcaactgctggtttctatgacgag

SEQ ID NO: 37652 - DNA, 589 bp, Homo Sapiens
aagatggtcctcagctgctggtaaagagctgagtctcagccagtccctgcagccatatttcaaccactcacagccattcaaaccacgctcaaataaagctccaaggccgagctgtaaccaatccggcagtttctgcacctcgcttccattttctgtactcactttcctttttctgtccataaattctccctgaccacttagaagcagtggagtcattctgaatctgcagtgactctgagggctgcccaatttgaaagtcgtttcttccttgcccagtgacacccttaaatttatctaaagttgttcttttaacacagtgggttcaaactgacccagttaccacactatggttgacatcattttcccgagtggatatccttcatatgtggctgcatgtccactgagcaggcctgccactgaggccctctattatatcaatgtcatcctctctatagtaattttaatctttcacaaaacagccctcagtacaagttactatttgaccaattacacagacgttaatgggtgtttagagaagggtcaaggaagaagagcagaaaatgatgacgtatggaatatgttatagctg

SEQ ID NO: 37653 - DNA, 409 bp, Homo Sapiens
tatatatagacacgactaactatgagtatttgaatggccaggttctagacttgagtcatctgtagacaatgaatagttgaaatcataagaatagtaaacagccatttactaaatcatactaaaggagacacgacgagaaaccagtgaaggaaacacagtgggataccgtcagccaagaatacagtgagcttcagtctacccaatctacttcatagtcatccaaaaagaaacagattatagagaattaaaaaatatatgcttatatgcttaaggaggttcctggtatcagtctgaaaggaaccattatatttaagtagctcaggggttagtggccttgcctggatgtcattatttgcttccttgcagttcccagggtcttccagcatctatctctgagctgaggaccatc

SEQ ID NO: 37654 - DNA, 533 bp, Homo Sapiens
cttagtctcatgtctcaagacactggtgcaggcggctgcagtgcttcatcagggagccagttaacgcagactcccaggtgtcactcggggtttctgacttggttttaggcagggctctggaagtctggattctgacaaacttcttgggctattctgctgtgcagtccatttcagaagctctgctccaaggcagagagagtgctgacccgctctggcctccttcattctctgggaggagccacgaacactgagagggctgcacccattttgcagagagaagccccggtgctaagacattaccttctgggggaccacggagtcgggaggcggaggcaaggtggcaatagcaccttcccattagcttcagctggttcaaaagctgctcgcagggtgtcgggtcaaactcaaaaagcccttcttcccccaggatctcagcccccgggagaggccggctcactccaagctgctttattgcatgtcctcatccacagagaaacacaccccagattgtatatttctgatgtccgggccat

SEQ ID NO: 37655 - DNA, 464 bp, Homo Sapiens
tgagccaccgcgcctggccaggatttttatttttaaattatgaatgggtgctgaattttgtcagataccctctctcctttttggtatttacagagaatgccaacccatggtataattctggacagcagttctttcccctgtgtatgttaggacctgggccgtggcttcagttattgcccctcagtagatgctctgtgatgtctagctctgggtgagaatggctgaatccaaagccgctggtgacaaagtggggtgaattgaaatgaaccagctcccactgaggccaactggaggtagaaaggaagaaaaatgcctaagacaaggggaacgtgcaaagggacaaaacatagaggggtgagggtacagtgtgcccaaatgtctttattgatatctaacaccttttcaaaaaggattcgaggtcgtcggtggacatggtggggtggggagtgctttccaagtcagta

SEQ ID NO: 37656 - DNA, 476 bp, Homo Sapiens
tgccggttgcactgtcacacagccgctgattcactgtgggagggggctatacaccagcatgggggccaagagacgaggtcacccaggccatctggaaggctaaccgctgcatgatgtcgtggtcctgtgacatgctgctagacgtgtgtgggcagaattctttgcctgactctcactcagccagaggccagaggcctgcccaccgcccttctccttatctcagtcctttgtgctggcctctgctggggatggtttctgtctggacttttaatcttgtgtggaagccccttgtttcccaatggcaagtctctcttgatttgaaaatcactgatcacctttgtgtgttttgcccatcagaaggtgtaggataaatacatgtctttgtgaataatcttacaaacctcaaggtatagaatgacaattcagcaattcaaaaatatagatcatacaaagataacaacctagctgaggaccat

SEQ ID NO: 37657 - DNA, 428 bp, Homo Sapiens
aacgatggtcctcagctcgatttgcagacgatgcatggttagagcaatggggaccatctgggagtgagccaggatttaggactcttgagaagctgaacaatggacggaaactgatgtgatgaagtggaacgggaagatgtgcacacaccctctacctgtactcagaaatcacttgctcaaatgtggtgtgggaggctgggcccactgtgcagggatggtgctgtctgcagaggcatccttaacatgcctttagcatttgcatttccattttccgtggacatctgtcttagtctgtttgcattactgtaaaggaatacttgaggctgggtcatttataaagaaaagggtttatttggttcacggttctgcaggaggtacaggaagcatggtgccagcatctacttcagctgaggaccatcgttggggta

SEQ ID NO: 37658 - DNA, 592 bp, Homo Sapiens
caacgaatggtcctcagctgtgaatattcaacagctgagaaattcccatcagggagctgaatggtggaaggaatccaccatggcaaggaagcaggcactttccacacaccattcccatgtaacccgtgatagagctctccaaggtgtcattgttgtccccactttacagatgaggaaactgaggcatggggatgttaagtaattggcccatggtcacacagctaataagaggcagagccacaattcaaatcaggttgtccaattccaagcctgggccagcgccacactagaaacacctctgcaggagggaggaatggtccaggggccaaaaccgtatgacttggctccttcctgtttggggtgggattcggggaaggcaggtattgacagtgtaatggtcactccacagaggacaggcaaggccacctctgagtgatagtcagagggctggcccagtggcccggccagtgttcagagccacactcttgtcatgtttaatgcctcggtggcacagggggctcagcaccagacttcccctgtggctcatgtttctgaataaaggcccgtggagagctgaggaccatggggtacc

SEQ ID NO: 37659 - DNA, 578 bp, Homo Sapiens
atggtctatctatgtttcatttctgagtgcttgtaaaatttacagatccctgatctccaaaattaccaaatcagaatctctggcgaatgggtccctgggaatccatagagcaactagacactcaggtgatttaaccacagaagtttgagaaacattagcaggtcttaaagcaaaagcttaacaggtaggccagcaaattttgaaaaacgagaataatttatttttagctataactgaatacacatcctataacataccatgtttgtcaggcaaaacactgaatatagtgagtttcacaatactatgtaatgtgaggtataattgctaagaataagaagctagcagtaaaagtcaataagccagcaagaacaagtgtgcgtttagtaaaactttgccttaaacacgtaagtgcatgagtagagttcaaagatgacctaaggaagaatgtggcaactgaatttttttccagttctctgaaacaattttttaaaagtcagcttttaataccttcatgaatgtcacaaacattcaagagtgaagaatcactgttcatggttaagagctgtgtatcactgact

SEQ ID NO: 37660 - DNA, 388 bp, Homo Sapiens
agcgatgcgcgctaggagtagctctgagacaaaagaggacagatccccttttaacacagcggcagggctagattgggggtctgagaagaggaggcaaattcaaagttaagttcaagacctgtggctcgagggacttgcaaatgttccgacattcatttctacgtgcattgaacatggggagagggagggtcatgtagtctgcagaagagaaggatgtcacgtagggagaactagactgtaaggccctggtgagtagaacgtctgaagaatttagctttatgtataagcacttcctacaggtcaggacatgaaaagtgatctttaagaggtagtagtgaatagcctctgacggctcctaacagttgttctcttgaaacaagaggggaaa

SEQ ID NO: 37661 - DNA, 575 bp, Homo Sapiens
aacgatggtctcagctggttggctcagcactttctttcacaaaattatgtgtgacggcctcctccagacggtttcctgctgataggggcagtttaatagccttcttcctgtgtggtatctgcaacaaaatcccaatgaatgtcaccaagaaggaaacaaaggattgcccagcgatgagaaatgtcccgtggtgccaaaacatcagtttgcccctaacctcttgtgcaatacctttaagtccaggtcatgttgttaccatttgggggtttgcggatttgtgtacttgtgcccaagaatggagaaaataacctgtactattgtacaactctggctccatggctcctcacaaatgtgccatgtgagatatgaacatctttatcctcgacaagtcatgttcattccaagaaaccagtcttggttcttaattggacatttgtgtctgcaaacagcttaccatacattcaattccagagttatcagaaagctacgatcttatctcacaaatttagaggtgtgtggaaccatctccaaagatgggcaccaacagttgctctcatcctctgtgcccgtgctat

SEQ ID NO: 37662 - DNA, 517 bp, Homo Sapiens
aacgatggtcctcaggctatagagtgtcttacaaaaatatgccactgacttaaaagtggtctagatgaagggagcacaagttatcaccccagaaagaacatgttcaacaggcaaggagtaagaacatcttaagcatcactctaaagacaagttatctctgaggctgctttgatccaactaggagtgacatgattattatggtcctaaatgttatatgcattcattcagcaaatacttacctagtttcccggcagtgtagcttgttagttgtaatctttgctttgacaacacatgggaaactagaaacaaatgtttaagaaggaggacaatctgtcacttttcacaagttattcatctaacagtaggggcttttaagtgtcagtccagataaagcagttcttattctctttaatgcaatttatgactcagtttttacaaccattttaagactacgagccaaaagggagagagaaggaaactttcagacatttggtgtatgtgcttagctgaggaccat

SEQ ID NO: 37663 - DNA, 351 bp, Homo Sapiens
gaaaacaaagcgtgattctgtctgggtagtgatgaaatactagtcagctggaagtagttctgctccttggaacttacatctcttctgtgtcctgaatcctctttaaatatggctctcttttcttcttcctggtttcatgttccattctcaagtataagatccttgaggctagaacttggttttgttcatctgggtatactctataacacagactgactctctgcattagtaagggtttatcaaatacttacggagaggaatggatgagaaatttccaaagatttaagtaactcaggtgtaaagaatgagggtaaagctcgtttaccttgatttctgcagataggtagctgt

SEQ ID NO: 37664 - DNA, 399 bp, Homo Sapiens
aacgatggtctcagctggcacagtgggcacaaggtgggttgggttcatgaatgtttgtgccactgcagaacaagaggccccattcctgaagaggagaagatggggtggcctgacctggggagtctgcctcggacctggcactcacaacttcctgaagcctcactagtcagagtgacccaggaatggcaggtcagcagcttctggagatgggaacatgggtgacttgtcaactcatacctcactaggtctgccgtgtgtcagcacaggactacgtgacccaccttctggccaaaccttcctctgaggcagggcgagcccagacaacacactgttggccctgaggtctgtccctggcttccagggtcatcttccatcccttctaaggacagagctgaggag

SEQ ID NO: 37665 - DNA, 581 bp, Homo Sapiens
aacgatggtcctcacgctgagtagagatgggattcaacagtactggtctaatgtgctggagtggcccaggcggaggcccacttgcatgagactaatgggagcctcaagagaaaatctaccataagaaaaggaccagtctgatagcaagcccagcttcccaagaagatagaaggttggaggcaagctgctgtccaggtatgtcccaaaccagtcaacttgaaggtaagtttgctccctggggagagaagggctctaggtgtgaactaaaagctgtgtccatagacagtgtaacactgtagttcaaaaaatgttggtgtggaacgggccttctcatccaaacccagacggaatgttctcacctggcaagagtagtgtcttgtattgaggcacaggggtagctttctggatccacaggcaaggccctgtggagtctcagaataatgataaatcctctggatgacctaggggctggtgaggtgagtggagcagcctactgtggtgtgtctgtaggaccacgggagcctgatgctgtcaaagcatgagctgtacagtcctggcaaatggtttaggatccatacaag

SEQ ID NO: 37666 - DNA, 446 bp, Homo Sapiens
aagatggtcctcagctggtaaggattacatatatataaaacatcttaatatttttcatcatcttgatttcttagatgttctagaaacgatttttagtgaggaaaaactacatttatctgagttgaccagttccttcagtttcacttccatttctttttcttctgataaatttacccagcattcaatttgctacttcttgtttttaaaatctcattttgtgtgatcagaagtgtctgttcatgtctctagccatctttgtgcatagcaaggaatgctgttcacttaatattaggaggtttatttcttggggtcgtgagatttggggtgatttctctccctttttgtacttttctgtattcagtaattttttgagacaatgtcaccaatgtccttcatattaatatttggactcagaacccattttggtggtggttaaacaatcgtca

SEQ ID NO: 37667 - DNA, 555 bp, Homo Sapiens
aacgatggtctcagctacttcttccacctgaccctcccaagatgctgggatttagggtgtgagccactgaaccaggtgcacagatgaattttaatggtgccctggaaacccccagcctcaaaagtaaaaatcagaccagcttgtgtgacaaactgtcacagtgcccaggagtcaacacactggatattttaatggttggtttgcattctactaaatgcatatgatgctattccctaggaaaagtctctgggtgtcaggtgtcagcagcacatgaaagatcctaagctggattttttttcttcggtgacgtcaattttttgctcaggtctgagacagaattgtgtacttggtcccaaaatggggtttgtttggatgcatgctttaaaaaaatttttttcaacaaattgcaaaaatgcagaaagtcttatgcagaaatatgaattcccagttgctgttgaataaacaggagttcatcaatggtgctaaggaaatttgctatgctcttcgagctgaggaccatcgttgagctgaggaacatcgttgagctgaggacca

SEQ ID NO: 37668 - DNA, 592 bp, Homo Sapiens
caacgatggtcctcagcgtggggggtgttggggagattatccactgatgaaccaaatggaggctgttcccagagcctgcttccaaccttgcacggccttctagagttcaaatctttcctgggggggcctcagagccctgtccatacctccgctcacagccccagcccttcctcttctcccatctggtttcctggccaggtttcggccctgcggagaaccctccaagggagcagtggaaaaagcttcacttggcagtaaagcccctacttgctgttccatccctgcagctggggtgaaataagccactgaccagtaaacaactgaggcttaaaccagcatgccagctcaggtggggagcccccagcactggttatattccctagattcctcactggataggaaagttgggcctcaggcactcttccctcctctgcagtcaaacagtgcagatgaagagccaggctctgttcccagtgctttatgtgctaacttggttgataatgttatccattctcattttgtagatgaggaaacaggcacagggtggtcaagggacttgttcaaatcactgatcccataagggtgagagcca

SEQ ID NO: 37669 - DNA, 520 bp, Homo Sapiens
gccttaagttcttgccttcggggaactcaatttgagtgtgagagaccggcaggggacgcttactgtggtgtgaccagtaatgatgagaaacagcagtactcaggctcactgtgagggatacccagggcacactagagaaaacttaccagagggaagagaggatgggttttgaagaatgtgtaggagtggatcaggtcatgggaggggcagcataggcctgttcagattgaactgaaatggggctcttggtcactgacagcgggttctggttggtcctccccatttacatagagtaagtctgctgtcctttccaaagcttatcaaatgtttatacatagttgtcatgttccccctacatttcttcctgaggccgaggatgatatgtgatatgggggagataatttcggataagaggtaagcagggtggcgaaagaaaattcagcttagatacagatttattcatgacttaagctgaggacatcgtggggtacgagccgatcgagtggtggctaaagaaaca

SEQ ID NO: 37670 - DNA, 429 bp, Homo Sapiens
aacgatggtcctcagcttctccagtgcccccttcccaccagtatattttcaagcagtggattttgccatcattctgttaatgttatgtattacactgattgattttttaaaatgttgaaccctccttgtattccaggaataaatatcacttgaggatggtgtataacctttttaacctaataaattcagtttgctatcatttttttggaggattcttgtattagtgttcatgagagacattggtctgtaattttcttttcttgtagtgtctttgtatggctttggtattgggcctcataggcctcatagggtatatactggcctcataggatgaatcaaattttaaaagtttatttggaaatgtttgagaagtagtggggttagtttttacatcatagaatttagcagtgaagctatcagatcctgggc

SEQ ID NO: 37671 - DNA, 558 bp, Homo Sapiens
tggtcctcagcttccttctcattatgaaaagagcattatctaacattgaacttgtcctgggcaactgagagtaggagagactcacaaatgccccctgccttcagttttacgcccaagggagagatcccaggtaatgcttgcgtcacaatcagcacacttctcagtggggcaggccactaggccaactaaaacgtggtcccgatatctctgcaaggaccccttgtatctcggagtggtgggagcagagaggtgagccggcagatgggagggcaagacttaacctcagatctgtaaaagtaacaagtcaacaataccttaatcttcactgtaagctactatctactgctatctactgcacataatatttatagtacatctgttcctctttagcttatgaaaaaagattacagagtatctacttaaatggaagaaaaatctacattttaatttatggcaccagaaacaatgtcagttttctttgtcaaaaatagtcagcagagggagctcaacactgctgctgttcgaaatggctttacttatgcacttgtctcatcccag

SEQ ID NO: 37672 - DNA, 459 bp, Homo Sapiens
caacgatggtcctcactaatctgcattttccatagggtagagaacacacacattttccatagggtagggtgtgtacacacggtggaggaaggagacacatgcctagatgtgtgggtggatggctcatttcttgtctctttgtccggcacctgtgaagatgagctgtgagtttacattgtcagggtgagggaggccgcctggggagatacgtggcctgtatctcacaactctctgctgaagaacagaaagcaggccggttttgtgcgtgtgtgtgactcacttcccaagcttaattttttccttctgcatagtgagtttggggtcctgagattttattttcccttcacacggctgaggtggcgtgaccaggatttggggaggaacaatgacacacatcccaaaggtgtggggacctgacaccagctggcctggatccatcccgcatccaccaccagtaac

SEQ ID NO: 37673 - DNA, 549 bp, Homo Sapiens
gtccactttgtgagcttctaggtctgtttttattcaggccctgagatcccagaaagagcctccagggtagagagtaaatgagttctcccaggtcaatgccagatggcagccctgggattagaattcatgggcccttgtttgcagccagctgtgccctcccctgagtcctgcactgtttcttcttctgaatgctcaggattgtattcaatttagtaaggtttgtggacacataatcacagctcctaaataaaacaattactacagagcatccgctgtgaggaagacaaacactgggcacctttgcccctgagagcagactgagagcgagctctggctgagttcaggtctgttccacttgaacaaaacccaacacaaacaaaccctcttgggatctggcaaagtcctcatctgttcttgtttcttctccaggcttccttgtgcattaaaagagcctgtgcttaaacccacagtaagggcctctgctggaagcaggaatgtgctgtttcctggagcaagagagagcgcaagctgaggaccatcgttggggta

SEQ ID NO: 37674 - DNA, 384 bp, Homo Sapiens
caacgatgtgtcctcagctaccctccaggtgaggtagggatgactgcattaagcccagtgaggttgcgtgtgcgtgtagctctgattgtgtcagtgggctccaggctgggttgagaaaactagatcctgactcaaaagtgaaaatttgctactgcgttgaagattaaaatgtcagaggactccctttatcctgcgtccgcgatctgactttcagcttgcatcttccattaggagctacagattagagacaggatactaggaaacatgctagtgagtctgacgatgtttgcctggctgctatcttagctcagcagtgttgacgggtcataggaggttcttgtccccggtgtcatgtgcgttcttggtcagagaaaatccctacag

SEQ ID NO: 37675 - DNA, 357 bp, Homo Sapiens
caacgatggtcctcagcggtatcagcgcagggttcttttggggatgtctgctagggttatgttctcacccatgagggtgagatagagtagggtaatgccatttagagttttagaagcccttttgtctagctaagaggatccaggagggcagtagtttaaatctttcagaggtcttaacaaaggaacatccttgacttgattttaaccctaaagccacatgttataggcagtaccctggattgatctaagccagtatctgtaaatagtgtattctagaatcacggggactatagggatcatctaggatgatctaggacgagtgagaatagatgagagaccttaagctgaggaccatcg

SEQ ID NO: 37676 - DNA, 556 bp, Homo Sapiens
caacgatggtcctcagtcacgatggtcctcagctcaacgatggtcctcagctccaacgatggtcctcagctctcctcagtttttttaatcttttggccacatttcatccaattaccatcataccttttatacgttagatttccaaggaggtaagtgaatcacgtaatgggggtgaactgtacccagtcaaaataaccttatctgactttttctatatttttgatattttttctctaaatattaagtctttctcccaagctcatgtctattccttcctaaaagtcaaatggacatgaagtgaaagatgatgtgtcgcttctgaagacaatggatggcttggcatttgggatctttcctttaaaactgataatgcttccccaattcagttccatctacctgactgactagaacatttactgtggtacattttccaggtttgataggaaaatgctaagcgttgtatgacacagatattcttgctcacaggcactctaccagcctttgaaaaagtcaatttaggctggacgcggctgctcacgtctgtcatctcagcact

SEQ ID NO: 37677 - DNA, 595 bp, Homo Sapiens
aacgctggtcctctagctcttcctgagacaagattttggctgggatccttgctgttgtcactgcaatactcggaatggctgtgtgactttggctgtgtgactttacagcaatgacacagaaacgaccaggacagatgaaaaaaatccagggaaaagctatttaggggataatattgagactattaagactttcataatgtttttctctgaacacagacatttttagcattattagcaatgcaagaccatcctgggaaaggctaccaccaatattctgtgaggcccatggttgcttatgttagagcattgcgcccagcctaaccaggcctccacgcctgccccatccagtgcctcatgctaatgaagcagcaatgccaaaaatccagtattattcaatttactccatatcatcacgcttttatggcctatacaagtaatctaaaaatctgtgatagaatctggttcttgatatctgagtccccttccaaagccactgtcataaatttagccaggaatgagtcaagctgttcattaggtacaagtgcaagttgacatccaaattatcaggaacactctcttaacaccattgtggttg

SEQ ID NO: 37678 - DNA, 619 bp, Homo Sapiens
caacgatggtcctcagctgtgtctttgggataggggtggaggtaattggtagtccagaggggaatctgggggagtaggcaggcttgaaggcacttggataagagttcatttggtagcctgctaccattcaatcatttgtgccttttcaaaagtccatcttttctatgtccactaagttaacaaacattccttaacaatgtatgagggaattttgatgtggttaggttcatccatttcccattctgtatttgctgtgttcttgaacccctatgtccactcccacagggtgtgcacactaggctgtgacacctctgggagaccaactactccagatttttcacctgcaagtggtaagtcaggccaacttccgttggtgacccgttatctctgcttgaaaaaagataaggagattctccactttggcctcagctcttagctaggttctttagtccagctaggagttactgagcctccaccaagaaggtgaatcatttgacctcatttagctcctcctccttatttatctttattagagcttgcagtgatggagagtaagtgattgggacctcaaacttctaacacataattctctcaggcgggtttggaatggtactctaat

SEQ ID NO: 37679 - DNA, 543 bp, Homo Sapiens
caacgatggtcctcagctgaagatgtcaccttttcatctactttctcccttgcttcctccatctaaacaaagacgcagagttcgaactctaaacaaaaactcacagagagttcaggggttctctgctgcgacttccactctctggcttagtgtgcatccgtttccacgggctattttacctcttgatttttggccctgtggtctctgaatgctggatgtcatgcgctgaagcctggagacgtccagatccggggtcaggaaactgcagcggggggcagccgcctgcttttgtgaacgcagcgtattgaaacacacacatgcccatttgttcacagatgctctgtggctgagtgtgccctacagcagcacggttcagtaggcaggggccaacttctactacccggctaaggaaaagatgggcagagcctgctctggatgacgctgtgttccagccggcggagagggtccccatttctcggttaaggagggtgactcctcgctccaatcagggactgagctgagctgaggaccatctgggggtac

SEQ ID NO: 37680 - DNA, 504 bp, Homo Sapiens
aacgatggtcctcagctctcagcttcatcagctcattgaaggatggggaaggcccaaggagccctgaaggagagatgctcctcagccctgctgcgtgagccctggccttgcgtgctccagccctgcgcagatgcctgcggagtcctggctgcagcctgcttgtctgcgtgagcaccccttaaatgctatgtgtgtggagctctctctaatggctgtggacccttctgccctgaatgagcatgcagacagcacccccacactccttgacctcacttatggcctaaggaggtgctcatcccaccctggttctccccatggcctgacgcatgcagtgaatgccagaggccgcttgtgtgccttctgcctaccctttggactgccctctggggtgggcggcaaattaacactctgattcttctgtctgaacacccaccagtcaaaaggagaaggcagagcccctgaacagcggaagacagagcccacccagctgaggaccatcgttgg

SEQ ID NO: 37681 - DNA, 612 bp, Homo Sapiens
caacgaatggtcctcaggcttcgacaaacaactgccctcattagaaaggcccagaattccagccccaggccacccatcttctggcagtcctgagctcaggtcacctcatgtttttatttttacacagcctccccctggcctcacacatgtagcctgtggcatgtgagcaatcaagcgacaggcaaccaaaaaagggtaggaggcaaagaagcaaggaataccgaatctgtgacatcttcccccaaggaacagcggcgtcgccagtgtctggataaatcacgttttatctcctttcgagagggacgcagggcagagccgcttcatcttggtgatgtcgtctgtctgcacagtgttgtccatctgacagggggatggcccggccctctggcttcagagaaaagatgatgaaggagagcttgagcaagagtccaggagaggaacaagaatgacccagcaagcactcattgagcatctgctgaatgcaaagcctagtgctccatgtagtgtgggggcagacaggaggggtgagctgcagagccatcatggagagatgagagatatccacgggaagcaggtcacatgcaataggatgcagttacacgttccactgtc

SEQ ID NO: 37682 - DNA, 372 bp, Homo Sapiens
aacgatggtctcagcttcttctggtcaactttttaaaaaaatattaggacaagtgcagtggctcacacctataatctgttttcatcacgcttcatatttaagttctaagaagttatctgtacttactgtctctacttaatctctcatgtgcttttcaaatgcactgaaatttgggttctgtcttcatcagtccatcaaagtagcttttactaaaatcatcaatgatctccaatccattatctagttttcagttcttatcttacttgtctgcccctagcactgttcttcacagttgtactcgctcctttttgcttccaaattacattttcctcatctggtactgagctcagtaccagctgaggaccatcgttg

SEQ ID NO: 37683 - DNA, 471 bp, Homo Sapiens
gaagagcgtttcagagctaaattacaggcatatgcaggcacagagggtcatggtagaacccagagccccaggcacacttgtacacacaccactaagtcacaaggggacgcacacgggtaacttacagcaacgctgggagctacagatagaattaagggtaaaacacacacagcccaagaaggatcagagctgctacacacggtaactccagacacttgtacaaacactccaacgtcacactcagacacacaggggtaatttatattggcacagggagctacagatggaatgagacacaacacgcacacaaccagcggctcacagccacagattgggagccccagacacacacaggtaacttacagggacacacagagccgcggtcagaattagtggttacgttacacgcaggaactctaatcagaaggccaaagctgctgcaggttagcagccccagacacacgtacacac

SEQ ID NO: 37684 - DNA, 602 bp, Homo Sapiens
gtcctcatctgggctttaaagtgcagctgaaatgcacaggagccagttatggcagtatggatacttaatatggaacgtaactcatgcttgggaagtgtggcagttgagagaccgtaaatgaagagattacttaatatgcggtattactgaggattctgaagagagtatgttatcagagactacaaattcggtcagcccttgggagtgttgaggaatgttgtgcaaatttagttaagtagtggatgattagtttctttcagcttgtagattctatgaagttgttggctaccatcttaagttatctaggattttatagaaggtagggataatggcttctactaatgacaaatgtaaagaaacacagacataagctaagcattacatatttcatatatatctatcaacatatatatgggttccctctccccctttctcttaactatttgggagtaatttctcccaaataataatggcagtttttggagcctatgtcttacaaaggtaattgtgaagcaaactaaatactcacacagaaaatgacctatgctaagtggaaggaggatcacgagagcaacaacgggtccgggcttctgcaatcaatt

SEQ ID NO: 37685 - DNA, 597 bp, Homo Sapiens
aagactggtcctcagctgggcatgtcacccaaagggcgcaaggtgccatgtgtggggctcagcatggggtggagcggatttctccatcgtggaacagagactagaggtaggtcctaggaggtaggtagaagatagtctgagcaggtggtggcacctaagctatctgatctccaagggagcaagtggtgctgctttgggcagggagcatctcacagaaatggagaaaagattatggctctttttcacagatttctaccccattatatgtaagtttgatggatctttaatccataatctttctgcactcaatcctctgctcggggtctctacttccttcagggctgtcacaaacctgggctggtgtatccaagacttagatcttcctcatgatacggaatacttaacattttactgccttgtgccaggcactgtgctgggggcttttcatgcattatcaaaatataatggttactacagccctgtgagagtagctaattttattaattgcattttccagatgagaacctgaagcatatagatcaaataatttgttaaggcatgaaattgtagtggtagtcagatttgatccaggagttg

SEQ ID NO: 37686 - DNA, 454 bp, Homo Sapiens
cgatggtcctcagctcggtggggctccagggttgggactggctgggtttggcctggctcttccctggataaatacaccatttattccggttcagccctgggaactttaaaccttaacccaagcctcctccaccccactatattagcccaagcctagagtatcagatctggatattggggtaaagatgcagacaaatttggagtgggaaaagaaagaacttaactcattactaaaagatgacctggatagctatatatatggaaaactcagagatggaatgacatgcaccaggtgtagtgtgagcaaaggatgaacttcctgatacatcctggtttcccatatatatagctatcaaggtcatcttttagtaatgagttcaacgagggtcctcagcttcatcaatcaccaggtcatgaatcgatatcattttattattataattattttggagatg

SEQ ID NO: 37687 - DNA, 549 bp, Homo Sapiens
aacgatggtctcagctacttagggagtagctgaggaagcggttttttttatatccttaataagcagttaacggcccacaacagaagatggaaaatctcccatcagtctaatactggtatgggattttcctcttatggctctacggggtcagtttttttaagtggtgttaattggagttcccatacttctcatatagggaatcttaagatataaacacatacataaacagacaaacaaacaaaaactagacggaatctgccagggtttcctttagtccctagtaggccttataattttatgttggaatggatttccgtggttatttactccctagttaattattaaatagaacaaacaaatctatattccccatttatgccaacaacagtaaaatatcatcacgtaggtattatttttttctctcaactcttggggaagaaaaggttggcatgaacatatttatgcctatggcatcttctaaacatctggacctcttttcttgtaaaataactaatggaaattaatcaaattaattatgtatttttctct

SEQ ID NO: 37688 - DNA, 447 bp, Homo Sapiens
tacggcgcagatgtgctggatattcggttattaggcgcgttctgcgtatcggggttcagtgatgattaagagaccagcatacaactcagacctaatgaataccttaaaactctcctgccaccatggacagtcccaggaaaggcaggggaccaaggacaggaacagagttagtcacagcctccaggaagccatggctgctggaggccttctcaagccctggtctggaagcaactgctggacctagaaccatctgaacacttcaatgaggggaactgacgcagacttcttacctcctggctggtggatcccaaaacatctgtagctgtcgagggcacccagcatgttgaatgtgtatcttgtataaggacaatggtctgaggtatgtgccttttacagaaatgagatggctggctccccagggtaaggttagggtacgtgatctggcaa

SEQ ID NO: 37689 - DNA, 375 bp, Homo Sapiens
gaaaattcatctcgagaattctttatcaaagctaatcagtcatcaagtatttcacagcaattatctatgccctaccactgttagattcacgagtataagaggtcatcgttgcttacttcataattgggaaggtaagatcatggagcctcctccctagaaaggaaccaaaagggaaatcatcactgcaaatggtaaaaatcatattgtttttatcagactgtagaaaagtctaattgcagcaattgttaaattactgttcagaaatcattacaaacaagtgtgaggtggtgtggtaggaagagaaagagggacagtgtggaactgtgggaatatccctagtctgggagttgacagacatgcctattaagcacctct

SEQ ID NO: 37690 - DNA, 354 bp, Homo Sapiens
tggtgggtgaaccctggcggactgttccacgtccaacctgctctagcttctaatgggcgagtcagccgagtctgctgtcagcacactgcccattctctgggccctgtcactgaggcggacgggaggtggctgccctgcccctcctggctatgtgagctgtccagtgtggaaacgatcactccccacctgcagacaccatcccttggaagggccatctttccactcctcagggacaagaaagccaaagagatcgaaagcagcccccagggaacttcgctatagccatcgcaacctggtatgaagaaattaccccgcttgagggcttatactttacaatgcacactacatgtcaag

SEQ ID NO: 37691 - DNA, 422 bp, Homo Sapiens
aaacaggtataatcgttctgcaatgggaaaaaccccgtggagtttttacatataaaacaaagcatatgatctataaggtaaaacactaccctagtttgtaattgataaaatcatctatgaatcctgtagggatatattctgccccatgacaggtacacaacagtatgaaatgctgaattataaagcacctcactatgtcttgacatggttaacgcctttatgtgtaaagtcacatgagaaataggtatttttaaagttctgaagatgaaaggcataaggaagcatacattccacagttttgtcaggaaacacaagagactgcttttctagcttttccgagacttcattgcttccccatcagtgctctgttctggcctagccatgaaaaatcaagaagcaaggatgatacacctatttagaag

SEQ ID NO: 37692 - DNA, 367 bp, Homo Sapiens
cttgttgacgagggagtgatccctagcgtcgtctattggcaattccagattaatgtctacaagactcactaaagtcctcgtattgaataattctttacccaactgatagcagttaggcttcattttcaatgccattaactctgagagcaaacgacaggcttttggtctgccaatatattaaaagtgtgtttctgaggaaatttcaatgagtcattcgttatataacaaatacttgttgagcatctactttctattgggtactgttatagggattagagataacagctgcaagcaagtaaaaggcccttgctttctcagagctttcattccaggaaggagagaaagagagtaaccacacacatcaata

SEQ ID NO: 37693 - DNA, 387 bp, Homo Sapiens
aatgttagagtcaggtagccccatggctggggccgacatgagtttctcttttaactcatgaaaagctcattgctgttgggacccccatttgaaaagttctgtgtctcctcactttgtgactccgtacaggggcttagccaatactgcaaagtttgggatccacaatctgcagaaccctacagctcctaagaattctctcacctgccttctggtcttaggctccagcaggttgcagatgacttgctttctttctgatcccaggctgtgctctccctgtcggatagtaaatcccaggtaacatacctgctatctgcagatctgagcttccttcttggacaccttataccttttgtcctccaggtgccagagcagggtatccattccctt

SEQ ID NO: 37694 - DNA, 375 bp, Homo Sapiens
ttctcagtattcctgggacatacaagctgtatccgtcccacctcacgcttccatgcgcgtagctgggactacaggtgtgagccactgtgcctagctttatcattaatctcaataatctagaatcggtttgccagctttgttcttcaagatttccttggctctttacatttccacataaactttcgaatcagcttttcaagtttcaaagagttatctgctagaatattgcttagtattacattaaggctatagataagttagggtagaatcgatgcctttacaacattgagtcttccgatctgtgatcatggtattccccttcatttgtctttttattttctgtcagtaatattttttggttttcagcatagaggt

SEQ ID NO: 37695 - DNA, 411 bp, Homo Sapiens
tttactccatggcccttcggaatggggatgatgcctctactctctaatctacttcagatcttggcactgagtcacatcattcccctaacagcaagtggtcaagtcaccaatgatgtacatatgttgctaaatcaaacagatttcccatcttacttgacctctcagctgcatttgatattcctgatctcgcccctctttgaaacactgccatgcctacgtccatcagctactaaatgattcgcaaatgtactgactgcacttatatatgcagtggcctaccgagcattttcttttggatatctcaaaggcctatgtccaaaattgaaatagtgaccttccctacaaatgtgatcttactgcagtccttatctcactgaatggcaccactatcccagtgtgcaaaccagaaac

SEQ ID NO: 37696 - DNA, 381 bp, Homo Sapiens
cattcaacaagatatactacatatataaatcaaacgtttatcataaaacaagaagctttaaattacagaaaaatcacaaagtatgttatctgactgtaatttacttaagccagaaatcaatatcagattatgtagattattctcaaatatgtggaaagcaaacaactcacttctaaatagtccaaaagtcaaagacaggcaagtgagaaaacatcttgaattaactgaaataaaaatacaaagtaccaaaaatttgtggaatatagcttggagagaaatgtatgacattaagtgcttatatgagaaataagaaagatctaaaatcaaacatataacatttcacttcaagaaactagaaaaagaagagcaaatttaacccaa

SEQ ID NO: 37697 - DNA, 384 bp, Homo Sapiens
tcaacaccacagtttgcttggtggttgggaatctaacctcccatttattttcctcccctcctgtccagaattttcttcttttcttcttctcatcctctctttgggtatcaccacaattcatcacttgtcaccaagagcctggcgagtcctcccagtactccaaatccctaccctctctagtcaccccaaagccccgggcttccctattccctgccccttctatgatcaccagtgtatcaagaggaaaagctggaaatgtacatcagtttcacttagtgccagccaatgaggggcactcgtgacagatgggaaggcagataaggagaagcccttcctcctctggtgttggtggacatctgcatctgcagacatgaggccagcata

SEQ ID NO: 37698 - DNA, 421 bp, Homo Sapiens
atagattcttatctatcactaggcctagtctttccaccctgaagaactacccttcacatttcttgtatggtaggtctaagggggcggggttctatatcaagtaaatctagtatagactggaaatctatcacatatacctatcatttttgaaggatatattctctggctatagaattcaaagtctgtgatgtatatactattgggcacttaaaaagatataggttcgcttaatacttcttgacctagcactagtatccaacagaaaggtctagctagtcatccttaaactattagtgcctactagtaagatactactgcctttatatcctatctagttatcatttaaacattatctattattaatacggttttagagcaatacaattatacaagtgccttaatgtaattttctaacatgttt

SEQ ID NO: 37699 - DNA, 369 bp, Homo Sapiens
tacacaaatctttattttctatatttaatatctgagtatgtttcactataagataatagcctccagttccacccacgttgctgcaaagccgtaatttcattctctttatatagctgagtaatatcccctggtatacatatacgacgttttctttatcccatcatctgctgatggatacttaggttgattccatatatttgctcttgtgaattgtgctgcaatagatatacaagtgcaggtatattttggatagaatgatttattttcctttaagtagatacccagtagtgggattgctgggtagaatggtagttctatttttagttccatgagaaatttccgtggctgtttttctaagaggttgtacta

SEQ ID NO: 37700 - DNA, 364 bp, Homo Sapiens
ctgtgctgggtaacaggcatgagcccccgtgcccagcgactttattccttatactgtgttaatatttgcttctgttcttagtttactctgtcgttttggtggagtacattctgagtagtttcttgagatatggtgcttgaggttttttgttgttgttgtttggtctttcttgaatggtttgccccgggtgtggaattttagtttggaaattactattctgaagattgaccattgtaaaagtatccaagcctgccattctgccattctgttttctgatcctttgtcactttttctttctaaaagcatatagaatcttctctttttcccccagattctgaaatgttactgtgatatttctttatgt

SEQ ID NO: 37701 - DNA, 402 bp, Homo Sapiens
tcatatactccatggcagttgttacccaggtaaccagggtgagtaggagaaatacttaaaatgtactggaggcaggccactcccaaatggactgtggccagccagaggaccagcagggtctgttggatagtcttctgtgccaagtgtaaacacttcagttgctgggtcttgtggagctccagtgagtcctggggaagtaggtgcagaaggagagaacactagggcagcttttatctactgaatattttaacaactgctgtagaggtaacggttggtactcagtgaatatcagctttccctctgcactcttgacacccactccaaattcatgaggcctgaaatatgtgagtaggacaagtcacacacctctctttgctcagtcttcctattttggtgtgtttt

SEQ ID NO: 37702 - DNA, 395 bp, Homo Sapiens
cattccggtggaacttctgatgcaaataaaaatatgaaattgtcatcagagtaaatctcctcgtgggattagaaactacccatggaagcactgcccatgcatgacttcataaatagcacttttctgtcttaagagtcattcccataaatatctgcttactcccttaaaaaggataagcccacatcactcttgtaagacctaactttgaatctcaaatgaaagagtgtgtttattggtcaagattcaggtaagcaccacatctctccacgtctaggaaaaagaataaaacgttaagatatttgaatatctaaggaaactgttggaattctcaaaaagaaatcagaggtaatcactgttacatgcccagtgcttagaacgttaggcagacactcagt

SEQ ID NO: 37703 - DNA, 355 bp, Homo Sapiens
cagagtaaagactcattgttgcttttgccaggaatccaccttggagtaggattaggctgggaaacacctggagagattacgtgaccacccaagattgcccaagaagttaaatgcagaggcctgctacatgatgctgtcaggacttgactgaaaggcgcaagctcagtgtctcaggtcaagttgccaggaaagagaccctgagactctgagatttccatacaggaggtttttattgggaagtgctctgggcacaatacacagtaggagagagggaaacgggattgcacagggggagagactgaactgtggggcatgcacaacagcggcctcaacagggaggagcttggaagctggg

SEQ ID NO: 37704 - DNA, 356 bp, Homo Sapiens
ccctagcggggaggtgcaatgcgccgcaagtctcgtgctcactagcaacctactgcctcctgggttcaagtgaactactgccgcagcctcccaagtagctagggattacaggcgcctgccactacacctagagactaaatataatgtattttatagtaggaggtgaggtactatagctatgttagcccagagctgggattagaacttctagagctacaagacaatcctaccaagtttaggcctacccaaagtagctgggattaacaggcatagagccaccgtaacctggtctatggcaagcttcttatactgcaccctgtatttatcagcagtcttatgtgatctgtgtctatgtg

SEQ ID NO: 37705 - DNA, 365 bp, Homo Sapiens
tcaagacatggcttctatgcgctccatttggctaagtcactactttccatgtgcctttcgtctatcggtgataagagttggtggtttagttagttcaggtaaaagtgtattattaatcagaatagacttgatttgggttaatccatgaaatttagaaaacaaataggacaaattgagatgagagaaaacacaatttaagaattttttaatgaaagaagatattccttctttgtatttttgttacagtattttattgcttagggtattcatatagttctattgggcttcaaagaactagaaagctaaatattgagaaacggctaccgggattacaaatataagtctccatcctttcttcctgttaa

SEQ ID NO: 37706 - DNA, 442 bp, Homo Sapiens
ttttcctgcaatggcctgtcttgtctactcctcagtgcgatctagaagattagcatgcatcctagaacaatctagggagttagaaatagacactctggatccactacaggcctgcagaattgggaagggtctagtacctactcttttcaaagttaagagatagtaactgccttaaggtttagactatttggtaagccacctgagagttccatgacaaggcttacgtctcttactagcatcaaggaaacttaccctagagctaacctatacctggcttaaccaaatagtcaaaatgtatcaaggatcaaaggctcctagtatctactctcctagctagcacccagacactgctatctttagaacgcaatttagaaaaattaaccagcttttctcagaagccccatttttactaggaaccagagaattcccaatttttgtgcaa

SEQ ID NO: 37707 - DNA, 513 bp, Homo Sapiens
cctcttcctctcctagaatatctaactcttctggctgctcttcccctagggtggctgagaccactaggtgctccactcttctctctttgactgctatccgttctaccatacccattcaatgtattcctgagccaaggatcaatactgtaattcatcatctccattcctgagtgttagcaggaaaaacaaatcagagattctatacaggctgacaatattataaaatcattatcagtaacctgagctgacttctcagaactgccctccaatccttttactttcccttggtcagctccatctcaaattcacttcaacataaactgtaagtcttcaacaaaccactctcctcaatgcctctaacctaattccaccactactcacctccctcagcagataatcttgcttttacctcaaaactgatttctctcaatttcctctctacaaacttatctgcatccactcttgtcatcttgggctccatccattcctttttcccttcaagtcacaccaagg

SEQ ID NO: 37708 - DNA, 384 bp, Homo Sapiens
ctgtgactcatacggagctgttagaagtgacttcatataatattatacagtgtaataaaatgggttttcgatgtgtgaggataccctcatgttatttagattatggacacaattaacaattccagacagaattattttctcatgtttgaagtagtataggcacatggccctttatgggaggggggaagctcttctctgtgtgcccacttttcacatccctctccagcatgactctcccctttctgtcagtcttaccccaggagtccctggcctccttcctctccttgacactgtttgctttgcaagcatatgaaatactggcaccctatgaccagggtagactacaaccagggttggggtgcaggagccatggagtaaatggca

SEQ ID NO: 37709 - DNA, 424 bp, Homo Sapiens
gaacagtctatagattctaatagcggaacatcctatatgcgggcatgccatactgcttggaaggaaacatattgaaagagggaaattgaagcagagtaggtgatacctgcttcctcctcaaggaataaagaattctgccatcaaataaatgaaaagggtatttcaagaataagaaaccagttgtacggaggcatattggcatgactagtgtgtttggagaattttaagcattagttaatgatatttgcccaacaaacattaagttactggagtgctgtttttcctgggctggcataatacaagcctccagcccactgattacagtggggttataaggctatcaaaattttaaacagagtggatggtagtatgctgtttttacttcatcttggtacatgagtacgatatagttaaggctttgtgc

SEQ ID NO: 37710 - DNA, 397 bp, Homo Sapiens
acaataagaagcagttaggagatttcggcaatgaggtcgctagcgacctcagaagagatttgttatagtgttgacagtgcagatcagacagtggatttctttctaaaagtatagggaaaagaagaaatcgttagaaaaagatgcagagattctggaggataaagcatttttatctcgatggagggtaaagcactgcagactaatgaaaaagccagaagagggaagtcggtgaagagaaacatagaaattcttctagtcattaccagataagcacacactaagtttaccataccaggtggtggcagcaaattcattatgtttggtccatataaacagacagtttaagaattgcagctgctattaactgagcacctactattggccagctgcataccct

SEQ ID NO: 37711 - DNA, 354 bp, Homo Sapiens
taatgccagggactgagaaacctgttgagtgatttgggagatgaagctaggggccattgtctgattgtatggagccagtgagaccgaatctagggatgatttctgttacaagaatttgggagacttctgcggccttttctgaagaggtaggaaatgcttctacccacctagagaaggtgtctataagagtaagaataaattttgtcctcttgacgggatgaatgtgggtgaagtctatttgccagtcctcccctgggagtgttcctctgaggggatgtgtagggatggagggagagtggagggccccttgggaggaagtaacagagcatataggacagtttgaggttatgtctc

SEQ ID NO: 37712 - DNA, 400 bp, Homo Sapiens
gcacttcagtcgctggggaggctgcttgctacaagctcccaatagctctgggaggacatagtattcattcctccctcagcagaagcggtgaggcaagaagctctggggagcacccagcgttggacttttagcatagtgtgtcaggtcttcatagtttgggcccagggcacagagaagtcacagctctccggcatcctgtgacctttaccctctttgccaagggaaaatgtggcccaccaaagcaagaaggttgagggcatgggccaccccagccctggcatctgcccagagcccgagaaggaaggaacaatgatcctccagctacctcacggggctggcacaggtgaccactgccctggcatcacccagctgtgtccggcagcctgaaccccatctgtgg

SEQ ID NO: 37713 - DNA, 422 bp, Homo Sapiens
tgatcgagctgcggcccgctttaggcgcacttctcaggaaatacgtacaggataataagtctggtcttggttctcaccacctagtggggagtaaacaaatgcaatagaaggcctgtctcaagggtcttgagagaaagttgcttagggagctgtgggaactcacaaaggggaccacctaactcagcctggagatttccagaaagtcttgccagagaaggcgtcacttagctcagatgttaaaggatgagcaagagttagctagagaaataagaaaaggaagagtattccagtcagagaaatcagcatatgccaaggcacagaggtatgctgtgtttgggaaaagcaggagtgctgggtggctggaggcttgtagcagtcattgagaagccagatattcaaggttccttgatggcctactcgta

SEQ ID NO: 37714 - DNA, 382 bp, Homo Sapiens
gtgcgtctatctccatgatgacttacttaggaatacaactttcccctggggcccaggctatgactccagccagagcagcattaatagaaaatctacccccaccctcctccaaaagcgaaatcctttccttcccagggctagcaggcttctttagaatatggatttccaactttgccctcctagctcatcccctctatgaagtggccaaaggccctcccaatgaacccctaaacccctcacataacatactccccagcttccacaaactccaaactgctcttgtcactgcgtcagctccgtccttacctgatatctcccaacctttcactctctatactgctgaaagctgaggaatagccctcggtgtcttaggacaacagaa

SEQ ID NO: 37715 - DNA, 410 bp, Homo Sapiens
ctcggacctccttaatgtgtgcccatacccaagtcccatccgaatgtctgctgtctcagtgaatactatggggcagatcagctgctctgagtgtgtgtattgggcatgagacttgggtatgggcaagggggtgaagtggaataggggtttgaggaaacccaaagaggttttaaatagctgctgtacaaatcccacttctctgaatcactttatctcctttcccagtgtgcctacagatgcctgctgctgttgtccataacagaaaacaattatgttaacaggcaaatctccaactatgggaaaatgagctgataaattcagctacattaactcaataaatcattttggcaagaagaggctattctctagccacgtctcatgagatttatctctgggcacacattatggag

SEQ ID NO: 37716 - DNA, 399 bp, Homo Sapiens
aagagtggtggcaggcgcggcccccagccagcttgaagaccctgccctcctgcagccggcaggggcagtcactcccggacttgtccttttagaagttccagctttaccacttgctggtggagcccaaccactgccgcagggtcctcatcgccaacacgcctggcagatccaagaggagatggcccaggatgagacgtggcacacacaggcacccgagagtgtggggttggcgttgttccactgcctggtttctgcagagatcctgtgcctgtggcctgtgcccgccatgtggaagccagagggggtgtgccatgccccccgctttggacactgctgcgtgaaggggccagttttcagacctttgctctgtcacctcagcactggcgccaggagccctga

SEQ ID NO: 37717 - DNA, 430 bp, Homo Sapiens
acccatccttaatgtgtgcccatctccataacgtgtgcccacaacagcactctatttgaaatccagacgaccctatccagttggtttatcttccaatctttcttgtttccaacccactcggcagattcatcttcctaataaactaccgaaaataaaaattttcactggctctctattgcctgcaggataaaagtgaaagacttccctcccacccttaacattcaagccctccaaaatctgatgtaatcctgcctttccaacttagccttctactgacgccaaaatcaaccatgtgctccagatggtctattcgttaaccatagcccagaaatccacgaacatacctgtctctgcaccttcgctctagccagagtcagatatggaatattcacctcttccccttcctgtagatatagtccacagatcaaag

SEQ ID NO: 37718 - DNA, 393 bp, Homo Sapiens
cccacactattatcaatcctcttaacatctgggggaacagagacccaggaagataaactgaactcaggacacacagctggaagtggtggcattaagtgtcacactcaggccatggactccgtcaccctgtgtaaggagcagtaattttctctcccattctctgcaggcccctgaaaggtaccatgctcaataccagtgaacgctgttcagcccaacctgaccacaactcttccagatgggcttttattccccccatttttagggtgaccaacgggtgtgcctagggctgaaggggctcctgggatgcaagactttcggtgttaacaccagaaaagcccgacccattttacagacacggaaactgagatttggagagggtaatatattccacag

SEQ ID NO: 37719 - DNA, 383 bp, Homo Sapiens
gctccttaatgtgtgcccaagaggatccacgcaaggattatacctatggtctcactctttacttggccctcctgcctcccagatttttttccccagggatgcttctgggatgacctttaagaggtagacaggaccagtccctgccatggagaacgttaggcataaatggtgaggggggtcaggtggtaagaggctgaaggtgtgacagcctgaggtacacctgtgatgagacgtggccctacttctttcagtccctcccccagggcctggggtacagagagggacagcttggcatctgccagtggggagatggacactggttcagtcaactttcactctcaccagctttgggtcaggcactaagctgggcacacattatgtag

SEQ ID NO: 37720 - DNA, 389 bp, Homo Sapiens
tatatatacagactctgcctctaaacagatcctctggagtctctgctctgtgggccatatggaatccacagcggtcatttctctgtgtattctctcacctccaaggatatgggtagagggcctataaatctccttatgaaagaaggatcccttcctattggagtcagggctgtacatgaaggcccccagttcctccatgctagacacatccccagaagcagcacctaatgggcaacactgcggaatcattttccacccagatcaggggcatcccacggacacttattccagaaaactgaagctgggccacaaagaaggctctcatccttgctgctatttgccctggaccacttcaaaatgtgacacatcgggctgcagtgagctgagat

SEQ ID NO: 37721 - DNA, 443 bp, Homo Sapiens
aggctcggacctccttaatgtgtgccaagaggaggagaagtgactttatgtcagcctgacctgcaggcagtcagtaaacagattctgttatcaggtctacattccacaccacaggcagtgcagatggaaatccgagacaaatgtctgtggtcatctgtgacctttactttcaccccaaagcttgtagtatcaagagctgggactcctatgaagggaaaagcccaaagaagctttaagagctaatggtctgcactccatgcaggagcaaacttcagggccaccactctgaccagcggtaaaacccagtccagcgcgaaggacagtgggcaggtctcagctcctcagcccccaccagccactggccactctctcggcaagcagacatcctgtcagttcggccgatttgtagcccagacacaaactctcacgtcttatttaccaaa

SEQ ID NO: 37722 - DNA, 413 bp, Homo Sapiens
ctcggccctctatagtgtgcccaggctagtcttcagcttccaggcacatgcagtcctcctgtctggcctcccaaagtgctgggattactggcatgagccactgtacccgaccctgtcttaatttgtaatgagtttaaattacctagtggttaatactgtctttatccccacagatttctgaataaaatggaaactaccaccctctggaaactaccacagtggttcagtggcttcataggtccattaggtttgatcccagtggaagaggattccatttctctgtccttccagaagacctggtttataacagtgcataaggctttttctcaaaatagttatataccgcacaaggaagaggtgtggctgtagtgtcacaggagacctaggggccaggtttgggaaaagtggttcca

SEQ ID NO: 37723 - DNA, 434 bp, Homo Sapiens
cttaatgtgtgccagagtatatctaaagatttcatagagacttaagattgtagtcaaagccaaaaccataaccagcctcccctgcatctgcatttggctgccatttcagttagggtaccaaccattccatacgaaagaccataatggccacgcagagtgagtggagagggttggattgcaatctggacaccttgattccatgttcagctgtctggcccttgcccctgagacctgggtgtgtctctgtgaatccaggaaggagaggcagacaggccctgtggagccttttttgacttggcattgcaaagtccacatggtgaccttcctgtcagcctgtagctgggctgactgtcatgcttatccaaagactcctacccaaaggccactgtactttgcaagacgaccaccggaaacaatattgggacgagaactga

SEQ ID NO: 37724 - DNA, 442 bp, Homo Sapiens
tgtgccagtgacagtgccactaaatagtcagcttttgtcagtcccccaggaaagtgctatcctatggcctaactagccaagccttttttctttcatttaaaagaaattagctttaatttttacctttaattacttattcaaataagacagaaatatattttccttgcaataattaaaacattgcatataggccataaatttccttattttctctgaacgatcctgattccagtcatcttgttgaataccctagttctaataattgactcttgcttttctagagaaatatttccaaatgatgctagttttgtctcttcctttcaaagttgtataccacttctttttcttgtcattttgcattgcctgggacctccagaataatgtttcatgaagtagcatgtatccatatctggttcttgactttttcatcattataattgtt

SEQ ID NO: 37725 - DNA, 364 bp, Homo Sapiens
tctgacactgtgcccacggctccttttgaccactcctttgtgattcctgtattagtttcctagggcttccatgaaaaattaccacacacttactggcttaaaacaattgagatttattttctggcagttctggagtatagaagtctgaaactgaggtgtcagtagggccatattccctctgaaggcaatagagaagacccccttccttgtctcttcctagtttctggtggctcccagcaatcccaggtgttccttggcttgtagttgcgacattccagtctctgcctccctctgcacatggtcttcccctctgtgtgtctgtgtctctgtccaaatttcctttgtctgggcacacattctgtag

SEQ ID NO: 37726 - DNA, 401 bp, Homo Sapiens
ccctccttaagtgtgccagaaaatttctctttaaagattatcaaacgcaccaagaatttatctgatcagcacaacagagggcaaatataaacactaggtctgaatttattccattcacactaaagtgactcccagcatcctctactcattctaataaagtagaagctagaaggaggttcttaaattccctccttataaatcgaaacaattacctgccctatcctagagtatgagagtgtatgtaaaccaaaataccaagcaagtttacagatatgactcgcatctgtgcagactggtttgcactaatctgtagaggaaaaatgtatttaaattaaaccaccaataaataagctctgtaatttgtcctctaggagcttacaatctagtagggaaaacacgaa

SEQ ID NO: 37727 - DNA, 407 bp, Homo Sapiens
ttctcatactggatgtctatccaagttcagcaggggattctgctcatgtaacaactccgaccatggctgatagacgtttcctctcggcacatgcttccacagttgctcactgccaaggaaatgtggcagactgctccctggctctcagagctcctgccaggaatggcaaactttccttagcttacatttcactggcaaaggaaaccgagtggccttctctaagcatggcactcctaccatgtgcccacaatgggagatgcgttagtaaacagcccagtgaccgccacaggatcctcaacttctttagtcattgtcattcctttgaggcgcaagttccaaagaatcattagagaagccatcataattcagaaagagaggaaagagaccatctgtggggttggcactat

SEQ ID NO: 37728 - DNA, 437 bp, Homo Sapiens
ggctcggcccctcttaatgtgtgcccacattcttcccatgtgcagttgacgggccatattacaaaaacaaaatttggaactccatttctgttttagattgtccacggcttcaagacgaatgttatcgtctacaaaatgtttaaaatcctgaaattatagaaacgtggctttagtctctacccattcaaaataatatgtaatatatggaaaatgtttttgttgaggaagaaagataaatgagactgtgaccatcttaggcctcacaatcagacaacatttaagtcatattggtatttggtgcaaaactggattcataaaaaattactttggcgacaaaatgacacagtagtctagatattgatactcaaatattctgggtattaaaactcagtcttcttcaggttatactcccagctaacttactttgggacacgttc

SEQ ID NO: 37729 - DNA, 450 bp, Homo Sapiens
cttatgtgtgcccactacgggtaacttttattttagttagtttttaatactgtactgacacagatttcctaatcattatccagtacaagatactgtacttctcctagattttgaggaatgaaatgcaatctaaaagggtcaaagatgccttttgctcgaacagtcccacctcaggacccaaatccaaaactttagagaaaaattcaattcctattttattcagtaagagtagaaacatttgtattaatgcaatatagaaattagtacaacctgcttttaacaacagggaaattttaagtgggttgtatgtaaacaaagcatcttaccttctcatagtaaatacttaaacatcccagagcatagaccaagaaaaaggcctgaaaatacagcaagcagaaaatgctcattacaaatagtttcacattcttgtgaaaccattttacagactga

SEQ ID NO: 37730 - DNA, 387 bp, Homo Sapiens
agcaattcaaccgccataggcctcccaaagtgctgggatgatagacatgagccaccatgctcggaagtgtacatctttcgtagctattgctagaccatttcctagaatgaaatgcttataccagtatccactttaccagcagtgtcctgtgtcttgcagctccacagtcttaccaacatttgctgtaggccaagtgaatgggtagaaaatggaatctttgtggaacttggtttctaggtccctgagccctgctgctgaatatctcctcttatgtttattggcatatgtgtatcctgtgaaatattcatgtcttttgccagtttttcattagggttcttggtgctttattttatgttgatctatagggctctttatatattgctgata

SEQ ID NO: 37731 - DNA, 362 bp, Homo Sapiens
tgtgaaggagacccactaatgggggagaagctagtccaataaaaatgtttggtttccccctaattgacatttaacgcttctcatgaacaaaggactgtgccttacatatctgtggtatatagcatacatgtctgatactaacacatttgctgcataactttgaagcataggtaattccacgcttgggataggttgagtttgaggcctgtgacccaaatctaatgggcttttgcaaattcttagcagcagctaaggagggaggtgggcacccattatggagctccatactgtgtgcccccctccacattgtggtgcttcaccctgcacttcttgcttttcctctccaccatatgttccaccaa

SEQ ID NO: 37732 - DNA, 420 bp, Homo Sapiens
ctcgtcctccttatgtgtgcccagggcctgggctctgtggccagcacacccccctagcccgtccttggaaggagagtcccctcctgtcttgggatcctgtctctccgtggcagagttgagagctgtttgtcacaagagggaggtgagcaagccaggagcatgacggcgatgctctctctggcctcctacatctgttccacttcaccccagacaaacccagccaggatccagcccgaaagagatggcaatggtgccttctgcccgagaaacaaggaaacctcgggctccctgctcatggcttatattgttgctaggattactggaagcaaaaaagacagttcatccctggagccagtgactgaagaatggatgacaaaatgaggtcatctttctctctagtcaagtccctatgctcaagac

SEQ ID NO: 37733 - DNA, 440 bp, Homo Sapiens
cggtcgcctccttaatgtgtgcccattacaaatatcggaaggacttatccaatgtaaatattagtgaaaataagcaagtgtgaaccaacgtgtgttaatggaagtaattccagatgaaagcaaacagccttattttgctaggaatccacgttaatgctttttatgagtgaggggggaagagctaaacaatggctcatttaatgaacacaagaaccccacaggtttggaatcaaggtagagataataaaccctgtaattaaacttacacagaaccttctagtatggaatctatttttgaaatctcacttcaaaacacaggacacttggaacatgtgctgtctcaatttcctctcaactaaaatatattttggctccattttttagggttttttccctctcaagttcctgtacagcagatgactcagtcaccaactcttcat

SEQ ID NO: 37734 - DNA, 410 bp, Homo Sapiens
tatgtaaggaaaccataacacagattgctgagtgccttctacaaagtgccaagattaattgcagagccaagactagatttctaatccagtgctctttattttgtgaactgtcttctatataagcatcggtgtttgggttggaggttttctgcttcttaggtacaagaggaagaagaatctgtacagaaccaaaaacatcttaatttttgtaatcaggatgtctacctttactgacaacatttactgacaacatttccttctgaaaataggttattgaaagatcaaggatctttgccagtgaaatccttaactggaagtgggtgggtacaagatagaaaactcatttggtataacaattttgttgttttttagtggaaccttgcttctctgttctgacatttccatgtctc

SEQ ID NO: 37735 - DNA, 422 bp, Homo Sapiens
acccctggcctaagtattgggatacaggtgtgagccaccacacccagccaggtatcattattaagtgtagtaagattgatggtgccagcactggctggtgttgacttgaagactcactgaaagactgggactggcagccatgatgcataagggcagaatagcctgggggttgtactgcccagtgatacttggggaaaggttcaagatctggatttgactcttgtgccaagcttccaagaaacctaggttcagaggtaagagcacctttcctatcagctgcctctgtggggacatctgacactttcaacatccacccccttgaaatactcttccctttgattctgtgacaattatctcccaggttttcttcttcttcactcgctgttccttttcaaagattctccaagagctctttttctact

SEQ ID NO: 37736 - DNA, 466 bp, Homo Sapiens
ggaccttccatttgtgtgcccatctgttttcttccttgtgctcacatggcaatcgtaggaagcaactttagtgaaaactatatttgattctcagtagacaggtttgactcagaaactgaggacattttactaaaaattccgaagaactttcatgtgtatggagagataatagcaagtatgtggtaataggtgcaaagtaaataactaagtctgaaacgtgaatagaaagtaaatcataaatgcaaacactacattgcagtagtctttttctctttagccttttcttacaaaatctgtggcttccgtacagagttgtaaatctttgctttggatgttttctaagaaacatctgagaaagcaagtgaagtcaaagaaagtattaaaaatgcagaaaaaatctataattaatgacatattccatattctctaatcatctatattttgtgatttttaaatatcttcttta

SEQ ID NO: 37737 - DNA, 421 bp, Homo Sapiens
cacgacttctgactcagcctctcaaagtgctgggatttaagatgtgagccaccatgcccagcctcaagccttttaataaacatatcttagtgccttagaggaacctgaaatctatcgaattgataaagatggcaatgagctgactcatctgaactgattgtgcagaatctcttaagaaaataagtgcctaatcttaacgttgtccgtgtacaggggctcacagaattgtgccttcatcttttctttctacagtgctatacgcaaaaaattaaaacacaagtaccagtgacatcatgttatgtaacctccataattaaaatctagaggttagggttagaaccctcacttgaatctgcagttagtattaaaaactaactaaatacaatctatgattaaaatactaattgcagatcccagtaag

SEQ ID NO: 37738 - DNA, 351 bp, Homo Sapiens
atgagccaccatgcccagcctggcatttttttatgtgcccgacatctgtatatcttctttggagaaatgtctatttaagtcctttcctcatttcttgaattgggctttttgttgttgagttgtatactctatatacttaattttcatctattccttgggttgcctttttacctgttgatagtgtttgacacagaaaagtttttaactttggtgaagtgcagtttgtctactttttctttggttgcttgtgcttttggtgacatatccaagaagtcactgttaagtcgaaatcatacagattttcccctatgttttctgctaagagttttatagttttagctcttatattgt

SEQ ID NO: 37739 - DNA, 388 bp, Homo Sapiens
tacctctataatctgtgcccatcctagtgtcttcaaagtataaataaacatattatcaagtgtctgagtagaaattagggagatgtttaaaagtaagtcacattagtgaagaatgtgcccatgtgcagcatactgtttatgattaacacccacttgatcatggtcatctgacaaccagcacaacaaatctaaaacaagggtggtcattagaaatttttaaaaacctaaaaatcaaaaacaagagttgtcatatgaaatgaagttattctgcatgaaaaaccatgtgagaagacttgcaaccaacttcctacactgggataacaaatagctcaggaaagcttaaagagaggtttagtgcacagagtccctctgggcacacattatggag

SEQ ID NO: 37740 - DNA, 399 bp, Homo Sapiens
cgcctcatatgtgtgccatgggtacaactctcagtatgatgagcagtggtaagcacttgggagggtaagtaggacagggcgtgcctctccaagggcagagggatgtgagaacttgcagtgtggaagggaggcctcaactggagatgcatgagatgttagcttctggatggatttgaaactccagactgggtaagatcattgagggagcgagtgctgatagaaataggaggagaaggcctaaagactcctccaggcactccaacaagacaacaaatggccaggaagaatcaggaaagaagactgaaaggaagcaacagtgaggtggtggaagaccttgaatgccagagtaaggagtttggtggagattgttgaggcactagttcttcagggaaggcctca

SEQ ID NO: 37741 - DNA, 374 bp, Homo Sapiens
cagtgcttcattaaggggaggatgcagtgttgctgacagctgacttgcaagagtcaaagtggccagatgaggttggagaggaaatgggggttagagggagcaccagatcctatagagcctttagaccatcgtagagactttgcttttctctgagtgctttggtagggatttgaggaaaggagtgacatcgtatgaatgactttattatgtgcccacgtggaggtgtcaaataggcagctattgtgttgcaggtccccaggttcattgattcactaagaggactcaaaagactcagcacgtagtcctactcacagctgtgatttattatcgcacaaggataccaagcaaaataagcacagggaaacgatgcatgg

SEQ ID NO: 37742 - DNA, 461 bp, Homo Sapiens
atgcagaggaggaggggagctgacgtggggtaagtctggtgaggctatgaattaatagctaacctcacaggtgtcccttctgtgccaggcatagttctgagatgtttacgtgcataatttcacttaatcttcatgaggaccttgtgacataagtagtgttattatccccattttatagagaagcaaacagaacataagaggctaactggccacggtcagatggctagaaaagctggactcaattcccggcagtcccactcaagggcctggccactggggcaagatcaggctgagcctgggtgcagggtctggtagatgatcacatagctatcaaggccaaaggtcgctgagaggtgatggcggaagaaggctgagaaggcatcagagttgatgactgcagccatcaattgccctaggaggtgccatttcaggcaaaggtggggtggacgccgatttgtaag

SEQ ID NO: 37743 - DNA, 432 bp, Homo Sapiens
tgcgctgtgagacatagaaacacctattcaaagcctcagcgctggcaggacacccctcccgcggccaaagctccagcatcccccggtcgatctcagattgctagcgctacgcagcgagcacggctccacgggcgtgggagccaccgagccaggcaccgggagggaatctcctggtctgctggttgcaaagaccgtgggaaaggtgcagtattgtgggcagaagcgtaccattcctgcaggtacagtcactcacggcttcccttggctaggaaagggaaatcccccaaccccttgtgcttcccgggtgaggcaatgccctgccctgctttggctcaccctccatggctgcacccactgtccaaccattcccaatgagatgaaccaggtacctcagttggaaaggcagaaatcacccatcttttgcatcgatct

SEQ ID NO: 37744 - DNA, 378 bp, Homo Sapiens
atccttaatgtgtgccaggctagtcttaaactcctgggctctaatggccccacaaagtgctggtattataggcatgagccgctgcacccagccttgattaattagtttttaatattatttttagaagtagggaaatctcattatttctctattttgtcctttacatttcttctcattcttcaaaactataagtggaatttttcaaaattaaaacactgctaccagaaaaaaacattggtatgaagttgccttttaagcatattcgctgccatattatgctctgcaaagtgaaaaaggtttacactagagcttgcaaattgttggctttctggtgagtctcaacatacagatgtgttttgatgggcacacattatggag

SEQ ID NO: 37745 - DNA, 395 bp, Homo Sapiens
caatatataaccacagaatgaggatataagtatagaacttaaaaagtgtgatctagtttatttgttgtggtagacaactcctaaaattcaaagaaatataaaaacacttatcttttccagacaacagccttcaaatgttctcaagcattaaacctgaaagttggaacaaggggtgccgctctggcagacccaacgtgccttacatgacaggggtgcctgacagagatgtgtgtgcgcatgtggctcagtgggaggacagggactctgaaatgacagataatcagattaccgaaacacaacaacttggaaacgatgaggaagaaagcttcactgagaaagcgaaaataaagaagaataatattaagttcaacaaagaggctaggcgtggtggccca

SEQ ID NO: 37746 - DNA, 489 bp, Homo Sapiens
cctgcgcccctctctaagtgtgtgcccagaatgaagcagcacttaaaagtgacgattaagtgcaaaatccctatggttgtgtgctttcaaactcaaccaggtctttattggtttgatttgtagctggttagatcctgaccctggggaccatttcagacactcctcaccctgccacagcataaagcccaggcttagtctctctcatcctcagcagatgatctcaatgtctacttttttaacaaagtataattgctatttcatttttttccagaggatagttttccatccttaagactgaaaacaccttatacgggctttcacggaggtcatggaacagcaccattaggtctaaatcagggaggggtataggatccttctgggcttcatgagaatgactcctgactacttttccatgaatggcacaactcatatcacaatgcagtttctcatacagctgggaagcacaggtgttaaagacactcacttcag

SEQ ID NO: 37747 - DNA, 379 bp, Homo Sapiens
tgccaaacacaaccgactccttttatttccccacttttttgaatatactctttcctccgcctggaaatcctcagctcctcttctcttggctgggaaatgactaagctttgagacccaagtcaaataccaccaccttcgggaagtcttcccagactcccccaaggcagaactagctatcacctccccccaggcagaactagctatcgccgctttgcaagtacatgaacatccattatgaggctgtctccctccccagaccaacagtccctcaggttcagtgggtttatttatcttaatcacgccagtgcctcaggaagtttagtttttgttttgaaacaggttctcacactgccaaccaggctgggcacacattatggag

SEQ ID NO: 37748 - DNA, 397 bp, Homo Sapiens
ttaggcgaggcgcagttcacaatagggttcgtcgctccagtgatgaatctaaggcggctggtctgacagtgaggcggagctcagtgcgtgtaatgccagcgaggggagcggctgtaaatacagtctggctggctcacttgccgctcacctcctgctgtgcagcctggttcctaataggcaagggacggtaccgggggttggggaacccctgctctaaaaccttcacatcggtcccaaccccttctccagcgtcatcgattgtcgccctgggtgccaccctgccaagcccaagctctggctgctctccagcctcccctgtccagatgctccctccgccaggaacacctggcagtcgctggggtcagcgggcgcggcccgtggaactgggctcaagcct

SEQ ID NO: 37749 - DNA, 392 bp, Homo Sapiens
tgcgtaggcgacggcgctgagtgcccaatcccttcaagcctgctcctctcctagttctctctgattcagtcaatggcagttccctcttccgatagctccagtgaaggcctcgggagccctcctgggctcttctgtcacacccttcacgtttgcttcatcagcacagtcttgggctttacgttgatgtcaaactgagaatcccactactcctctccacttcactgccccactccatccaagctgccatcctttctccatggattggttcaatagcctcaaaatggatctccttactctgcccccaaccttcccattcctcttgagtttattctcaacagggtaccgagagcgatcctgctgaagtgtgtatcagatcaagtcagtcctctgtt

SEQ ID NO: 37750 - DNA, 377 bp, Homo Sapiens
tatgctcatccccgatagcccagcagcccagtgggccaacatcctggtctgcagatgtatatagtttggcccacagaatgactaacaaacgttgggctccaaagtcaggagattgtacaagcagtgatcagatattctggattagtcagaatctggattactgagtggtggaatatctgatactacttgtccaacatttctacagggcatcaattgaacatagggctgagatagtatgctgccttgttacatgaggcatggctatccagtgcgctacagtttccacaactggttgtataatagtttccctgacactcaaatcatttaccacttaccagctgaggtcacttgccctttatcaggacacttgcactgtg

SEQ ID NO: 37751 - DNA, 362 bp, Homo Sapiens
tcttagcatggagatgagtgttactgggcagctggcctgggagcatcactgtgccaggcctgggctgagcccggtacataccttccccaacagctccgtaaagtgggggcggttgggggttcccatttgacagatggaggtgtctgagctgcggggccaggagggaaaggtgggcccttctcccttctccctgctgctttctgtcctctgtcccctgagcctgggagctgggtccacctgtttatccacccactccccacagctgaaggaggttgtgctgaagagcagcaaggtcgtgcgggctgacgtctgcgtggtgggcattggtgagttggtgtgtgggcaggcaggcacaaagcagc

SEQ ID NO: 37752 - DNA, 401 bp, Homo Sapiens
aagctcccctctagcatcactccccgttgaggctgcaggtgaggggacaaagtagagcgccgagggtcagatgcctttggagaaagtccatgagaggagtgtagcctgcacatctagacatagcttggaacggggaagtgaacggtaaaaagctacggtgtgtaaacatggagacacaagatctgggttaactggccatgctatcttctccacaaagatagggccaggattacacctagtatcagctcactctaaagcctgtgcttctatcacggtgccagtggccggcctgggaatggaccccgagcttcagaatcctggtcgagtgtgtcttctcctgtcacaagttcagggccctgggttcggcccattgtggagttcacggaagcgaattgctttgg

SEQ ID NO: 37753 - DNA, 376 bp, Homo Sapiens
actagaacggctgcttatcttctcatctggtggtggcatgcactataatcctgtattttaacaagaatagtacctagaaactgcctcacgctgcatttaagttgtaacagcagtacactggtacatggctctagtacccagtatcaggaatgtacaaatgtctttttattccagattacaatatacattatctagtggcgttgactgtgaccgctgtccacccttatatattttgtctactgaatccagtaacttgatggttattgtgattttccgccatgcctttttcttcattttctcccccttacttcgtctacgtttttggtgaggaacactgccttgggcttcctgtctcagttcattaataaaggtgctg

SEQ ID NO: 37754 - DNA, 391 bp, Homo Sapiens
tctacgaggttcccctcaagcactcactccccgcaaagctgtcccaatccttgtgacagcggatagagaaatgtgcctgttcaacaaatcccacaatcacagagcgaactgacatgttccaaacctcaggataagaacaagagtggcggttaagaccagacagggttggaacaataaggagaggaacagaagttgcagaactgcccaagtgtattaagtcagttgagctggctcctgtccagggcactgtctctattatggtattactgcctagaagaaaatttgtctgggcagacaggagaactccgagggtaccttgggattctcatcaggtaatcatccctccatgatcacctgttggaatgtagcctgtcccctggcacgtgagaca

SEQ ID NO: 37755 - DNA, 419 bp, Homo Sapiens
ccgatatcttacaggatcccctcaagcatcactccccgctattccgcactatcctccctctctctgttaccagccaattaacccccccaggcccctgacttaatatctttcgaacacttagtcctacggatctttgtgttatgttctgtagtaatgctcttctctcggatacctgcatagactacccttcctcactatcttcagatctttgttcaacatgtcctgtgaggtcttctctgctcacctctatgttaaattgtattgactgattccacatttttttccctataatgtgatgcacactccactttgcattcagcccgctctcccattcttcacagctctggttcgttgatttcctgagggacgattcggccaccttcgttggttctgcagcttcatcagttttttcagcatgt

SEQ ID NO: 37756 - DNA, 379 bp, Homo Sapiens
cccctcatagctcactccccgtcaaagctgaggaccatcgttgtcaaagcatctactccccgggaaatgagagagggaggttggtagcaacatcagagtgacagttggctgtctctcatttcttggggtcatcagtctgatttgtttagatgcctgtggatcatcccagttcctgcaataatctttggacaagggtccccttgttcttgggacatgtgtcatggtcactacgccccctttccctcaggctactgttgctcagggacacaatgagataccccaaggacatctagacctgacttttcatgaactctcttgcctctgtggtccccacattgtatacctccctccctcctccttcccttgtgtgaaggagacc

SEQ ID NO: 37757 - DNA, 435 bp, Homo Sapiens
ccatcggcagtgtactgggggaagataaagtttaccagaggtatctggatgtggggcctgtttctttaaaggctgggctgtggactgggctcccaggagggtgagtctccttttcaggtgtggcatagtgtgtcatcaccagcccctgaatgatttcagccaggccaggggaagggctgaccgcaactggggcagaggaccctggagagggaaagggttagaccgccacctgctgtctagtgctggtatagcctcagagccgaaaatcattccgtttatccaactggtgtttattctgcacttgctgttttctgaggtcttaacatgtgactggtactatgccaaacacttcatattccttcaacagatagcctgtaagctcctgctgtgtgacagacactgttcgaatttctaggaataccacaatgaacaaaa

SEQ ID NO: 37758 - DNA, 392 bp, Homo Sapiens
ccaccggcggttgtactccagtgtgagaatgagatatggttggggaggcgtgtttggcacttttacaaggttgcattgtccacatttgcttggatggtggcatctgtagcccaaatgggcattcagtcttttcttctgctgtgaggtaagagtaattcagacctaatgaatgagaagagggagcactttgatccacagactttggattaacactgtacccactcttagcaaaaggggacttctctaacaagctagcattgtgttaacctgtcattaacccagcattagagacaggtcactgggatgttcattctggctctcagcctgctgttatttccccactctcacctgtgctagttcgctttctccagaaggggagctgaggtggtctt

SEQ ID NO: 37759 - DNA, 385 bp, Homo Sapiens
tcggtgtactcccacagtttttgtgggtttttatttatgttgggaaatacttcggaagtttgtgtgaaagtataataagtttggaaattgtcatgattagagtttgataataaacatgcataagcaaatgggaaactctattaaagtcagatgtaacattgaataatgttttctctaaaatgtatttgcagagagaagaacagtgatttatgtggatttgaaacaaagactttggctgtaatataaaataaaggttaaatgtgaattcttcatcctgaacatggatcaagttttgtgtttttaagagcttccttagtgattgttataggagcctctgtgcccttttccaattatgggcacagaatttatgcatgtatttatagat

SEQ ID NO: 37760 - DNA, 414 bp, Homo Sapiens
ccccccagcggcggtgtactcaccaggtcgtacttctgatttttaaacaatatattttaataacccttaactgtttatggtattacctgcagatttcttgtacttcatattgcagttgctattcatctgaattgtgtttgttcatccgttaaatacttactaagctcctgctctctatgccaggaacacacaattaaattaatgttagaccatctctgcccttacagaactccttagcttcttggaggtagtaccatatcagtcaggagcagaaatcctagctgctttctttcgtatatatcataacatttaattgtattttatattatactattggttacaaatattttttatatatcaggatatacttcagacagcatttagatattgtcttgaaatgcaaattttaagtac

SEQ ID NO: 37761 - DNA, 424 bp, Homo Sapiens
actctagaggtatccccccagcggcggttgtactcatgcgtgtgccaccacacccagattttttttgtattttaacagaggtaggtcatcaccaggttgcccatgctgatctcgaactcctgagctcagacaatcctccttccttggcttctcaaagtgctaggattatagatgtgagccacagtgcctggccctgtggcgttgttatctttactttatagataaaaatgttgaagtctaaaggttaagtaacatgcaaaatcacgtagtgcctcagcacagctgaaaccccttttctttgccttttcccacagcatctccctcttgtaacggatttcactagcttcttcgtaaaagtagtcccaatattggcttcttttccacgtatgtgtgtaatctgtcacattttgaaaatattatcagc

SEQ ID NO: 37762 - DNA, 411 bp, Homo Sapiens
ccagcggccgtgagactctgattcccctgatctttatgcctatcttgaaataacggcacgctgttatgatcactatgcattataacatagatttaaattcagttactgttaatgtctcaatatttttatataatctagtatgatcaactgctctatttctaccaaaaagaaagactgacaagatattgattgggaatatgtttaatcaattgattaatattgggaaaattgccatctcaacaatattgagttttctcatctataaacattgactatttatctcactagttatttgtgatctttcatttttctcagtaccattttatagtttccagtgtataagtcttgtactcattttgttaaattcatttccacattttttatgctatcgtgaatcatatattttaattc

SEQ ID NO: 37763 - DNA, 362 bp, Homo Sapiens
gccccactggcaggtgactactgagtcattttagatgttatcctaggcattgaatactattcataaatatctactttgcttttttagaaatttatctggacctgtttctatgggccagcctaaacataacctcaggtctaaagagaaatattttctctttttcttcattttcactaaatttcctcaaagttattgggcatgtgcagtttactaactagaatctattaagtacataggtatctacagagagaaacaatgtgtatttaatttgaatataaacaacagctcaagagaggaagaaggggcatgtaagattggtttttcatctgacttctgccaattccaaacagcttcttgttcag

SEQ ID NO: 37764 - DNA, 361 bp, Homo Sapiens
tccccacggcaggtgtctgacagtagaccacaaacggccttgaaggggccacaaagtccagcaaagacagcagcagggagtggggtggaaacgactagctacaattaaactgtaaggaaaatgccagacaaattatttctctacaccctcaaagtggagcacaggttttaaaatgcatttaaaatgatcatgtatttaatttgcatgactcacaaagagaagagatttaaatataacattctagaaatccaaaacagaatacaatcatgagctatttctttctaggaaacgcgaactaggttagaagctcttgtggtacttggcaactctaagtcgcatttaatgacattcttgatttttt

SEQ ID NO: 37765 - DNA, 421 bp, Homo Sapiens
ctgcacccactggcaggtgtactttttacaaaaacacttattaatgaattagtgcttctgtaaataaattataagcaatgtataacaaaacaagcaactgaaacgtttgtttctgccgaactaacacaggcagatactttttatttctactttacattgtaaacagttcagtgtgaacatctgttcatttctaatattttgtactttttactgaacacacaaaataaagtatcttatgaatagcctaaatatgtaatttcctacacaattgtgagcctacaaatatcaagctttttaaatgattactgaaatggttttactactaacttttaaggagctgttatgggggaaggggggaaatagtccccatccctaaatttcgaggtcctcaaaaaagagtatactggagtacaacctgccg

SEQ ID NO: 37766 - DNA, 441 bp, Homo Sapiens
gccccacttggcggtgtctcatccttctaagagatcactcataggttcactaagcacctgctggcatcaggtgccatgctagggacaggaatgtctgcgacatgattcctaccttcaagaagcttgtagactattgaaacaaacaaacattgatacaatgtgtaacagcatatgaagcacaagttctatcacttttaatcctcattacaactcgccatttcctccacttttcagatgtggaaactctttgaccacaaccttcaattcttgctcaaccattcccactatgcctcagcccctcgctcaggactgccagtcctctgcctcctctgcttggtttgcaggcatcagctccttccattttcacttccctttctgtccatcttacatcctatagtccactgtttttgtcacttttgttgatactataaagtcccttgc

SEQ ID NO: 37767 - DNA, 425 bp, Homo Sapiens
ttgtactgtctcttgtcatcatccctgatgctgctcctgaggacagagaggtaaggagctgccagacatgtgagccagggattctgctcgcccactggaggctgctttgcccttctcatctgtcacttggcctgctgggcaacaggagagatgagaaagtaaagcaaacatgggctgagaatgaggtttggaagaaactctgtttagcaagctatgttgcagattcttattgttatggaaacaagcaacaggtaaaaggatggggaagatctcaccagtatcttccttactcagtgcaaaaaggatcaggtccctgaaatagccaggaggaccacaaaaggagtgaaggaagctgaaggatgtggttttgagctatactggagctgaagccaaaacaccccaaagtatagacacaccctcgcccc

SEQ ID NO: 37768 - DNA, 428 bp, Homo Sapiens
ggcggtgtactcttgtccaatgtaaaaatgctgcagcataaacaaatattcatggcataaaatacaatacaataaaatgaaaataactcattagttaagttcagcaaaacagagaagtaaaagatagagaaaggaagaaaactaagtgcccttgctggtgttagctggcaatgtcttttgtcttgaaagttctgggtgaatgtttttgggtttttggagagaatgtactcccactgaaatgagtaatccattgtgtctagcatcatactgggatttggaatgccattgtgttttagtatgaagtgcttgacaatgcattcacacccagaggtcagtttcaaaactgccctttagtttaaccctatagttgtgatttagtagaaggattcgaataactgcataatttgtttaccacacattattctgct

SEQ ID NO: 37769 - DNA, 428 bp, Homo Sapiens
tgcacgtgtactggggtgaaggagggtgtcttaggagccactgaggcatcgccagagcccgcacgggcagcgtcaggcaccccaggaggtcatttcacatgttctacaaggacatgttttcagctctccagttttctagtggaggaaaccaaacctcccaggtggtcaacacaggcgtttgccccacatgccaccaccaggtagccacgggtctcatgggtgactgggaatgggaggagaaggaagaagctcttcttttgtggaatctgatcacagggaaccctctcccgcccggggctcagaatctgatcacagggaaccctttcccgcctggggctcagaatctgatcacagggaacgctctcccgcccgaggctcagaatctgatcacagggaaccctctcccacctggagctcaagatggtttc

SEQ ID NO: 37770 - DNA, 457 bp, Homo Sapiens
ctggccccacctggcggtgtcttactatgtgccagcgaggagtactagttattaactcatttaatcctcacaaaaacacaatgaattagttactaccattatactcattttacagacaagaaaacagaggcacagagaagatcaaataacttgcctaagattacacagactaaaatccagatactgatggaaccacaatctcttgttacagaaatcaagcatttagtgattcagcacaaaacaatgtacattgaattcttatcaagcaagttattgtgttatgcactctataagggacagaaaacttagtaagaaaaaatctgttttatctagcatttctattacattctttatctagcctgctttaattggtgatgattttgtgtttaaaccttgctttcttaactaggatacctgcaagtatttacaatgctaagtggaaattaaacaaatacaa

SEQ ID NO: 37771 - DNA, 437 bp, Homo Sapiens
caggttgtcccagtagtgcacggtagatttatgctgcacaaaagctgtgagtcttctgcctggggaacccccacaaaaagttccaacaggggtctgtggacacttgccagtagggacaatcagattacttctaggtagatctagtttaaatttaaaaggagtgcaagtacatacaggagtcactgattcagattacaatgggaaattcaaattgttatagctacttctgttccctggaaagcagagccaggaaagcacaactcctgattgtgccatatgtggaactggggaaaagtgaaattaaacgaacaggaggatttggaagcacaaataaacaaggcaaagcagcttactgggtgaatcaaagtattgataaatgtcctacctgtgaaataactattcagggaaagaaatttaaaggattggtagatacagga

SEQ ID NO: 37772 - DNA, 469 bp, Homo Sapiens
aggagaactccctacgctttttacttccgtcaattactactgctgagaccacctcacataggacttccagcttcacttgttcgatcaccaccaccaagaccacctcacacagtacttccatcttcacttcctcaataatcaccgagaccagctcacacagttctcccagcgtcacttctgcaatcaccaccaccgagaccacctcatgacagtactcccacgctacagcttcttcgatagccaccaacatgaacacctcaaagagtactcccagcttcacttcttctatcattaccacggagagcattccacggagtactcccagcttcagcttcttgtatcactagcaaagcaagaacattcacgcagtactcccagcttgacttccgtgatcacaaccaccaagaccacctcaaacagtattcaaggtttcactttttcaatcacccccaccgagaccacctcacac

SEQ ID NO: 37773 - DNA, 393 bp, Homo Sapiens
agaagagacaccgataaccactacagaggagcgagacatccccccagacatcttgtaccacacttagccctccactagatcgtgcagaaacacagggaacgggaaagcatgaggaacactctcgggactggaaaaacgtcaacagagatcaggtaatccaatcatcccaaactgagaatctaccgcctaactgatccagctgaagacagccttagcgttcgttctcatctgtataatggggcataatatcttctataaggatgcttacaattctggaataaaataatgcatatgaaagcatctgacatgggtaatgcactcactaaaactgggtgaacctggaaattctgcatttattcaataaatattacgtgaacgtctacaatatactag

SEQ ID NO: 37774 - DNA, 373 bp, Homo Sapiens
actgtgaacacagcgagacactcagctgtttaacaaacagagaagaaaaatgaacccactaagccagtgatttgtttatatgcttacgctaaacaacagcagtaaccacatcaaagcagaaactaagagtaggagtcgtatatttccataagtagctttattctgcactacgaaccaaaacaacatcaacgactccctcccttactgcacttatatctaccttcaccagccactctacagttgttaggtcctttaatctctacttgcaggttcagtccaccaatttccaggtcaatccaggtccaatgggggaaaatgctaaacccgatccatttattcaacaagttatatactgaatacttacaatgcacca

SEQ ID NO: 37775 - DNA, 464 bp, Homo Sapiens
actacaggtgtacccaggtgtactgctcggtggaataatgtctggacaatgagataagacccttcgtaaatactgcaccttctctttcctttcttacttatttgcatgaacctgttttacagcatcctgcactgtcagccaaagacaataaaaaaataagtcacctcaccctgtatgtttttagcttggtaaaatgctgtcatatcttttacttaacttggtcacttggttagtaactaggtaagcaaacctatttatagccatgtgcctattaaaacacactttaccataaaagtgagatgcactttccactaaggatagagtttcatccaatagtcctcttgacaagcttcagaagttttctctttgccatcatctacatacctggaaaggcactctgtaccaaaatcagcatactgaactagcaaggacagacagagatgagaggaaaagagaccatggag

SEQ ID NO: 37776 - DNA, 412 bp, Homo Sapiens
tgaattcccccgagtcaccctgttctcttatcatcacagtacttggcaccccatgaaatttcctggtttgtctattctccaccctcctgctggaatgtccgtcccgggagaataggagtcttgtcagatggattcattgctagcacagtgcctggcaggtagcaagtgtttactttgcaactccaggggaaagtgggattctcagacccatgaaatccaactaggatcagctcaagccctttccacatatacttaaaagcctcaaaccccaccacgcccccaggattttagcagaatctagagtggctcctgttctccagggcacctctgccctggagcagcttatctattgatccagacacgaatcttagcctgttcctcagctcccacaagaaagcccgtccttacagta

SEQ ID NO: 37777 - DNA, 428 bp, Homo Sapiens
ccaggtgtactgctgatagtcaaaatatatattatttttgagggaattaagtacaatgaagaaaaagcaagaaaagataaatgataaggtaggccattttttaaagggcggctgagggaggatcctctggggcagtggcattagagcagagaccaacttgcctggaacacagtagcacgagcagccatgcagccatccagggggagatcagcccaggcagaggaaagatgtgcagaggttctgagcaggggcatgctggatgcagtcaaggactggcagggtgtccagagtggctggagcactgtggataaaggggagagggagagcagatgggcaggtgggatggtagaggttgctctgaggtcacggtaaggatgaccttaccacggttggcttttttctcaaatgtcacaggaagccactggaaa

SEQ ID NO: 37778 - DNA, 442 bp, Homo Sapiens
ccctgcaggtgtgcacgcagtgagaaccggggggtagacgagaacagagttcgatctgtaactgactgaacaatcaattaagataactcactaccttccaaccaggcgattatgtgtcttatttacagtaaaaactacaacatatttctgttaacttaaacctaagtatatggtaggaatgaatgatacagagaaatggttgagtgacaatagcaggagactttggcctatgtaaaacaattaatatggaatttatagaacctaataataaatgtactggcaagggttaatgaaaatgtttctcttaagaatctgaaaatgtttcagacaaatataaattcatgaacttacttctaaaatgtttttaacttgaagatgtaatgttagtatgtcagaagtaaacatgaaacttttaacttcctcctccttgatatcatgcaaa

SEQ ID NO: 37779 - DNA, 383 bp, Homo Sapiens
ccggcggttgtctgttgagtgtccacaagagctttccttaatgggaccctacttatcatcacagaagccaagattttccatccaaagtgctatattaacaacttaataaatgttgttcaattctttaagtctgtgagacaggtaatactgtccatacttaataaatgaataagaaaatttaagcaatttatcctatcacacatctagtaagtcatgagaccaggcattcccaagtttatcattcttcaaagcctaggaactttctattgctctctgcttcctgtgaagcagctcctggttctaccaactatccagcttgttctcccactaacccctcacttccctcacaccaactcctccctctactttccatcatgctatat

SEQ ID NO: 37780 - DNA, 429 bp, Homo Sapiens
aggtcgacctagaggcccccccatcggcggttgtactccaccggcaggttgtactgtcttaagtattttacttgtattaactcatttgattttcatggtaacccagtgagatagatgggttatttatttatagggatgaggaaactgaggcatagagaagttatttacccaggtgtcacacagtgtagtaaatgccaaaactagggtttaaatccaggcagttcgactccagactggtctgtattgcttctttttcatgggagagttaacatgactctagttagtgttgaagtctacagtttctctattactgtgtccttagctctttaacttttacctcttatgacctttcaccacttgatctgatgctctcctgctttttaaattcttcctccttggacacatggtactgtctgatagattgcatag

SEQ ID NO: 37781 - DNA, 401 bp, Homo Sapiens
catcatagagcatcccccctccggcaggttgtactcaggagcttacagagcattcagactgacaagaccgcactgctcatgaggggtaaactggagagactgtgaaaggtggcatgtcttgtgccaaggagctcaggttttatcccaaagacagtaggaatcctgtgatcagattaaagggaaggggaagggttcatacagtctaataacttttaaaaagtcacttagttgcccacactagggaatgtactagaaaagatagaagcaaactggttaccaactgcctccaaggagacatggagcccaaacttcaaaaacacctttgcatttcccaattcaatactatagaatcattaaaaagctggtggttaaaagttaaacagtgttgcattcaagcttca

SEQ ID NO: 37782 - DNA, 388 bp, Homo Sapiens
ccaccggcaggttgtactacataaaaattgaaacaaataacatatagttcttccaatttcccttgtatgacctctttctttagttgttacagtgcttagttcccagtggtggataaataattttgccaaaacaattgaccaaacatgtcatgccaacaaagggtatcaaatgattatctgggtagtgccttagaattccaaatatgaacagacgtaaagaaaaaataaggacactaacaaaacagtattggctttattcataaatttgttaggatgtccaccaacacacacaatcacaaatagattactaatctttggtaatcttaattttctcaagaattgaagggtgtttagatacagaggacaatgaggggaggtggatttaaga

SEQ ID NO: 37783 - DNA, 351 bp, Homo Sapiens
ccatccggcggttgtactgggcccctgggaggaagtcaacaagctccaccacatctgacaacacctactgcttgcagcccttcccccaggtcaggcagctgcacacctcatgcttccaactgagggggaatgaatgggtaccaagagtaggtgagtctacttctttcccaggggtgagtagcgggtgaagaaatcagcatgtagtggacatttacatgtgccggatacctcatatatgcagtgtggtatcattatcctcactgtgcagatgaagacactgaggctcagggacttgttcaagacacacatctggtcaatagggagccaggattcaaaatcacgtcagtctag

SEQ ID NO: 37784 - DNA, 409 bp, Homo Sapiens
ccaccggcaggttgtactatctctggttttcagtgatgctatttctcctagggctttatctaccattgctttgtagaagcagggccagccatgtggcagaggtaatggttaaggaagtcaggtgagtgaagataaagacagaaaggcacagcagcaaggcagcatcaaataaaacctgagatagtactcctggaatgtatgacactgctcagaacctctgtgatcaagagttaattacataaaaaagaaataactcaacttttcatttacataaaaattaagttattttgtgatacatttctgttaattccctccttttcttcataatttctctggttgataattttagtatatagatttattttaggacatggtgaataagattatcagtgctaactctaaatgctaa

SEQ ID NO: 37785 - DNA, 402 bp, Homo Sapiens
ccaccggcaggttgtactgtgaatctgttgttgttggcagcatcttggttcgaggtggtcttttgtgtgtggagtaggagcttagccaataagtgtagattgggagtcaggatctagcctgctagatcaggactaggtcagggctaagattcagaatagggttttagtccaagtagggaaaagaaggactgtagattagaaaatcttgctgtctaatatgcgcctcccatttcctaggtccaaaacagaatttctaatatcctttaattgtctcctaatctgtaagagacaatggcacctccattcctccaattgacttagctgaaaatcttgggagaaaattctggactcctttttctgttaccccaaatccaagttgttagcaatccccttggctttacc

SEQ ID NO: 37786 - DNA, 352 bp, Homo Sapiens
taggacagtgcagtatgggctgtctgactaaagtagagagtgtgtggaaacatgaagaaggatccccagtccagcctggtagtggtattcagagaaaactgtgaggaaagtggtactaagcagagaactgaactggccatggtggaaaagatggtgcttgtatttcattttattcatttgggactgtctgttgtttgctgtgaccttctaaaggcgtattttgctttgccatatacaaaaaattctttacctataaataggacaaatattctttcaagtgttgttaagaattttagcattgtgtacaatgggggcattctaagcaacctacataaatattttattcagctag

SEQ ID NO: 37787 - DNA, 380 bp, Homo Sapiens
gtgcatagcctgtggaagccactcacggtactcagccagcaggtatataggggtaattcttccaagcagccagcaaggctacataggcagtcagcctatctctgcaacccagggctacgcagcaaggctctaccgtacaggggctagcagcctaggcccacgtacttcagcataggtgccggggctaggacagcaagacaggctccgcgtatgacggccagctatgcggaaagacctgccctatccagacaggaaaccggagcaaacgtgcttgtaagcgggtcaattcccctactggaaaaatccactctcgataggcgcgggagccggccaggcccacgacgatagaaccacgctgggccccggtgacccgggctacg

SEQ ID NO: 37788 - DNA, 454 bp, Homo Sapiens
ccaccgccaggtgtactctctgcttctctcctcacccagaatgtacagagctgcagctcatgtagagaaaattaccttgattcacattcctcctcagaacatgctattgatgattggtggaaagtgggaaagaggatcttagcgcaggctggttgttttaatgcaacagccaagtttttgaaaaactggcaggagaacaggagtttctgtttttttctcagagagaacaaatgtgaccagactatgtgatttaattattctctgggcctactgttttgtaaacagccccatgagcctgttaaagcgaatagcatgaagaccaaaaccttccagcccttctttccatatgccacccttttagtttcatgagttgggttgcgttttccccaaatttaaataatctgcagttgtttgttgtgatgtcttttcctggggctcctagtgtctcctagaa

SEQ ID NO: 37789 - DNA, 438 bp, Homo Sapiens
gctgggagcccggtttctatgatcaggactctagtgcaactcttaaacaagtcagcagagttggagaagaagctgctgggtatcctggccccaagtcttcaggaccttgaagttttcctttagacccacccatctggagaagatgcaattggtggtaagcctttaatccagaagagattttcaggcagggtaggtatgagatgctgggtttttaaaaaatcattttattataatatttttcaaacatacagcacagttaaaaggactttacattgaaaaaatatacaatcacagcataattctatcctttatgttgtcctataggtgttttatcacttaggtatctatatattcccttattgattaatgcattttatctttttgatgcatgtgaatgtaagtttcagatgtcagtgcaattccccctaaatatttcag

SEQ ID NO: 37790 - DNA, 465 bp, Homo Sapiens
actaggctgcggaagacgggcactgataggaagcgttcacgtagcaggtatttcccatattctggagcccagcccccaccgcagcaggtctcctgctactcagaggaagcttctccctgggagcaagctgtcttgccacaggagccaaatcatcacagaggtcgacacgggtctcacatgagagtggtgacttctcagggagagaagtccgctggatttcagcaaaagctgcatcgggccgagaagatgtgagttttgaaaagtggttgaactgccactcacctcccaagtagagtgagtcgtcctccatgtcgactggaacgaggatcacaaggtttgtctgctgggaccgcaggttgcagaaagacgctatcccttccgagagagtcttcaaatgacgagctctctggccgcatcagcccttctgtaagtcaccccccccgtcttccacagggtaccgagctc

SEQ ID NO: 37791 - DNA, 374 bp, Homo Sapiens
agccgtctctagaggatccacctgcggcagacggggggcacacggggctggcggcggcgcacggcggcccccgcacccacaggcagcagcacgacattctgggggcgggcccgctcatacaggagatcatgatgacattaaagagtgctcattcctgttctccccaccaccacgcggagctcggcgtgcaggcgacaccgcctagggacctgaggtgactgcgcgtggctcccacgggagggcagcctcttctccagaaaaggccatttgtgccaacatttccaacccgtcttccacgcctacccgtcttccacagcctacccgtcttccacagcctacccgtcttccacagcctacccgtcttccacagccta

SEQ ID NO: 37792 - DNA, 409 bp, Homo Sapiens
gaggacgggaggctcaggtggcctcatctgcaacccagaggaccggggaagagcagtggcggagacaatgggggggtgtctgtaggagagtaaatgtgtacactgccgagggggaggtggcagtcctgcagcttgtgccggagcatatgtgagggcaggagccggcccaggctgtggggaaagaaaacaaagggcctgctgagatttccgccagtaggagctacggaggaccgagcgagggagggaggcacggcgggagggagcaccggaggcaggcgtctcagaggtactatccctgccaggccctcgatcccctcgtcccagcaaacagccaggcagtggccgactcggccttcctctgcgctctgggggcatgacctccgaagagtcggggctccttcaccctgct

SEQ ID NO: 37793 - DNA, 379 bp, Homo Sapiens
caggctcgctgtcgctgggattacaggtgtgagctaccatgcccggccacgagaatctattttttagaagcttctcagacaatactgaaatgcagctgaattttggaaccactgttttacaccacaggtttagggactgtttgtgagttaagggttcctttcggtgatctgtgaacttggtctttgcagtacctagatcctgccttggagattatttagtagtggggattatttagatggtatacttaaccatttttcagatgcctgaagactgaactttagaagcatttgttaattgattttataaaatatcttaggacttttttttcttaacctcatgaaaatacattaccatactgtgctgaaactaagcaaaatt

SEQ ID NO: 37794 - DNA, 402 bp, Homo Sapiens
agctgcagcctcgctgccgctgtgtgctctgggtcccttctaaagagagggggaattcaaaggagaaccagctgcctacagctgtgggatttcctcctctcagcctttcctcagtagctaagccagacagaagcagagaaaaaaggccccagccccctcgcctccaagttgccttctcctgacagccagcaatgtggaacggatcccaaggggtaacagggcagggcaataattaattatgcccccccaccgccccgccgcctttcagctctgagttgaatctcaaacccctgcccttcagtggctgaggcagcccagctgtccgccgccgggtctatggaaggtcattgaaaccatgtctctgcatccctaactcagcagatctgcttctggtgtcctacg

SEQ ID NO: 37795 - DNA, 484 bp, Homo Sapiens
accgcgagtatcaagtgggaatggcttttactgagaggtaatcttgtggcaggttagagagcaagtctgtcagcccctccatgtactctctttcccagcagaacgtgccagctgctcttctccagtgtttctgaggctgtgtttcaggaagctataagcagccacacaggttcaagctggtacactgtcctcttctctgtaccacaatggccaaaccagaaatgattagggatgttactcatagaattcactaaggaaaattttgctaggtcttgtgttcaacaacccgtgttatcagagaaatcctcttgaagcttaacctaaatctcctgcaatcatttggattcacttcctcttctgatgtgagtcagcctttcatttgttagttgatgtattcgtccagtttccttctccacacaacccacccccaacctcaaacacacgtgtgtccacgtgcacactcatacactctcctcacactctc

SEQ ID NO: 37796 - DNA, 352 bp, Homo Sapiens
ggttgacttgcttagaaacatatcgaaggcaaaggagagctggacttacagggaaaacggatagagaagaggcaggaagaggtgccatggctggggttggagagggaggtaggccctactcagcccctccaccccaagaaacacatctacgtggggtggcagtccctcagtcttttctctcccacgccccacagcaccaaacaaaaggagaagccccctcccccaggggctgctccccaccccaacctgggctgtacattcagtggttttcagcagtcctatggctcagggggccacggggcaggggaggtggcccgtcagtctcagtggacagttgcagtgacccgggtct

SEQ ID NO: 37797 - DNA, 369 bp, Homo Sapiens
ttgggaagaaggatggacctgagggagtagctggagcgtggagatttctgcatcccatattaactcccactgagagcatgtatcatagacagcagacagccagggagacatgatgacacagccagtggatgtcagccagcctctgccactggtcacctgtacatggcacagggctcatgaacacagcagccgtggtggcagggatggaggctgcgcgtgggcctgaaagaaggggctcccactcccacggctgggtagccaccactgctgtggaatgtccaacctgcctgcgacagagatcaatgctgagcccctgatatgacggcattccccgaggagactgaccagccacctggtagcaagctgatg

SEQ ID NO: 37798 - DNA, 560 bp, Homo Sapiens
cttaacaggtaagaaaactgaggtcctgagcagatagattaggctgcatagttagttctgcaaggtctggaatccacgtcctggaatcctcccagtgccctttcagtgcatcagctgacctcgaaataatttaacagaagcagttaagaattaactttcctcaaaatgcttattaagcaaaagtaatctacattgaggtagatgagtaaagaataaggacaggttagggtagaagaaatgaggaaaaaaggaaacaccagaatggtccatattcatgcctaaaccctccctaatcctaatagggatttctccaccgatggtaacttgcaacttgaggggggccatgtggcataaagagttgtaaaccactatttccgcttaccctgtccattatatttagacaagaggaaagtgatgccagagaaaagatccaagaggacctgtctgtctctaaaccttggacaatcatttttctgaaatttgttgagttggagtagatctgagaaccgttccaggtaaaggtatgtactaacaagaaaatgaatggcagattgtggcat

SEQ ID NO: 37799 - DNA, 377 bp, Homo Sapiens
tcagaaagcaaaacagcagataaagagagacaaatgtacttgttattaaagacactttgagttgagttttctgttacttgcagcctaatacatccaactgatagggtggagttaagaataccttcaaagcataattgtaagggcctgaggagataaaatagatagaaatgcactgtaaaatgttaagtagcatataaaacgaatatgtttttattattgagtgcttaattctctgtcttccacatcttcataagtgtcatttttttcaagatctttaaaacaaaacaatttccaaatataattaatattacctcaacataagtggagaatgataagatagcaaatagaaaattgatcctgggttttctgcatcatct

SEQ ID NO: 37800 - DNA, 450 bp, Homo Sapiens
agaggaggcagagaacccaaagtgtgagataacactgaatcattaaatgggatttaattattctcccaactctcaggaattaagggacttcggaggaaatgcatgttttcacataacaaagcacgtgttcccctcctaattcctccaatctctcaaggcagaaggcaaagggccaagatggcagcacatgtagcacagtggctacaggtatcctatctgtgcaaagggtctaggtgttccactggctttggagtattcccagcagtcagggtggtagatgtgttcattcagccattcattcactcaacagaaattcatggagtgcctactgctatgtgccaggcattgctcgttctaggccttagggagacaaggtgggcaaggcagacaaaatcccccctcaaatgctgattacactctagtcgtggagactagactaataaacaagtg

SEQ ID NO: 37801 - DNA, 451 bp, Homo Sapiens
taatataatcctttttgtataaataggcaataacacaatagctccacatatatgaatatagtttattatgagcatggagcatggtgaaagaggtagaagttataccccaggtccttaacaatggatgtcttgggagactgggtgggaaatgcagaggaggtgaggaagatcactgatgtttttctttgtatatctttgagtgttttcctggttgaggtgaacatgtgtttctttcataattttggaatgcatcttaaagctttacaaaagtagtttggaagtgggctatgaagagtcaagtgttacactgtatcatagggagccactgaagagttttgagtaagggaatgatgtggtcaggaaaattaacccagcaggagtatgtatgatggattagaggcaggagaggtggaggatgggcagaacaattagagggttctctgcctcatct

SEQ ID NO: 37802 - DNA, 417 bp, Homo Sapiens
cagctagagtttaccctcccacagaaaacacattcttggcattttgaaagagcatttcttttcttcctttgagaaattatttagcaaggctgtggaaagcagggctcccagtggccattcaaaaattaagaccaagccagaaggcaggaggaaatgtcaccacaatggggagaaaataaatcagttagattaagattaagatctaacccttttctgtggttggggcaggcggatttgagaataatagcatgctatttctggaaagtccctccagagtaaaagctgggagggtgggggtgtgaaactatatgtttcagtgttagattaaaatttgttgaagttgattgaaaacagatagaaatggccaacggtccccctgcccagcacaggtatgccagtcctctgtggctgaggtcc

SEQ ID NO: 37803 - DNA, 407 bp, Homo Sapiens
gatgatgaggagaacccactgcaatatgcatagactcactatgttaaaatagatgagcagaccccacctccagataccgaaatgggaggtagtaatttcaagcgattctgatgttggtggccctgggatcaacagtgagaaaaagctagtttagcacgagaactgaacgtaatgttagctttataacgagctctagatctctaaggtcatgcctgattataatttgaggacaaatacacccgtaaaaacgggtgaggagatgtagaaacgagaattagtgataagtacaaaacagtaaatatcctatcacatagtggggatgtttagcttcaggaagagggggaatactaaattcgtaacgcacaaggaaatttatcagaggttaaccggtgactctcttgattctt

SEQ ID NO: 37804 - DNA, 373 bp, Homo Sapiens
tctctagagcatccactggctactttctagcctatcctgtaatgacaaaaacccgggtatcttcagtacctcagggatggctaagtaacaagatcttcacttggctctgccaaaaacagcacataaaaactccagttggacaggatgtaaccagtgtatatcacaggggttctcggccaggatgtcattaactttccacatgtgtcctgccaaattctgatcaacatacaacatgtatttttactgccattgaatggacctactgctagagtcgtggtaccagatcaggcctcatgagcatccaagagggcaccatcagggaagtttgcagctcccatcatctggagatgcaggactacagggcccccagggg

SEQ ID NO: 37805 - DNA, 386 bp, Homo Sapiens
cggacctccacgatcggcacattgctaaccaaatggtcaatgttcagacttcatcttattcagctcatcagcagtccataacttcctcttccttgatgcatattcttcacctagcttccaaaacctatacttctcctggcttttctctgccttaccggtaatgccttactggtctcgttgctggctccttctcttctgccccactttatgcacagaaatgccctagacctgccctttctctacctatactcaccctctactgcttgtgagcatcttgcggtcagttttccacctacccagccccctgcagtttgagctcaatacctgtttgttgaagtgcactgagtccggaaagtcgtttctgtcagtgagcttctacagaaagg

SEQ ID NO: 37806 - DNA, 488 bp, Homo Sapiens
tcaaccccaccccttcccataagggaaattcattcattcttgttacatagccgcttgggggtgggggtggaaggaatactacataacctttgaactaatgcgcaactaacatgccattaaaaacaaacaaaaatcaaccagtctcctttcaaataaattttcccaagtaagacttcagcttataacaatccagtttcttgttttatttattatctgcttccagttatcttactcctggtgggaaataaaatttattgtgcattaaaatgacacatttggagaaaagaggctggaaaatgactttttgctctaagtagctaagcagtgctcaaatacattcacagggatatctggttaaccctgaacaaattaccaatatttaatgggacagtttgagaactgtctacaaatatcttcaaaacatttccatataatgaactgcaagtccaagctttcagagaagaaaaaggtaacaccacacaagattc

SEQ ID NO: 37807 - DNA, 486 bp, Homo Sapiens
acagatgacgcagagaaccctggtggtgtaataataatagtcaatcaaacaaagaaagggttggagtttgccataaatatgcaaatgctaatatgcatatttagaactctgttatactaaagacctatttcttctcccactgacacagttgtccatgtcagtgtaagtaaattatgttttcatatttttattggttgaaccactaacaaactggtatgctacaaatatagctttttagaggaggaagtttgcttccttgggagaaaaatgaattgaaacgggacggttgtgttgcagatagctaaaagctctacagaactgttctatctaattattatgatgaccaatgaggatataactatttagcatatgagctagagaagatattgtcaagagaagtcatgaaggtatagatgtgcagaggatgtgaggaatagcaaaaagcttgggatacaatgggtttctctgcatcatctgggtaccgag

SEQ ID NO: 37808 - DNA, 482 bp, Homo Sapiens
aggatgcagagaacccatgaaaatctttagtaaatttaataatcctagaatcttcctttttttctagtctctatgaaattgctctcaaaagttaacaaatttcagtaatatagcaatcagatgacatttctatatttatatggcgggtgggctcagagatagcctttacaagtgatgacaagattcaggctttagtaactatagtctcacagcaaagttttcaacgcagtcatacagtgacatttcagtcaatgaccaactgcaaatatgatggtagtcccataagattttaatggaacaaaaattttctatcacctactgatttgtgttatgttattccctaccatattcagtacagtagcttgctgtacaggttggtagcctaggagcaataggctatactatatagcctagattgttaagcgacacatgattgtacattgtaatttgttagggcttttgttatttaaaatatcctcaca

SEQ ID NO: 37809 - DNA, 441 bp, Homo Sapiens
gctctagaggatacacggagatccagagatacccttgaatcagtgataaagtacatttaccaaaaagagaaataaaataatcagctgcttaaatggcattttccagacaatcaaagcctgcaaagctgaaatgacacaagtcactaggcttctgaggatgtgaggaaggagtgaatggttctctgtacaccgacataaaaccagcattcatcaagagaaaatagacaggtggaatatcacctgtagcaatactctagttgtcagaaataacatccctacttgaagagctagaagcccttccacttgcaggaagagtcttagccatatggtattccccaaagccacggagagaatgaaaaataaatgatgcggcaaactgtatttaaacactgctatttccagacaagttttaaaacatgcaaaactcaaaatgtgaacctt

SEQ ID NO: 37810 - DNA, 351 bp, Homo Sapiens
gggttagacttgttgcttcctgatcatgacggatgttgagcatggtttcatttgtttattggacatttgtatattgtcttttgtgcattgtctattcatgtccttagcctactttttgatgggattgtttcttttttcttgctgatttgtttgaattccttgttgattttgaatattagtccttcatccaatgcatagtttgtgaagattttctcccatgctgtgcattgtctgtttgctccttacttcttttgctgtgcagaagctttttagtctaattaagtcccatgtatttatctttgtttttgttgcatttgcttttgggttctctgtcatctgggtaccgagctc

SEQ ID NO: 37811 - DNA, 487 bp, Homo Sapiens
agaaccccagtcttcagctggccttataaataaatggaaagaatggggctcctaagatgagaacagcatcttccatgtatggggagcagacattactgagctgctgccatgtgggaatctcagtccagttgtgccaggtcttctgagttattccaagagaagcaagaattcgtctttgtgttataggttccagattctaaatattggtagcattttaaaaatatgtagtccaaagaagacagtcctgtgggctgactttggcctgcaggcaccagtttctcatctctgcttgtgaatgtcaagttctagagagaccattgctttagtcacctctgtcctctccctcctcttcccactcctgcctcaccaagaccaaattccaaaagaccagttctcctcaaaagttgtgtttcataaggaccttaaaattggctactagtctaacagtaaattatttcagttgaggactttttaaactccatgacta

SEQ ID NO: 37812 - DNA, 598 bp, Homo Sapiens
aaacagacgatgcggagaaccctacaaaatgcagatgcttgtacacatttgttttggagcaatgttcttggctttcatggagaaatgctacaccaaacagcttcagggaaaccccttaaattacatttgtggattcgtgattatggaggaaaaccatggagcagaaagccacagctgaggaaggttcaaaaatttacatttaatttcccctccaatctttatgacctctcaacataaacgtgaggaagaatacaagaatcccaactaaaagcaacaggtggaacgctaaaataactgatcacagatttcagatgctgggcaccacagcagagactaactagaaaggcttggtaaataatttgggctttctacagacctgccttaacaaagcataaaaccatgcctcaagataatcaaccaataatttaactacctaccagagcaaaaacaaaactctgcaaaaattaacaaaagccaaaactgctacaacatatcacctacattttccaatatgaaattaaaaattactacatgtgtggtgaaataaaaatgtgaccattagtcaacatatccgaggatgacaaagatggtggaataa

SEQ ID NO: 37813 - DNA, 462 bp, Homo Sapiens
ttttcacttaaatatcaggttaattaagaattaaaagactttggaagtatatgaaaaaatatacacaaatatactgatttggtctcagagttcagaattcctttccgaaaataaatctgttagggacaaactgcctcaagaagcttcttggtgctgcctgcccctccccactctgcaactcctctccatgctgccccaagcctttttacatttctaagcccttatctaggcgccacagcgaagccagcagactttacctatcaggcctcgctgctataaagcaaaccccaattacaaaccatccggaccgcacagagtgagttcgtgggaagcataaacaaactttacctacaatctccggtaccataaacgtcacagggtgataatgtggcagaataaaccagcaaacaaccccgggatgcggccataccaaagaactccctcaaactccctccccaatat

SEQ ID NO: 37814 - DNA, 486 bp, Homo Sapiens
ccgtaatcatgcattaggctgaaaccagaggtaaaaacacgggcccgcgattctatggtaaagtgatgacattttccagagcataaaaccaccgcattatcaactttgataaagtcttatggaggcatctagggattcaatataaatcatactgttcaaagtataaggtaacattaaaactgctgaggagccagataagtattttctgttaaatatacacaatttaacatttaaaactacataaattaattcttgctaaaagttgattcagttttacaaaggcatactttgtgaaccatggtgaatttccccagcaccacttttttattccaaaactccttcgattaggtttaactttctcctgtcattcatatgtgaaaattacagaaggtttacaatacgtagtcttaatagtaacatgtttaaaaacctaagcaaagggtacattaagttagctactactactcactttttgattaatgtttc

SEQ ID NO: 37815 - DNA, 477 bp, Homo Sapiens
tgcctaaacgggggggaagaaaaccacaatgtcatcccaaaacatgcctcttcgatataaaaacaacaacaaatttgagctgaagacaagaggcagcaaatgaaggaaaagctctctctatcctccccctcttccgcccaaagacaggatataaattctttactggggataactttagacttaccagaccagttaaggtaccaggggaatctgcaaacaattcttactccattagtttccgaatatgtatctaccttcccaatttcctgccctttgaagcctaaaactgctctcctgtgtcctgtcacttctctgcaaatctacagttctttgttgaagatggtatacaaatgtagttctaagccaccatttcaagttacttctcattaaggtttatcccttgtgatgtgtactctgtccaagaataaacttttttcttgttatcctttcatttgttaaaggggtcactccgaacta

SEQ ID NO: 37816 - DNA, 469 bp, Homo Sapiens
ggagaaccccaagttctctcatttgtagaaacaagattactctcatctactgcattttattaatttttatttgttggtttgtttttgcttaaaaccagctacgtggtctgtcaggaaatgccattagaaattaaaatgtggtatttctttgataaaacacactgatttctatagcaaactattaccttaacttgatttttagtgtatttgagatttcaaaaggtcatcccctttaagttttttaacctaccattaagaagctaattaattgtaactttgaatattgctgtttgcaggtatagcgtgaggaactcataaattgtgccatttataagaattatacacttggaggtggcactaaatttggtgaatatcaagtgttattttggtaactttactaataaatgcataaagacagatcagataaagctacataaatacttttttactcttcctgtactagtttgca

SEQ ID NO: 37817 - DNA, 361 bp, Homo Sapiens
ttgcagacagtctagccctccccgaggccttgtgtttgtggccggaggctgagtgcatactatttatgggactcaccagccaaggcaaggcaggcttacaccaagagccatgtcagaaatgccacctccaaatcgggacacttggttaggatgtcaccctcaacaaggcttctatttgcaatgtaagtccagcacatcctgcacccatcagacctcctattatgccatctcccccttaattcaaggagcaaatttgtttgcagagacttctgatcagggtctgcaaatgaagagacagccacgggtgcccttgccagggcccagccttggaatgccactgcagacaaagaccagagggtcc

SEQ ID NO: 37818 - DNA, 379 bp, Homo Sapiens
agatgatgcagagtaaagttttaagaaaaacaggtattgactttcaaagactcttcctggctgtcttctattgtatgagtatcttcacgtagaatctcaaagataagaagaaaagaagcaattattgaagatatagtagatttttttaactagctaacaagctgtgcaagtagtggaatatcttgaaactaacaatgagaagaggaagtcattatctgagatagctaatcaaagtgaccacacttctaaactgaccacgcttaattagttatggaaagcatatttttcaacccgctatgttaacttttacagaaaaaatatcattgagttaggaccctatggcacataagaatattttttacaacagttaaacaaagca

SEQ ID NO: 37819 - DNA, 364 bp, Homo Sapiens
ctgggggcttcttgttcactagagcccagggtctggtcatcagctctgtgaatggaaaactggactttccctgaggtgaccaacaggtcttagtgctgttaagtcatgggacatgggaatgcgtcatgggacattcctcctgtgatctggaatggacacgcccctcactagggatcacctgggttcctcccatcaggatacctgggaaaccagattaaccagatgaacaaccccatgccttgtacaagtagaagcagagcaaatcatgataaacagaaggcagtagactttattgagcccttacatgtgccaggccctgcgtcagccactttacatgaatgatctcatttggtcctcattgtaa

SEQ ID NO: 37820 - DNA, 373 bp, Homo Sapiens
cgactctagagtatccactgatgaaaagaaccccaacatctgcttctggggagacctcaggatgcttttacttatggaggaagatgaagcaggtgcaggcacttacacatggcaaaagcaggagcaagagagagaacgtgtgtcgggggaggtgccacacacttttaaatgagcagatctcacgtgaactcaagacgagagttcacttattaccaaggggatggcctaagccattcatggggggatctgcccccatgatccaaacacctcccaccaggccccatgtgaaacgttgggggttaccattcaacatgagatttaggtggggacaaatatgcaaactatatcaattagtaaatatgagatcatagca

SEQ ID NO: 37821 - DNA, 419 bp, Homo Sapiens
ccgtaagaatgtccatggttgtttcggggggtaaaagcaaccaccgactatacggaggtatgctcagtggttttttcatccagagaacggacatcttcacatcgaaaggtgatggccaccactgttctcaatgccaagcaacagaacgttctgagatggccgttcttccttgcacagcagctacggcagaatgatctgcagccaccccttagagggggctcttcgttttacctttgtacagatcttgtgtttacacatttgggccaaacagctttcagcaagggcatgtgtccacagctgatgggcagttaagaaccagcctgagctgaaggctagtaataccgtgctgtaggctctttaaaaggaaagcctggcataaacccagcatggaaaggaacattatcagttatcttaaattt

SEQ ID NO: 37822 - DNA, 378 bp, Homo Sapiens
taggctgcggaaggtgcacgggtgcgggtaggggctgccggctcagaggcgtgtccaggaacccccgtcaggccagagccctgccctgagcggcctgcaggggtgactgcgagacagcagcgttaggcccggtctcggctgtgaagtcgcccccaccgccacgcacgaccctggggattctgtcaaggtgggggccgtctgctaggcccgggctccctgaccacgtggctaggtttgcggaggaagccaggagagtgccaacaccaggctctgtaagcgtgaggctccctgccggccccatcccggagttcaccccatccttcctgcgtccctggacctcagctgttcctcattgacctcagagacaccctgccctgc

SEQ ID NO: 37823 - DNA, 435 bp, Homo Sapiens
tgcgcatgcacagttgctgcttgggcctacgaaaatccattctcccttcccctgtgacctcatcttgactttcctcacccacactttgccccatatggtttcaatgtgaccgggcccatagcctggctccagggtgcgcacatcaccaggccttcctgtcacctttgcaacagtgatgggctcaggagctgccatctgaccaaggtggcccagtgagcatcacgcacagggcaagaggtgctgtgttttggctgtgatatgggcctgcagtaggacccatgctgagtgcctcacggagagaacctgtctaagagtgaagccaacagagttcagcagagtgatagagagatgctctggacttcacttgtgcccctggatcaagctatgcctagagcccatatggacttcagctacataaggccatagactgccttt

SEQ ID NO: 37824 - DNA, 357 bp, Homo Sapiens
tgtgcatctatcagagaggatgcagggcatgcaaggcaaggcaaaaagtagtgcctttaaagacacaggagggctgctatgactggaagaaaaatgactcacaaaaatgtactactgttgcacactagtgctctggtgactgaaaaggcttgggtaaagatgagagatatctgtccagatgtgtatggggatggggataagaagtgggtgcatgtgtagctgcactatgaaggcatgtgtgaatacatatgcatatgcatatgcatgcagtgagattgcatccacacgcttgcatgcagcagtaatgcagaacaggtaggtgtgcagtcttccttctaggaattatcctcagccccc

SEQ ID NO: 37825 - DNA, 366 bp, Homo Sapiens
aaaccgagtcaaatgcatggcacacatttttcttttctttcttccgaaagagccttcaggggtttctggagagtgagcacagcctgccttccaggcacctctgagctttcttggttgtgtgcctttcattttcatttgccctgagcggcccttgcacccactaagcccccaagggtgactttggaagacaagctccagcaaccttggtgtagttaagatgagttttaacactgaaggataaagcgaggccagaattgcagatatgctgcccaggtttgcagcccctgataatggtgaaaccttgaagggagcaaactgtgaggctgaggctgaattgatagctccaaatgttgccatggaggcttc

SEQ ID NO: 37826 - DNA, 459 bp, Homo Sapiens
caaacatgtatttggatgaatgacaaatagctactgaatatttgccctgttccaagcattgttagaggtacatgggacagggcagtgaacaaaacaggcaaaacctcctgctgtctcagagttcacactctaatggggagacccaggcaatgaggaaataattaaaatatacaatgtgtcttatggcaataaatgacaaagaaaaataaagcagaggtgagaaacagtggcagtgttttggtgatcatttgctttgcaacaagccactccccaaagttagtggcctaaaacaatttaatcacagttcatgttctggctacaacaatacacatccctctcatgtgcaaaatacactcattcctccctcagagcctcgtaccattaagggttcaggttcaaagcttaagatcttatcctctgaagtaggtttagggacaaacaagtcttctcaggtacttc

SEQ ID NO: 37827 - DNA, 388 bp, Homo Sapiens
gaacgcagcaggactatagaggagcccctgccagtcgcagtagtgatgtactgcgtgtatgagctgcctcactaccttctacagggctggggttgcagaggtctcaggaagcttgtctcattctccagtgctgtacccttttgtcagcggctttgtattgggttgtgtagtttgaccttcaggcctataggtggcactattgtcagtagggtgcagatatctctgatatattgatttcctttcttttggataaatgtccactggtaggattgcttaatcgtatggtagttctctttgtagttttttgaggaatctccatactgtactccatagaggttgtgctagtctacattcccaccaactgtgcatggcgacgggtaccgagctc

SEQ ID NO: 37828 - DNA, 372 bp, Homo Sapiens
ctgtagagagatccccgccgcgcagacagagtaaatcgccgcacctgcaaaaggacaacagagacggagcgtgtaataagttcgctacatgttcatgcagtacgaccattttcctatcccccagcaccctggcaaccacactcatacgttgcaaagcagaagaaaatgggaactggcgaacaattcctatctcataagtagcctatatcatttcaaaagaggcacaaagcacttaatattcttaaagaatcaaaacaaatatacttagtaagaagtaaacattcttcacttactggaagttcaaacagctcctaaaaacgaaacaaaacaagaaaaaatagtacagattaactctattaacacactaaagtt

SEQ ID NO: 37829 - DNA, 378 bp, Homo Sapiens
aacgctccaggacgatgtagagatcgcccaagccacgaaattgaaaacgttgcagtagagaatgggacacagccatgttgtccagactgcactcgaagtcctgacctaaggtgatctgccagtctcagcctaccaaagtgctaggattataggcgtgagccaccgcacccagcctaattctcctttatcatgaataatctatgactaactctcactattccattagttcttgtgtataataaataataaacaggtattgactgttgttgacttggaataaagaaaaaaatccaaaaccaacatctattgtttaagccatttttagtctaggttcttttacttgcaactaaaagcatcttaactaacatagaactcttg

SEQ ID NO: 37830 - DNA, 414 bp, Homo Sapiens
gccttggtctttgttcccctctcactccctccacccctgccccccccaacacatgtggagtaccttaccctgccttcctagttctggaatggctgcccctgtgccaggccaccccattttctagaaccaccttcatacagcccctgcgcatcccactgtactatttccttgtttgtttttcctgtcaatcttgccttccgcgctaatgggacactgatgctgtatggtgatgtgttctcccacagtcatcttctcctcctgtggttggggtggggagctttctctgtgtccccccatgagagtgaggacagtctcatttaatggcaccatggtctgtggagccaggcaggcctgtgtgtctgactccacttcagcgctctcagccagcgtgggcacctcggacccagacagacg

SEQ ID NO: 37831 - DNA, 423 bp, Homo Sapiens
cctgcagagaaatagccaaatcagtgtgaactactggcttttatatacatatgttctcacatcagcttactcatgactgccttctaaagactgcctctttcaggaatcctaatagaaaaagcaactaagagaaagaaaatgaatcacgtcagaggttacagaaattataacctacaccatctttcacaactagaacatcatataaagctgtttcattatttttcttactccttttacacatttttcttactcctctttgtcttgttcctatcagcccagggactctgttgcattttgctttactttctggtgtttgtaatataaaaacaatttatctattgtacatgttttccatttccagtacatacacatgcacaaaccccaccttcacctcaggctttgatttgactccaccttcaagct

SEQ ID NO: 37832 - DNA, 416 bp, Homo Sapiens
gagggtgcagggcaaaggcactcagtttgaaaatgcataccctcttcggtattctaatatctctcctgatggggaatcactgattgacattgtctcagaaatacattttctgtcctttaaaaattctgaaataatatcaaatttttctcccctcagaagcctacgccaaataagtgctgcaatcttagtacaactttgtagtacagtcagactcatttgttgatgtctgactggctgagtttttaaaacctattattcccccttccgccccatatctggacatgccagtaagaaagctcaaatgcttccacctttgtgcctggtggaagttcaaaccacctaagaatcctcactgcagccctacctccaagccactaggaaaagccaggctcctctactttccctgctcaagccat

SEQ ID NO: 37833 - DNA, 401 bp, Homo Sapiens
aaaaggctgcaggtagaatatagaggatcgcccacggactgactggtgcaagtgaccgatgaatggagtactaacgagctagattctatttcatgcagatgagagcagagagcttctacaacaagaagaggaggatatgctgacacaggcggctgatctgcgcaaagcaactagttggaggatagagggaggggaagggtggaggccccagaagaggaggctcagcttaacaagttggacctggctgcagatccaagcaaggtcaggattccagagtccatgaggagaagcttgaacttgaacctgctaaaacctgatagaaaaccagcgaccaggagggtgagggatatgcctcatgcttgtacagggcagggagcataggtgaaccagcaagacagagc

SEQ ID NO: 37834 - DNA, 365 bp, Homo Sapiens
cacggaacgagtcctgagagctaacaattcaaaaagtgctggaggtttctgtcattctgctattaatggcgacaaatcccatgttcattaaacttttcatcaatttctcaaagtttcattttcagaagtaaagtaaagttacttcttggtcagtggatgaattttagataaacacctaaaaagactggcatcactggcatagaaataggttttagacacttatcagacatgaagttctacaagtttattgtgagtatattaagttattgctatttcaagaaagaaaattcacaactgggttctaaatatattgactaatttttgtcagtttctgtgagctgcatgagttctcatatctcacattg

SEQ ID NO: 37835 - DNA, 400 bp, Homo Sapiens
ccctaataaagtcccattattcaaattagaccactttatccttgaactatttatcagaaaacagcttgatcattcatgctataacaagaatatgagttaaagattgagttctttcattaatataaaatttgcaccatttagagggatctgttttccttaaaaattatgcttatttgctatagtttgttagattttctaataggtaaacccagtctctgcttcatatactatttttaaattatttgtaatgtagatgtcattgatgtagtagactgcatgccttcatgtcagtttctctgggaaagctatttccatgtatggcagatgaaacagaggtaactggtcaaatggttgtaaaggaaaatttgaagttttaattatatctaaacaaagaacactt

SEQ ID NO: 37836 - DNA, 405 bp, Homo Sapiens
ctgggccaggaacacctgggccatgctcgccatcttcatcctggtgatggcaaatgtcgtggacatggtgagctcctgctgtccttgttgaagggacgcccctgttctcagtggagaagggcttctgtttgggtcacacaagcagtttctcagtccatccctccaccgtcatgtagctttggagtggctcttaggttcccaaacacatcatccccacctagtggaaggagtcttgtccctgtcatccagggagcctctgggatggacttgtttccttgaagctcctctcccagagtccgagagcacagttccatgtgcccaggcctgtgctaggtaccttatgtatgttgattcatttaatctgtgaaaaagtcctgagcagttgtaccagtatctgctcggcgg

SEQ ID NO: 37837 - DNA, 386 bp, Homo Sapiens
ggcgttatttgtgaagaggggatgtgtagagttatttttataaaattcctaaacggtagactaaacaaaattgagaaagaagtatttttttgaatagaatagaagttgtaaatgaaataactaatcacaaccagaatctttggttttaatgttgaaaggagagggggttggttgcacactgaggatggttctccaatacgatgcctagggaaaggcactggcttcagctggacgctcactccagcaggattctttgcacaatgctagcaaagatcaatgagaggaaggctggagccaggcactgcttcatgacagcttgaatttggcaagacggcggataagagttaatgatctccagccacagagtggcttaccatttcctttat

SEQ ID NO: 37838 - DNA, 455 bp, Homo Sapiens
cctcacagagcgcccgactcacttttccatccttatctgcctccagctgctacccagctgcctgactcttccatttctttgctcaggccttagtgtcccgtggaatgctcaaaatgctacccatcccgccaggtactggtgccgcctctaccaggaagccttccccagtgccccaccatcacctcctctaggccacaatgccatagacctctccacagaggatgtcatgtccacttttggtaacagctccctgttcctatggggaaccagccctgcaggggtggactcacaactagcgtatatggaggaatgggtgtgagactcaggtggtcctgtgaaattcacttccaggacttttgttgggactgtgggaaagtgttctcattcacttggcagtaggtgtgagctacgagccactggggccatctttgccacagtggcagtcagcctcaagt

SEQ ID NO: 37839 - DNA, 354 bp, Homo Sapiens
cctcaaactgcgcccggatctcctcctctatcacgctcaagtcgaacaggattcttcttctcagatcaatgtctgtggaagactagtcagatcccccagaggggtctagacggaagccgcacgatgccccggatgcatacaccaaaataccatgatttaccgtcctgcccagaaggactagtcgctcaggatcaagatgccgctccagcacctcagcctcagcgctttgtgagcgtgttacgagcttgcctagcccatgagattgcacggaccctcataagatcccatagacaccgtaaccttccatgggcatgttacaggctgaacgcccagccgcacgcccggactactgta

SEQ ID NO: 37840 - DNA, 512 bp, Homo Sapiens
gggggacacggaggcaggagacagcagctgaactagatatcaggaaatgtgccacgaagctctgctttgcgtcaacaatgatattttcatgttggtgacttcatcattacatgatttgattttgactcttatttatcattttgtaccaatttgctagctagtgaatgagtccttttgatgtcttttgagtttactagatttacagtattgtttattaaaataaattcctagttactaagtgttcgcccccagttaataaatacaacagagtaaaagaaagaatgctacaccaagacctcagattgaattttggaacagttaagaattgaaagactgacgtggcttattctaaaccaacagcaagaacaataaaaagaagaaaaatactttattgcttttaaaatagttttatttttaaattgctgtggttgctacccattttgctgaaacagtaatttgagcaactcagtgactagaaaaaaatcagctgacaggaaacccgaacacggata

SEQ ID NO: 37841 - DNA, 548 bp, Homo Sapiens
tatccgtgtcggggttgggcttgtcattcgcccttgctcaggctttgtttccttagctgtaaaggagatggtgatggtggccttgtgacctgatgccatgccctacacatgctggatcctcagcaaatgccagcctctctcctgtccctcaccgggtcctcctatcactgccccagggctggataagcctttgctgtgtgtggggggagggcactggcctgggagttcctggatgtgtagcagcatccctgatacacctgactgatgccagcgccaccctcttctagtcacagatgtctccaggcattgccacgtggcccctggggtgtacaattgccccgggttgagaaccactgcacggtgagaaaagatgtggaaggacaggaaactggcagttactgggatccccgtcttggccttggacggagccagactggggttctgcagatttttctgggaagagctgaacagtaaatatgttcagcagcacaggtcacaatgatagctgctgaagcgactcaactgggctgttgcgtagaagcagccct

SEQ ID NO: 37842 - DNA, 526 bp, Homo Sapiens
tatcgtgtcggggttgcagcaatgagcatggttgcatggatatgtttagaatggaaaattctgaatatatgtgaaccttccaaaaaaaagtttttaaagttgtatcagttcattacagtacaaatgtaaaattaggggaattgtttaggagtacccctcttagacccctaattaggagttggaggtctcagtctgtgaccaggattagagttcgttctatggctggaatctgggctcagccaggataaggttctgtgtggatccagtactaatcatcgctgcatcagggctctgcctggcaggagggctcgggagcctttgctctgtgtccacagctcgactgctgccgttccaggatctgaccacttgatgtctccacttcacaaattgccaagtgaggaaagagctggatagagctgcctagacacgtaccggccctgagctgggataggttggaggccatagctcaggcaaagacttggaaactgcagagaatgaatccaagtggcagcaaagctggctgggc

SEQ ID NO: 37843 - DNA, 525 bp, Homo Sapiens
tatccgtgtcggggttggggtgggtgggaaggtgaggaggaaaggccactgtttcaggtggggttggagggagatggaaaatggaccacagaggttcagagaacaggccctttgtggaaagggggagaccaaataatgctgcgttgtgaaaggtgaaacaggctgcaaacagaaggagcccacaggaagccctgctctgagcagctgaacattctggggtcctcagactccgataaaaaagcacatttagcctacagctttatgcccttcctcctacccttgtggactctgccacagacatgccctccagattgattctatccacttgtctctagtctactgctactattttagtctaaggccttctccccgctttcctgggttatggtcacagactcctatctgagttcccagcaccaggtgcccagttgttttcatctcttaacacattccacatattatagcaagagagatctttctcaaatgcaaatcagaccttgttgcatcccaatctcaagcccgaac

SEQ ID NO: 37844 - DNA, 412 bp, Homo Sapiens
tatccgtgtcggggttgggcatacacaatccacactcccgagttccatatctctggaccttgattttgccttcctctgtgcagggaaaaatgggaggtgctttcccaggtttcacagcctttatcacttctacttgttcactgagtggcagctcaacggaaggtgagagtttgaggagcacctggggaaggagcaagaggccgacagtagatctgtgtggcttccttttctggaggtgcttgctctctctgaatgctaacttgttttcctgtttaaaggtcccagtggttctgggcctcctttggctcttattacagaggggtaatcctagcatgtcaaagaggagaagatcaaattgaaagaaaggtatttgaaggagtctaattgttccccaagatacattatctactct

SEQ ID NO: 37845 - DNA, 412 bp, Homo Sapiens
ggtctgttgagggtctgcccagtcaggtggctgccgtcttccagcctctgcaaagtgaagcaagagaaggagagaccaagcgcttgggcacgttccctccctctctcatttatccattttcctccttccccttcagggtgtagagaaaggcctggaggattcacgaggggaaatgaagaatatggtgagttctcttgggtcagcgcctgactgctgaaaagagggcagcagtgtttctctcccccagccctcgaagccagtgggcttccaggattggggacccctggtgccaccctcacccccatcagcatttggatgccttcctctaggtcctttaggaggtgatagtcatcgctgtccgaggtgtcatacaccaggttgttggtgaaggtactcctgaggaaccgcacgg

SEQ ID NO: 37846 - DNA, 448 bp, Homo Sapiens
tcaggatggtcatgtacgttggtgttgagcacgccgtggaagaagcccacacactgccagtcggccaccatccgcgccgtgcgccgcgtcacctggggtgggacagtgtgcttgctccctcctcggggtcctgaccagacctccccactcgtgtccatccttcccctccctgaaaccggctgtgcttcgctgagtggctctcactctgcagtttctgggcgatcttcctgatgtcctgtcagcgcctcaaccacaaggtggcgatgaagagtgcgttgcactcacagcatccactctttcatatgctcacaaaatttggcttttacccaaactagaaaaatcagggaaccccagactcaggcccagtagagaccccaaagaagcagagaagggtcagttcactgaggggccacacctgccccagggccaggccactgtccatcctggt

SEQ ID NO: 37847 - DNA, 370 bp, Homo Sapiens
gagccacagcactgtagtctctccagccgccgagacctctcctaccatgctctccttcatgtatatgactacatttggcatttggtatatatccttggtgacatttctagcatatctttattccaacaaagcccaagtgcttgtttaattttaatgcatgcaacttgactctcctataaactatcctgtatgtgcctcagcctcgttccagcaggactcctactagccaatgctgcacatttatgtgttctagaagagcctctgccttcaggaggatccactttggaaaaggccctccttcagcagagcttggactggagtccaggccccctgctccacattccttcccccatctattccctcccatctc

SEQ ID NO: 37848 - DNA, 411 bp, Homo Sapiens
acactccctgctgggcataggatgtgcctgcaaaaagttccctgagcctgtaagcactccaggtggggaagtggacaggagccatggtcataaccagacagaatatggaaacattttcataaagctccatggagagttttaaagaaacatatgtagcatgattttgtaggagaggaaaaagattatttaaataggatttaaatcatgcaacaacgagagtatcacagccaggatgacccttgggtcccattcctaagacatggttactttattctccccttgttaagacataggaagacttaatttttacacggtcagtgtccagttgaaggcagaacactaatcagatttcaaggcctacaacttggggactagaccaccttatgttgagggaactctgccagctgcgtg

SEQ ID NO: 37849 - DNA, 356 bp, Homo Sapiens
caacgtagctgactgtgaatctcctcgaagctctgctttcatttgaacagtcttgtgctggtggtttgattcccagtttaggatggaggagcccctgagagttgggattagaggatcctccatttgcaccctagaaggttctctgtgacatccccctttctctgcagagtggtgaaggaggagatctcggatgacaatgccaagctaccatgcttcaatggccgagtggtgtcctgcgtaaggagccctcagccttccatccagctgcatccctgtgctgggctggacgagggaaaggcatcactgagattgtagctggtggtattaagcttcagtatctgaatctttctttactc

SEQ ID NO: 37850 - DNA, 428 bp, Homo Sapiens
agccgtgtattcctgagcctgtcctctctgaagcttggggaaatgacagcctttctagctacgttagctgtttcccagagatttaaagtggtaaatctgcctctcgtaccctggcgtccccctgtagtcatcggtcttcccaaatccagagctcttagttcctggttctcccccaaatcttcacagaacacaacttctggttcctttcggggtgttgggtggttctagcgcacccctatcccttaatctctctatttagatgacctttggtggttgtgagaggaagggggatatgccctgtctttcctgggccccttcccacatcctggccttggcttccaataactgttttgtctttccctcccccgcttcgttcccaggtttcggtctaagtaccacccagatgaggtggggaagcgtcggcagga

SEQ ID NO: 37851 - DNA, 473 bp, Homo Sapiens
aaatggaagggggcgcatgtgtgatgttacgggtgtgtggtctgctcatcatctgccccacagcgatagtatcatggaggcgggagctctctgaccttaggacttgtcagatgagcaaatgcggcttccttactggtcagattccagaaccagggagatgtgggtgacaagaaaagatgaccaatggctcagacataatgcacccacaccacagagggtgatggtaaaaaaacgcgtctctgccctgctgcctcgttgctatgaaaacccaagaatacccacttgggttaggccacataatgcatacacaatagctgtgggggtcaagcacaccaattcggaagtgacagaaacaatactcctgtattgtgtgacctgatattgctcagtgatatgtatctcaacagccagtgccagctggtgaaatttcagtcaagaaaatgacacagttcctttcatactcccagctctct

SEQ ID NO: 37852 - DNA, 466 bp, Homo Sapiens
agggccgcaggtagatcagtgattgtggctggcatctggggatgcaggggaaggggagcttggtgaatgggagagtgtgccaaagtggggagggtgcctccatctgattgctgaccagcaggaatatggctcatccgctgtggccagctgggattttcttttcccctgtaaaactgcctcatttagaaatgtggtctgtgtagactggcttctctaaagatcatgcgtgaacccaacaaaacgcatttccgggtcagaagaagccgagggctgtcattttgcattccctgtgcgagactggccaaggcacaattcattgcagaatttggcctcaccatgcgtgagtcagaacaagcgccttgaaggccagggatttgcagcctgagaaatgatgtactccgcgggttgaattcacgtctccatacaaaggctcccctgtttgggctgcttgcgtcttgatcctgcc

SEQ ID NO: 37853 - DNA, 365 bp, Homo Sapiens
gtagttgcgtcgggttgtgtaatctatggtcataggagagggaggggttgcaaggcagcctctttaaaagtggtgttcactcttctgtcgagttctacaacttttagtgtttcattcccctccagtttggcgctgaccctgtgaaggcattaaaaggaaaacgaagtattagtcaccagctgttagctacaattctcatgctttgtagcgtgatgcaatcattcaggggttgcaacttggtgagacggcctgggcatgtttcttgtccttttctctcctagtagcaattctctgtttccaaagtcccctgctaccagcctctccactagtccacattcctacctttatctacacccaaggcatcc

SEQ ID NO: 37854 - DNA, 531 bp, Homo Sapiens
atgtggacactagttggacgaagccctagggccaactgcctacaatggcctcactggcagtgggggaagagggtaggctggcttcctcctgcccgtgccctgcagcccagctgaaccagcctgcctgtgcatgtctcagtgacctcactccgggctattaacctcccgtggcagctgtcttccctactgtgggaggggacatgggcctgcacagcggtttattcagggatgaaacctaagctatgtgcagggtccctgggttgctgagagagaccgggcaagccttcccctcccactgcctgcagaatgacggggaataattaaagactattaaaggaaattcaactccaccttcagagataacctaatttcctcccagcacacacagcctcttctaacatctggccccctaccccggctacatctggaagctccagctcccttcaaatccagagtccaaaatcccagcccaggaaccacggacacctctaggcccccaaatccgtcgtcagacactctgctaccctgacc

SEQ ID NO: 37855 - DNA, 364 bp, Homo Sapiens
tcgctcatataaatggtcgctgattgagaccttcctgtgagagaattctacagtactcataggccctgagcccagtttgtagagcctcaaggaatttccatgaagctgcaatgctccagagaatgaacaatgtgtgtaccctcaccaccccatgacccaagctgctatagtatggtgccatcttgaaattggagccagtgcttgagtgctctgctcaggggaccagtagccacttcatttgtccactcttgaggctccactgtcattccaccatgctcacatgggtgactacaatgccatgatcccagctgctcagtgcctgtggccaggaacagttgtggctctggtgcccacacccatacag

SEQ ID NO: 37856 - DNA, 525 bp, Homo Sapiens
gttcatttgagggaatacagaaaggcttaggatgaggtagcatttagactattggaatacctctccggggactctctccatgggagctgggctgcacttgtgagagccatgtgtgcacatctttataagccatcctctttgaagttggtagtttgtaatcagccatgaagaaagtatttactgtaaggaaattggttgtacccagcggcttttctccttcccccacaccccagttgtttgttaagcatttaccagcaaaccactgcctaactctttggcctgcatattgagcagagtccctgatgtaaaaaggaaaagaattactcatctagggaggaagacctagaagactcactaaggacaggtggtgctcagttttagagctgctgttgtaggaggcagatgactgtgcttactgaaaaatgggaagaacacttaaaaatactgaattagaggagaaagacttaatgaactaaaaaactgtgatttttctaaataaaacaattcagcagtcactgtggaagg

SEQ ID NO: 37857 - DNA, 403 bp, Homo Sapiens
cctctcacttgagcactgtagtaattctacacttactctgtaaccatcccaaactcctcccagactacagtctggcagaggtcctgctattccagatacctggaggaagttgaccatttacatccatgcaggcaggcctgaagatctgggcctttactggggtcactgaggcagttcactgagctcagtttcagttacccgagccactgtttatggtcagttctccctatagtagaaacccacacagttacctgaggacatgctctctggtactcactgaaagccatactcatcaacatccggatacacggtccagcatatgcagaccgaactgcaaaaacttggcctagtgtttgccctatggagcaatgccctgaaggatatttagtctgtccaaaaatga

SEQ ID NO: 37858 - DNA, 379 bp, Homo Sapiens
ggctcctggttgctcccggctgtctttcctctggtatctgccatctaagtcccaactgtgaccccagggattggaaagggagcatgacagtttccgtccctactcccatccttcaaccacccagcccagccaggaagccagcagagcccaggctaagctagctgctccttcttttgtctttcacggccaggcaggcgtcacaggggaaagacttgggttaggtaacaggcggaactggacaggaggcgctggggaacaggctcccctccaccaggtgaactctcttggctgtgcaatgtggtgactgagacaggcgctctcagaacctgacacccataaacatgtgccacactctgtgatatgataatattggggtcag

SEQ ID NO: 37859 - DNA, 398 bp, Homo Sapiens
cctcccatgagttgctattgtcttgtaaagaaacttcatgaaagattccagcttacaccataaatataaggcgttctcagcagcaaaagagcattaagcccaagaccttctggataaagcttctgctctttccatttggttcccggctcaagattttgggataaccatcataagagagttcctgtgagtttcatggtctgttagtaaagtataatcctacttaactcttcctaagaccttccagaatccagagctctcacattggaatttttgccactaaatatttctctaattatttcagacatgttggactctccttcccaaccagatttaagttctagaccatgaagcttaatactgtaagctgaaacaagcttaatactgcagagaatacagga

SEQ ID NO: 37860 - DNA, 386 bp, Homo Sapiens
ggcctccccggttgctaggttccaaggaggaacattccaagaaagaggaagagccatgctgaagctgtataaccttttatgacctatcctctagaagtcacagaacatcacttaggctgcatcctcttcatcaaggcactcacaaagtcccatccaggttcaagaggagatacggaggccgcctcttgctctagaagagcatatgtgactagaagtattgctgtgatcatctttggaaaatatctgtcataatgggaccattgaagagtggcagaaagccttgttgaactggtttccagagagtggagcccatcataggtgtgagcactgtggcacagcagctgctgggggcagatgccaggtctgggtttgagcaggtagtacaa

SEQ ID NO: 37861 - DNA, 444 bp, Homo Sapiens
ggcctccttggttgcctgttggaccaacactaggtatcaggaagtgcaggaagctcagtttataaaaagtcatctggtgctaccagctgtatgtagcttcctctgaaagaaaaggaagcgtggggagtgtataaagcagttagttcttcacctgaggctgcagttccaaaactgaatggaaactgtggtgtttgggaagtgtgtttgactaaagtttccttacctcaatttctcaaaggaaactgtgacccttcccccaccatcttccaccccttcagtctccatacatacaagaaagaatgatgtcctggagcaacctctggagaacaactgtggggcctccccattacaaaacagcctcccctgtgtgcaatcagaattgctttcgtctgggcagaaccatacaacacacagctgggctgtgtggagagctgtggccgactg

SEQ ID NO: 37862 - DNA, 392 bp, Homo Sapiens
cctcattggttgcagatgcgctgcagccgcacaaggatgctcaggacgttgacaaagtgcaccgcatcttcaaggcctcctgagtgctgcccgtggagaaagaaacacgaagcattcaatccaaacgggcacatggacatagtcccaccctcaccatcgactgtcccaactccagaaaggcaggcaggagcagattttctaggtccgcttaatgagttagacagagtggccattcaagtccacatcccaggcaggcccctccgcacttgttcgccatccccagttgagaatgacatccgccccaccagagctgacggaaagacagccactccacttcattcacaatcatagcgagtgctctgaaagagaagtgggggcaagcaagtggtagg

SEQ ID NO: 37863 - DNA, 380 bp, Homo Sapiens
cgcctcattggttgcctctgagtctcctcctcccaagtagcttcccttgcaccactcaagacaggctcaatcaatccaggaatatctgctagagctccccactctggccctcccataattctggtcgataattctcttccttttcactagacagggccctcagaggtccatagacttgtggtgaatactgaccatccaatcacaaccacataagctataaccacaccgtaactttcaggaattttaaccaagtttctgtcacacacatgcacaaaaggctacattgttttgcctgttctgatctggcctaagcagagatgggttatggcttaatgcacctatttccccataggtgagctacatggtcacctgcaggtgaa

SEQ ID NO: 37864 - DNA, 359 bp, Homo Sapiens
cctccttggttgctcaggagtgtgtggttctgtttattctttattcttgttcctgaaagttggcttgccagatgagtgacctggtaacttttgaagggactgttatttctgtgtgcaatggcgaggggaggttgagaagccgacaagggagtcaagaagcttggggcggaggggggtcttcagcatggctccaggctggaccacacggacgaggctgcagaccagctgagttgtgtatcagggtagaactaggcccctagagtgacacagcacctggctcacttagaggagagttttctagcaaccaagtgggaggccgcaacgatgggaggcccgcaaccaagtgggaggccgaggcc

SEQ ID NO: 37865 - DNA, 430 bp, Homo Sapiens
ctagagagatcccgcgcctccttggttgccttgggaaatgcgtttcccactatcacccatctcagccccgagggaactggggtatgtggcggtggaaacagcgctgtgctagtgggtcatggcagacaggttctctcctgtttctgcctaggactggtcgcagtaataagtcacttctccattctcagcctcagtgtttctttttcagatgaggggaacccgggtgtccctgccgcctctgtcttgcctatcagcttctgtgtatctcactgcaggagttaatgagtgagtgaatgagccagtatgagtacttggcaaaggctgatctggggcagggagagagaagaggaaagacgactagctcatgactgatcatccacttggggcaggcgcacccttgccatcacctacgttcaaccaagtgggagga

SEQ ID NO: 37866 - DNA, 384 bp, Homo Sapiens
cctccttggttgcccaattgtcacttattaggtggaatctgaaccacactacctggctccaaatctaatcctttcctcttaccacagatgatgcattcatttattcaacatattcataccaaagacgcatttgccaggtacttattgtttgttactcaaccgatgttgtcttccaccagaaaccgtgtcttctaagactgtaacataaatgtctgacaggatgagagagaaggtagaaaataatagctaaaggaatattttagatggtgtgtacattcacaaatcttctcctatattagcacagatgattagttgtcatctcttctgagcagtttctgataggggcatgcctgtattcctgcaacctagtgggaggccgtgtac

SEQ ID NO: 37867 - DNA, 536 bp, Homo Sapiens
gccctgcatgaaaaggggatcctggcatcccactgtctggcactggtctccagctagtgctacttactagcaatgtgaccctgcagcactcaagtcacacagcctctgtgtctcacgctcgcttctctcggtaaacctgcgtttcataactactatcattctgtcacaacggtcagttcgcgacgttttaaaaggaagtacgaaacactgagtgctgcagtctgttagaatctagcacacacgtaatcactcaagtacacagatcccgcctagtaacttaatttcctggtcacaccttttgaccttcagttgtgctgtagccacccctagtccgtcctgctgcctgcccttggaatcatttccatggggacactgttgggcacgggtactgtgtcccttccaactccggtgccaagcatgaggcctggcgcttagtggagcctcaagagtgtctactgagcaaatgtcaatgaatattaaactgaggctggaggagcgagggtgctgggggcaatgtcgcgacacttggggcagac

SEQ ID NO: 37868 - DNA, 512 bp, Homo Sapiens
tggctcccacttggttgctggcctcccacttggttgctccctcctgtcagtttcccactagctaacccgtcttccagtagggtcctatcctgggggttattacaaatgctggtagcagcatgtcatggaaagtttgctctgtttactttaattgttgttgctttacttctgcctgctgcaaagaccccttttctttacagtccatcgtttccaacccatgcaatgcacaacctaataccaactgagctggcaccactcctttgatgtattttttcagaggaaggttatttttgctggcttgaaaggttttcttttctagctttaggtaaaaatcagcaaagattccagttcttatcaattgagtgcttaagtaaacagagcaggtgccaaagtcaataggatatggaaaacaagattctgctgaagattatttgtaatggggatcaactgctgacatagaatcaggagttcacacttgatgaaaaagaacatgaaagaggaaagagcccaaa

SEQ ID NO: 37869 - DNA, 625 bp, Homo Sapiens
gcaggtgtgtgggtagaccagcaccttcggccagggcagtgccagcttcctttgcccctgccctccacgtgggcaccagtgtccaggacatctgcggccaggtgggcagctgtcggcgcagttgacgtcttggctacatcgtggcactcgcttcacggcgtgctgggtgccaacggtgtctgcttccccgggtgtgtgtctggtgtgaccttcggatgtccacaccaggaggggtggaggcaggagcccctgccaccctgcatccttcacctgcacacattgtgtttctggggggttctagttcttttgctggactgaggaggcccagggagggagacggatcccgagacgcacttcaccccagacctgtcgcagccacatcccctttcttacggttctgcttcccacaccacatgcaccatgttttgcgtagaaagccttagggaaaggatgtttctagaacatgaactaaatctagcgccttcccgtgagtcaggagacctggctgtgtcctgtggtcagtggtctataccaggctcctgccctgaatggacgctctcctcccggaggatggcggctccaggagcagcagtggaggtcgggaacgcctcattgtggagccccg

SEQ ID NO: 37870 - DNA, 366 bp, Homo Sapiens
cacccaggtctaacttgggtgacgtgcataccctggacttgaggagcaggattcctgactggcttgctgtgaagggcaccactggggcagtgacgcagcttcacacgcagctcgggaagcacacagtcggcgcagatgcttccaaaatgtctgcaaggctgcggcctctactgcatccagatggtgaactggctaactctaccgggtcccgatggtgaactgctaactctgccgtatcccgatggtgaactgccgaactctaccgcatcccgatggtgaactgccaaactctaccgcatcccgatggtgaactgctaactaccgcatcccgatggtgaactgccgaactctacccacaaccacgtg

SEQ ID NO: 37871 - DNA, 508 bp, Homo Sapiens
gccggtggttgtgggtagctggaatggggaagctgacttcaagtaggaacctgaaagccaggcgaggaaatagttttccagaagtaaaattacaaccgtggggatcgtttccttcccgctcctcccttcccccaaactgtgacctagattgaagaagaatgggcagagtggccaccacgtgtctggcttcattaaggatacccgtgcagcccttgggcagtgggagccttagaaagtgtcctacttgagcgactgcctgcctgcttccctgcgtggacagcaaggcaggcctgaaagagagccgccgtctgataccgcaccagtcccagtaccagaggctgtgtccaggacgaggtgcccaggagggcagggaagttaagggacttgcttcctggcaccatgtccctcagcccatgtccctctctctgggaacccgagctcttgccgtattgttacacctttacactttcccggaagtggtgtggcttcgcctacccacgaccacctg

SEQ ID NO: 37872 - DNA, 360 bp, Homo Sapiens
ccaagggcagcagtctgtaaggaaaggctggccttcgtgcggcaccagccggcacacaggcgacccaggtgagaggccccaacagagggtctgtcaccatcataaaagaaacaccccagtgactcatcaaatgcaaaggggcacagagaagtcacaggaaagacaaaccaataagcatgcgttttgtttcttgtttttaaatgagactgctccctccaggcagaagcataacctggctgcctggtgctccaggcaatcagaggcagaaaggtggcaggcaggcatctcaggggcaaaccgacacagttcaagctccagctccacctctcgggagctccgggacttaggctaactgacaac

SEQ ID NO: 37873 - DNA, 527 bp, Homo Sapiens
ttaaggtggttgtgggtaggtgctatatgtgatcttagccacaggactctcgggtcctgtcccctgacatggtctttgctgtgaggctggtgttctggtcacaacgcaccaccctgaggcaccccaggctggggggactaaaccttccatagccacagagagtgatgctgcctgaggatctgcaggtgggacaggcagactcagacccagaggatatgcccatgcctgttggagccgtcagcgtgctgcccagcgcccacaggcgggcctccctgggaatggtgtcttgtgggccgatcacattggcatctcctgctggcaggctggacactcagtagcaacagcgactgcatcagcctttggtaagtcagagactgtgctgttgaggcccctctggccagccctgggtggccagcgaccaccagccatctctcaaagctgttcagtgccccctccatggcggatgctctcaggtggacattaatgtgagacagcaacctgcacgcttcccattcctctacccatgc

SEQ ID NO: 37874 - DNA, 363 bp, Homo Sapiens
gttaggtggttgtggggagctgaagcggatgtgtgattgtggggttcacaggagcactcctggagagcagagggctgggggaggcctggggtcctgcccaactcagccatggcagggtggttaaccaaggggaggggcctcctcacctgcagacttcagtcttcacctgggcagtgaatatgggtgctgagaaaagcccagagtggccaatgcagaggacgtttattgagcacctactgtgtgcctgactatgccggtcccatgactaagtgccagttgtccacaccacggtggccacctccttcctccttctccctcttctgttgctgcttttcccccttcaccttttcctacccaccacca

SEQ ID NO: 37875 - DNA, 419 bp, Homo Sapiens
gtactcaccaggcagccttcccagcaggccccatgccctgcctaagaggcaggcgggagccgtcctcagcatctcccaatggccgagtacaggggtgcttctgcctcatcatgatgggcctggtctgagggctccagtcctgcctgggctgcaaggctgcatggctgcatgggctatgagccaagttcctgcctggcaggccgcactcgagagacccaccccactcccctgcaggggcagaggggctgggagaagaagatgtttaggtcctgccaggaaggtcctctcaccacaaattccacctttatgggaaaatcaatgttattacctcctccatcttcccacacttgctgctggtctaaagcaatcacctcatgggcactgagccagaactgagccagcgctctggggtcactggc

SEQ ID NO: 37876 - DNA, 411 bp, Homo Sapiens
caaaaggaatgggaatggaagctgaaaagcaggaacatgccacaggaggccacaagagatgcaagcgagagcttccgctgccccagatcaagtggcagggtttaaggtcgccttcccaaaatgggaatgaagaggccagcccaactccacctctccctgggctttagcagacagaggaacagactctcactggcatgtccatgtgtcacagagtacactagagccacaaacacaagcaggtggcttaggccaacagcctcgcacaagacatctggcttgacaacgaatgggcagaagaacctagaggctcggttggtccccggcctgcaatgtcattacctgtcctgtttcctgggcagagtacttctgcagaacttagggctagcagcaggggaagagagagggctagaa

SEQ ID NO: 37877 - DNA, 357 bp, Homo Sapiens
gcacaggatggttgggcccaggagcacccctcccagtgattggctggactcggctgttactcccatctccctgcatgtccccagcagccaggagatgccacttagactctgggtctctgtcctgtctcgcccactgtagagatgacttttccctctagtgacaaagtggcgagcattgctgatctctttattccattccttaaactttcccgactcccagccctactgggataaaggctgccctggttctggatccagtcgtccaggggagtggccagggctccttcagcagtcaggaattagtgttaggcccagaggggcaagcttcctctcctccatctctacccacaaccactg

SEQ ID NO: 37878 - DNA, 561 bp, Homo Sapiens
ggagaaggcttaccagccactctgttactttataggggcattgccttcctacttttgaagttcattgggaccaagtgcttatcatccaaacccagtcaacatttaatcccattttaattgaagttattgcgtgcctcactttgagtgttccatatggccaagaggggtccctgacctctcaaatcatctcttgatttttagtattccaagtaacttctgtcttgctaattattttcccccaaaattaaagttacttaggaaggactatattctggtgctgctgtctgcaaaactctgagatactgaaatgaccctgtttctcagttgtatagagttatttaagtccgtctgattctctctttatcatctggatagacaaaaggaagaaaacctttccaccttcctgtaggagaaggagataaatcctctttccagccttggaggtaaaatatccaactgcattgcattgctttcctttttctctccctctacttacctctctttcttactcttctagcaatttgaagtttgaaaaccaagggagtagggactatttgatta

SEQ ID NO: 37879 - DNA, 493 bp, Homo Sapiens
tgttctagatttgccaatgtcagggtggggcaaatgtcactgctcagattaggcttgtccaggaagcccggagttctccagctgaatgaggcattcccttcatcttgggtcctgggtgcattctttgcagaatttcaacaatggcactctggacactgtgcttactattaacttatgtttactttcctggcttgcttcacaagaatggaaattccatcaggaaaagagtctctctttacgcccagcactgtgcttggtaactgtggatggatggctgattgcctggaggccacaaatgcccaatccccagcaccaccagctgctggactccctcctccagcccttctggttacttccttcttttcccacctaagcatggttggtcttcatcttgctccttccccactgtcccaacattcactttcattgcacctgttctccaaggctctccatttagatgttctgggttgaccaatctaaccacaaacacctg

SEQ ID NO: 37880 - DNA, 471 bp, Homo Sapiens
gtggtgggtagagaaggctgagtacaagtccacttccaggttctctctgcctggaatacttttctcccaatcctactgccaccatcctatgaggtccaattcaatgtcccctccttttcttgcccttgggcttctacttggtttgcccaatggcctggaggctcattgagaatctttcagggatagtggagggaagtggatatatggagttggaagttctgggtttacttgaaaattccacccatagctccaccacttgatgagctgaacactctctctctctcagctagttttctcatctggaaagtgctaagaacataaaactcacctcgcaggctcacactgagggttctacctaacctgctcgcccacagagacatggtcaacatcaaatgggatatgtaggggacaaaattgctacaaaaatgtgatctgtactccacatttttaatctttatattctcctgacag

SEQ ID NO: 37881 - DNA, 420 bp, Homo Sapiens
tcgtaggtggttgtgggtaggaggtaaattgctaagcagtactcacactctttccacctcagctcccacatgggagaagctatacagagagagttcatagagtcactactcaatgctctctgaagcatggcttggcccaattatggagataaatagagatagctgcgacagataaaacacaaaaaggtccacaacagcaggtaaattctttctaactgagacagaaagtgtatgtaccagcttcttctaagggctaggttgtaggcattagtaaaggcagagcttcaggaaaagctctctgcaattggcttatcaggtaagatgttcaaggaagtcacgtccagtctagtatgggactcagcaaaatgatgctctagaacagaggcaggtcaagcaaagaaatgggttcttacaaagttc

SEQ ID NO: 37882 - DNA, 463 bp, Homo Sapiens
tgctgcaggtcactctacaggaccttgcaggtggttgtgggtcggagccaggagattgatagctggggtaccattccccatctgtttctgggggagcctgctgcagtactactctctggtctgccctggaaaaacccagaagcattactggattcacagtttgaaaaattacatctatagggggagcagggagctagataccatgaataccaataatatgagggatacccgtggaactggtgctggaagagatgaaaagaagttatgcatggaggcaggttgcagctgggtaggcctgagctgtagcttccagttccagggaaaatcataggcggaatggatgaaaagaaactggaatatgaccaacagcttctgtgaagaacataacagcttgtatgaatagaaaaagtgcagtgggcacccagatttgaactggggacctcttgatctgcagtcaaatgct

SEQ ID NO: 37883 - DNA, 472 bp, Homo Sapiens
ttacaggtggttgtgggtcctctcaggtgtgtcaccccacacctgagagggtcatttgaccctcagtccaggatctctgacccattgactcaagcagatttgcctaagggctcgaggtcattccccctggtgggggctggaatttagccccagaccaggctggggcaggtgcatgtcacgggttctgactggcagtcagagggcaagtttcccgcgatgactctcgctagcctccgttttctgatctctaaaatgggagctcagataacactgtggatgagagggagacccctggactcagacatagctgagcacagctctgcaccccagatccataaaactggtctgatgattgtacctacacccgcttcagtgatttcaaggctaaaacgaataacggtagtctctaaaactgtcatggatgtcattgtcctcataattctggctgttcccacctatccacaaccacctg

SEQ ID NO: 37884 - DNA, 360 bp, Homo Sapiens
aggctctgaaaggggcaaggacagagttctacagcatgttaatagaggcttaccctcttggcttacaacagtccattcatcaccacttcttgttcagctagttacatatctgtcttcagaccatgtttctgttctttatccatggagacacaaaagacttgactatgtgactccaataagttagaggtgtgaggcagcaagaatgattgggtgggacattgactctagagtcctacagacctgtaatataaacctgtctcctcctactctttactatgtgactatagcaaatagtttaacttctctggacttcagttttttcttctataaaatgaggagaatgatatctaccttgctggg

SEQ ID NO: 37885 - DNA, 385 bp, Homo Sapiens
accgctcgaagaggtgcattcagtacatactgtgttgtatcttgcagtttccccttaaaaatatatcctgcgggttgttctataccaggtacagaatagatctactttggatctgtgtgggattttgacagattggagataacgaagggtttctgacagagggcacagcctgtgcaaaggcctagaagggagaccttggacttgtttacttatccccagaatgttcaaatttgagtcttccttgaaaccaaaaggaggcgatcttagaagaaaatctccccggagtggggagagagcaggcagaactcgccaagcccagaggaagcctcaagctatgccctgagttccatgtgccctggttctactgggcttggaggccggagct

SEQ ID NO: 37886 - DNA, 388 bp, Homo Sapiens
acagctctgaaaaggggcaatgcaggaagcctgagagccattcaggtagacagtgatacaggcttgggggagcacgggagcaggaggaggcgatggtgacctctaggcctccagctctgccactaaggtagacaggtgtctcttcttgtagatagggacccacacgaggaggatgtttcagccaaagatgattagtctcagcttataaatgtgcagcttgagtgactgaaatgtgagtgaatcaaatgtgtatttcgagtggcttcctagaaggactggaggggttttcttttgccctccaatagagagaggtgtgagtggttccgatgctgatcagcaggagccagtacagattcccctttttcatagccttgggtaacgagctcga

SEQ ID NO: 37887 - DNA, 369 bp, Homo Sapiens
atctagaggatcccaaggctcgaaaaggggacacaacgatggctgggcaatgcctttgatggcccaggtgttggcacaaagtcctccctcccgcacagcaggaggggaacccaacttggagaagcagttttgggtggtggcaatgaagcattcaccctccctgtggccttggctgaggcacatctccctgacagagaaccctcagtctcctcatcctaaaatgagaacagtggtccctgccctattatgtgtcacatgtctgaagggacagtcagataaagctctgcaagggaagtgctttgcaaattctcaagagtattatgcattctgggagaatctcccgaggttccatcatccatcctctgcctc

SEQ ID NO: 37888 - DNA, 530 bp, Homo Sapiens
gaccatctcgccctcctgctgtgtgcgctctactgctacagtgtgcacaggtccaattagaatgccagtggaagggctggccatctgcctgagggagtgggagccctggagctcctgaattgggagggtcttcatctttcatccggcttcgaaccttaagtctgctctccaaatgacttgataacaccataggaaccaaagattgtaaagcaaagtctctccatgtcttgctctgtcccctctgcagattttcctgcattcatttccccttggtagcctttcccctgtcttggtgccagaggtgtgatctgacctgtcttaaggccaatcattctatctggccactggatcctatccccttgggtccacccaaatgacactttctttcctctctctcaactactgcaggctgtctggctccactgtctcttcctcaggtgcatttaacttgtttgtatttcttccatctttaaaaagaaaacatctaccctccttccttaccagggacaatggctgtcaaagtaaagtaa

SEQ ID NO: 37889 - DNA, 391 bp, Homo Sapiens
taagccttccctggatacagtggtattgaccgcgtatgcatcatgctctttgtacctgactactgtgttgcaagacgtagtatctatacttatctcctttttgtataaccccaaattcttattgaaatggtcagcctaactcagctggaccttaaggacaaggaaaggaactggttcattcttaggcgaaaatgaaatagggactttgggggcagggtttggtgttggccccaggaatctcagtgggaaaactccaaggaggaagaacagctcatgctaaaggcgtcctcgtgcctcttcagcggggagtctccttcctgagctcttgcctgctcaatggtggattctgggtttggaaaaattaacgggaatggttcctcctcttagcatg

SEQ ID NO: 37890 - DNA, 355 bp, Homo Sapiens
aggacacagggctacttgggtaaaccacttgaagtgggtgtaagtggtgagaccttccaaacatgtgttgcttgaggtaacagcagtgtcagcactgccccctgacctgggaatgtcggtcaggttaattggaggggaggtaggaaagtctgggccagagctgacagcttgggcaaggaaggtgagaagctggaccctgcagaattttccatctcagcctttccctcacagggctcagtcttatctttaaatggcacagaatgtttgactgaagaggcatctaattatcaggcccccaggatccttgagagctggtctggctatgtggctgcctcagttccccagtccccaccac

SEQ ID NO: 37891 - DNA, 400 bp, Homo Sapiens
aagctcgaaaaggggaagaggctgctgtttctaaagaggatgtgatcgacagttattgaaggtgcttagctgggggctccactctagtcttaatctgagccgccctcaaggaaatcataaccagctcttaaaaacatgttgagaccaaagctggtgtgtgtgtttgagcggagcttcagacagctacttaacactgggggcctccgggcttttgattcctccacttctagcctgccatctccccccagctggctggtgcttatcagccaagacgttgtttaaatcacactcatttcctataaccatttcatctgaaatgccatcctctgctccagaaattcatctatcaccagcctaggggtatagttgaggagccttggggtgatcactccccatctct

SEQ ID NO: 37892 - DNA, 561 bp, Homo Sapiens
aaggtcggaaaaggggattataaatacagaaaaggtaggacaatatcctgccctagagcacttatgttctgggtgtatgattgaactaaacactaacataataaggcaatagctatcagaacaataaatggtacgggccaagtgagtggtattaccagaagtgggttggggatttcagaggaggagggtgtgccatgggctgtcatgatcagggagagccaaactatattgggctggatgcttagctctggaggttatggtagacaggtccatctgggaccacaaactaaatatttatgtgaagtacatttgagttcaatgtgaaaaggggcaatttaatgaacagactgtcaaaaaaggaaactcataagacgaggaacttcccatcttaaaagtcttctgtcactagaaaacaataataaaaataacaattataatagtagtagtggtggtggtggtagtgataccaggaactatgccaaatgcattttctcacctattacttacgctaactctatgaggtactaaaggtaacaacaggtaacacatagtacgtacaat

SEQ ID NO: 37893 - DNA, 443 bp, Homo Sapiens
aaggtcggaagaaggggtgagacataagaaacatgaggtttccgcagtttagggtcatcatgccaactggtcccccatttccggcaaccaactgagtgccaaccccatggacccaagccaagtggtctatgggggattgagccccgagggttccttgggactttggttgaagatgagagtggagatggggaaaacagaaagaaggataaaggaggagacagaagggaatagcagtaaaaggcagagaggcaggaggaagggggacgaacgggttcgagaagggcagcattccttcttgggaccccaattctccagggaatccccactgtgggtcaggcagttttctgcttagggaatgttaccaagacttaaaaggcatttgaagaaaccaacaaacttagaaatcacattccaaaagagtagagaattttgacaaaccaatc

SEQ ID NO: 37894 - DNA, 401 bp, Homo Sapiens
aggggtgttaatgacgttgttatgcacgatttaagtttaagagtaaggtgccttccccactgataacaggtgttaagagtcttctcttcctggtacaggcagcgggagataccttttacaaatgtaaatttcctttataaaagaagaactgtccttgcctctgctggttctcaatggcctttagctcaaaataatccttatgccaaaaaggcacattttgcagggaaatattttgatgcctctcaacagccagggcctggtcaactctctggagctgttcctcactcttgcaagcctttctgacccattgggcacctaagtcattgtcctgctttctcctgtggttcattctcagagcagtgctgtgttgagaaaacacagtccaacaatcatccagaggg

SEQ ID NO: 37895 - DNA, 432 bp, Homo Sapiens
tcaggagctattcggattgtgcatcctcttctgtgcagcctgttggctacaaagtagttagatgatagagaaggcaggttgggaatattcaaagactctatagcaactggcctggatgcaaaggcttttttagttctttgtcctggtcgtcttggtaaatgtgtagtcgcgtatctgagacatagattgtgctttattcggtgctgtggagagtagaaactagcagcagtacctggaaaggggccctgatctgcgggtgtggatgagtagagactcttcagttgagatttagctctagtgagggttgggtgcaacaaatgtaggaaagagtgaagagatgagcagctcatgtctgagtttattctgtttctgttactgtgtcacagaccagcctcagatcatagttcatgatgccaagatattgttggagtt

SEQ ID NO: 37896 - DNA, 383 bp, Homo Sapiens
tagagtgggaaggaggctggcctgttctgagagtgggttgaggctaggggtggctgagcaggggcagcatgagaggagatccataggttggtgcaggtctaggtcatgcagggacctgtgagccccgatgaagaggcttgggttaacattccaagagcagtgggaagcccctggaagctcaggcacaaggagaggcgtgacccgaggtacacctaaagaaagatcacttgcaaaggcagcatggagcatgggtcccctgtagctggaggggatgcagggagggtggttaggaggcaccgtgggcatccaggagaggcaatggcatgtgggttaggtgttgacttcatatgcagtggaaactggaaagactcgtgctgtctacg

SEQ ID NO: 37897 - DNA, 456 bp, Homo Sapiens
ctttccgggattgtgcatctggggctgaaatgtcttttctgttgcattttcctggttgtgtgctgagtaactgcaattagaatcctcactcgtcatgtggaatgttaggttagactctgggttgttaacaccctcgttgtaagtgtcatttcatgtgtttgtttcagcagcaggcaacctggtttaggttctgaccactggttctgtctctctttccacgagcagcaggtccaccaccaggtcagcccttggccttggctgtgcttgtttcgggtcgtagcctgcactcacaggtggggtgggcagggacgtgtgtcagcacatgtagagaatctgggggtctgcttctccagcactctccttgctggaatttgccttgctttttctcacttctggggtcccttttcttggcatcatctgtccaggaaagatgggtacaccccagagctctaccca

SEQ ID NO: 37898 - DNA, 394 bp, Homo Sapiens
ttccgggttgtgcatacactctcccagttagtaagaatggtgtctcaatgggacagaatgtgtccggcaggtgaagacgaccccgggtgcatctaccagcccaattttagggtaagtaaggccagctgtggttgccgtctacctgtagccatccccaaggggagggcatgggcccctacgtggagacagttactgtgccaccctagccacatattattggctatttgaagggattggttgcattgctgtgggggtagccaccccacattaagagtttagcttgtgacatgctattatcatgcctttcagtacataagggtgcatgacttactacctgtatctgcactcttgttactcacccttgtccatcgtgtatggaataccccacagctgg

SEQ ID NO: 37899 - DNA, 409 bp, Homo Sapiens
gaggtgactctgaggatcccttccgggttgtgcatccagagggtgggttttgtcttttgggcccaagacagagatggtggatgaagcttctccttcaaatcttcaagatttaaagaaatgctccgcctcttgcctggaggaatgccgtgctgctcaaaacacactttgggacacggcacatttttctgtcacagtggaaagacctgactccctcaaaagggtgttggcaaaaagcatcgcgttctcagaatgacaaaacagttttaaaagaaaaaacattgtgtcagccctgcagcttatcgatataaaatgaagactaagattcatttatgtgaatggatcattttttgggggagggagttgttaaaaattcatatatcttggctaatggaaccacttccatatccac

SEQ ID NO: 37900 - DNA, 395 bp, Homo Sapiens
cctaccgatgcttatcgggtttgtgcatctagacggcattagtggagggagcctggaggggttggtctagccacaccaaatgctagggaggactcggaagcaaagaaacttctgatctggtcatttggaggtcaaagatgctatgcttggagtcaattaagcaggcaattgattggccctgtttctccatctgagaattgaagggcttggataagaccagaaaaggcacaaggtgcatcttgaaagagcagccatgcttcacaccgcctgcctgagtactgtgcctaaagccatacctcagctcactgggaaaggaccccacagtggatcagcaacgtctgccttgggcaagtcgggcaagagtatctcatccccgggatgcacaaaacccggaa

SEQ ID NO: 37901 - DNA, 468 bp, Homo Sapiens
tcgcgcatctgagagcaaatgacatcttaaaaagctggaggacacagggacggtctctatcgtatctccatttaattcaccagtttgaccactgcaaaaaccacataaatcctgggggatgacactgaactactggaaactcaaacaagaaacgggtccactgtaacctccgtgcaagctggttttccttaacaaagtagactagcatggcctcaggtacacggacaatgatttagtcaaagtgctccttcccaaccctatcactaaagaggatcagaaacagttcactttgcgctggaacaatgtataaatttacaattatgccccagggctaatcataagtcctgcctgccgttataagagtctgaatacatgtggaacacctgcaaagcatcacactagcctactctatcaggggcatcgcgctatcagactgaatgacgcaacgaggagtagcccaggacagcg

SEQ ID NO: 37902 - DNA, 453 bp, Homo Sapiens
actggggccagtggaagatgcttgatatgtatttgcttaatgaatacacgggttaaggaaggaaaagctgctaaacaggagctaagttcaaggggtccagccagagtctggctcttcagggagcattcttactggactgagctgataaacagggcagggacgcctacctgggcaacagcagtgccctgtggaaagtatgcagctgcagagttagcagagaaccatggttgtgggtcttgggcctgtttccccatctgtcaaatgaggttagtgctttgccacctctgtctctgaagtcagctccagatgatatcgtgctttgaaatattaagccacgtgcgagcgtgaggggctgtcacgctccaggaggtcctcatgcgagcccaggagcacctccctgtaacactgggaactgtcagcacctccctgtaacactgggacctgtgagcttca

SEQ ID NO: 37903 - DNA, 452 bp, Homo Sapiens
cggacggcagtatggtggacaggaaatgggcacttagggtctggcatggagcagtgtgtcctgctgtgcggtacatgacagtgggtggctgttagcaagcaccacccatgagaccgtagcacccacaaactgcaatgttttagaatagcctggattacactgtggatgtttaaagcaaaggataaacaatgctccatctagtttagtttcactgcatctcctacttgaaaactgaatagactcggtggccatccagcccctcttgtctcgatatttcactccatggtgagtcacaagccctggtcagaccctaatggacacagccccaccttgaacagttcctctttcaggctgaaatcatctgctgggtatgaagactcagatgggataggaaagttaaaacttagaaataggcgtgctctgttcttttccaatgcttgtcattatgctca

SEQ ID NO: 37904 - DNA, 419 bp, Homo Sapiens
tcaacttgttagaagatgcttcaaatttgccttaaaacttgagaagatataaatacctcaaaataggttgagaggctgccagtcatttactatgtaagtgattttaaggaaagaactttttctcaatacttgattagcatttgaatggcaggcagaaggaggaagaagtaatttcgtcccgggagcctcaaatgggtcgcaacctggggagttgagggctgagtgaggcaaggtggtaatgatgcattgaggctttggggaatagaacccgtaaaccaacctacatcaactattgccaaattgggccctaaactgtcctgggctctggaaagggaggctgctgtgtcgctgcctctcccatctttctttctttctcccgggccaggccgggactgcagatactgtcacagctctaccat

SEQ ID NO: 37905 - DNA, 379 bp, Homo Sapiens
tataaaatacatgagacaaaatctcacaaaacggaaagggggcacaaatccacaaagagtggcagactttaacacacctcctacaggaaaggaaggacttcaggcacagaactgagatggtgggttctgcattgagatcacggctgcttctgccgtactggagaaggactgagggcagagactaaacccaaggagaccaagaggaagccgccgaacaagctcaggtgggaatgatggcagcctggaggtcaacaggaagaagcgaagccacttgtgaaacagacgcaacagcgacctggccactcacaaaagcagagacagggaacgaacaccaagtgtgggttttctggcctacacaagagcagcaagcaaagcacca

SEQ ID NO: 37906 - DNA, 418 bp, Homo Sapiens
gggctcgttgtgatctgatgagaatgagtgactcctcaggatgcatttggactgagtggtggaacatgagccctgggtaacggggaaaagtccgaggatcagatggtagttgaacacagaacaagcttgagaatgaaggtagtgtttcatttcctcagggttgaaggagaagcagctgctggtggtgaaagggctcaggcctggtgatgggctataggagaagatggtgggagtcagggagagggctggtgaaatggggacattaaggacacctccgcggccagggattggagagacagcgaagggactgtgggggtcagggtacatccctggcctagcgaacagaggaagcattatgtcaggcttgcgtttctgatggccaatccctcctccagcaatggcattcctggaggacacg

SEQ ID NO: 37907 - DNA, 427 bp, Homo Sapiens
tttgtgcatcccaagcgctggagtatgctgagcaaatgaacaaagcaatgcagtgagtggttctttttctaggatccctcttattctaacattctgtgactcttccagttttaggaattgctggcggaaggtcaggggttaggatggtcaagtgctctcctgctcagatttgaagctgctccaagaaggcacattcagactcggtattctggaaatctctgttttctggcatggaaacagccgcagcagagtagagttttggggccatgccagacttgggggtgtccatttatcaaactggtgccaatctccttcccaggtgaacacatcccagctatatggtcctcagccagtggggtgggggacaggatgggggacttcctgctactctccagtgagatcattccctggaccagtgcggcgtcat

SEQ ID NO: 37908 - DNA, 441 bp, Homo Sapiens
cttagagttcgtggatcggtggggaggagcatagtaacagattatttctgagaaagaaagtggttaattggaaaattctaaaaaattattcctaagcattaatcctcaattttaagggatctgcctgtataaatatttgcttggttgataaattgtgctctgttcatttccaagcaagttattaagaacataaaatagtcttcttcattcattcctgctggccagacactgtgttcaccagggtggtgaggggatgagtaggaggttgaaagatatattctgaattctgaggcacaacttggaattcatttctcgtaaaaatcataaaaaataggttcttaggtgttctgtgtgggaaatgcgcgcggggaggagacacacacacaatacctttaagggtaaacaagctttatcccaaatggcagtgcagatataagcaaa

SEQ ID NO: 37909 - DNA, 439 bp, Homo Sapiens
gatctattatgtgtgatcagagtgatgaacaattatcacaggaacacgaaaatcgcgaaaaaaagccctgcctgacgcatttccggccgttaattttgagagggaacagtccgatttacctgaattttgtgaattatggccaattcatcgcgatctgcaacagacacgcctgaagaatactgttttaccatccggtttactgtttgtggcacacaaatatgatccgacaactccctggataaatgcccgtaaaatggcagataaattttcagctccgttactgactattaacggtgacgggcatacgctggcgcttgctggcactaatttatgtgtggatgaggctgtcgttcgtcacctcctgtttccggggaaatctgacgatctaacgtgtcagggaagtggtaccggagacactaacctgatatcccataaaact

SEQ ID NO: 37910 - DNA, 402 bp, Homo Sapiens
taacagtctcttctgctttccctgcactaatatacagcaggtgctcaagacatgcacggtcactgtctttacatgtaaggtctcgcaaatgcataatcctgttctgtgtgtgtagttggtgtcttataagtgcatgttctctccccttgtgcagcagcagctctgggtgcgcagccccttctcctgtatacagtgtgtgcatcctaagtgcacactcctctcccctggattggcagcacctccataagtgcaccggccttcccctgcatacagaagacgcctattaagtgtctgctctcctcgcctctgtacacacaagatgttcaccatgcgctcattccctgccttcctgtcaggaggtaccaacagagctcagacagatggggctcctgaagggtcccg

SEQ ID NO: 37911 - DNA, 350 bp, Homo Sapiens
agcgggcaggcagggctcgtatggaacagagtgggcagaggcactgatgcgtaacagagcaaggcttggccatggacaacctggaaaattgatgctgaagaccaagaggcaccagtgcaagatcactttacccagcgataagagctgtaaggctcacttggtattcagtagtcaacccggtggttctgaaaaccacaccccagcctgaacagtgagaaggctcccgcagcttcaagcgcatggcaagaccatgggagcagcctattgatacagaattagatcagctctggggagcaacagtgcaggcaagaagaggccctctcagatctactctagctaattaaggtact

SEQ ID NO: 37912 - DNA, 444 bp, Homo Sapiens
atcatttgctgcctgtgctaacatatccaggcaagagctaggaggcacactacctgaggcgactgacattctaggaagatgcctttatccttcttcggcaggtcctggatactcaggacagtgcctgttccatgtgcacaccttgcccactctcatgaagaaaggctattttccaagcaccatgacaccccaccacaccaggacctgtcctgggaccaatccagcctgcccccatgtttgccatggaaggctctgctatagctcttatcaaccaactacctctccagtgatctactacttgcttccaagagcaacatccaacattctgctatcttaggggtaagcagagacctatgagacttagggctcagcctaatgcactgacagaatctcctggggagtcctcacccccatgacagggcaccacgctctgtccccacttcg

SEQ ID NO: 37913 - DNA, 488 bp, Homo Sapiens
agaggacccatggaaccaggcagactgaaacagcggcctctgaaaccccgctctcctgacaaggccaggtaaagggtgatgcagcccaaactcaggggtgcggctcagagcacccccaaccccgccagcgcagaggctcacgccaggacagcgagtgcccccaccttgggccctggcctccgccctcatcatccaggtgagagctcccacaggccctcccaggagtgggcttctccccagagtcctgggtgggggatggggatcagagagcagaccccgtctcatgaccgctccccaccaccgtctcagccaccaaagaggaatcgcttcaaaaggtcagctaggaggtcacctcatccaggacccccaaccccagtgctgcccctggacagcagccctccacagcccagcacaagaaaatggagcagacgggccggctgcccatcaatcagctataaatagtagcgtgcgtcctgcctgggtcccat

SEQ ID NO: 37914 - DNA, 392 bp, Homo Sapiens
aagtaaggatggatcaactcaggtctcagtaagcctgcaggcatcagaatggaaggagtacacggcgggatgggctggcatctcctcttggtcaccaggagagggggctgctccagagtaccaagttctcaggtgacacccctccactggtctcctgttcattaggaaagcccctgtgccaaccaggccgatcacctgatacaactggttctactcagagatcgcctttttatacaggtctaacttaacactttcacactagacgtgaaacatagtaatcttcacaagtgcttaaagacgaaacgacattgtccacagagcttaccttctccatggggagctggagagaagctttgcagtcggaaaactccacagtcctgactgggtcccat

SEQ ID NO: 37915 - DNA, 444 bp, Homo Sapiens
ggacatggcatgccagtttctaacccaagattgcttgatgtgtcggaattataatggtaaaataaggtctgtgccagccactcattaactcatctgattctcacaagaaccctctgaccttggtgacacaatcatacccatttaccaaagaggaagcataggcactttaagtgttctgtactttgcctgaagactcagctagtaagaacagagttgcaagctggacatgtgcagtcagactccaagagctctaaaatcatactgagttcctcttgaatacaaacaaaaggagttaattatatggttcagatctttgatagcatcagactatgatttcctgttgcagccatttccacaaccagactcatgtttgcctcatgagtcaacaagcagctaaccttggctgggagccatgtggctcctttcaagggactatctactgtg

SEQ ID NO: 37916 - DNA, 478 bp, Homo Sapiens
gggatatgtccaccttggtgctgggggcactgggcagggagtcaagtttgcaggaagcttcgcagagggtgacgcaaaacaggagcgtggtctgcacttggtttgggcattaaactccacgttgatgagttagtcaatcccactagcaggcagactgacatgtgggggatgtcagcagcaggggcccagacctgtggacccgaggggcagaggtcagcaccctcctcgttgcagctaacccaggaacttgcctcagtggccaaaattgctctcttgccctcagttctgtaaatggcccatgtccatcagtatctatggttgtgtgcctgtcctgtcttccaacccacatccatgtagggaccctgaagctggaccagtgagtgattgggtgaaggctggctagcccgtagcaggtcaggctcacagaggcagctcatggagatccttggaggggcgcacctcactcctgctggcctgg

SEQ ID NO: 37917 - DNA, 573 bp, Homo Sapiens
ggcaggacttaactcctatatacacatatgtatgcacatgtcatgtaaacacacatgtactttttaacaagaaacaggcccattttcaaccatactgtcaacactcttattgtaagactcttgctttttaggcttaacttcagggttaatcataaagcaattggcttatttgcccccaagcataaacatgtgttactcccatgagaacaaggacattatttcatgcttagaaagcaggcataagtatcagtgttcaaaacagcctaagcgaaaatttaggcttggacaaatgtcaggctaggcctgtggtctatttcactgttagaaagaacttttgatgggtaaaagttaatcactggggctaagcattcctgcactcggattccttcttccagcagtctcaggacttcacaccaaatatgagaaatggagtgattactagcttcctcttttctcctctcacacatcaaagtgggagctgaaaccaattgaggccatgtaggaatctggtttatcattgggattgtaaaagatatctggggtcaatactggtttggactggtccggcctggg

SEQ ID NO: 37918 - DNA, 410 bp, Homo Sapiens
cttgaggcgccttttttcacgttgctctatccatactgtactgatgctttaaacgtatcgctgatcctcaaaatggcccttcaatgtggggataatcactccactttacagacaaaggccccaaagttcagagaggtcaattaaattcctcctagtcatatggctagtaagtggtggcaatactagaattcaaacccagcttggaatccagggtctgtgctccttccacccagtcccacttctcaactaaggggcacaaccccccagggtcactccagcaggcctacgagcatggaaatccaaaagacaatgtgtggcccattttttgtatcttcttttcctgatggtaaacaacataaaatacttcagacgtcacaaacggcacagatcagcctgggcaacatagagag

SEQ ID NO: 37919 - DNA, 496 bp, Homo Sapiens
acagagtctggatctaattaattgggtaactcaaaaaaatcttattccggacgggatccagaactaaaaagtaaaagctcgcagagaggaaagtcggcgtctctccgaaatgggtcccgggggcttctccttagcctccttcatcctcgtgggccaaaagttaagcatatccggcagcctctccttaattttccgtgggaacgcggcttctccagagcaatacgccgccgtgggggcggcaggacacggtggagtaacaagacgctaaactcgtggggtgctggggccctgaggtcctaaccttcttaattaaggggcttcctacacaacatacggggggacatcaatctccttaagaagagatggaaaagttgggggatccggctaacttttggggggcccgagggggcgaggcacggtagtatcagccagcccgggattatccttctctccttttttcacaataacccaagttgaaaagctcggattggcttca

SEQ ID NO: 37920 - DNA, 362 bp, Homo Sapiens
tgggctgactctagagcatcccagtatctcggaccgttccacgaatacttcatggtcgctcccccctggcccccatttttccatcaggaagcggaggcacagagtgagaaagagctgcccaaggctcccaggcagttcacggagccactgggagttacactcaacccgtccaaccccacgttcctgttctcagccaccacaataaaccaccaaggttccacagccacaggagctcagcccggagtccctccgggtctcccaaggcagggagatggggctggaggccatgccaggtgcacggtgcccagagctgcttaggaagcctcgcggtgcgggctgggcaccaggcagtgtcagtagga

SEQ ID NO: 37921 - DNA, 453 bp, Homo Sapiens
gtatctagaggatctcagactcggcaacgttcggggatacacgtgcagttatacttgggtatattgtgtgaagctgaggtttggacctctaatgttcctgttgccacaacagtgaacacagtacccagcacgcagtttttcagccctgcccctccctcccgctctccctccttgcttttggagttcccagtgtctactgttcccatctttatgtccatgtgtacccaagacttatctcccacttacaagtgagagcatgcagtatttagttttcttgttctgcgttagttccgttaggataattgcctccagttacattcatgtcactgcaaaggatttgatttcattctttttaatggctgtgtagtattccatgttgtataggtaacacattttctttatccactcatcaattaatgggcacttacattgatttcatgtgtttgctattgt

SEQ ID NO: 37922 - DNA, 465 bp, Homo Sapiens
gttctagaggatctcagactcggcaccgttcacactgggaaaacatgcagaaaccatacaaaatgttagcctggaaaactgtcccacaatttagttgtgaagtccaaaaaactaatgggtttctaatgtgaagatagaagactgttcttgttgaaaacgggctggcctactgggaatccacatgagatgggccaccgtgggtggaataaatacatcagggtgaagaccagagcctgttagttacagcagattttgaacagctgtggtggccaaaggcctttgcacactggagtgactttgagggtttggtcacctgcatgaggaggaaggacgccagactccattcgagtggcctgggatccaagaaggtacaggtgggatcctcctgccctaacagtgggttgtggagcccaggtgtcagcccagtcaggttccacaacccacccgctggcctagaattgcctg

SEQ ID NO: 37923 - DNA, 399 bp, Homo Sapiens
tcaaagtcatgacacatatgtccgctgacttcttttagctaactttaatgtgggaaactcacttcctctctgtttagccttggaatcagtggtggatcctgaatatctgaaagcaacatgccggtctggctagctaatagtcacggccaccagcatacccgtaagcttgactggttctcgctgaaacctccagattggcagggcttaatttttaggaaagaggaactaggagctttaatttttaggaaagacagtgaggcctagaaaggaagaataacttgcctgaacttacacagcaggtaaggaactttaacaggactagaatctgggctctgagactcggaggactcactgtcctgctgcttgaggagggcctggaaaccagtcaccaagctggcc

SEQ ID NO: 37924 - DNA, 389 bp, Homo Sapiens
atcagtgaccaaattagagtgtatttaatatagtaggtggtttaagaactgttttaacgtaagacaaactgatagcaacattctgttgttttaaaggaagtgggtccgtgacattctgcagctagtccactactccaaggtaactatcgacttggtttcagtgaatctattttgtttttaactacagtgatttattagctcagtatctagaaattacgtatattttgtgctactgtcatcgatgtgtaaactctgtttttatttgtatttatgcacttggttcccatttggagcctctggtcttttctgggataagtggtgtctgccgagacatctcccggttgtcagtggtcaggagcagctgagctctagtctgccagctgctctgt

SEQ ID NO: 37925 - DNA, 365 bp, Homo Sapiens
acttggattgttaagaaagtgatcatcctgttcttggatagggtgattttggctgtctgggtaagttctaggaatttgctgtattctcttgattctaatgaactttgctatggcttgggaaggggcctctgcatggagagagagaaggaagctagcgtttcttgagggtctggtatatgctaggcactgtgctggctgctgaattggactgtttgatttaatccttgtcacaacccctttgaagtggtcttgttaccctcttttacaaatggggacattgtggctccagcaggttaagaagcttgctccaggttacatggctatcagtgggaagctgggtggggggtgtggacaggtctgtgatt

SEQ ID NO: 37926 - DNA, 371 bp, Homo Sapiens
cggggtgcgtgctcaaaccagaattgtttgatcccaaaccctagggcctctccatcatttactatcatagttcgtaggagagtcttcaggctggaagtgaaggttgcctagattccggatctgctctgtcttgtggccccccagcacaaagctcttgcatctcaacctcagtagccttactcttgtagcacagatgggactgtcactctcatggctggcttcttgggatactttctttccatgttgaatccagttctgcctttctttggggtgcctcgtcaatcagggcaatatttatgaaatcatacaggtgttcaatacatttttagatttaggtctaaaaacccaggctgactcgcacttggtgtttc

SEQ ID NO: 37927 - DNA, 359 bp, Homo Sapiens
aagaatcatcctgataaggcctacaggcccctccagtgcctcatggggttagaggctgctggagtcttctccagcttgggggcccctggttaggaggaatctacattgggttgcaggggagtccaggtgcaggatgtggactgaaagccaggacccaagagtcccattctgtgctggcccctgccacctttggcacctgtctccctcccagttcaagctgtggtggggcctgcagtagaggttggtagggggagctgtagtttctatattaaagtgctttgcagtgtctcaatggaagggaacaagttggtgtcaagccgcatgggcagtagtagggttggggtttgagcccccttccc

SEQ ID NO: 37928 - DNA, 367 bp, Homo Sapiens
aataataatcaatttgtgtttcaaacagagccaccaagtagcaccgatcagtgttgataattagcctgactatcataagccatgaagtcctgcttttatttatttatttgggggacagagaatcttcctgcctcttgagaaagggtggcctgttaagtctgaattagctgtcatcacagaagaattaatgtcggagtgcagactttctagtggggaagggaagaactaaacgagacagatcttagccaagccttgagtgataaatgaggaccaagtggaccattcatctcctgcgaggagagtggacagaggcactaaggcagttttgcggaagacgtgtcagcaaatgtgatcattttgttacctt

SEQ ID NO: 37929 - DNA, 361 bp, Homo Sapiens
caaggcagtgaggcagaggccagcatcttccaggaaggggcagagacaggaatctcagaactgcacaccactgaaataaggagagacagcaggtggcataatctgaaatgctgtacgcttcaaaaaaactatttcttttaaaggagtaaacagagaaatggtctggaaatggcaataaggaggatcctgactcatatctagacattgcagaaataaatcgccacagttggagaaggctgtagggacagtgatgtcctccaggcttcagttatggcaggatgaagaagaaaatgttttggtttaaaaaggcccaacttctgcacagctctgacctgtgacttgctcaaagacctagagaaat

SEQ ID NO: 37930 - DNA, 398 bp, Homo Sapiens
tctagagcatccacactcggcgaagtgccacgatattctggcgatggctgatgcaaaggaggaaactttggaggcagacacatccccaccccaactttggcgtgggtttccctggatcttcctgcgacagccctaaatcaacatcaattgtggcggactcctctgcctccagtttccaccctatctgtatcttacataagtatttctttggttaacctggtatcattctcgaaacaatcctggggtagtcctggcttagacaaggtgtggctaaggagatagtgtcccagcgtagcgtccacagactcactggagttcttgggcttcccctcacagtcaggttggtactacaggtgtcccttacgtgaatgtttcaatctgtcagtatgaaattgaaa

SEQ ID NO: 37931 - DNA, 410 bp, Homo Sapiens
cgggggctgagacttcgccatcctacgtcgggagctgagacttcggcatcttacgtcgggggctgagacttcggcatctacatcaggggcttagacttcagcatcctacaccaggggcttaggcatcctcaggtgctggtatccttgggaagtccgagaaccagcccccatggatacccagggataactatatttccaaatctcctggcattgtatcattcacttctatatttatttaaccctcccactaaaaagtctagttaactataggcaaagacagtttgagatttttgattgcaatctgtttctcagattacaaagccaagttaggtttagttcaagcatcaacaaatacatccaacatactttccaaagaatcctgttcgcttgtaggaaactgggatcctgtc

SEQ ID NO: 37932 - DNA, 350 bp, Homo Sapiens
cactgcttgagtgtttgggagtacaccagttgttgtagcagacacggaatccttgtggtcttggagctttcattctagtggggggctgcggggagccagacagtagacatgaagtcagttatgtcgtgtgcagaaaggtgctgtgtgctgtggaaaaaatagagcagtgtatggggattagggatgagggcggaaggatagttgcagtattaaagtggtgatcacgtaggctcatggggaaggcaggattggagctgagactaagagggagccattgtggttccctctgcttcagaggtagcccctggtttcatcttcgtccagcctctttttcggtgatctctctactc

SEQ ID NO: 37933 - DNA, 363 bp, Homo Sapiens
ccaagggctgaggacagcaccttcctagagggctgtgcacaagccaagttctcagcagcaacttttctgagagaaaaccatctagctccaaatcacgtgttcattatccattttcttcccaccttttgccacttctcctttttctgtggtccctccctgtttagcaggtctggcaggatcgggggagaagccactcattttctctgcatctcttctggccctgtttctacctccaaatctgcaccatagccccatcctcagcttccttgtatttcctgaagctgtgtcctctctcccccagcccctggccgcacccatctcagtgtaatggtaccataaaggggccaaggaagagcctgtttc

SEQ ID NO: 37934 - DNA, 424 bp, Homo Sapiens
aaggcggcttgtgcccaactggcagtaatgactccttgaagagacatacagaagcagagacagctagtgttagggcctgcgcggatgccagggaaactccggaagacttggtcgggttaatgtgagagcgggtagtgttcgactttttcataaatcacaacatttttgaacctcttctcccttcgggggagggcaggatttttctgccctaccacccacccatccatcgtctcttacatgcaccctacagccacgcaccctcaaggtggcatcgagcatacagctggagccttctgctcaccaaaactcctacttcccggtggcaggagagcaagagagggacagacagatggcagggcatgtccaaaagaagagcatcagcacaaatgaatcctccccttccccacctccaggggtgggggcc

SEQ ID NO: 37935 - DNA, 422 bp, Homo Sapiens
ggcttgggggggaaagcgtccaggaaccagaatgctccagacctacagagctggtcaagcctaagtgccttaaacttaccaatcctgggctcagttctcctttgaaaggagaaagtctttgtcctctacttaggcagctgggctagaagtgccttttgacttctaatgttaactaccctccaaagcctcctgggtcaagaaggctctcccaaactccacccctgttcttcctggtcagagaaccagtcagtcattctagtcttctagtccttaaactgatctgatgacttggaacataggatttcactgcaagtctggctttttagtctggaaatacatttgaggtctgttttcgcacagctggatcacctgtttcctgggtttattacacaattcagaaggctagaagaggagtttggggg

SEQ ID NO: 37936 - DNA, 494 bp, Homo Sapiens
tgtggtgatctagaggatcccatctcaggcaggacgaggccagaggatcacggtgtttcgggaacattgcaggagttagcgcagcaccaggatcggagcgcggggccccgtgtccagctccttactcttttggttctggcagcgatgcccaccgggccttcacagtacatttctctggatacagagagaaacattattcatctgaaagcaaggcttcagaagctgtttttataataatttgttagagccacatagtaacttgcaaataaacatttacagttaatgagaaaaatggatacccctgagaaaaacggtttgtagttactgtgttctagtcagagctcttgagctaattggaaaggaaagtcaggattctggcaggaggagagctatccccagattccaaggatggggaagagaatctctgtatggactagaattcgagactgtcctgtgtccctctgtctctccttcccggtcttctgtctgtgtcc

SEQ ID NO: 37937 - DNA, 429 bp, Homo Sapiens
atgcctctatataaaaacattataaggtacttaattatatatacattccataaagtctcatgcagaattttctagaccattatggatgtggtatcctttgtttgccgcaatgtgggagataccttgtaattaattatgtagtactttgtatttttgcggcgttttatcatatattatcttttgtttcttataataaccttatggaatagatagaggtgatattaaatatacactgctaacaaatctagtatctgagaacccttctacttagtgaatattttaagaacagtggtaaaaaattaatggaaagcagggcatgggggaaccattgaaacattttaaacggggagtgatgtagtcagaagatagccaaaagaatgtatctaaaggtcaaagcggggtgaggaacacggttatagcgaatcttta

SEQ ID NO: 37938 - DNA, 359 bp, Homo Sapiens
cggaccagacctctgtcacaggcaccacacggttcatcctggaagcatttggctatttgagaaattacagaaggaaaatttttgccacaaagaaccacaatctacctaataaatatctgcatctggaaaggaacttaagtaaatctctaatggagtaaaaacgtgtgacatttgcttagcagtcataaatcccctgaactcctttcctggcctgtaacgatggaactcgcccacctgtgtcttcagcaagagtcacagtcccgaagatcacataggaaagattcccctgtgctgtccgtcacccccaggttggatcagctttgccgggtcagaagccagaagccccattaactggtgga

SEQ ID NO: 37939 - DNA, 407 bp, Homo Sapiens
accagactctgtcacaggttgagaatgctgggttggtttcatccccccatctctcaacctgggggctggacatcttacttggctcccagagccagtgtcccaagagaggccagtagaagctgtgtggcctttcctgacctagccaaagggatcacgcagcatcacttctatggtggtagccaccaaaggctgcccgggttcaaggggaaggtacggagataccccctccagatgggaagagtgtcaaagaatttgtggatgtttttcaggactgccacatacctgctaggggtgttgcagttgacagttgattcgtgtgaagtgtgcttacagcatagggagaacttagtgaatgttagcacatctctgagctgggacctgagacatcgtctgcatcgaaagctaca

SEQ ID NO: 37940 - DNA, 383 bp, Homo Sapiens
ggcggccagactctgtcaccagcactacatcagtcttccctccttatcatcaatattagctcacctcacctgaagtctcccacattcctgtcttttttgccatggccctgagcttgtagttctcacaatccctctgcctgacagagttctaatggaaaataaaagcaggcaaacaaaacaaaagaattcaaaaataaacaccaagagggtcactttacctaaatcaacagaagtaacagggtaaactctgcaaaggagaccaagaagcatacaacaaacatgctaggcttaagtacagctctgtccctaacacaggaagtcaggcagaggcttgaaaagcagggagcagagcacaggaagtcttttagcactgcagagatttc

SEQ ID NO: 37941 - DNA, 390 bp, Homo Sapiens
cggcggcgagaattcggtcacagatactactcctctcggccagatagtgactcctctccgccagatactactcctcctctccacgagatgctcctcgtctccgcgaggatgctcctccgctcggagagatgctccatcgtctccgccagatgctcctccggtcctcgagatgctcctcctatccaccggatgctcctcatctccgccggatgctcctcgtcaccgccggatgctcctcgtctccgccggatgctcctcctctccgccggatgctcctcctctccaccagatactactcctcctctccaccagatactactcctctctgccagatactactcctctccgccagatactactcctcctctccgccagatgctcctcgctcgc

SEQ ID NO: 37942 - DNA, 377 bp, Homo Sapiens
cactagtatagatgtaggctaatatccagcactggaaaaaagaggaaaaactcttagctcttaaacacgcaacagtgatggtggaatttcagagaggaggggcaaggtactctgtgcatgagtaggtattattacagggtcaaggcatcacccagcagtgagtcccatccacagcagcatgtcttacccaataccacccccaatcctagcaagcatgtagccctgcagtgaggggcctagacatacctgggtagaggtgaggggtggtgtcaacctgagagtctctcctgcattcattacagatcgcaaaagaggatgctgtcctaccagtagctctcttcccatctctctgtgagttcgtctttcataacaaccct

SEQ ID NO: 37943 - DNA, 393 bp, Homo Sapiens
cagccggtccagacttctgtccaccagccgtgggtgcagccactagggacttaaggtttggttgctgcataagcttggagtgctatatctcctcttgtagcagctctcaagttcagggattgtgtcttgtgaatccccccagtgtatagtaaggtgctgaggttctgcgcactttagaaccctaatttgttggcacatgttgggggatgggtaggagggttaattttgtgagtcgcatggaggtggggtccaggtctgccttcggacatgcaggccacaggcatgcgcttgaaacacaggctgcctgatttcagaatcgagccatgatggggagcactgtggtttgtgaggggggttgatctgaaccggtcactctgtgcctaagcaggtgac

SEQ ID NO: 37944 - DNA, 407 bp, Homo Sapiens
taagctcggaccagacttctgtacaccagctggcgtagctggtggtctaatcttgactttcaccctttccttgaagttccgagtcgggggtagcttccttttctcttcagctgtggttttcctgtgatgggtccctcccagttagtaatgagaggctgagagacaagttgtggtaactgcttcgtgggtagtggtctttcccggcccctgagtcattctaacttccatcctgctccgctgcggatgcacatggctgctttcctaggggcgagaggagatgaggggactgggcctgatgaccacaggcgctgccccttcatagcacattttattcctgaaggatcctaactggaaaagtacctctcgccaaaggggctgggtggttccttatcattttcaggcaaggc

SEQ ID NO: 37945 - DNA, 461 bp, Homo Sapiens
ggcggtccagacttctgtcaccagcacaactcctaaatacagaatgctgaggttgctgagcctgtgggatctcacattgttagaaggtggttctgctcttagtaactgaggggggcctcctgggtcctgcctactgactccactttctgcctttggagttaaaagaagcctattttattctacacagctgcccttcatgtttttcaaacagataacatcctttccaaggcttctcccagctaaataaatgtccaatcccctctttctcttgtaacagaccccttactactctctctgtcctatgagtactcactagtttgtcaatgaccttcttagtgtgcagtgctcagggttagatacagttactttgatggattggaatgaggaagataaagcttaatagaaacgttaaatgcttcatttagattaaaaatatttgacaatgtaattaccacattccc

SEQ ID NO: 37946 - DNA, 464 bp, Homo Sapiens
ccaacactggcagtacacgggctgactgcaggctctgttatgatatcctgctcttcatctctttcttttttatagagagaggctctcagaacaaggaaagaaagttccagaacaggcaaacaacgctgtctgtgccaggaggtggctgccctggggccaggaagctgtgactgcaggtgctttcctgagcacatggaacagctcgggggtacgtcacaagggactgaatccacaaaacgcttgcaggaggggttccagaagaaacatgctgggctgggcatgagcgagtgtggccgccttggggacctgggaccccaactgtcctctcccctctcatgcatgtaacaaatcttctgaaagacgctgaccccttggggtggggacctgaggggtccttaccaggaagaagcgtgcctgctcggctgtgagcctcacgctggcctccgagcagcagggaacagaca

SEQ ID NO: 37947 - DNA, 447 bp, Homo Sapiens
ctacaattctcagatcttacagcagttgatgggtggggtgggcaagacaatcttcccgtgaccacagactgaccaaattcctgcttcatctttgctgagcttaaggaattgttgtgagagagagctggacacaggcatgacacggtttcctaacagcctgcagaggctattaggcatcagtttggcacagagaactacatgcatggcatatctacatatttttctgcgtatctttaaactatcactccaggaagacatgaaggattgctacttagcataagcatttcccctgtgcagtgactgcctgcctcagaatctacctgtgcctacgatcttaagcccagttaatacacacacccatgccccagtatgggacggctcctttgtccgagcagcagggaaagacatgtctttccctgctgctctggtcacagtactagatgggac

SEQ ID NO: 37948 - DNA, 434 bp, Homo Sapiens
ttggttcgacacatcaagctgatggccactcttctcctgcagcaatgccgtaccttggcaaagaaagagcggacaacaggaattacctggtatccaccagataacccaacatgctggagaaacaacaagcactatgtgttttccatgaaggaccaagtgagggatgtgttctccttcctagcatagtagggcgggctaatcggctgacacatctctgggggaagttatccatattcccattttcacaacaggacgaatttgaactgcacagaaagtttatgtggcttccatcacccgaccaccagtcttcaggtgctgcagctccctctccacagtggcccttctggtctgcatcctcccatcagccctgcccaaggcccctgcacttgcccgtcccagacagactgtggtagagggagcagcagggaaagaca

SEQ ID NO: 37949 - DNA, 420 bp, Homo Sapiens
cccagtgctcacatgtgtcatctcccctttctgctgcagaaccagcttcagttctgcatggagcagctgcctctgagcctgtgggaggacagcagtggaggcttgaggccagtaggggcacgagcagtgtggagtgccatgctgagtgggcagcaacagcagggtgtggtcattcgcacaggggagaagggccccaccccagctgtcctctcaccgctgccctgggtgcaggcacttcctcctcacaggcagcccagccctgatggtgcgcccagctgtctgcagggactcacgcccttccgtggggttcttgctgcctgagggtcacctccagctccttgggcctcctgggtccggcgctctaagaagaatcatgtgacgagtgttattggctaacagccaccgatgactccctgagtg

SEQ ID NO: 37950 - DNA, 350 bp, Homo Sapiens
gaagagagagagagtatgggcgaaaggggtttcttcttggagcctataatccagcccaacagaaggtcccccaaactcctgagtgtggttgaggtacccaggctgggtcaaaaatagctacagggtcttaaaaacaactttccatcccaactccaaatctggccctgaactctgagctctaattaaacattaaaccagacaacaccttctctctaggctttaggtgggaggggttgggaaaatgccttttttcctctcccaaattctttactctacccacttctctacctcactctgagcacagcagacccagcagggagtaatcaatcctggctcctcctactgtgggc

SEQ ID NO: 37951 - DNA, 403 bp, Homo Sapiens
aatcagtgtgccactcgtgtgcttctcactcatccccaacttccacgtgtatgagtaagggggactctgccatggcctacagacccgctcgtgctctggtcccatctaatactgtgaacagagcagcagggaaagacatgtctttctccatcatccatcaatcccctatcagccttcaaactcaggtcaaaattccatggagcaggaaagcaggtaagagctggattctgagtgtgacaaaccaccatcctctgtgaacaggccttgctgtgagccaacaagaccacaagcatgagtcagagccaacaaatggacatctttagcagccagtagagagacagtgagcttagcccatgaacaaagatgactcagtggagcagcagggaaagagaggggatcctct

SEQ ID NO: 37952 - DNA, 361 bp, Homo Sapiens
ctggacagtctatccctctatccggagtcagcaccaagcacaggttcctgctaagagagccccagatcagcagagatctcagaggaggggtccgagcttcctcacggtgagtgggcagtggacagctgtgggaagaagaaaaaaagcaggtccagctagataggggaacatttgggctacagacgacatagatgagatcctcgcggcattcatgtgaatctgtgggttgtgggtggtggagccacagcacatcatctggccacgtgtgggtgtaacgatgtcaccttgaggacagttcctctctagactgtgcctgtatcaggcaattggatgctgattattagagcagcagggaaagaca

SEQ ID NO: 37953 - DNA, 446 bp, Homo Sapiens
cccgtttagagcagaagctgagtctaatctaaaccaaaaggaattcattggacggatgtgggttggctcacaaaatcaaagggacaactgcggagccgatcttggaatgaggctctgacaccagaacagctctgtgaattcagataggggtagtgaattgaccatttcatcaaatgctgcagcaagctaggtggtttccccaaaggaaattgaggagtgttacaagaagaccattaggggaacggttatctggtggctgataataacaaatttccatggcagtctctttgctctctgttggaagaggtactccaccatgggccttgagcatctctacacatccttgctaagcgtgtcaaatttcaagtcctaactgtcctctgtctctggaggaggagacaggtttggttactgtttgttgtaaaaattactgagcccttcaccat

SEQ ID NO: 37954 - DNA, 402 bp, Homo Sapiens
tcccctgtagagcagaagctgaccgacctatgagtggggcggtcaaactgtccccattttacacacaggtaaacttagtgaatggcaaggctgggtttgagcccagctggattgcccccaaagataaggctccattccctgctccattacccaggcatagggacttgtagggggctggaaccccaggatcaactctgggctcagagggccccagcaataagtgactgttgattactcctgatcccaaagctgacttcaggcaagctccttggaggtcgcagccccttcttgctatgcccagtggcaatgatgttcataatcccactcctcagtgcagggttccactaagaacccatgatctcctacctcaaatggacctcatgctttctgagtaagcctccc

SEQ ID NO: 37955 - DNA, 426 bp, Homo Sapiens
gatgagcagaagctgactttggccacgtgaggcagagccacctcctgaatatcagaggtgctgaggtagcccctggataataagacccatgcagaattgcgaagcctcactccaaccttaatttcaaacagctcagtcagtcaatcaatcaagtacagtatttcttgaacagcttcatgtagccggagagctcagcatggtgctctgctgcataggaatcccatcagaaggatatgtccatgctgtcattgtttgtgtatgtttcaaggacttgcaattatgtgatttggaagagcacattatagatttattaatcaaaactgaccgaccaggtatcatctctgctccttctcttaagccctctgtacctgtgcaggtgagcagtgaaggacagggttggggtcaacaggagggggctcctctgtt

SEQ ID NO: 37956 - DNA, 353 bp, Homo Sapiens
ggcttgagagtgtggggatgtctttgtccactcgctgccgttgcggagacccctgttgcgagtctccatgtgcacgtgctgggcgtgagagcgcgggggtgtcttcagtgtccttcggctgttcagggaggaggctgagctgtcctgccctttcattcagactaaatggctttttcactgttttccaggttctcactttaaccactaatgtgctgggtagttcactctttggaccctaatcattttctcttacctcaacttggactggagttctgctaagcggccgttttggaatgcacaaagatcactgcatcttgcctttcacttaattcttgcggatcacattggaatca

SEQ ID NO: 37957 - DNA, 405 bp, Homo Sapiens
gacccgcgagacccccgactgacccatcagttagattaacaagataagaagtgaagagaattgtaggcattcactcagaccattacttgcagaagtcagaggcaaactgagttattttccacgaagaagcagtgggtcacaaatatatatatgatacacatttcatgcaaagacagaaaagtgtgtgttttccatcaaccgcgaatacttttaatagtagaaaagtaagtgtattctagcttattgtttaaaaagatttgtattgtcctcgtgttatatcaatggtgaatagcaattatcttttatattaaacttcaggagataagaatgtagtagtgctaaaaacaagaactattaaagcaaataattccaaactgactatggtgttttatgaaatatttacca

SEQ ID NO: 37958 - DNA, 356 bp, Homo Sapiens
gaccaatcagagcacgcggacaacttctagtctctttttctctcctcgaacgcttatctgcgcgcagccttatctccgagctatctcggcgcaaaggggcgggagccggtagctaggcaggcagagaaacttctttcttgctatctagccaggtctgtgtgtgggcattaattttagtatggtaatctccgatgagccgaggcgatttggaagagcagcctggaggaggccagcccggctgcatttcacctccctcccccactcgctccgagtctccctgtcattcttcctgctctcccatttggggtcgcctcggctctggggcggtctcacgctcccccctcctggcccctgtc

SEQ ID NO: 37959 - DNA, 383 bp, Homo Sapiens
tgagagaaggacagagactctcactgagggacagaccagctaaaccagaaatcttaagagggaaagtaacagtgtgtgattcaagacataggtattcaatcaaatatccttttactttcgtatatgcatggaacatcaaatcactaaatagttggtgcttcttcctcaactccaaagtcaactaggtaaagtggctcaggatgtgctttaataacctctaatgcctaaacaaacataaggaaagttagtttcagggataatcatctctcccaatgtgcaagacagaaatacggatatggtgacctataaaggggtcctcaaagccatgaattctcaacaatcaaggcatggggaaacaggagctttttggtcaaatgagcaaa

SEQ ID NO: 37960 - DNA, 379 bp, Homo Sapiens
aaatgtgtgcaagcctagggagcttgctgggacacaggaagtgcctctaaatgggcccacacaaaaaaacccttcctgatactacagcctgcagcttctctcatccttctcatctcagcttaaatctctctcccggctgtctttgccgctaacaaacatagaagtcagccagtgcaccagatgaccaagttgccagattgccaacagtgtttttcagcaatgtggtctctcttccactcctccatccaagtctgtccctgaacctcttgaacctgctcaggccagtcacacacctgcctagagctggatactccagcggctttactggggacctggccgtgaactctgtcatttctccagccgaagcagacagctaatc

SEQ ID NO: 37961 - DNA, 431 bp, Homo Sapiens
gctctgttatcactgctctgcatcagaaagaactgtgtgccatcacattcgggtatagctggattgtcaagatcgtcccgtcttgccatgactgatttcgatggtgtttgctcactgcggcactcgtgtatgcatcgcgagctctacttcttaattagggccataactgggtgccgtgtggtgaagacaggggaccaagtgggtgggattcagggtggagcagagtcatgggggtggggacagacacgctgatgcacacgggagtgccacagtcccaaggcaggtgtttgcgtgatgggcctgtgcaagaggaagggagtagcagtgcagctggggtgaggaagggaggcattcgtgcttggaggtgggggtgcaggcacagcccagcgagggccaagtcaggcgacagacgggggcttttattcaggtga

SEQ ID NO: 37962 - DNA, 468 bp, Homo Sapiens
gctgagtctcctgaatcagctgttctgaacctcacatccatagcagggcaagcctcaccttcgtcatatgcaatgtcgtgactggcgaccgactgctgctgtcctgccattgttccctatgcctggggaggtggtgtttaagggacaggtgtttctgctgttggggaagtcccacctgctgcctccactggagaaagtgactcctctctgctgggtgacagtgaggggagcccctaagtcccaggcaatgtgccttgcagctcattcctgtccttagagacactgcctggggcctgctcagctgaactgtgcccctcgcctgctgcagagacaaggccaggcttctttttccctctgcacccccctacccccaggaatcggggttggtctccaaggcttctccccccagtctcaaacatgcaggcctcactcagctgcccagctccaggagccctaggtcacccctgc

SEQ ID NO: 37963 - DNA, 478 bp, Homo Sapiens
cgggacctttctttcgccaggctgcccaggcacctctgaactctgccaagtgtcaatcaaaactcagcaacagataaagaaggcaataattaatgcagcagcctcacaagcccccagaaaggtgtctcgagtccgggtggtgtcgtccttgcagagttctgtggtggaaactttcaacaaggtgctgagcagtgtcaatccagtccatttacatcccaaacctcagtcctcctgccaatgcagggatcacattactgatgccttggtacaagtgcttggaatgtagggactcctttgaacttgaaaagagtctgacccagcactatgacagatggagcgtgtgcatcgaagtaacatgcaacctttgtacaaagaacctcgtttttttacaacaaatgcagcctcctttcccatgcccgtgggcataaggagaaaggggtggtaatgcaatgttcctactcaattttaaagccagtcc

SEQ ID NO: 37964 - DNA, 381 bp, Homo Sapiens
ggggaagacagaaaacctggacaccttgcaattgtttgcaacaaagtggaaaaactaaagtagttttgatatgtgcattagtttgcttggactgctatacgaaatactacttggtggcttaaacaacagaaatttcttttcttacagtcctggaggctggaagtgcaaaaggaaggtgtcggcaagatcgtttttttctgagagctctctccttggcttgcagatggcagcttgctcctggcacagtcttttctctgtatgtgctcatgtctgtgtcctgatttccatttcctagtagggccagtcaaattggattagggcctaaagtaattatctcattttactttacttctttaaaggccatatgtccaaatacagtca

SEQ ID NO: 37965 - DNA, 504 bp, Homo Sapiens
ctccttcttgggatcagagctctgggggtggggagtcaggcttctgaatagctgtcaccaggagagaacctgtgggcaaagcccagagcccagtcatgccaggcatgtgtgcgcagccataggtgtgcaagcatgtgcatccgcagggacatgaggccacaggtgtgtacaagcttgactgagcccgtctgtatgtgtgaatatataagcatgtgtagatgtgtgctcacacttgtgggacctgattggggcttcagaccttgggtgcctgtccgcagggtctcctccatccttcttgatttgcctgtcattgaggctgcccgctctgggcgccattccccagcctaacacctcttctcagtctttccttgcaggtccctggtgtccaggccttggggcagtgaagaaaccgtggggaggggcatgagatgccagtccccaaagtccttgggagcccttgtgggccgagtcattgtaggacacaccctctcctgggcattgctg

SEQ ID NO: 37966 - DNA, 446 bp, Homo Sapiens
cagatctcggcgctcaagggacatctgtggtgaatctcaattctggaccatgagctcccagaaggcaaggactgtgcctgactcatccctgttcctggtccccagtgcggcacgtgtgcgtggcaggtgtcaccaccgaaacgtctgcggatcctggagcaaatgctcacaagcaccacccagcccaggccgaaacaaaggagaggcacagacaggccacctcaagaccccaggttctcaaacaggaccaggaaccacaaagagactgcatcctccactcgcaaaagccaaaggctgggcccctcctgccttgctccactcagaccacctcggatgtgcttttcttccttaatggccaagttttccctagcttgtggtcagttccctgggcctccccgccaaattcatgcccccccagctaagcctgggctactaaccccggcccc

SEQ ID NO: 37967 - DNA, 442 bp, Homo Sapiens
ctcggacctttctttcgcccacgctggggagctggatcccggaatgctcgaggggaccaaaagtagggggtgggggaggctggatgcctccgttccataacataatcatgactgccaaccaagacttacacagtaccaggcaccattctaggagcttctcgtggattaattcatttaatcctcacaacagcccaaggtggacgtccttctgagaccactgtatgggagtgaacagtgtggtccaaggtcgcagagctagaaccgacttcaccgtcctgctgctagctaacgcaggtccctggtagctgtgtcaccccctgcatggctctcttgctgtcttcttctcccagcacacacctgcccagggttaaaggatgccttgcctccactctgaggagggaccaagaaatgctggactggctgtaggcagagatgctcaggg

SEQ ID NO: 37968 - DNA, 390 bp, Homo Sapiens
ccgtactttctttcgccaggctgggacagtgccagagtctagaactcagagagatgtggtgttgtacccttgaatgattctttgaatgccaggctagtgattgggaccttgttgacaagtttttaaaaggggctgcatataatctcttgaagccagacattgaagcagaagctcccccgactcccgctgtgccttccctccttctttcccttatttgtggtaatgggatcactgttctcccaggtacccagtctcaagggtctttttgcagtgttcctgtggtcttctgtgtgacaaagaccatcagtggcaattttctgccctaatccctgccaacctcactcatcaccagcatggctgctggaccatccttactgggcactctctgtg

SEQ ID NO: 37969 - DNA, 368 bp, Homo Sapiens
aggttttaatctctttcagatattttaagtatcttttgtgtctggattcagagaggtatgataatgagattctcttctagaaggggaagtgggagtaggtaaccatactactctttctacggctacagagccgcatactcgaaggagggagatttttatttgtaaggacatttgtattatctttcattaaagtagagtcccatgggcgtggcaaatggctgtaaataaagtaaaagtggctaaagaaaacagtgcctgctattagcttgatgctggcattttcttctttccctggatgtgacttattgtctttattgggtccccttattatctgctttgatatccatctctggaactttgatctctaa

SEQ ID NO: 37970 - DNA, 480 bp, Homo Sapiens
cgagtctcggagtgtggagagatgcagaaaatattaaaaagaactaaactaatgaaaaaaaattaacggataggattaacatgagagttgacaattggataaggagtcaattatatgaagttagatcactaacaattatctaatccaaagaggagatagaaaaaagactgaggtaggggaaacagtctcagggacatgtaagataatatcaaacactaatatatgtgtgattagaatcccaaaagagaaaagaatgaattagggcagaaaaaatactagccaacaacttcccaaatttgatggaagacatcaatttataaattcaaaaagctcagcaaactccaaacaggttaaataaaaggatgaggcttatgagggctaatgagcctaagttttaaaaaaagaagtttctccataaataaaaggcattataaagctttcatatatttggtatatagtctaaatatttgaagctttaac

SEQ ID NO: 37971 - DNA, 424 bp, Homo Sapiens
agcacgtgacacatgacaactgtctcactgtgccaaggaatggagtggacccctattgggatgtcatccccctaccttttttggttggaaccatccctcttctctcccccctcccctccacgcagtgacagggatgggcttctgattgccatgttcataaacaagactacctgcaactactccccaccctgggtgggagttgggcactgttagtaaattggtcaaggatggtgcctgacccaaggtggttcagtctgtgtccttctccaggaacttggaatcaggacgtacagagagttgcctctctgcaggtgacgagataagcacaggccctgtccatggtcatgtttttggccatttggaccagagaacccggtttgcaagaagacaagatttctaagatccaagctcggattgcttttcc

SEQ ID NO: 37972 - DNA, 490 bp, Homo Sapiens
acagacttctccttagaaggactgtgccaaaacagtcctgaatgttcgtgttggccttaatgaaccaccccttagtgactcagtcaccattctccacaagccctacagccatcccggctccctctcttctagcaaataggttcggggtaaaaaaggagaaatttattaggtatgaattccctccttttcctgccacattcccttcagtatcttaggataatgtatacatttcaggcttattcaccagtttgtacttctgattacattttctcatttcatccacttcttcagattttccttcttattacctttcttccctcctaaacctctagcctctccccatctttccttactggcttctgtggcctacacactttttcattctgacaaccttcctctaacttcgcatctcctggtaactttattaccaaatcatgtatactctttgtgatcttccactttcctcctcccaaacacccccaaactccga

SEQ ID NO: 37973 - DNA, 499 bp, Homo Sapiens
accgcacgagttcggagtttgggctgcagcctgtgctgggctgtctgagttacagaacaggagatgtgtgctggactgggaccgggagaattgctgagaaagaagaatgtgaggagagcctgggctccagtgcgtttgagttaacaaatcctatccttctccactgaactctttcaggacagtataaaaaagtttaatggcaaacttcactaagcaagaggatgggggacctggctgggaacattttccttatgctgggggagaggctgcactctatgctgttaggcagaaaaaaccaggcactgtaggctagaggggagtcaaaacatcccctacactcaacccacacctccagacaacaggcctgtgctcgactggtggtgagggcctctcttggaattcagttcttggccagaaatccctgccttagactggggaaggtttgagagaagctcagcaaacctggcggctgctctttgggtttggcaaactccgagac

SEQ ID NO: 37974 - DNA, 507 bp, Homo Sapiens
accgcacgagttcggagttggctgattaatatgattagacccaaaaatgctaggtctctacttctaatagtatggagaacactgatagtttttggtggaaactgtgtagagagttatacaaagtaaatgcaattgagactcctgattcaccactcttgagaggcaaggagtttagtgactctatacataatacctttgaccatatgtggagaatcaaggaacataatgaagctggttggttgctcctaagttcagtggacaaagtgatgaaagaaaatgatgaactcaagtattctgtctcccaggttcagaagcagatatggagcctcaaatctgctaagactgccctgaatgagagtcttatctcctgtagaaaacgagctgaaactgtggaaaaacagacccaagctcttacacgagtggctgaccagcaatgaaagatgcatgcacagcctcaccaggtgtctactgttaaagtgagggcatttgttggaaaagcatgcgaac

SEQ ID NO: 37975 - DNA, 438 bp, Homo Sapiens
tcggagtttgggtgtgtttgggaggagggagaggagcaggcaggaatggaattcaggatgcatgcgctgattaggcttgtgagtaaggggctcttttctgatgtggggctgagtgaatagaagtcctggacacggcagtggggcaccctcaagaacagcagatctagggtacagattttattcttttggatgcagagacaggagaaagggctgaggcacagctggcttccaagccttcgccaagaaccatgaaatccagtgagaccgataaggcaggccctgccctggggagctactgctttggggtgacaaagacatttagtgctagaggagggctgatgctgcagctgtggaaagcttcctggagaaaatgacctggaaggtttctgggatgtggctgaggagggagggcgagggtgcagcctgtgctgggatggc

SEQ ID NO: 37976 - DNA, 474 bp, Homo Sapiens
gcacgattcggagttgggggtgtttgggaggagggagagctggaaagctgttgtcttctcttcttcccattcagcagaccatagaatacttcagggtctctgccacatagagatgccaaaaagcttggatgatggctcaaccattcagtttttattaaggacacaactttgccaagagctctaagcttcatcaatttctttgacatctaggttcctaccatgttcttacctactccactacttgacctgctgattcatttatttgtgccaggcactttacataccttacttctaatcttcccacctcacctgtatttctccgcagcgtttagcacaaatatgatgaattgaccattgatgtgattatttgtttttatttgtgaactctgcgagttcaggagccatgtcagtcaccattgtacccctgtgcctggtggttaacaaatattgatcaacaaactggaggatataatt

SEQ ID NO: 37977 - DNA, 561 bp, Homo Sapiens
cgactctatcagtatcccgcacgacatcgagagctttgacgctgagagtcatgcgggtatcttctataatcgatctgatatgctttcaacctgttgtaaggtgcgtcattttactacgttcttaattgaaaaaacccctggtgcagtgggccaagcacgcccccgacaccgagggatggacccctccaactcagctggtttgtgacccaggcatcttggtgttttaaagactccatagattccatggagacaacaaaatcacacaatgacaggaccctgaggggctgctctgagaagcacatggtatcacaagacactcagcttcctgcccggaacgtggcgaaacagctcaatgcattatgggagaagattccaggacaggctggagctgaaactacatcaggacaggggctcgtcggaccttttgcactggacagagcagattgacggcgagaagaaaatcggcagcgggatggagaatctcctgggaggatgaagctgtcgcacagcctcctcttcagagcccagtgtcctcagaatgactctggtgggctggttggc

SEQ ID NO: 37978 - DNA, 425 bp, Homo Sapiens
cacgattccgagttgcatcattctaaagatatacagtcgaggacttgtgcaggagaatggtcctgtagaagagttcgcccttcatgatcattaatccatagctttctataagaagagtctcagattcaaggattccctgttaggttctgagatttggacatcctcttaattcgcagcttgcctggcccgcagccatgtctcctggcttttagatgggcttttgaatggcctggccctgaccacagtctgcctctgtgggcttgtgggggacagtggctggctgacctgtaaggggtcggctccactcccagcttgctctggctccagctgactggcatacctctggcatctgcgctgcactgggtagggcagggaccaggccctcagcctccctgccctgctgtacctcctcccaaataccccct

SEQ ID NO: 37979 - DNA, 470 bp, Homo Sapiens
atcgagctcggtaccaggaacggtagtcacagtggaaagaatggctagcatttacagagtttctactctgccaagttctgtgcttagggcttcacctgcccctgcctatgatgtaggtgctaccaccgtcctcattttatagatgaggaaattgaggctcagggagtgcagtgactcacccaaggtcacacaagttagtggtgtggccaggacccaagcccatgctctgacccttgggccccatgccatgtcccccaggcttcctgacaaagtgcatccagctctacgagaccacggtggtacgacacggcctcatgctcgtcgggcccacaggctccggcaagagtactgtaagcagagccaagcttggcagccagtgtccggatagtgggcctgtaggggggtgcagcttcaacaggggttggcctccatttgtgccccttggcatagaatacccctcctcccataca

SEQ ID NO: 37980 - DNA, 423 bp, Homo Sapiens
catttctttcattttctgccatcctcagagagagaggtttaagaagagaaataaaggggaaaaacgggaaacagaaaggcgaaaggtatagatgcctcaggaactgacagggagtagcagtcaggctcctggaagaaacgagaaatgtagcaaggcatggtcaggaaacacatgtctatccatgctcccactctctctgcctttccctctctttcccatccctcttgccaagaagtgagttggcaatcttaccaatgacaaacaaaatagataaagcctccacactgagatttagaaccccactttatccaaaactaagtcacttacatcaaattgtaccatgacaccaagcattcctgtcccctcccctgcaatggcaatcaagtgtcatagaaaaatagccttttaaaattaccatgagcc

SEQ ID NO: 37981 - DNA, 579 bp, Homo Sapiens
gaggctgcggtgggctatgaacactgctgtactcagctctctctaaaaagaaagaaaagaaaatctttataaatcctgtgaggcagcaccatttgccactgcagatatgccttctgcctgttgcttccatgccactctaccaagttaaagcaaacaaggccagtctcaaggcaaattttccaccctgtgtctcctcctttgctgtccaccaatctttagcagaaatatgaacttgttaatacaccattaaatattgtcttaaaaacgagtataactcacatctcaaatcggagcaaagtcctttagactggtgatttccaagtgagtcaagtttgttattaaacacttttatgaagtaccatagctataaaatcacttcaggaattcaaggctatgattcttgagtggcaacaaagtttatatcctctttggtggaattgtttaatgatgctcttgagctgcccaggaagtagtaaggcctcctaagagttgtttcattattatttcgggagtttagggtttatttttttcctttttgagacagagcaagaccctgtctccaaaaaacagacaaaccaa

SEQ ID NO: 37982 - DNA, 496 bp, Homo Sapiens
actgaaaaatgggccatcagattacgggagatgagcaaaaccggagtgcaataggaagtgtaagtttctcctgacctggttattttaacaggagccctgtggggagtccaatatatactttcccaaatatgaatcacaggagttccaccacacagactaagcaggaggcaaaggaggatggcaaggaagtgtggcaaatactgctggagagattcatggtgctagatgtgatgatggatgttgaattttggacttctgccaatgttcttgcctccattccttcacgcatgctgttgcctctatgttccctcccctctgttagctgcagtaattcctggtcagcctttaggtctcagctcaaatatcacctcttccaggagacttcttgccttcccagacctgcttgggtgacttgcctctgtgctctgcagtagtctggcatggcatgtgttgtccctgtttttctggccctttttattttttgagacggagcctg

SEQ ID NO: 37983 - DNA, 468 bp, Homo Sapiens
ggctgtgttgcccaggctggatgtagtggtgtgagctctgcttactgtaaactctgcgcctaaccccaggttcaagcaattctcttgccttagcctctcaagtagctgggattacagttcaacatggctgccataaactggatattgatatctatgagcagaggagtccctccctgtgtccaccaccatcacaagcccagggcaagtactgctagagggctgcctatgatcagatcttctgagaacatcagagaaagactgtccttgcaatctacactacagcaagacttcaggaccttgaacttcaggttcataatctcacaactgagaaggatccttccacactcttggaacagtgcacccattggaactctgaaggttaagctcaccaggaaagtttctctccagaagaagataacacccttaatgtgaacagcttttcccaaaatcatggattgaaacttctct

SEQ ID NO: 37984 - DNA, 427 bp, Homo Sapiens
agggttgtgtgggacgtggtcatgctgcattgctggccactgcccctgaaggaaaacacctcttccacaccacttttctgtatctcctctacttctttctctagcatggatgtggcatttgggcctgttgtgaagactaagccagccatctgaaaaagctctagccaccccatgctggacatgtattacagtgctcaatatgttcaatttcctgaacataaagactgatctttgccaacagccaattctaaggccttttaatttctgtacatgctgtacttcagggattttatctctcttcttatggctttgatatcctccttggtacaagtgagtctcacacctttatctccagccccaacatctcatctgagtttctgatcaatatttccaactgctcctagatatgttttcctagacattcaac

SEQ ID NO: 37985 - DNA, 360 bp, Homo Sapiens
ctgagctgtgactaacaatactaacactactactatcagtatatacaccaaaaacaagcatagttttgcatgtgctctcccctttcttccacactgtatctgtacagagcttgtaatcattacataccacttctctttcgactttcatttattcttaattgttgtaataaactatgtttaatattcatccccagtccttatgttgatgccttgttctctctaatcagtttgattttttaaacagattgtttaggaagggcttataggaataatatctacatttttgcaagtaacagtttctggcctttataattgaaaatcggtttgacttgacataaaatctttgtcacattttctttc

SEQ ID NO: 37986 - DNA, 459 bp, Homo Sapiens
gtcttagctgtgactaacgtctatttgacgcatataggagctggcagggttgaaagtggagcccaggactgcaagcatggccatctaccctcggggccggcaccagcctcggggcagctgaccttccccacctcagaagctctcattcctctgggctttccacaaaccacccttcttgaccacaaaaaggtggccatcctgactggtctctaccttcaggaaaacaaatggggacctgagggcgctcaaccaccccagaccacccagaagtcacaggagcacggaacaggaagcagggagacagcacacagtaagcacatggcaagcacacagtaaacacacggcaagtacatggcaaatacacagcaggtacacagcgagcacacagtaagcacacggtaaacactcagcaagtacatggcaaatgcacagcaggtacacagcgagcacacagtaagc

SEQ ID NO: 37987 - DNA, 464 bp, Homo Sapiens
tcgactctaaggatcccctctagtagttctagatacttgagctattacttcctgcattctttgtcttgcagattcacctactaaccttgatgaatctccatctggtacagtcaatggccatgacttttggctatctgattctcaagatgtctaacttcgtcttataactctttctcaacaacttctctctccaatttaaattctttctgcgtgagcagtctgaatagccttcactctttttcacaacttaagcttctgaattatttgtccttagtcatagctccctacgtcgggagtctgtgactaacccaggatggacacatctgttacatgacaaggcatacaggtgacatgacaaccactgagttacgctttgggacagactggagagaagtggcatatggattaagctagtcactaaaaatcaactcagtctagcacccacattcacactcagaccctca

SEQ ID NO: 37988 - DNA, 378 bp, Homo Sapiens
caagggtgcatggtggctatgatggtcaggaagatctccaaaatgattttatctataacgggaatgagaaattattaaaaaggctttaaataggaaattagcatgatcagatttgtcgtgctagaatatttgtgtaatcggaaagggtaatgtttcaagaagtgtattaatgtcactttctgggtatacaacttaatcaatccaaggcaccttcctgctgaggattaggattcttgtataaaaaatacaaaagaactatttactttttaactttcgatattaaatataggattttttaaatcgagtttttaggcttcaaatcgaggcattgtcaagacataaaatgtaaatttgtttatggttcaacatatcaaggct

SEQ ID NO: 37989 - DNA, 357 bp, Homo Sapiens
aactgtttacttcagttgtttgatatgtacacaatgtaccttagactacctagttgttctaccagcgattaagattacaaagtcttcatatgcgtcacaaatattttgagcacagataggacctacttccttaactcttttaactattacctacaaccattacatactttatagtttatcaggctacctcgtgacgtaacttgtacagtttgcttccattgttatgtctaacatatcgggacctccgcttaagataccttgcattaatcgttggcttggatgtttagctgtatagcctctggctagtctattcctttctactaccttgcagactgggtttttgaggctgcatttcaa

SEQ ID NO: 37990 - DNA, 440 bp, Homo Sapiens
tcgggactgtgactaagcagctcttctgaagcactggtttgggtggacagatctaagcttgccatggagtgtgggacaggattccacatccagctgctgaagtgagactgcaaaggagagcagatggaaggatccgcgggaggccactgactgtctgtctagtctctgagtcagccagaagagctgaattctgctagcctgtcagtgtctgtcttaccatctctaactacagtgaccttctgcgtaattgcagctactgcactttcaccttccaaatcttgggcagatttctttttggctaactctaacccagaaccatacagggaaggggatttggggaaacctacttctagcttaaccaagttgataaagtacaaaactgttagattctaccctttgtcaacttggcatctatacacacctgtttttatcatgttagc

SEQ ID NO: 37991 - DNA, 401 bp, Homo Sapiens
tctgggagctgtgataacggaaaccatatggggccagagcatgcaagaccattgcaagaagcatcaagggcttggagctttatccagaagacaggagcagccattgagagggcatgctccagcttttgttttagcagaatctctttgcatgtgatgtggaaaatgaattggagaggggaaccaggaaacctgttaggaggctacttctgtaatccatgaaatggcaatattctgcttttatgtccctgagaagaaagcataggtaaggaccactgaatacacatttggtagaaaaagaatattccccggctaaggattgggaagataaaacaatcaggaccacccacccattacttcattttcctttatgtatccgatcaagtaccctttctaaaagaagg

SEQ ID NO: 37992 - DNA, 456 bp, Homo Sapiens
atatcctagaattaggagtatccccttcttccagagttggttaggctctggtaaaactagacagatatgtacagagaacttggcaattagtaacaccttgaagtatagggccttgtataaggagaagagagagctctcagtagttagtacaaaaggttacttttcccctccctctagcatagggggatttttctccagtcctcacaatagagaacctggagagagtacaggagattaacctacttcaatagtatgagaggctaccctaaaatacaggttcccttagagtttttaaaattactcatgtatgtacacatagagccttcagcaattcatccatattagcttaaaacattcctatagatattagatatggcgaagggcttctgctccatgtaagctagtggttatctgaatccacctgtttgtctctgtagttatcagggcagcattgcc

SEQ ID NO: 37993 - DNA, 638 bp, Homo Sapiens
ttggttgaccgtggctgcgatggcaggggtcagatggacagcagccagtggtagacttgtggatttaaatgtcaggtgacagcttctaactcagatttccatttgacaaggctcataattctatacattgggctgccagagtctacagactgcttccgtatatgggatctcattcattttccatgccaaccctgtaaggttgggctgaacagccccattttatgcctgaggaatctgaggtttgggggattaagtagtgacgtgtccacaggcctttaggtttcgtggggcagatccggaacttgaaaggaatttgctatctcagtttggtaactcctcagatgctgccactcagaagggtgttggtatcactgatgcatgtgacttcatgagggagagtggagacatggcacagagggagggagggagatgcggggtggaagagtagaggccctggcgttgcacatcaccaggatgctattcgcagtgtgctgacccttcctggctgcaggcccctccaccagctgagccctcgtgtgtcatttcagggagctactttgcccgagatgctgcatattcccaccactacagcaaatccgacacgcagacccacacgatgtttctggcccgggtgctgg

SEQ ID NO: 37994 - DNA, 403 bp, Homo Sapiens
ctcattgtttaataaatgaggaaaccaggcgaggttaagagtagaggctggagtgacaggaatgaatggcttcttgaaaggaagagatcttaatttgggttttggagagtggactgggcttaggtaggtcatgagaggaaggcaagagggtaaattgtattgagtaccttttactagacactgagaaaaccactttgcttggagcgtggagggcaggtgagactccatctttttacttctctggacttgtagagtgcttctagccttcccatttatttagttccttaattatatctttttgactggaaattggagtctacaaactcagtcttatgctttgctcctcaaactagacttggagtgattattgctttggtaacatagaagaacactgagcagcttg

SEQ ID NO: 37995 - DNA, 425 bp, Homo Sapiens
acctattcgtcacatgaattttcagccccacaccgagctctccaccccccttctgcagtactggatgcctacacattctgaggcttcccatagttaatctgacaagaataaaaaattaaaactgatcaagaacaaagttgcatacataccataattacaactataaaaaaattaatatcactatatgtgaaagactgaaagggaataagacaaaatgaaaaccgttgttgtaataagcaccattttttaacataattcctttgtagcatttaatttttccatttaaaaattttaacataactgagtcaaaggagtttaaaacttcactctaactttcttaattagggagtgtcatcaagttagggttcattggtcagacaccacttttacagggccatcagttcaccccagccacggtctaccca

SEQ ID NO: 37996 - DNA, 373 bp, Homo Sapiens
tcaaccgagacgatttgatgctcacgtcccctcctgagtgagggtcactataagctcttcaggcaggcggatgtgggttgcagcgtccagcctgtgctctaggtgcagcccaccacgttaactcactgagtggtagccgccagtgtgccatcgcgcaggggacaggccacaccccgatgctcagacagcttattcctcatgtaattggtcatcatgtgactatgtgttttgtgtctgtgcaaatttctattaacataatgttctccaggttcctccatgttattgcaaatgataggatttctttccttgtaaaaaataacatgccacattttcttaccaatccgtccaccaatagacacttaggtcgttttca

SEQ ID NO: 37997 - DNA, 371 bp, Homo Sapiens
catttctttgcacagcaggcttccattcttgtctacttactgcattgaactaatattccagacgatggaagaactattttccataacgaaatgctagtattcatcaggaggcgcgggttgtgcagtgtgaacaattcactttcgttaagtaccatatggccgctggtaggaaaacgctaacatgtttcaacagtacagctgggggagggctcctttattcaccgtgcagatagctctaattgacatctctcctaaaacaggtctccagcatttctgcaggatcattagagtaattagttattaaataccatcaccacttttagagagggggtctgatccttggcaacattccagcgtgatggaactgacag

SEQ ID NO: 37998 - DNA, 373 bp, Homo Sapiens
gtttccactgagggtctatgtagagtaaacagaaagttttgagggccatatgatctgttgcaactttataagaactctgccagtgtaatgcaaaaaccgctacaaatatatgtaacaaaagaacatggccatatttcaataaaagtttatttgcaaacacaggaaatgggccagatttagtctatgggccagtctgcgtgaccctggcttaaacaatgacctgaagataaagtggcagacagatctgaggtgttcagtggcagaattttaaaaatatttatcttcattcctactaagttttcttcacagatacctgtggtcccttttataaccaaactctcaagtttctcagcttatattcactcttcaaaac

SEQ ID NO: 37999 - DNA, 405 bp, Homo Sapiens
ttcacaactctacgtaacacaagctcccgtcaattgccttgctgtaaaataggtgaataggtgtagtgggagattcagtggccaagcctgggtcccaggtaaggtgactaaccatcccagttttcctgaacagagaaatttcccaggaaactttgggttctaaagccaggaaagtcccaggtaagcaagggtgagttgatcaccctggcagggaactgattcattcaattctggataattgaataaagtccacatcctcaccgggaacattctactgaatgataagaagaagttccttctagttttgcctgtttcttttccaggatctgggtccatgggacccctaccttatcaactgtccccatacccaggccctggctctcatccctacattgacctccaccc

SEQ ID NO: 38000 - DNA, 373 bp, Homo Sapiens
gagagtgtagagaatgtggtttgggtacggactgtagataggggctgactttcacacagcaccctggcatggtgatgggcacttcctgtacgtgccctctgttgtcctcacaaccaccagctagattggaattcaccctatttcataaaggagcagagggccagagaggtgaagcaagttgcctaaggtcacacagtctttaattgataggctcgaacttgggtctttgcagcatttaatcccaggctccttgtgtgaggcacttggaagagtgaggtaatggagatgaggcctttttggagattttactcaggtttttagagggctcagtaacttgtcatgtgaccaaccatctggaccagggaggtcttgg

SEQ ID NO: 38001 - DNA, 419 bp, Homo Sapiens
cattgttgtcccccttctcttcgtccggtttcctgctccagacagctcactgataggctggaggtggtgctggtagctcgttagagttcagcccatggtgtctagcagtcgttcaggaacctggctgacaaaagctttgtgatctccaacacatgactccaaaatcacccttcgtgtaggcatccagttgccagatgagagaatccacagggagatgttctgggccaggcctccatgtggttccattggccagaattcagtcacaaagccccaccaaacttggcctcccaaagtgttaaaattacaggcatgagccactgtttggaatccagtccactgatatgtttctcagagtacgagttagttgttttgtagcgtgttccaaggtttggatttctccaatgtttcctcatcattag

SEQ ID NO: 38002 - DNA, 382 bp, Homo Sapiens
gttgacagtggcttactagaacaacagtgccagtatagaaaatgcgtccaacatttgttgactgcttactcgatgccaggaacagtcagtccattaaattcgaaacacacacatcaggaagaaatagatgcagtgtaatgaaatctagacatgttgagcttaagatttaatgagatgtgtaaatgaagatagctggaaaccaagatttggaggttgggagaaaggttaaaactatatctagatttgggagtaatttctacagaaattagttgacaatatcttaagttcctgaaatctctcatattcttccaatatccaattatgtcaaaagaaatgttaacaaacacaactggttatctgctcccttgtgtttagtggtgag

SEQ ID NO: 38003 - DNA, 434 bp, Homo Sapiens
cctgttagacgataatattacagaagtgtacgttacgctaagtgatgagtagtcccgctaaaagacatttatgtttttataaagatggtagttatggttatcaggaggatataatctattatcttaaattaggctaagaccccggccttcaggccggggatacagccgtaatttaacctcatgctccattttttggcctccttttccctaacagactcccataactaccataaagcacatctagctctagctagactatatgaacgtgtcagtaaccagagacatgactggcagcacaagatcactcgaaagctggtagacgaaagccaagctatctgcatagaggatcttcgtagctccttcatgttccataaccgcagacttggtaaagcctcagaactagagaaggagatactctagaggattaagtagcc

SEQ ID NO: 38004 - DNA, 358 bp, Homo Sapiens
ctcctcaccctgaacctgcaccaatgggggagctcagttccccagaggaaaactacaatgcaattgccagcagtgggaggggctgttgggctggccatccttctgtgggtggtcacttttccttatggagtctcacctgttaactgagcatctcagtgggccaggcacccagcaggcaagagtatcctctagttgtcagagtccgggtggcagaaaaccaacctaaactcacttaagctcaccgtggagtgtattggttcatttggccagaaagtcccaaagtagggccagctccagggtttcctgctgtgtgccacgattctccagctcttgcttggcctgggccacctccatccgc

SEQ ID NO: 38005 - DNA, 358 bp, Homo Sapiens
gttgacgggctggggtctgggtgacccctgaagtcagatcagaagtggccacattcgtgacttgtggtcttctgagtataagaaatgtccccatttggatatcctcacagcctcatgaaagtaagattttattgagtagacctgctcatggaaggtgggtagtttccaagtagcactggtacacactaagtgaaataactggtaatcctggctgtcagcggagccaagtcaacatgctggtatacgtctgtttttcctttgagctttaagttcttatgtacacataaccaatccaacctacttttcattaacaccatgttaggtattattttcttagattgatatttttcttttaaag

SEQ ID NO: 38006 - DNA, 463 bp, Homo Sapiens
taacctcgtacctgggttgacgtgagcttccggttcgagctcccggaaccgccgcctctagggatgacggtcagactctgcgaaaggccgagagaagctggtcctgctcacgagagaaaaaggaggtaatgtgtccctggcgagggctgatgggaggcaactctatttgaaaggacctgagggagcagggtggcgaataagtgtccctaaatatactcttttctcttggggtcccaagcttgaatcctggagcaaatgatagtgagcaactagacttaccaacccagtgtcacttgtaataatcacttgtaataatcacttgtaataatcatctctgagtgtatcagttaactttgtctgtgtaacaaatcatcccagattttagtggcttaaaacaacaaccatatatttagttctggatttggtgggttagcagtttgggcttatctgggcagttctgctg

SEQ ID NO: 38007 - DNA, 443 bp, Homo Sapiens
ctgcttgacgtgactctttgtgtctggcttctttcacttggtgtcatgttttcaaggtccatccctgtggcagcatgtagcaggacgtcattattttttaaggcccggtaatattccactacatagaccacactttatttctcagttgatgggcatttggcccgtttctgttttccggctatcatgaataatgttgcagtgaacatccgtgtccaggtattagtgtgaaggactactgcaatttgtatgttgcaccttctcccccacagggctgggagcttcatggagggggtggacaagtctgtcctgttcaccagtgtccccagcattcagcacaattcttgagacataccagccgttcaacatacgcttgctaagaaaaggctcctgattctccagccctaattcctgtggctaaattactaccagtgccccaagcctgc

SEQ ID NO: 38008 - DNA, 404 bp, Homo Sapiens
aactcttctagactaccaacatcctctatgtgttgcttatttcataaatcatcaaatatagctataatcagttatgtttaatgtgctcctttacacaggattttgacattttttctttattttgatatcttaaaccttgctgtttaggatattttggttttccaagaatgatttattcaggtcctgattttaaacctttgattttaggatattagcgtgcatacaaaggatcttaccttcttagtacttaaatttgtgattacccgttctggtttttagataccctaaagcacagtttttaatcttgtttgtgtgtgccacaggtccctttgagaatgtgatcattgttattgatcataggcacaaaatacacacaaatacttaacatacacaattttgcataa

SEQ ID NO: 38009 - DNA, 436 bp, Homo Sapiens
ttgtacaaaatgtaacaagtaggcaaatgcctaaatatagacatccactgcatcaccatagggctgtgcacacagcagctccctcaactgctgcatgggggtggtcccattttaccccaccccactttcccctgcctgactcacttattctcaatgactatggagggagggctttcccactcctctgaggaggagacaatacagctttctttgccccttaaatggagatgttaccacagggaaccagataggcccagagtatgaatgaaatggattcgcctggcttctgatgctgttttgcttccaaatgttggctaaaacaatctctctcctaagcctatactctatcagtggatattcttttttaacctatctccatccttttttagagggaagaggtacttcaaaacttttagcctcctagagtgctatattt

SEQ ID NO: 38010 - DNA, 454 bp, Homo Sapiens
ggctcttggctgtagctgatgataaagacagctctaatttttgaaattcaggacacagatgagtaaggagcatcgatgctcagaggtggttcagaagtacaggcatgctgccaggaacgtacgctcagacgtgcattttttcagaacatctgtcggtcagccactattacattccacctgtatatgaggagcaaaacggaaacacgtgacctcaaggctaatgggtggagtctcatggcaagggctctctaaaggccgcagctgcaaagcttcgagactccagcttccggggattctacgaatgtatctacgaatccttacgggacacccaagggcctggcgctgggtctaaagctccgcatctaagctcttgctcagagtcacgggtcaatgtcatcgaacacagcggcgcaggccctggtccgcagcagtccagtaaggaagccatggggac

SEQ ID NO: 38011 - DNA, 390 bp, Homo Sapiens
tcgtaccttatcgtggctttcttctccccgcttcttcacaggagctcccctctgcacgtgtctgtgtccacgttgccccttatccaacaaggacacatttctattggactagggcccaccctagtgacctcattttaacctaattacctctttagagaccctatctccaaatacagtcacagtctaaggtactggggttatgagttcaacatattaactttgagggggacagaattcagcccctaacaggccttaaagctcagcccaggatgagccctggccagacagaaaaaaggccccaaaagccacttaagctactggcaacatctgaaactctcatttcctgatcctgggataaatcttcttctgaattaactgagcccagccctc

SEQ ID NO: 38012 - DNA, 440 bp, Homo Sapiens
gtgcttagggaagggagctttgggtatagtgcagacatgaagagattcactgaatcaaagcaaggatagtaggtgtggatagaggaattgttagaagctggcggggcaccactaggacctgtcagctaaaagcagggcagagtggtgaggaagaaagaggaatcggagatgcctctttgatttcctccttacttgtccgagtaaatgaaaatcaaaacaagggaaggaaagcaggttttagaaaagcttgagctttgggatactgagtttatctgtgtaacaaccaagtggctgttgtcagtatgtggttgaagagatgtctgtgctagagataatgggtttaggagtgatcaatgtgtgggccacaatgaaagccttcaggtgtctatccaggggcattagaggtgggttggccatcagaaggaagcctagacaggtcc

SEQ ID NO: 38013 - DNA, 374 bp, Homo Sapiens
accgtggcttcacaaaccagagtctttctaatgtcttctgtatttatttcttcatcctctgccctctgcgacccctatccccaatattcagaccttaattttctcttgtatgggttccgaatctaactccttatctctctccagtctttcgtcctttctaacccaccttcactattgcctcctaaatattcattctgaaaggtaaatgtgtgttattattttatacctcaccttcaggatacaattcaaatttcttagaatgacattcagcctctgccttccttacaacctaatctgctaaacccattactctacattttagtaaatgaagctaatttaatttcctgacctatgccctcccaagccacggtcaa

SEQ ID NO: 38014 - DNA, 369 bp, Homo Sapiens
ctggggatcatgcctacctctgaaaagctgccagcgttatgccgcatgcccattgttatcatgccgagaactgggcagaaaagtcatgtcctctgcttcctcctctagtttgtaaaggaattttctctttagccttaatagcagatggatagaggtgcttagtatagaaccttccgaacagctgacgtttagacctaaatgtaaatcaggaccatagcttcctgtcaccactcggatcagcaccctttacagccttgctatacctctgctgctgcctcccccagtgctggaacagactctgggaccaagatcctcttgtcactgggtctttgcagttctttttcaaaagcttgccttccctgctgttta

SEQ ID NO: 38015 - DNA, 375 bp, Homo Sapiens
acagaagtaatgctcgtccatcctcaaagaagatggcacagcaggaaagatcggtctctgaaagcggcagcttgagtatttatgactttccacatgtctttcctgcccctaccattagcttagagctgtgtacctccagaatttggtggtgagcagctccaaagataggtacaccaggaaggctagaacagatttggtgcatataaagactgccagcatgaaaaccaggaaaactgcttttaactttcaagttagtgaatatccaaggaggatatacctgccctatccctaaactgagctgatgaggctctgatagggttcaaggttgtgtgacttctagttctgattccaacccaatagggccatctcacagcc

SEQ ID NO: 38016 - DNA, 367 bp, Homo Sapiens
tgtatatttgctctgctcaatccctgacggccctaaagtaggcatgaatggggtagactccaagcagcccaggtaaagttaaccaacaaaaaaagaagagagatttcagagtttggggttcagccaaattaattgcctaccaaaaccggatgaaaccaaaccaacactctttggaggaatataacagaatctacagtaatttcaacacaatgtccaggatacatttcaaaattgttagagcatacaaagaaagaatatgcgacccatattcaagagaaaagataatagtgactgaccctgatgaccaaaatgctgaattagcagacaatgattttattttatttgagacacagtcttactctgtctc

SEQ ID NO: 38017 - DNA, 360 bp, Homo Sapiens
aatcttgacgcgtaccgacaggtaaatgtctgcatgtacataacgtggggacatctgtgcggccccctgcctgtccattatgctcgttctgggggggacattggcggccctctgctatgtccattatagctcattcttagggagatgtgggactgtttgttactattcaatctgatgtacagagggggcggagagagacccctcaaatgtgcaggcgtgcgtgtagagattccagactgactattctaatcctagttttgactgatattatctggtttaagtacagcttgggccaaaaggcttgaagccagtttacactggtctacagctagttttaactggtaggctccatttgaacat

SEQ ID NO: 38018 - DNA, 366 bp, Homo Sapiens
ttttctcttctttgcagccaaacttcgactaattctctagacttaactttccccattttcttatctctcactcgctcttcagcctcttccctgctaactccctcttctctccaactcagcagttggggtgacaggtggcctgcagctttcaggcctcatcttagccgactgctcggcagcatctagcgctcctggcgctcttcccgtttgaaacactattccagggctttcctgacacttctctctcgtagttttcctcaaacccttctggctgttccttctctgtctccttcctagtactgcctcttctggaccaccagtaaaggtttgtggagtctctaacctgtatcctcctgccctcactcc

SEQ ID NO: 38019 - DNA, 429 bp, Homo Sapiens
ggaaatattggtggcatcgaattatgataattcagctactaaattggtaaatctactctaagttttctagaacttctctgtgttgtgcctatattttggacatgatggcagcttctgctcatctcagatggctgggtggcagtcaggttaagaatgtgctcttcagaacacctgcggatctgactggtcacccaaggattatgcttatgtctagttcagtaatcaatattattgggagtgtcattgactccttcctaaaagcaagaatcgtagtctgtgattggaactctcctccctaagaggaagccctttgcctagtattcctttttttatggcactttttatgggcatactgccttactttcctttatagttttatcatccaagtgtgtgtcattaaacactacagcatggttttttgcattaatt

SEQ ID NO: 38020 - DNA, 406 bp, Homo Sapiens
aactcaaggatttccagttcaacctgggagttacacaccaggttctagtccttaatgctcgctgtgtggctttgggtaagtccttgcccctctctggaccttgaggtcccattcatacaaaaagcagttggactcaggcctgccagcccccatttatgtggctcttccccgcccctccccatcctttggctatgggatagtctcccaggcacctccaaaaggaagtgtctaaaacagagctctccatctcctctccaagcccagctccccactgccctcttcctgccctgtccctgtctccgctgccctttagatcaggcaggcaggcaggcctagagcatccgccctgagacaccgcctgttggctgccttaagacgccccttccttctctgcccgcagcctccc

SEQ ID NO: 38021 - DNA, 380 bp, Homo Sapiens
cgcgtgtgacgggcttccaaagagctaaattaccggcatgagccactgtaccagccagctgcagtaacattttttgccaattaaatttattcaacatatttagcatctaaaacttgtttgtgtatatagtgttacaagattcaaattaaaataagcaatttttcaagctcaccaagaatttcactgttcagaaaaataatatccttgaattgtggtgtgtctactcaaatctacaaaattgaggaaatatgcaatatgcaaaatgctaaccctctgttcctatcccataacaaacattacattctgtatattaacataatttttttaatcccactaaaaacaagatacaatcactccgtcacctgatgtgctatacacgg

SEQ ID NO: 38022 - DNA, 357 bp, Homo Sapiens
tgactgggctcattgatacatctcatgccctttgttattacagaggagtcaggcactttggtgaccttgccctttcaaaccccccaagacaagctggtgtgccctggtaagcctgctttcctgaccccaggctgagatacagtgggcttcggctagagctgctgtgagcaagggacccaatatgtcctccaggcatgttttgttttgttttgagatggggtcttgctatgttgcccaagctgaactccaactcctgagctcaagctatcctcgcacctcagcctcctgagtagctgggtcaaagatctttgaatttccttagtactcatgttcagtatatgattaccttagatctaa

SEQ ID NO: 38023 - DNA, 386 bp, Homo Sapiens
ttatacctggagttaagtacagttgtttatacaacaattgaataggacaagatatcaaactgaaaattcaaaaataaacagaagaaatgtaaacagttctaaaatatcagtatttataaatgttgcttagaggaaggctattcaaagcatggtccattaactatttgtgagtctgtccatgcaatgaaagaggcttgtgccagcaatgaaaatcaattacatcactaatcatactggctcagctgactttttttaaataaacaagacttctttgataaaggaagcaatgtgttgatttatattctggcacaaggtcccttattactgactagagcaggggtcccccagtccccaggccacgaccggggctgcatagaaggtggggg

SEQ ID NO: 38024 - DNA, 374 bp, Homo Sapiens
ggccatgaagaggttccaccgcaagtctatcgccattgtgatacactgatactgcacagatacgagctgttcatccttaccttctcaactccaaagactttctcttccatcctcacacccctaccccaggggcagattttcttaatacttgcagaatcgtattcttattactttccacagacttccttcttcctctcaactattccacctctaaagttttaaaacttagcatgccactttataactacaatgttcttgagatttcgatcttctcacctgtttacgcaaactacactgccaacccctcctcctctgacatcaatcacaccctctcacttgcccacttctgaccacgctggcctgttcccatttat

SEQ ID NO: 38025 - DNA, 366 bp, Homo Sapiens
aggtttatacgtattcaagtatttttttcctgcaacattctggaacactctgtctgatgtcacttgttttgggcctaattacttcctttagggtgtcttgtaagccaagtcttagagcaacaaattctctcagtctttgtttatctgggaatatcttcagcttgccttcagattttaaatgactgtgctgctgaatgtcaaattcttggttgtcatgtctgtcccctaactccagcactttgaatatgttgtcctactgccttctggcctcaatgtttctgatgagaagtcagcggttaatttttattggggtttccttgtgcgggaagactcgtttttctctcaccaccttccaattgttctctc

SEQ ID NO: 38026 - DNA, 447 bp, Homo Sapiens
tggaccagaataggttacaccgcaacacacagctctgtcagtactccacgttttgctctacacgtattagggcggaaaggggtcttggttcctgccctccttcctttattctagttctgtttgctgaaagttaaattctgagatgtgaccttttttgctttggatgtttgcactctgggaaacaaaattaaaagtccaggttcagtatagtttgaggtttacattaggtggacctggacactgattgatccgagcttcctatgggaaaagtagttgggagagccagaatcacgaagggactgtggccatatgggagggactgaaggagacaggagatagggctcacctaccagaaggagccttggaggagagcggacttgttctccatggccagaaaggggaaagaagttgtagattttgtcataacttggcgcggaaacgtcttct

SEQ ID NO: 38027 - DNA, 418 bp, Homo Sapiens
accttaataggttacaccgccatagcctatttattaaggtgcttgccaggcactgtgctaaagctttacaagcattgtttcagttattccaacaaccctgaggtagatattttcaacatgcctccctccacccatggttattatagtatgaggaaactgaggctcagagaggttaagtaaatcaaccaaggtcaaacccagctggtaagtagtgaagctagaaattcaaaccaactatatgtgactccaaaatccatgcctttaaacactatcctagattgtttaccattgaaagttaaaggacatatgctccttcccaaaatatgagaatagattttcagtgggaaagcaggggggagcccatatgtaaatcctttcatcagctatgggactcaaactcttggaggagtggagagat

SEQ ID NO: 38028 - DNA, 378 bp, Homo Sapiens
ttgctcagtatttacactatttgaactgcattttcctccctctcaaaattaatttatgtttattgattacttaccatgtgccaggtgcttttatgcatcatcttatctaattctcatgtgaccccaatgtaactcacagcctccttggacctccctgttgcttttgtgaagccaatctcagtaagttgttgaatccctccccatctcacctccccccgcaaaaaagaacccagaattccatctttaaaatgttgaaaaaagtgtatatttttctgcatattttgggagaagacagaggggagaattacttaacaaaacttcttaaacataccctttttttcttaaccacctcttctctttcctcaaaattcttctttg

SEQ ID NO: 38029 - DNA, 357 bp, Homo Sapiens
ggttcaccgccatactataatctgctcccttcattcattccccaattatctatccctatcccagaagctagaaaccagcaatcatgccaatatctgtgttcttgtccaccttatcacatccatcctgagatgctcctaattttacctcctaatctctaatctcatagcattacctttgtccaagccaggtcgttattctttcttggattttaatatctcctttattaatctcctactaccaatctcatttcctctacaccatttccatactgttattagaaagacattcctaaaaattaaaatcttccaggagttttagagaccagcctgggaaacaaaatgagacctgtctccacc

SEQ ID NO: 38030 - DNA, 469 bp, Homo Sapiens
ttataggttcaccgccctattttggttcatgtggactatccaggaggacctagtgagcaacataccatctagaagcatgtagtctaacaaaagaatcagttggataactataattaagttttgagtccccattttggctgagatactactcagagggtagataaaccaggccaaagtgaggctgccaaactaagatccttttctgttgacagctgcacttcatggccaatcttctttctaggtttattgaccaggaggaagtgaagggagtagagtgagaattatttttgagttgattatttaggagcccattccaaagctcaaaaacaacagataatcgtggatagtagggagtgtggaagttccactggatatactttaactatcagcccattaattattggggtttttttggtaataaaagaagcactaatatcagactgcaaaagtctgaaaattaaagtacatt

SEQ ID NO: 38031 - DNA, 411 bp, Homo Sapiens
tcaccgctagtgaagggggctacatgatcattgcgcaacacagataaggaggccaggcttgcggagagatgatgtcactcggcccaggacgcggacgtgtctggctccaggcctctgccccgacccgccgtgcccggctgcttctctgggccttcagggtccttctgcggctcaggcctgacagaactcagccagagtcccttcagctcctgttcttgcccaggccctggcagcaccccgtgcactccttttctgtctgtaagtatagtgatatcctgtacccccagctggttaagggggcctgtcgtaaacctagaagactgactagcagccttcttagccgctgatgagttaaagggtagacaacatgtacagctataagcggaggaaaactctactggggatcctcta

SEQ ID NO: 38032 - DNA, 380 bp, Homo Sapiens
accataagaggttcaccgccaaaagagtataaaatcctaagtttaattaaatttaggggccttcaccatacttgctgcaagtttggggacataaattccgacagccataaagctgtgaaagcccctataggaataaaataaatcccataatgcctctccagagtccccaagaccaccatgatatgctctagccccttcctgctcctctcctcccaccaccaaccccttccacttataaaagcccctgccccacacttcccttgccttccccacataccctgtgagaagctcccactgtggggctggaaaaggttaacattttctgctcactaaagggaataaaagcgaatctcaatggatggaaatgtttacaaaacgga

SEQ ID NO: 38033 - DNA, 412 bp, Homo Sapiens
gccagaataggttccaccgctaagcctctgtcagtaagaacactggcgtgttctctcagtcacacaccagagagaatggagctaacacataagtagtagctaaattctgagtttctgagcatacgcagagatggagttgtgcttggggccagaaaggaggtctcctgtagtggtgacaaacatctctttccattttcttttgctcagtccatttgcacaggttcgagggagttgatggagggtcagacgagaggtggtgggagctcaggattttctattcccacaaagagctaagacttaggagtgctggccccagagatggtgcggccctctttctacttctgtttctgtgggctctgtctgcccacctgctgcataaagcaaggcaggggaaagaccggatgggaacatg

SEQ ID NO: 38034 - DNA, 411 bp, Homo Sapiens
gagatacctggccagaagaggttcaccgcaactgctggcctgacacttgctctgaccaccgcaactgctggcctgagtctactggggcctgagggaattgtcgtgtgatgacatcacatttattgggcatctgctttgtccctggcactaggctcaaactcaggacagccagcccacatccagtgtttcctgcaggcctggcaccactcccaatgtcaacttgtctcatcctcacaacagtctttgaggtagcatcagtcattatcctgtgcacagaggagtccacggccaccatggcaaaatcacttgcacgaggtcacacaccggaattggaacctggttgtctgagtagacattgtccctgaactacactgggtgtctgggtccactccgttttggagatgagacctc

SEQ ID NO: 38035 - DNA, 406 bp, Homo Sapiens
agaggttcaccgctatctgatacactttctcctgtcctcttacaattacagcagtttctaacagaccaattcatgtagttttgttcactttctactgaagtaggaatatatttctaatgcgtattttcttcttacttttaaaaacattttgtgtgtttaagcttattgctcagttaggttataaattcctttaggggaagaagaaatatttcatctctttcctactctcaccagatacttagtccaattctcactcatactattagggtatcttgattttaaaattacatcagattaatgatgcaattccgatccagacaatcagacttcatgactaccaattcagacacacaactaccagcatacacctgattaatctgattccgatccagaacccaaaggggga

SEQ ID NO: 38036 - DNA, 439 bp, Homo Sapiens
cggtcaccgctcactccagcaactttcagtgtttttgtagattcaaaactaggggatctggcttgggtcatatttcactttttggctaaagaatggcaggcaatcttgactcataatcccgttaggctgcattcagtggggtagaggtaattttcctcaaagatttggggtgctattatcaaaatagtaaggaaatatatgctgtacagacaaaaagtaatgaatatccacaaaggttatgtgatcataatctttgaatattggaaagaggaagataagccttggtaaggatgtaaggcaatagttggaatatccatggaggcatatatgtttcaacatcaggaagaacattctaacaattagagctcttaacaggctgtattgtgagttatggacttcttattcatagtaggatattcttttcattgcatgcggtggc

SEQ ID NO: 38037 - DNA, 371 bp, Homo Sapiens
actggacatagatgttcaccgcctgcctcccatctccaaaaatctacactattaataccgttttttcttctctttctttaaactcagttctttctcatgaaagacataatttctaatatcttcgaataaaataaaaacaactttaccttaatctcacacccctctgtagcttccattccctcttctacccttcatggccaagcttgaaaagttttgctccccaatatactttgattcgacttggtccccaaaaagtgctaaggtaatgtctgacctctatctcaccaaaaccaatgggcacttctcagttctactaatcatcgtctcagcagcaattactctcttgagacattctctttcctggcattttt

SEQ ID NO: 38038 - DNA, 376 bp, Homo Sapiens
cctaaaggtacatcaaagtttaggggctttagtgggctatagttcaggtagctgtgctgtgataatgcgcaatagctgcacagttgggtatttgtattggcagagatttgttcgctcttgatacgtgctgggtagtcaatgatggaggaccgctgaagggctatgctgttgagacgatgtgtgtgtgctgctaaacttggcttgggtcattgtgatgccctaagctcagtctatattgcaacaatcttcccagttaagtgacccatgtgccatttatcaggacacatattagaaagatgctgtcctaatttcagttaatgctaagtgtagccaaagaaactcaaatgaatgccacagctctatttcactgcttttc

SEQ ID NO: 38039 - DNA, 358 bp, Homo Sapiens
acaggtcaccgctgaattgtttttcctccttttctctgaccctagtttttcaaatttctcaagaggctatagcagtcctatatattttcttttaggaaatatacctttgtttgactttttcatgtaccttttgggttttgtgccatttctgtttttcctaaatggtaacacatttgcagacatccctgcgaggcattctaagaaacgagctagactgggaagtcacttagctgaagtctgagtttattgcctctcattctcacggcagcgttttctaatcccttatactccgaagcataatccttaacactccaaagctcactggataacagtggaacagcaggcggcaaccttttct

SEQ ID NO: 38040 - DNA, 370 bp, Homo Sapiens
accaagtctagaacaacgtgactttcccacttaaaacccttcaactgttctcaggaaaaagactttcacacgtggcttatacactcttctgcatctgtcaaggctgagtttttcagcttacctctcatttctcagattatttcttcccttaagcacacgacactccaaccatgtcaaagtactctctatgccgttccccatatatgccaatgtccactagtgccccgtggtctttgcagaagctgttatctctctaggtgtccaccctttttaaccccccgacaccctgagcaccagccagccccttgcatctattctctaacttcagcagtcgtgtctggagaaaatcttcacactactgctaggcttg

SEQ ID NO: 38041 - DNA, 380 bp, Homo Sapiens
aggtacaccgtctgtatgtttccgacaatatcttcatcagttgcctcacggaatgccttattcaccattacagttttccatactgctttgcttccgacaaaggaaaccacttcacagcaagggaatgaagcaatgggctcataagcatggaattgagtagtctcaccccatatccctccaatcagaagcagctcacctaatagaaatgtgtaatgactcactggaaaattcagttatggcatcaaatgagagacaacaccctgaaagcatttctgatttacaggatgaagtaagaatatgccttgaatcacggaccactggcaaccctgtaacagaatacatggatttggtaatcaaggaatagaagtgagagtgactcc

SEQ ID NO: 38042 - DNA, 443 bp, Homo Sapiens
tacacgtacaccgccactacactatactagttgtgcataattagacatatacatccaggtgtcatccagatgtctcaaactcaatctgttgacctgaactgatcatctttttcctccaacttgctctccgttcagcactgcttatctcagtgaatggcacaaaatcaactgacttgtccatgtcagaaacctaagcatcagccttatcttctccctctctctccacctccatagtaaatcaatcatcaaatcctgttcactcttcttctttaatgcctttccaataaatcctccagtctctttccctactgccactatctgagtttttaccaccatcatctcacaactggtctcctaaactaaaactaaaacccaaacatattctttcttaaatgatcttggtgccttccacctggcctccatccaacccactctcctcatct

SEQ ID NO: 38043 - DNA, 415 bp, Homo Sapiens
cacggtcaccgctctcagccttatttttcatttttcatctctttctttctttaagtcattctacaaactattgatagagtaatctttcaaaggctctgattgcatcagtcttttctattcaaatatcttaaatggtccctcactatctactgttcaaagttcaaacctcctgttatgtggctctaaggcttttgatttgccactatccctgaatatcctacattttgttcactatgtctgtaggccataaaatacattgattatttccaccacgcctgctgaaaaggtatccacaattcaagactcagttcaaactccatctccatgttaccccatctccctagtacggaagtaatctcttccttcttcatgtatagaaagtacctgacagcttcttgctgacctttatgtcctt

SEQ ID NO: 38044 - DNA, 359 bp, Homo Sapiens
acattgttatattagacaaaactaaattaccaaaagaatagcctattttgttagctccttcaaagattaatatgcctgtcggggtcagtccaagagaatattcacagccatctcttccctacaaacaaacgaagtgacaatcggtagagggttctaacaggtcgtcacacagcagaatgcaaaatgcaaaaacagtttcctcaccacaagttattttgtttgcataatgttcattcatttttcagtaacagcaaaaccaaattacttaaacgcacacagttcttaccctgacaacgtgcatgtctaccccatacatttccagccacttcgctttattcagataggagagttccgcctgg

SEQ ID NO: 38045 - DNA, 386 bp, Homo Sapiens
aacccaagacagacactcgggcgatgtcttacttaccttggtacaccagctctgggcccacctgcctggcctgatttgaaggcagactgctggtactctgggactgccctggaaaacagccactctcacacctcttacagggaggaaaacagccagcgggagagagtcagccctgagctgggggggaaggaaggctggccctctgcttttggtgtcaggattactatttaatgcagtagtcctctattttccttcttcccccagataaagtgttagtatatgtgattttcaaaagacattttaaaagagcctttccccacacctcaaaaaatttgatgtggaaaggcagattggcggttacacccccttatttttcctaccccttt

SEQ ID NO: 38046 - DNA, 456 bp, Homo Sapiens
gtggccctatcctgctcctttctatctcggtgctttgtttctcctgttctgcctgccttggatggtccccttttcagctctccatagtctaactcacagtctccttcaagcattggccaaatgacacctctttgagaatgtcagtcccgcttctgagctgcagtgcctgtttctttgcaggcacttgaaacagtctgccgcttagcttggttatttctggttcagtcttgcttccccttagggcgggtatgcagtggttaaaatcacagattccctagacgaggacagcctgggtttctgtctgtcttctgtggttttctagcttatgatttccgtgagcttcagagggagaagggcatattagctctccccgggtggcagtgaggactgtgagtttctgtatgtgaggcatttgaaacaagtgctgtgtaggggaggatccatatcttgattatc

SEQ ID NO: 38047 - DNA, 442 bp, Homo Sapiens
gtaatgtatttcaagtacacactggacctgtaagtgccacgctgcctcagagtatctttcaacacacactggaccttgtgacccccacgctgtcctcagagtatctttcaacacactggaccttgtggccccccatgatgttaggagactttggacaaataacagttcacttgtgagtcacaactcttccccactgtctctccccccgcacctcacctctgtgtatttgtgctccgatatacatttcaatttgtagtgattactaaaattccttatgctggaatcaaaataacattgacaggtgctgaatttgtaaatagtcaaggaatttctgtcaacttacattttaaatagtttctaaaatcaaaggttaatctatgtaagtcctatggttattcatgttttattttcccaaagtttagaaaattctataaagatatat

SEQ ID NO: 38048 - DNA, 458 bp, Homo Sapiens
ctctaagtctaatttcctattggcttaccctgatgtatacatttcatttatattgcactgtttattgtatgtctttaccataagctgcctcaaatatttgtgaaacagatggtatataaataaagaacattggaatgtttgagaaagttgttgttgacaagaccgatgaagatgaaaatagtgtagttctgagaaaatgttggttgctgtggcatctgctctttttttctcccttgcactcttatctcctggggtggtccatcttcgttaccttcaactcccatgacacccctgctgtggctttggctgcattctggagtcttctctatctccgccctcaccctggattcacaaatgcagatctgtatttctgacttccttcctattggatagctccatctgaatgtccctaagtccctcaactcaacacgttcaaaacgaggctcagcatcctttcc

SEQ ID NO: 38049 - DNA, 381 bp, Homo Sapiens
caagcacagacacttgggcttcatgtgagcattcttagcccgggctggaattctgcagcacaaaacaaagtactagagattttaccctttggagaagcctactccttaagggaatattacctcccaggtttagcagttgggaagacatgaagtacctgttctcatttcattcaaatgccattcagtggtctgtgagtctacataaaatgactccctgcggacagcaccctcccccagtctgaccacctactacttcctcccaggtcactcccttgcagccacgcaggcttctttgctctttcctgaaaatgtcaattatgatctgccttggtctctgcactggcttctgccacatagagtcatggttcgttttcactcctc

SEQ ID NO: 38050 - DNA, 377 bp, Homo Sapiens
tagatacgaatcgagctcgtgacccaagacagcactctgggaaggtttaaaagatttaatgtatcctggagacgtttgaggcttcgcggaaacttattggcagagcagaatgattctgaaaaatgctacatcagtgaggggatatttgataaggtattttctgccaactcgggtattcacttagcattgtttatcctttaagatatgtatacacatacttcctctgtgagtttaccctactaacagagttttatccccagcctcaaccttgctttgggtctccaggcccaagtttctcaccatctcttggatgattgctccagcccactctgctgccacctgggatccaacatgttcaaacccagcgtgtcttcttg

SEQ ID NO: 38051 - DNA, 406 bp, Homo Sapiens
gaactctgggaacaggcatcatccatttatagcgactttgttggctgttagttcaacaacaggtgaacatatacttgttcagtagccagtagccactatgtgccaagagctgtgccggcatgtgcaggtttcaaagatgagcaaactgtggtgactgtccttgaggagcaatggtctgggaaggggaccaaggaacaggcaagtaatctcaatgaaattgccaaatatcagaagcggaagtcgcagaagcacagggcccttccctagccttccagttcttctctctcttccttgagaaccgaagttctcacctgggccatctacaggtgctgagttcatttccccacccccatctggctgctgccccaccactccacacaagcagctggggacaccaatgtcctcg

SEQ ID NO: 38052 - DNA, 369 bp, Homo Sapiens
tagaatgagccgtaccatatgacaaacttgacctgagtgtgtactcatgggtgtcaccagctccggacaccttcccaaaacacccgccgtctggtctacaccaggagacggcatcccgtctgctttagtttcctatcaagacgtgtttgcctccagaactcggatacagctctagccccactggcctggagggaatgtcagggacaaggacacacacagtccacagatcgccagatctgaccacgccgagcactgtccccagaccacgtctgattgaggagaatgtccggggtggctgtggaaggacagggttggagtgcggtggccagggtggccacagcgccaggcttctgaaagcacagagctttg

SEQ ID NO: 38053 - DNA, 353 bp, Homo Sapiens
catacctatactcctcagacgaacaactcacaatggagaagttaagagcactgcaatcagctgacaggatctatacaaggtcagttttttctttggaaagcagagaagcatgggagaagcaatcggagtacagagaaaacaaaactgcagagggagcaaatcaaaggcagcagagaagttgaggttgtgagccacagacacagacagtccagatctacagtctgcaccttagcagttactaaaggcgtaggcaggagctacaatagtaaagagacagatatcaccaatgccccagtattgtacaagcaactacaatagtctccacaatgtttatacatgaaaaatattactga

SEQ ID NO: 38054 - DNA, 548 bp, Homo Sapiens
aagaagacactctgggcagtgctgatggtttcgtgcactgaagtctctgtggggcacaagggcggcaagccaggcttgactatccaagcccctcagctggaagtcagtgtgccctctgccaatattgagggccttgaggggaagctgaagggcccccaaatcactgggccatcacttgagggtgacctaggcctgaaaggtgccaagccacaggggcacattggggcggatgcctctgctccccaaattgggggtagcatcactggccccagtgtggaagttcaggcccctgacattgatgttcaggggcctgggagcaaactgaatgtgcccaagatgaaagtccccaagttctctgtatcaggtgcaaagggagaggaaactgcgattgatgtgacactgcctacaggtgaagtgactgttcctggggtctctggggatgtcagcctgcctgagattgctactggtgggctggaaggaaagatgaagggtactaaagtgaagactcctgaaatgattattcagaaacctaaaatctccatggggat

SEQ ID NO: 38055 - DNA, 627 bp, Homo Sapiens
aagacagacactcggggaacgagagaataaggttactatacgtcccacagcacagaaagtgtgggctttctcctagcctgtgttctccctctgctatcatgcctcccctttctcttcagggctgaccctttttccattccaagaaagtactcagtgaagagatgtgcaacaatatacacattgctgtggaggcaagaatttaaaacactggctcaaacaaactctaccctttctttacttcactgggagggagcagaccccctctttccctttatcattctctctcaggataccagctcttctatataaccccaggtaaaatgagtcctactaataggggaaaaagtaggatgtgcttgcttttgacatttcccagaaagctctgtctcttaccttcttcccgggttcgcataaaattggtgatgatattgtagactgtgtgtcggtccacctgtggcagggacttgggggtgggggagaaagaagtgaagaaaatgctcaaagaatacctcagctgacacagctagttcctgcttcataatctctaagtgaacagtgctctttataccagcataagatcaatctaagagaaactacagagaaagggtatgcgcagagtgtctgtct

SEQ ID NO: 38056 - DNA, 469 bp, Homo Sapiens
catgttcctctgtgcttaacattcatgttaaatgaataaccttttattacacgtcaggatgtggagggaaatgtattttacaaaagtaacaaagtaagaaatgggaagtgtacaaaaaatttatgtctacaaacaccttccagtggatttgaccagaattacatatttaaagccttgattgactattttggagggaacctgaaccccagccagatcctgaaagagtagggccagtgttctacggactcaaaatgcaaacctctgttaccaggaaacccgaagacgagaagtagcacgattttaagtactgtgcaccagtcattcgtcaatgcacagcaaactctggcaactttgccacgttaaaaaagttgccatgcaaatccaacctgagcacaaacttcatattctagcacaaactttatgccctagcgaaaaggcttcctgtgagtccctggctctccccaatccc

SEQ ID NO: 38057 - DNA, 480 bp, Homo Sapiens
cagccttgggctcctaagtgctgggattacaggtgtgaaccaccgtgcccagccaagaaacatctctaaacccctctcttcctcccagcagtgactgtgaagggcactggggacaaatccctttttgaaaggatcttctggatgatgtcatggatttgggcctcttcctgctgggggtcactgggtggtacttcttggccatccagccaatagcaacaggccagcatgtgatgacgtcactgtcacccccactgtctcctcgggttccaaggagcaagaggcttgagacattcctctctaatctgagatggattttgtgggtttgcgtggggggaaggtattgtttttttgtttaagcaagaatcttcttaagcaatacacccttctcattgggactagttgggtaaatctatagatccacttattcgggcgcacgccagccccagagtgtctgcttgggggatctctagagtgacctgg

SEQ ID NO: 38058 - DNA, 384 bp, Homo Sapiens
cagggtgctttccattaggaactgcctaataagactaggagaaaatctttattgctaagaggacctagcagtgtatatattcagggtagagaagtataatgaagaacaacggtccccttgtattctgatagcatatggcatttatgcaggtttctgacagttagatgtgattgttaaataacagtcttgaaaaatgttatattctccccctgtgtttacaggcagaacttgatactaccttgagaagagtcacatggtattttcccaaaagagccaagataaagaaccttcaattctacataatgaggcacatttctaatatgcctttggttctaagtggacaacatatgaaagcaacaatggctgatccagtctagagctaat

SEQ ID NO: 38059 - DNA, 444 bp, Homo Sapiens
ggaaatagttgtgagtcaggcagtatgcttttgttgcttctcacccttactatctctttgagtgcgcttcttatctgccactgcagtggtcagttctttcctattccgtttgcccgctcaaagcaaaaggaagaagtattattgatgtttgctatgggtcaggctttttattgggtgtttgacatatactgtcatttagatgactgttaaatgggtggcaccagctctccttccccagctgcaaactttgtctattcaaattgcctagttaagatgttgtagaatttgtttatatcacatgatgttatacacaaatacctgcttaccaacctaccttcgtacatacatattgataatcctgttttatatagataagcaatatactcatgtcatgtcagtgaaaagtgtggctttttatgccagactgcttgaagaaactaaggc

SEQ ID NO: 38060 - DNA, 501 bp, Homo Sapiens
gaaagacttaattacgggcttcgtgctgtcgtctgggagcatttcctgtggaagggaggggcgagagggggagggagagagattcttgtcaagctgaaaaggttatgcaggtgcatgatttgctttcagcccttgccaagtcacagcatattgaaagagactacagaatacaattttcattgttcacagcatgctgcccgcatggaacactacacatcccagggaagagtctgaggcgccacaaaagctgagagccaagctcctggctgtgaaaatcgctccccactattcgtcatcatcaacatcatccacagaacttcgttacaccacactcagttacactttgctccaaactgagagaggctctggggcagaattcaagtgaaatggcaaaacctgacttctgccttctttgatatcactattaagatatttggacagaggcagaggtaggggaagggacctctagagggagcagaacaaaacagaaaagctggctgt

SEQ ID NO: 38061 - DNA, 414 bp, Homo Sapiens
ctctcctattctccgtcgagtcaccctgattcttttatgaaaagcaacacattcacatgtgagtagttttatcagcctgcttcctatcagtagaatttggggggtccaacagccctattactttctgtctctttcaatccaaactagaactgtttatgttggcataaaattctcaagaacctaatgggctgtggaagtattccacatgggtccactccattgaagttcacattcacaaataaaccaggctgcacatttaatactttgcttggaaatctcagctaaatatacaagttcatcacttgcaaatttggctttccatatgaccataggatacaattctgctaaacttagttgctactatgtaacaaggatcccctttctgccagtttccaataagaaagacctcacttc

SEQ ID NO: 38062 - DNA, 495 bp, Homo Sapiens
tggagatggtgccctggtgtgagggagcgggactgagcttacaagggcctcgggacacattcttgtcacagcagccactgagggccctgtgcagaaccacggcacatgcagaagcacggccacggaggaggaggtgagccgccaaagcaggacgagaccaatcctggtcgccatactcggtcctgtactctttccatagcaccacgtctgccctcggggcttatgtattggtcaacagacacaggcaaacaaaagtcagaaccatgaggagacggctggaatttctaactgtaaaacatacaggatactcacagaactaccggatggagagagtgtgtaacaaggaaaggacttggtttggatttaagaggaactcctctacgtgactattttgaatattcaagagccctagttcccctgaaatgttcaagttagtaacacgaaaagcaaatacctcctaaccttcaaaagtacaaatataggtttatcttccac

SEQ ID NO: 38063 - DNA, 431 bp, Homo Sapiens
gcttatttattaccagagagggatcttaaacattaaattactttaaacttctgttttagagtgggaaattaaagccttgataaattaaggtattttaagcaatgtttattagtccagatgagattaaaacctggatctcttattccccagtgtcttagcttgggctggcataaccaattaccatcaactagatagcttataaacaacaaaaatgtatttctcttagttctgctggaagtcagagatcagagtgccagcatgattgagttcaggtgaggcccctcttctggttggcagactgaaggcttctcattgtatcctcacatggcgaagagtagagcacagaaagcaagctctcttgtgactcttataagggtcactattcccattcatgagtgcttcactcttatgatcgtatcttattctaatta

SEQ ID NO: 38064 - DNA, 462 bp, Homo Sapiens
agatcagcgcgtgaccggtactgtacctagtgagtgatacacctgtatgctaaggctaatgagacccacttttttgtctgcccagaagataagtagtatagttaggtctcatacttttatgctgattgttttcatgcttttcaagtttttattaatgcctgtggctgtactccttatgagtgtaggagagatttactgtgtaagagagatttactgtggtgaacccagctttttttatacctagaatactttggagacttgtaagcctaccattatctactaaagaatactaattggggccagaggtccgtaaagaatggggattacgtacagatgaaaattaggtattttcagctctagttgagggtacagggatagcggacaatgcaactaggctgtggttggggcatccattccttgcagtgatggtactcagcccttgtccctgagcttgctgcttcc

SEQ ID NO: 38065 - DNA, 443 bp, Homo Sapiens
aaggacccggtactgctactagtggcatcagactgtagcaaccccttcttttctctctctactcttttcctaggtgatgtagccactcccatccttacaccgatgactcacaaacatacatttagctagccctatcctctggcttcagagctgcatgtccaatcagatgactaatgtcatcttttgggtttatcagagacatctcaaactcagcatgtcgaaaatggaaatcttgccctttcccagagtcttttgatcctctttctctgttgccgcctcattgaatgacaccaccatttatgcatgccagaaacctgagagtcaattttgacactccctgtcacctgccatattcaattcattaccaagtcttgtcagcaaccacccctcaaacccattcattctcctttatcatcgccttagtgcctactccactagcagta

SEQ ID NO: 38066 - DNA, 545 bp, Homo Sapiens
tcgttaagtgatgctgcaaacagtgctgcccagacaatatcagagaagtaagagtccattgaaatgtatgggaggaaagtgtggcttgtgttattgaagggtctgaggttagcttctgtcatcgtcatcacccactctgagcctactagccataaccaactgccaggtacttttggtggcaggagggttcctccagtttgttgttgtggtggttttaattgctgtgtaatagttgtacatattttgagggtacatgtgtttggttttttaaaccaaccaagaagcactgacaccaaccaagaagcactgacgtatgatattttgatacatgcataccatgtattatgatcaaatcagggtaattggaatatttgtcacctaacacatttatctttggttgatgttgggaacattccagttcttctgttttgaactatacattattgttaactatcatcatcctactgtgctatctaacactagacctattccttgtaatctaatggtaattttgtacccgttagccaactctctatgtctcctcc

SEQ ID NO: 38067 - DNA, 467 bp, Homo Sapiens
aatgacctgacctgcatatatgccttactcttacgaggtcgggtggccaactatattcaaaaatacgtcgtagtatcttggctctagtagagtgtgggagcccacaatctgatggaccagccagtggtcatacagatagggaccagactcccagggacaattatctgtctgggatatgcctaatcaggcatgctttagaataggttcaaacctttaaagccaatatttaactagaccaatttcccagaacaaatagtaaaaggtaaaggaactagatgctttcttcttgaccttatgttctattttaatctatttgtccgatgtgttcacattaacctcattgcagagaaagctgtatttattggcatcaatatcactgactgcctgccttctccattaatacaatcttcttgagtgagtgaaacatgattttcttttgttctcttgttatactagttgtcattatg

SEQ ID NO: 38068 - DNA, 379 bp, Homo Sapiens
catgtcgttgaaaattaattctttaagaaaataccatgctgtgggctatacatgcaagagtcatttccttaaagcactgatgttcagtcttgtccaaatatgtcacaaccaggtgctgataactcctgtcagtagaaaaaaacaattttttctaaaggatcttccaggctggacatgaagtttttggattatctgactccaattttccttcaagactgtagctagaaaaatcattcttatccagagaactcatcctcacagaaaggtccttcaatacccaatgccaattccttgcaataccatctgaaccttgaataaaaacaatataaagcagaagcagaaagtacttcaagtccatgattcctcagagagacaaggg

SEQ ID NO: 38069 - DNA, 482 bp, Homo Sapiens
taactagcggtgagcttagctgagatgtcccttcctccaaaccatcccacaggacagctgggggccaggagcctggggtggctggcgacccttagcagcgcctgatgtcagcagtggcttcaagagaggcattttggaaaggcgcaaggaaatggaagtgcctgggtggtagctcctcttcccagtcctgctcctggaagagatgttaggaatgaagaggaaagaggggacaggtggggcaagatggaggagacagatgaggagaaggggacacaggacagaggaggagaaagccccagagagactgggaataagagaacatatttacatatttgagggagaaaccaggggggaaacaaatcgtacttatctttctcccaaagaagaaatggtattccaagaggaaagtccaaatgaggactgcagattccctgtaggaatctttccccacagagcaagtggatcagtaactggcctgggcc

SEQ ID NO: 38070 - DNA, 548 bp, Homo Sapiens
caggatggagtcatgcactggccaggttgtaggaaatgaaattcatatagatctgcataaagagcaaccacgttctcatggctgctcgcggctatctgaagtggaaaccagaggagtttcccgaattgtctctgtctcgggaggcgagtgttccagtggccctggaggcctggggtgggaaactgtgtgtgccactgtggtctggagcctgcacaggcatctcgacagcatctaggagcgcaaggatggcaagggggtgtgacagggagggagaccatgccccaagatcaagcctgtgggaaagttgtcctgcaagtgtgaggagtgtgagctccagtgtccccaggtcttctcggggcccctagcaggggtctcagtgttaggtggaggtgtgactcagtgactgatgtacttcattcgcataggtcgtaaatgagggaacgatgacttccctgcaggagaggaaaagtctttcgggggttctggggcggctacttccctttgatgggggttcttcttctccagtagaagagccacgtgctggagcc

SEQ ID NO: 38071 - DNA, 410 bp, Homo Sapiens
cacaatgtaaatcttaataatttccttaaggcacattttaaaaaaagggccttaatgagtcaaagagcatgggaatacatcattcgctgatctcatgggcgtggacagaaataaggaacgattgcttgtttggacttaattctgacaggtaataaaaaattgaaaatcatcggaatctttggagaacgactacatcatatttgagcaagttggtatcttctaatttagggaagcagctttccagaaatttagataaaaggaaattagatgttctagcctgagtctttaaaggggaaaccaaaagatgaccacagggagcctaaggaatagtgcttaagcctgcctgggtctatgggggtaatgagaaggagggagagctaagacgactggcctagatgtatcagtttaaa

SEQ ID NO: 38072 - DNA, 512 bp, Homo Sapiens
tgttatgcgatatggcctagtgaatattaagtatttattctcacctgcagacatgaacttgtgaattcaacacgtgaagatttacaacttgataaaccagcttcaggaggtaggtcttcagtcttaagtcagattagaagattatgtgaaataattatttaatgcttaacattgattttttaatggtatcttccacatgaaataatattcctctaacatttaattacatgccaggacaggagaattcatgttgtcaaaattctaatactctctagaacagtaaactcattttatttgtattaacccattataaatacatgtaaatgttgcatttatgggtagacagaactaaaagaacaatatttttcctacttttgagatgcaaaagttgtctggcataatgcattgaacaggttattattgaagcttgcaccagacaactgaacaaacattcctcaaatgtccatgatacccaggacataagaggcttccttttagagtatggagccatg

SEQ ID NO: 38073 - DNA, 530 bp, Homo Sapiens
ccgcgtctagaggtccccaagacaggggagaaaaggtactggtgctgagattttcaacagggcaaaacactgtgacattggtgttctagaaagatccctggtggcagtgtacaagacgcactggaggggattagaactgcaagggcagacagcgctgggcagaagacacagtaacccagacaggaagttgtggtgcctgaacttgacagtggccagtgggaaggggaggagacacaggaaagacggtagttaaatcttcctaagagtgcgcagaggtagagatgagggtgagggaggagactggctgatgcccaggtggaaagctgtgttttcaacaagacggcgagccctggaggaaaagcagaacggatgggtatgagagcctgaggggcactgaggttagatagaggcagagggatggagcgatatgggagtctgcagtgtagtgaaggccttggaggaagtgacacaattctgaagtagtgattggtctcatgtgggaatatgattgctatggtctgaatgtgttc

SEQ ID NO: 38074 - DNA, 645 bp, Homo Sapiens
cctgatatagaggatccccaagacagacctctgggctaacatcttttaaaattctgtgtgacaaaacagtaggtacacataaagcacttctgcacaggtggctgcttcaagaagcagcactggagttattgttacgttgtaagctgaactagcccatttttttcattgactatcattttacttactaaacaaattgtggttattcacacttgggtatctgatggatattttcttgaaaatgaacaaagtgagtatgtcacttcaaggaaaacaagtgacagttgagatcaagagaagtgtacagaccagaccttgaggtagaagtgaggcttcttggttgtaagaacagacagtgactctggctgatttaacaaagagtgaaattttttgaaagaccatcaaggtagctcacagagttgctgggaaggctggggaaccaggtcagaaaatggacaggagggtgaacagctagaaacatagttatgttcattcactctacagaaccagtgcttgcaactgggctttttggcttctaaagtgagagacatctgtgctaggaagttctccagacacagaagcaaattcagccatgaggcttccaaaaaattgaccaatgtctattatcattagatttcttaacttcca

SEQ ID NO: 38075 - DNA, 352 bp, Homo Sapiens
cccaagcgcgcgaggagagaatacaaggtcagctcagagatgcaccatcttacagagaaaggcaacttagaaagacatcagctctgcagggagagaaacagatccattttcaatgtgtcagtattagtgacagctggaactgtggtggctgcaaaaagactaagtgatcagaggccctacagacacagctgtaggaacactaggcagagaggtattggttgaaaccaagggatcacgtcagagagcttggagagctctgtgtgagtacccagaactgagcctgggagacgccagtcatataagggcaggaaaaattagggagtgggaggaaggagaggcagaagcaggaagc

SEQ ID NO: 38076 - DNA, 443 bp, Homo Sapiens
gtcgtaggagctacaatctcagtgcccacttcccaatcttcatcagcagaagatgtggtggaactttaccttctgcaatttgaattgtgaaaacagatacttccccctaaaatcaaaacggtgttatagctttgaatatgcctcttcagctttcccagtcttctctccaaacctcactccctgccacccgtaatctattccagttgaaaagtgccatttttagatctttgcttcattctttctctttctcatccccataaaaacatattggcttcatgcattattccctttcaggtttttactccgggggcagaccaggcttggacatattaaattggtggctgaaaaattttaaagctcgggaattaatttcaattaacattgggacctttttcaatggataagttagtcttaaatagtaagaaaaccgacagttgagtttc

SEQ ID NO: 38077 - DNA, 551 bp, Homo Sapiens
ccatgctggggcatcacgtgtggggaagggtaggcaagggcctcctgcaaaggggcccagatccgccctcttataaggccggccagccaaggggcagtgacggattgggcttagcgggctccctcctcggtccactggctccaatctgcagctctgcaggtcaccatcccacagtgatgagctcagcaagcagagactcatcagaacgtcagcctaagctagggtagcgaactggccagggagaaccaagaaaactagatgtacagggctgtatacaaaacacttttgggaatgtctgcaccatagccaaggcagagttaggaccacttgggagaggcagcggggaatgctcccagcaacattccccagcctttccccctagggaagggacatccaaagaacacggggtgaattcttgactacattcggaggtagtctaacggtgacttggcacaggtagctaagaatgatcacaaaaaacagaagaagggaaggcagaaaagtcgccacagagagaaaaggctaacatctctaacagaagaagctacact

SEQ ID NO: 38078 - DNA, 394 bp, Homo Sapiens
ccatgtggggcatcacggcattgggagatccgggggccctcagggcagcctcccaacccctttggctctatggcttccgtaaccctaaggtacacagcggtagggttatgtatgagttgggcgggatggaaaataccatatgcagccttagggtcatgtaggagttggcccggacggccaaaacaaagtaccacaaaccaggtggctcatggtagcagaaattcacctctcatagtcggggggccagaagtctgagaccagggtgtgggcagggccatgctccctccatacaagggtccttcccggcctcttccagctctcggtggccccaggcttctggggctcacggccgaatcactccagtctctgtctctgtcctcacgtggcctccgcc

SEQ ID NO: 38079 - DNA, 433 bp, Homo Sapiens
catgtggggcatcacggagtacacagtccaggttttatgcatataaacgtaactatttatttactggagtaaagggatgcatcaaattctcaatttaaccggatttctgaacttaaatagccaaggatatcttaggcccagagggttaggagaaattacggagttaggaaaaattacttagtttagaggctactaataaaccatcttcaaatgtagatgccacaactaaataaaaggtgggctgctcacattactagtgttacatctatagtggtagctaaccaagaaaaaggcgtacatgtatcgcacaaacacttactaaaaagcacaagaagagctgtcactctacttcttgagccatcatcatgtcaaattaatgtggaaacaaaaggtaaaatttatgggacatctgataagaggcctccaggctatt

SEQ ID NO: 38080 - DNA, 410 bp, Homo Sapiens
tcatgcatggggcatcatgaatccaactgaggaataagggagggtcatggaggtggtaacatttcagaaaaggctggaagggtaaatacaattttaacaagcagatatataggctaagggaattctatgtagaagaaagagtattagtgaaccgcacacgcgggtcaacgcatgcatgtgcacatccacggcaagcgtgcagcaggacaaccagggacggctgggggacggatgccacaagtctggtgtctcagacatagaccggatacaaattacattcgacgcagggagaatacaacaatagtcttcagctggttctgggcttaatctacggcatgtatttctacggaatggacaaaactgaggacttaaatcttatctttcctaagtattatttctctcagctgaac

SEQ ID NO: 38081 - DNA, 403 bp, Homo Sapiens
gtagaaggtgtttctctcccacctgagccgtttctctcaggaaaattctgacatatcctgggactcagcacccaggtgatgggtcttggccacctatggcctgcctacatagaccatggtgaagtatagctgctttcaatacccacgtgatgtaaccgttcttccagggcactgccttctagggaaatggtgatgcatttctgtgtggatcacataggtgatgtgaatcttttcacgggactgatccctgctcacggggggataacgatatgtatggcgggtttcagcactgagctgatgtgattcttctcttctgcaagaaaactgatgtattgctgggcccaaaaccaaggttattttggctggcctgccctcaaaagaaatggtgacatatggcagtgat

SEQ ID NO: 38082 - DNA, 404 bp, Homo Sapiens
ccatgtggggcatcaactggtagatctatgagcaggtcttttaactgaggagcacgggccagacattagatatctgctgataagatacacatggcctccttggatatatggagacaaaacggtttaccaccttttaaaatatggccatattattggataagcccataggacgagatcacgggggtggccactaaagcactgggttggtacacaaaaaccaacggcaaaactggattagatatgttaactcactgaactcaatacctgcctttaggatggttcctgttatctcctaggatcactgtggcccattcatccccctggtcagaaaaagagacctttagataacttaattcaaagaggagagaaactggacctgagttggtgtcaaaaaacttcagtca

SEQ ID NO: 38083 - DNA, 479 bp, Homo Sapiens
gactcagaggatccccccatgtggggcatcacgtgcgaggaataaactattaattttactggagctacaacttctaatttacataagttagaaagttggatttcctctagattttacaagggtctggtttcttttcaccttataagtttttaaaaactatggattataccaataaacaagggctcccacaaactaatttaactcccagtcacagtaatgctgtctcaatggtttacacatattcgatcatgtgtaggtccactttcatggcaataaaatagcctaataaagagaccaactattcttttggtgtgtccatgtgcgtgtgtaattttagtgtaagtactgcaagtagctatccgcagcatatgtaacttaacattcatatgtccaaatgggcctacggatgggagatttaggcaaaagttaacagtaatgagcctggccaggggtgtagggtcatgcctgtaatcttagca

SEQ ID NO: 38084 - DNA, 488 bp, Homo Sapiens
acatcgttgagtccaatattaaaaggtacgtctttaaactttttaagcttagggaaaatttctagagcaatggattttatggatgtggcattggtgaatgtacacttttggtatggtttaaatatgacacgaaatgtgtatctgtatggaaaattggttttatttccacatttagtaaccattctttattggtacctttctaaggtggtgtcatggaagtattacccaaagtcaaggctgtaaaatcatttcaaggacggcggttgaggctaaatagatggacatctaatttaaatacagaacataccttttaaacaaatgcaggaatgttattaatgccctggtctataaatccatctatattagaaaattaagactgggatttactattctacctcagcccttcttgtatatggaacctacaactaccaactcttcagttaccggaggataaagcattgttcccaacaaggtccaaatgtctcggt

SEQ ID NO: 38085 - DNA, 503 bp, Homo Sapiens
acgtacctacaactaagtgtcatctgctacctttaactgagggcttcctgaagtgtggtgctgagaatgattctaaggcatacacagggcttagccagcaaaagatgtgataaattagtgatgtttactatagactctggctacaaatttactatccgggtcaggaggataaagtgtctgtggaagaagatgaaagggaaggacactcaaaggatctgttccagaggaggaaatgacctgcagaaagatgatgaggtacaaggtatacatatcagtgctgtctgtttaatatctgtctatggttatttgtcaaccctgattacctcatataaccattgactgctgagccacaatagccttttaaaaagcttaataagtaaatggtaggtatctagactatagtcctataatttatctcttagccagaaacacttttgttgtgggtgtacgagacgaagtctcactctatcggccaggctggagtgcagtgatgccccaacatg

SEQ ID NO: 38086 - DNA, 372 bp, Homo Sapiens
aggatcccggtggggcatcacggcacctgcgccttcactggggtgacacattagtggacttctgaatagcaaaccaaggtggcactgagggaaaaatccaacttcatgttatatggtactatttagatttggctatattggggttactaatatttggcttaaaatttttcatctaagttggagaaattggcctgtaatttcccattctggtaaagctctggtcaggtttgggaaacatgtttatgtggaccttattaactagttggatggtgttttcttatgttcccaagatgatgtggcaaaagttttctgttatttcttccttatattgggtccattttataagtaaaacttggagttcatagagatttg

SEQ ID NO: 38087 - DNA, 385 bp, Homo Sapiens
gtgtgagcaacggcaccgggcccaatatctatcaatctatatattttaaggggaatgtttaattcatttacattcaaggttaaggttaatacatgaggttttctttctgccatatggctgttggttttctacttgttttataagttccttggggttatttggtggtggtgtttggttttcctttctgtgtgtctctttgtctttggggtcgggtggaaatctgtggtgtggctatttgatggctcgtcctactttgtgtgactgttttacaagacctatgagtttgctactttcatgtgtttggatgatgatgatgaatgttgacctttcatttttgtgtttgggacacctttgagtatttctcataggactcgtttggtggtga

SEQ ID NO: 38088 - DNA, 401 bp, Homo Sapiens
gatactggtgatatttaaatggacactcattaggtgatacagttttccattacgcctaggggtgagaagtttggcatatttaagcttcagggttaccgccccattaaggcattcaaatatgtgaatatgcttacatcccagagactacatatatggcaacaaagaaaacaaagtcctggccctcagggagcttctaatccagtaaccacaatttggtggtatgttcacggcatacaagaaacagtggaaggtctgtcaaggtttacaacaatgaaaatttccccctaaattcctagcaggtcgcaaagtgctcatacgcaattcaaaagcagcgacaacctggggtattaggctctctttctatgtcagcagggatgcccacatggcagatgcccaacatg

SEQ ID NO: 38089 - DNA, 523 bp, Homo Sapiens
cgtaataggtatctatcgagacacactcttggtgcagtactgaggacaaaaaccttttcattggcaggatgttgggtattataagaagtcagtttccagcactagcacatctacactaagttactgttccttccctagactcttagttaggggggctgaatcagtcatttggacttagagttttagaagctcaatttcacatctaattctatagaatctggcattaaaaaatcaaaatttccctaactccccaaaatagaaattatgagatggtgaaaaaacaaaagccattaggtctggctaagatctggtgacaaagtacttcagttagactcaaaagacctacattttcatcagttttcccactcaggttgtgtccttactacacaaaacggtgctctggcctaaaacaatatagattcaaatttctaaggaaaatcatctccaattaaaatcacatataactcctcacttctatatggaagtcaagagattatgtcgtatttgaaagatcccctatagc

SEQ ID NO: 38090 - DNA, 437 bp, Homo Sapiens
catgtggcatcactgtcggtttctagcaaccatggggctgtgctgtattgggactaccaccatatttccatttcctcaaatcgaggaccagggccatgtgtctggagctcactacaggaatccagaagaacaaactctgcttggattaaatcatagtctgttttaatgagtttggtaatccttggcattcatggtataagcatttcaaaaatagccaagattaaagattccatgcggtaccagagagactagaactaccaaacttgtatttcaaaataaatgttgtagacaataacagaagattttgtggtaaaaatagggaggttctaaagcagcttttccttgcaactcaagacattgaaaatccttaaagctagtcttttggattaacgttaatgaaaaacatgtatgttagcgctttccctcccagtatcttt

SEQ ID NO: 38091 - DNA, 364 bp, Homo Sapiens
aagggtgatggtcatcctacccattcattaatctaactccctacaggatactttcctaggagacactgacaggtcggttttctgaaatccagagaaaggcagcaagggggaggggtgcagggtatgtatgtcataccggtgctgggtatatctgagtggccggtgtatgatagcagctggggaatcaaatcatagataaacggttctcatacaggttggtcctatgactacctattcttattaaacaatgggctatatggacccttttgggttttggaaaaataataataatttttttaagagagaaaaagaaacaattggctacccttcaacagtgatgttaaaaccatttcacattctttag

SEQ ID NO: 38092 - DNA, 390 bp, Homo Sapiens
gagtgagccgtggtgccgggccaaaagtgtagtttaaataatgggaattttttcaaagttatgggaagagatattaaaaaagacggaacaatatttggaattttagtagctgtgcattgttctaacaaagttataatttgcctaattgtgtatggtgggatttatagggtattaccagtttttgactcatttacttagttagttgtgtaaacaatacagcagtaaactctttacttccaaagctgtttgcatggtgtgtgggctgagattacttccccaaattaaattcccagaagtgagactgtgaggtcaaagcatacatgattaaacatacatgatttatggttcttgataaaactctgataatttatgttcagataattatagtag

SEQ ID NO: 38093 - DNA, 471 bp, Homo Sapiens
ccatgttgggctcactgggacgacggacgtgacggctggagggtggccggctgggctgcagggctgcggtgggaagcccagaacagtggcgcaccttgctcagcaggaaaagcccatggggagggggtgagcagggagccagggctctctgaagtgtccaggtgcagggcaaggtgcccacagaccataaggcacttaaatggccacaaagtcatctcagaagagtaatatgacaagtgcctggtctctaaaaagcacaagggtgacctctgcatagaaacagtcccccagcccatcaggctgccagggcaggctcacctggcgtcaaaacgataggatcaggctcccctcggttcccatagtagcaaatgacgtctccctttgctgtgctgcaggccaaggggcgagaatgtcagactacagccatagggcgtcctccctgacactgcccggtgatctcacaggggtacc

SEQ ID NO: 38094 - DNA, 421 bp, Homo Sapiens
gaatctcataattccccacaagggatggattcaaaatttttatttcaaatttagaagaggatttgggggtatgtgggttataaaaagggaataatttacgtagcactttctgtagcacttttctcttatacatctattaacatttctttcttcctcttaagaatatggtgaggtaggaagctcaagagattattactcccagtttatacatgtggaactaaagctaaaaagaataaataactcacccaaaatcacaagcaaattaggaatgcaaactagaaatgagaaccaagtctcctgatcccctaatgttctggccagcagagctcggctcaaccagcccaatcattcctgtcatcttcatgccaacagctgatcacaaagtgactgacggttaggccccggtagtggtcatctcgtc

SEQ ID NO: 38095 - DNA, 489 bp, Homo Sapiens
tgatctagaggatcccgcatgtgggcatcactggtgaagagtggagttggtgacatgtcaagagcttagcgtggtgccgggtacatggtaactccggtaaaggtattagtggctggtatattatcatccttttcatctttatcatggtcattatcctcatgatcacgggcgtcattatcacgcgtatatagaagacaggttgagctagagatacaagtggggcagtcaaaagatcgtattggaaacaagggaaatacggcagcatgattcacaaggcaacggtggcacaagaaggcccaaggggagccctagttaaacgtggagccagaaaagaagagcaaggtatggctagagaagtaggcagggaaattaggcagtgacaccaacaagaacaggaaagagcacagtgttaacagaaggacggaggggtggacggtcgaatatgttaaaaatcttagacaaattaaatttaacagagtttagttgagc

SEQ ID NO: 38096 - DNA, 503 bp, Homo Sapiens
tcacgggtttgggaaatagggataaaattttctttcttacattggggaaattcaatctttcaaaaaattccgagcactgaaaagaactatgtcgaagggaaaaaagggaaacagacagacaaaagaaactctacactcagctcatccaaaagtcatatgtgacaaaattcaacataaacacttctgtcaacactcaaactaacctattttcattgggtgcaaagaaatgctattataacaagtaacaccaaacgaacaagggtggctaaaccaaggactctgaaaaagaaaaggctcgggacatccatctgtcataggttaaaacaagaatgctatgtgacagggtactgatattttagtcttatatttctccctggattctaacagtttctatggcatgaaaatgccatataggccagcatttatcgagatgtgtcctatgggcatattaagtggttaagccctctagagtaattttaaacatgtgataaacatttaattac

SEQ ID NO: 38097 - DNA, 452 bp, Homo Sapiens
tagaggatcccggatgttgggcacattgtgggctgaatctatcgtgttcaaagtgagcaatcaatccctggagttaacaccaaatttcagaggtgaccaggtctgttgtttgaatgggttgagggccgaggtaggagaagggggcaaggcagactgagaggctatgtgggctatggatgggcatggaaccagctggaaatcccagggctgcaaagatttaaggagaaagtccaagtgggaaccagggaaagagccgcacttcccaacatcttggtggagcacgaagatgtcaccaggcattctgggaaagtggttccatggccagagaaacttaggaaagctgcattcacagagctaggcaggcctcctcactcctgacttcctgaagcctctcaacagctcaccgaacacgtaaatgaggaaccccaggaggtcagacaggaacgcagtga

SEQ ID NO: 38098 - DNA, 441 bp, Homo Sapiens
catgtggggcgtcacggggagctatctggttattctcggtgtctgggcggtacctggctagagtagtttcaatatggccaagtaagtctaaaataaatcaaaggaaagaaacacgtttcttctaggggggaagctttggtggtagaagagcccatggaaaagcggaagctctgtagcatcctggtggaatcagtgcctgccccagtagcccggtttttatagtgaagtatcttggttttcattcacccaggaatgcattcacagaggaggattctgaattaggggtgaattatatagcaaagaaatccttctgtcggcgagccattgaacttacctgtaagtggactttcatttcccttttgggcaaaagtacaaactagtggagaacaaagaaggatcaatagacagatttctaacaaaagccagtgatgccgaagatgg

SEQ ID NO: 38099 - DNA, 499 bp, Homo Sapiens
tactgcacctgtaaacttgaagtttctttttccagtgagagtaatcaaggtgtgaagtagccaccatgttctaagggatggagcgaatgtgctggtcctatctgtttgggctgctgcgggtttggcttatgggatatcctcgtgccctcagtaactcctttgctcaaggtggtgatttagggggctgagaattggtggttgaaatacagtgcttggcaaagttgtactaaacttctgcagtctgatttaaggttggtggagacttgagtccccagtctcactttgttgccatacttggctgtgaggcttgtggagctggggtacaaactcggaaaagcagcccagcatcctcactccagctgggcggtccagtgcggtcccagcatgaaaatgtcagtgggatccataccaaacactcccaggcaagaggaatgcggggtcccaacaacgagttcagtgctcgtgtttgcagaagcccggcccctgagtgatgccaaca

SEQ ID NO: 38100 - DNA, 605 bp, Homo Sapiens
catgtgggcatcactgagcagttcccgggactttaccaactaggtgtcagcagcacgtacccctgctctccatacccacaacggtgacaaaccagtgtggagtccccaaatgtcctcttcaggccaatctcacctcccccacggccttatccctacccaggttggagaatcgcaggtctatataatagtgtttaatctagaatctcagtgataagactttggagtggttttggttggtctgggttatctgcacttaattatctataatgatacatgtgattggtattaaaaggggaattaaaaagaatcttagcatcaggaaaaccttccaggtattttggccataatgcaattttggagttcctaaaaaccctcatactctacaaaagggcacaataaaagtaaaaagaagtcccatgggaataggtaagctggggcaggccactgagaacttatgcaaattggtaaccaagcatcacgggaacaacagcaatattaaatgtttttaaatgaacaaattttaccacataaacactacagtaaatacagaactgcaccttttaaaaaataacaggctgggcgtgggtggtcaagcctataatccc

SEQ ID NO: 38101 - DNA, 572 bp, Homo Sapiens
tattgtgtatactcgtggcattctgccatttctctgaaactgcattttacttacttctttattctgtatatttaaactgggtgatttctatcaatctatcttcaaattcaaggatggtttattctaccagttaaaatctagtattaaacctctctaatgaatggtaatttctgttattatactttacaactccagatttccatatggttcttttctataattcttacctatttatttatattctctagtggcaaaattatggtaattatatcatggcctcctgaggtatggtgtcctctagttcttttaagatatttataatggccaattggaaatattggtctgcttagtaacacatcttatgccttcaaagttgagatgtttggccagtcttcttccccataaggtcacgttttcttacttctctttatctctcaattatttgtgttgtggaaaattaaacatggtcagtaatatatggtagcaatactggctactatcactccaggacaaggtgttactatttactgtctaatttaactaattgggtgaatattaagtgaagctattct

SEQ ID NO: 38102 - DNA, 526 bp, Homo Sapiens
tatcccatttccatccagtgcaaccacaattacatgcagaaaaaacacaaaatacaaaacatcaaagcagtaactcacagcatctggcgtggcttcaaatggcatgtctgggaaattccagatgccaggagtggcccagatgcacctaaacccacagtcaacacactgtttctcattccacgtgtcctcaagctcacccatcctatcatcaaacatcacacatgtcatgagttcatctagctctgaggcttaaagcaggagtcctccagcttttacttgcccgcaatatcacatccagttttcagctgtatgccgggccattaaggcagttcaagtcgggctttaaagcatactagttttctgaagcaggcctttcagtggggcttggccaaccaggggcccaccagacacttttgctcattaacctcacatgggggatccagcatgggaccacttaaggattataagggcagcatatgtgagcatccaagggccgaagaacatggtgccctttcagatggtgctt

SEQ ID NO: 38103 - DNA, 620 bp, Homo Sapiens
agttgggcaacgttcttgaaggagcggacactcgggtcaagtcttgaagatgagcagaagtgtttgctagatggggaagaggcagggtaggtcatcctaggttttccctgctcctagtgtgaaagggcatgatgtgtttgaaaattcatctttgtagttgcacataactaatgcctcagatatattggtggcctttatctaatgtagctgcacagtacgcccatggacttctaagccagagagggcctaatgtggggcactgtagctcctacagggctttcgggtccctccgccaaaaggtgggcaccttcacgttctcagaagtcccagggttctttcgcgggaacaccgagaagataatccctgaggtcctctcagccttccaaatggagcttagctctttcaccccagtccttactttcctgctgcgtacacttcggcggtgtcaaacaggtttacacatgctcataggctacagtcagcacatcctctgctgtctcatctgagatctgagaacaaaatgtgacccaggtacataggccaagacaggatacccgaagcaccgacttccctaggttcctgcaagatacagaagcagagggaaggggtggagctccatt

SEQ ID NO: 38104 - DNA, 541 bp, Homo Sapiens
cgactagaggatcccttgtctttatacctctgctatagtatttatatcttctgttagcttgggtttagttgttctttttttcctaattccttcaggtataatgtaagtcgttcatttttaaccttctttttaatataaagatttacagccataagtttccttggtcatggtgaataatccttcttagcactgctttcgctgcattccataagtttgggtatgtggtgttttcattggtctcaagatattttctaatttcccttgtgatttattcttggacccactggtggtttgaaagcatcttgtttcatttccacatatttatgaatttcccagtttccttctgttactgatttttagcttcattctgtggtggtcagagaaaatacttggtgtgacttcagtcttcttaaatttatggagacttgttttatgacctctctggagacagtctattctggagaatgaatgttccatgtgtatttgagaagaatgtgtactctgctgttgggtggagtgttagtgtatgtctgttaggtcc

SEQ ID NO: 38105 - DNA, 509 bp, Homo Sapiens
ggatcttatttttggggtctgggtggagaaaatcaactggagctagaaatggaggtggcaatgccaagaatggctgggtagaaaatgtgaccacagggagccctgggcctcttctggtgaaatgggacttctcaaaattttctgggtcactgttgctaacaagatggtgtggagttttactgtatggggatttgggctgctctttccccagagttagggtattctcaggggggacagcatctgaagagctccaaaagcaaacagaagagctcagggcccatcgatactcaacaaggccagtggttggggccagcaaaaaaccagggtagggacagcagactggcaggaatgagtgacagttctatgcaaatggcgttattattattatggttattattaataagggcaggtttgtaccagaactgcccagtatggcctgtgacttctgcgcagcaattatttctccagggacagggcctgaagctacctcacagtgatgcccaacatgg

SEQ ID NO: 38106 - DNA, 410 bp, Homo Sapiens
ccaggtggggcatcactggctctcagatacggagtcgtctgggtgggatggctgagacagcccttgggaactactgctggcactaatgctgcaaacaattttggagagaaatatttgacaagtcagtttcaatgagaaatttcctttttccatacatacaaaatgcacatagccattaaaaccagcctaaaatccttacggagatcacaataattcatgatgttccaatactgatattttaatctaactcctatagagctctatttttttctttcatttctatctccaaaatcattaagcgagttcatcttatcaaaatatcagaaatgtaggtactagtgctcagacacctcagctaatggtcctaaacttcacacacaaatatgtcagggaactacggatcatctctc

SEQ ID NO: 38107 - DNA, 603 bp, Homo Sapiens
ccatgtggggcatcacgggttagcatctgtccaaaacgattccccccctccaaaactaccttttattattttttccaccagattttctctccaaaactatcatgtagccacacaagcaggaagagaaagagatccctgagatcctccatcaaggctggaaaatgggttataaccaattggctaactccactctgtgggaagtggctgagtagaggagaactggggaaagatgggtgcacggggtgagcaggacctgcctcctgcatgggatgtggggaatggcacttgccatggtgggagcccaggccaaccctcctcatcttacagatgaggaaactgaggtcttgagaggggaactgacttctgtgagctcacttagttggccaatactaaattagagctagaaccctatttcctactcctagcactttttccacactgggtcagggaaatagggtccaccatatacattcttatcttgacagcaatgctaccacctccagcagcaactcctcaaaggaggcaccatcctgactatagctgtgcccatttttctgtctgtcaaaaggctgtggatgtaatgggataccagcaatgcagtac

SEQ ID NO: 38108 - DNA, 375 bp, Homo Sapiens
tgtggggattacaggtgtgagccaccacgcccggcttgtgttaacatttctgatagagcagttcatttcatggttggaaaactaccctcatgggagcaatgacaagcacatgtctaggattttttcaagcatgttgggtgatctcctaaacatacaggctgtgggttaaaaagtgaacataaatgtttagaatgaaaccttttggtttaaatggggaagtgaaaggctggcccgggcgtttccatctgcctactgtaattgatttccgcataaacggtcattactggcacctatggcagcaccagtattaaactgcatatagtaaaatcacggtgtaagatggtgttataatctaaacagttctaatgcgatctt

SEQ ID NO: 38109 - DNA, 480 bp, Homo Sapiens
catcttggcatcacggggacgatctaaaacccgtgctccttctccaaccttttcatatgagtgagcttcaggggtgcagttggccttgggggagaatcgaaacttaagtcagaatacataggaggcattattaggtgatgatattgaggatgctaatcatggcatttggaattttagtgtcatagtggacaaatttgagaaagcgataaggagtagaagatggaaaagagacaagaaaatatcaactctgaagatggcacagtaaggagaataaaaacaaaaggctggtatttgggctggtgatcaagaaaatggtgttctgaagcaagggaggttaaatttggcctagatgctaaatcccaatagtgacattatataactgggaggagggtgaaggagaagagaagcttcatgatttagctactgcctagcaagaaaccctgtctctggccataactgtcacatggggaggggagccag

SEQ ID NO: 38110 - DNA, 479 bp, Homo Sapiens
tgaggatccccatgtgggctcactgtatgtcctggggcctctatggtgcgttcgtatttctgatgcccagatctataggctgtagctgcttcaggttgccttgaactctgttttcaactctgtcccatagccaatgactgactgatgtatgactacaaacatccagctcctttacctagagacagaacaaactctgggttgtaatttatgtcccagagctccctgaggatccaggcggtgcggggatttcactgggaatcactcctcagctgggctctccctcttttctcttttgctgccactcctcagcttggctctccctcttttctcttttgctgccattgctcctggtaactcctgacagcacagcttcaataaatcacttgaccttgaatcctcaattgaaagcactggaacttgcttcagagcctttgcatgtcttattatcccttcctagaatgttctaccctccccttgcc

SEQ ID NO: 38111 - DNA, 420 bp, Homo Sapiens
tgctgcagggaaaccaatactgaaaaagcatagtgtgattgatgctggcagaaacacggctgtagaaaaccgggacctactgggttccgaggtgagaagatgttatttttttagagttaatagatgggttttactagcaacttggctggatgtcagagaaaagtaattctacggtataaacttcatatacatttggcttaatataatactccctttaaatacagttttagaggctattacagaatttcagaatagggaagtacaatcgggtccaacttcattttggacataggaaagtaaaacccaaaaggtaaaggttttggaatcaagacaaagtgtttactaaacatgtacttactatagattatatgctatgaactagggcatatataggtactggggatactgagacagggggta

SEQ ID NO: 38112 - DNA, 565 bp, Homo Sapiens
acgtcttgcaaaaagacatgttatgtagatgtcgtgtgttccaacatgctattgttttttaaaagatagttatttctgttttcatttatgcagaattcagtgatgaggatttaatgaagcagtgcatttcagaatatacaagaaatactttagtcaaataccgggttaccaatcatctagttatgtttaatgtcagtattctgtaccttaaatacattatatcttcatgccttcattttcaaacagcatcttgtctacatcatacatcaataggttcatatcattatactaatctgcggaatcaaaggtaagcaatattttagttagatggtagaaatttataaagcaaagtagcaatgctgatgtttctgtacgatcaatatgcagcacaatctttgaagtgtgaaagagttgtctctcttcattcatccttggtttagctgcctggagccaatcattgtaatcaaatggccactttattctctgtgcatactacttgagtcagactgtatttactatatacccccccatgcattccttctattcactgttgccatggtatcat

SEQ ID NO: 38113 - DNA, 586 bp, Homo Sapiens
agcggcgtagcggccgccttttgcatacgggaccctctgccgcctctcctctgcctgcctcttctctgccactgtgggatcctctgccatctgctccgcgctttgctttcggggctgctctgtggctgtctccctcacgccggggctcccgccaaccccatgaggcagcccctgtgtaaggctcctggtcagccaagaggaccccagcgccctggagggtgcacccccatccctcctgctgtggggcccttggtgctccaggcccgagtctctcacaccgtggctcacccgctgccccaaggtggctccggaagcaggtcccagctcctcccggggcctgtgacagaacagttccagcagggggctcttcactgtccccacctgctcccagagaggtgcttctgtgcccagacatggaacagctccacagaaaaatgagggccactggcctgagcaggcccagacttccagaaggaaaacactgagggttggaggctgaccaagtcactcggaagtctgtcctcgcgagagggatgggcttccctctctgacgatgagacacacaggagctgatcatgctggaatt

SEQ ID NO: 38114 - DNA, 585 bp, Homo Sapiens
agcggccgccctatttttgacacgcgctaggttcttgtatgctggcttttcttaaaggaacagcagagtagaaaagaggttgagaatgttttctagcaggcagaatgtgcatacatgttttcatgagtgtcctttgggtgctgtttcttttaaatcctctgtgcacggggctctggcctttagtaaactgtttttctgtcttacgtcatgctgactgggtgctaggggctgattacaaaggggaagagttgaacagacatcaggggccgatgaaaccaaaggactaggagtcaggagaacaagtcagggattaggagacagcggtttggtttattgttatccagctggaggactcctaggggcagcagcaggaggaataccagggccacggaggggccaggagtctcacagtggagggcagactctaacagatgccagctgaacgctcgctggccctggatgtcatacgagttggggaccagaaatctgggctcagagaacccgtccagggagatttgaagccatgggttatcttctagagttgatactgatactatatcttaatttttatggatgtttaatacc

SEQ ID NO: 38115 - DNA, 352 bp, Homo Sapiens
gaggggtaatatttatctcaggatttatctcaggatttactgtaaatatgtatacacacatacaaaaacccaggcatgttaagagaaaataatggcccagaggttgaaattatcagacagaacctttaaaaataattatgattaatgtgttaaaattctagtggaaaagataaataacatgctcaggaaattttagcagagagatagaaactatataagaagctcaaatgaaaatgctagaaatgaaaagcagtattggaggtgaaagattcctttggcaatttatcaacagactggagatggcagaggcagaatcagtaatattgaaggcagattactatatattattcaa

SEQ ID NO: 38116 - DNA, 587 bp, Homo Sapiens
agtgatctagaggatcccagcggcgcctttttttgctggaatacagagctcgtcacgggaagccaccagcttgctgtcctccagcatgagacagtggaccaggaactaacgaggcagacacacctgtgcaccctcccacactggaatcagagcttttgcccaggtaagccactgtcacaccggtccctgagcccacgcagcaaccctgaccaccagcaccggacaccagaccagggaactcggcaggcaccacaggtggagcagtgtgccctctcccgctggaatcggagcttgcatctgggaaagctgccagcctcctgtcctccagcaccagacagtggaccagcaaactaaccaggtggagccgacgcaccagcgtgccctcccccactgggatcagagctttggcccagggaagccactgccacaccagtccctgagcccatgcagcaaccctgaccgccagcaccagacaccagaccactgaaggaggtaggcagggcgaacggaccagtgcgccctccccagctggaataggaacttctgtgatggcgtgaaaatcgagctagagggaatacttccaaaca

SEQ ID NO: 38117 - DNA, 367 bp, Homo Sapiens
atgagccactgtgcctggcctagccttcttttcgaaaagaactgggcagcaccacgtgagctgatttaagggaaataaaaatggtttccgtttttataattgctaacatgagattttgaggataattggtgatttgtgtgcttgaaaactgtaatggcaacattcacaaaatcgttataagtttttaaagatatgtgtatgggcatatgctttctggaaaagagggcactgataaaagtagtttgagaatcatgaagagttaagttacctcattggagcaaaatacgaggtatagttagttttctcctctcctcccaaattccactgtgccctccaaaaaaagggcggacgctgggtaccgagctcg

SEQ ID NO: 38118 - DNA, 469 bp, Homo Sapiens
ggaatagataggatttaatatgtagctattagctttatctgtatagctgcatagcctgtgctgtaggaggttccagaacttactggactggtctccaatggtgaccatttggattattttgagccttatgctgtaacgatgccacagcaaatatctgtacccatttcatgcaagtttaagtttacctgataaactctatttaggtattgccaaatgacctgccgtatggggatgcagcactttaaagccctaccagcaaagtcagagagccctgcccatagaaggtgttaccaaactaatttttaaaattgattttataagtgaaaaatggcttttagcattatttttaaattcttgtttttcttggttttttaatctctgcttcccacaggtgataagcattgttttaatatctggatttaattcctttgaatgagggtaggatcttcctatatgttgaagagtgaac

SEQ ID NO: 38119 - DNA, 368 bp, Homo Sapiens
atgggtgatctagaggatcccagcggcgccttttttcaagttagcatgaacctgactcagacatcggccatttagtttctgttagcttctaactgagcacatttatttagtgcctgggctgtgtcaggcactttgcatgaattattagtgtgtttggtcctcaaggcaaccttgaggcttggagaggtcaccagccagtcacagtggggctggagttgggatttggaccaggccagatgaggggctgccctcaaaactgccagagttagagggatcctgggggtaaaagggacccaaagatactatctttgctgattcaaaattttaaagcagtgcataggccggcgcattagcaaaagaatattttt

SEQ ID NO: 38120 - DNA, 612 bp, Homo Sapiens
agcggcgccctttttttgctgacacatgcagtccaatgggcctacattaactgcaggtgtgacgcagctccttagtaccttcatcagggactgcacactctactgccatcatttataagtcattcctccaaccccgaccccatgagcttggtttcccacatatggctcgagaaacatcagtaagtgtgggctggaattattttcctctataccctaagactcctgagtcccccttgtctccagcatgctgcatagatgctgaatctgtgagagcatcagcctagagggcctggacttttctgtcctgcttcacgcatggcctctgtgacctgatggacacctacccatgaccttggctccagcctcattagtcactaaccaagctccaaaagtctggctgcctctgggacagctctggatgtcccatggacccctgaacacagcacatctgccagctcttgtccctttcatccatgtgacaaacctgctccctcctccttttcctgcctcagtgattagtacaaccacccaccgtctaagccagagatctgggaagctaagttctactccagctccatctatcccattcagtcactgactcttacaggctat

SEQ ID NO: 38121 - DNA, 425 bp, Homo Sapiens
ggtatacaatcttatattctgccatgttcatatatattccatatatttttctcgtttccagatagtcttgattatttcaaagggctgcataattagctgtactgacacagtataatttaccaagccctacactctggtaaaccatttaaacctttctaatatttggcattaaaaacaacatcacagtcaataacttggtatataaaaagcttttggcttatgttaaactacactctagtatatactgctgaatgaatgaatggacttccctgaagcattgcaactgtctcaatagtccaaacattttcacaggtcttgcaaagaaggacagactgcttctaaacggccttacaatttacaaggtaatcagaaatgcattcgctactatctggccaagaaaggtgttaatgagtttttgccaactt

SEQ ID NO: 38122 - DNA, 398 bp, Homo Sapiens
agcggccgcctttttttccaaggagaatgcatcctacattgatgtaattgaagtccctccctaacttcctcgggggctcttcaaaataacggtgcatcctttcagagtgatgtctgcattttctggaatgtcaatagtctgatggccaagaagggtcttcattctctcagtagatacaggaaagaattgaaataatggtttttaaatgtataattggagcaaagactttagagaatttccttagtgggatcagacacagactatgaaatggctttgtcaatgcagttacacctaagtgccagggtatgtcttggcctttaaaggattaaaagcttactcccaaagttgctgggctttggggtataaatatattttatcgtttgatgtctgatagtata

SEQ ID NO: 38123 - DNA, 558 bp, Homo Sapiens
agcggccgccgtttttttcatacatcacacatgcgtggataaacacataccatcttttattttattttctaaatagagacagggcctccttatgtggcccaggcgggtgtcaaactcctaggctcaaatgatcttctcatctcagcctcccaagtagctaggactacaggcatgcaccaccatgcccaactaattttttggtatttttggtagagacagggtttcaccatattggcccaggctggtatctgacaaaaggaaaataggaataaagtgagctccaatgtccccttcactcatggtggtcccatacggtacttttacactaagtggaaaaaaggttttcatccaatctatacatggatggatttctactcataaaaacttcatgggaaaatcttagagatgctaacccggcactggcggtttcacaaattattggttcctccctatagcagtgcctccctacagtaccgggcactggataggcactcatcgaatagataggtcaattttttcctaaatgtggatgtcgatacaggggggagtatatttttc

SEQ ID NO: 38124 - DNA, 504 bp, Homo Sapiens
agcggccgccttatttttggtggcattatattataaaagacttgaatcataacttcaaaggtgtttctgagagtggtaggtatccactctcaaagtgtcgttgggtttggctttcggtttatgctattgggttggtgctgatgttattgggtttagcttatgtttattatgtcaaacagctcagcccaacttcttccaaggaggaaggatgctttctgtctacacggagatccatttccctcatgttttaatttagtccgagaagtcagttccatcttggggtcttggatgttggaggtgtctgaaatcatgcacagcctgcagcacacgtaagtctcaggttctctgaaacctgcacacttgggtggtgcatgacatggtatataccaactatgtttggagaggctttctaagaggaggaataggaatcaacatcaaagaattccatctcagagtggagtcattactgatgagtggctggttatgcttgaaaatatcagtgct

SEQ ID NO: 38125 - DNA, 400 bp, Homo Sapiens
tgcagatggtggtgttcacagctaaacagacggctcggtgcagggagaggccctacagtgaagggaaaagtagacacttgatggtggactaattggttcagtatttcccaaaaacttacagctaacaataatattaaacaggtttaattagcatcttatacatctgacactctctcctaagcatccagtttattttctagtcacgggttacttactaaaagtcggtgtaacaggagctcacatcagattagaaaacatcaagggggtagtattttggaccgaattaacatacaaaagaaatggcctatatcaggtatatgggctccaagggtagttcatacttcagcctcttcattcttttcggcttttgtcacctgttacagaaaatgatctataaaat

SEQ ID NO: 38126 - DNA, 449 bp, Homo Sapiens
tagagtttgagtgaaatattttacacagatcctattagttttggaatagctcaaaaatttggatgcaaaacacagctagacctaagttttcaaataaaggactgcaaagcagtacttccccaaactgttaatgatacagtgattctactaaattcaaagacagtcccaataaatatttttgtccccttgtatgtcatgaggataaatctccagggaaaaaaagggcatgtcagaacgatgtgcaggctgtgtgaaaactgacacatgattttataaatgatgtagctgtaagacactgtgtcattaccagaagttattcatccataaagataacatatggtgtggttgctaatagttatctccctaaaaccgaaaagtcccattcttttcaagtgcttagatacagggctttaggacattcttatgtagttctagggcttagaatattc

SEQ ID NO: 38127 - DNA, 459 bp, Homo Sapiens
gaggatgaggtgtgctctacctaggatacctccaaaagtttcattagcaacattactttctaattagtagaaataagggctaaggaatcttggatcactgaaatctaactattctttaattgaaatgtggttatgtttctgacttatagtaagaactaaaatgaattctatttattctcaagtgagagcaaagagaaaaattttaaatggcataataaagagcttataaaacaaaatatgaggatttcggaaaatcatttattgaaatagtactaggatatttagaagtatttagaagcttaaattaatttggtttttctttatgacattatctctattacgataatattatattatttttttaataaaggccctaatggaaatctcaaataggttggtaactatagaaagctaagctaaaggaattattagaaaaagaaggaaaatagtctcttaagg

SEQ ID NO: 38128 - DNA, 396 bp, Homo Sapiens
ggcagcctgtgttgggaggagttggcaaggagggaggaggtgctggccagtagagcacatgtgtctctgtgcatcagagcaaggacccgggctctccccgtgagtgagaagagtccatggggtttgggggctgaggaggagttttacagatgaccggtctgttcttggcacttgcaattagcggaccgtctgtatccgagtgttgatcgggtggattctaaccctgtgggagaactccccagcccgtagcctgcgctcactgtacctggcagttgtattaatgacgtcaaatgcacagtccagcttgagtcccctctagaacgtgggcagcggacactaagccgagaggaatcgctgtgggtgggcagacactgtggagactgactcctggacagg

SEQ ID NO: 38129 - DNA, 527 bp, Homo Sapiens
gggattatgcttggccttcaatacctcctttagcacctaatcgtaacagctttagaaaggacctctcccaagtggtagaaggttcccaaggacattttaagtatccatccttttaaaactcaacatgtcatctctctcctcccacagctagatttcctccttcacaaaaccagccacggtgttaactttcctctaacacaaagcccataccctaaatatcttaggtgcttaagtgtctgtcacaccattcggtatatggcaaacggtcctcgggctactccaagaaggtaagtgattatataagtgcatccccaaagcacatcatttccccattttcagaatacaattaatggcgggcaaaatcccagaattcaacacttttcactcagggaaaaatagtgctgggtgggggaagaagcgttaggtctgtaagaatgactttctttttttaataagatgtggtaaagacctggtagtttaattccttaccctcttgcagatgtaataggaagccctttacaaatatc

SEQ ID NO: 38130 - DNA, 375 bp, Homo Sapiens
gcaggctctcaggtagaatctgcgccatgcctctctcctgaatctgctggatgccagcggcccttggagttcctggcttgtagaggcatggctccaatctctgcctccatcttcacgtcaccatctctctctgtgtgtccctgtgtcttctcctcttcttataaggaaatgtcactggatttaggacccaccctaaatcgattctgagatcatcgagagccttaattaatgacatttgcaaagaccctgtttccaaatatggtcacattctgaggctctagatggacatgaatttggggaggatgctattcaacccaatgtagtggtcagatgattgaacagccaccacagaaagcagctaggaccatcacagaa

SEQ ID NO: 38131 - DNA, 354 bp, Homo Sapiens
attcagctcggacccccactgacatttaactagggatacactcagtcatggctttaatatctgccatcaaccacattgctccatcatggcatctgctacactttggtgtcatcagtctttgattagacagttcaatgaaagcagaaaccacagtaatttttgtcaccactaaatgcctagtgcttggcatgatgctgggcaaaggataccctaatttgctgaataaagccttagtttagttgcttaatacagtgtgtctccctattaaacacagtacttaaaattggtatttccaaataagcattaatacacaaatgcctttgctagatgatcaggaacaaactgctgatcttc

SEQ ID NO: 38132 - DNA, 414 bp, Homo Sapiens
accctaagccaacccccgccagagtgttctggggcctagggggctgtccccacttggctgatacctgaccgtggagtgattggtgcaggagagcagtggccccagtctaagagcctgataaaggagatggtggggctgtaagctctggattgcatatgaaaggtgctcttgcagatgtctgttctctctgggaattagccagccttgggagggacagtgcttgtggtgtcaacaagtccccagatatcaaaacattaaaaacaacggacatctcactgtagaattggaatgaaatatgaattaaaaatgaccatctggtgattacctaaaagcaaatcacagtctgaaaccacttaaactggcaatttagaatgttataaacatcaccgaactaaactggacacagaacacatg

SEQ ID NO: 38133 - DNA, 355 bp, Homo Sapiens
gtcctaccctaaagccaacaccccgacctcagcttcttctcatcatcatcattaggaaggcctcatgagatccagtctcgtcagcactttgctgatgaaggggtcacaactggctggcgtgttctggccactgtggtcttggtcacccttggcctaatgacagtgtttccagagataagaatatagaagttgccagagctccaggtgcccagaaacaaccatgctctgtcctaattacatctgaatctgttcttggagaatacaggagccactcatgtctttaaatccttggccattaaacattttaaatataacttggcctgcgtaatatttaaatcctgacatttggctcaca

SEQ ID NO: 38134 - DNA, 398 bp, Homo Sapiens
acccaactggattctgagcagtctataaatacacattgagtaatctactatgtttattatatgttcaaactttcagaccaatgtcaattgcaggcaaatttaaaaggaaaatgagattcaaataacatgagttatgtttaaattagaaaaaattatctctaacaaattaaatgtaatgataattatctgaagttggagaaaactttaaaaaacctctatgctaaaactttgaaaaattattattcatagtaaagtataatttacttggatgacttatagaattagaatgctttttaaaaatctaaaaaccaaagactgtttcagagctaggaaataaatgtttctgtgaactgactatgatgtatcaaaactctgttttaaatctctgtgataatttc

SEQ ID NO: 38135 - DNA, 367 bp, Homo Sapiens
agctcctacccttcctctcctccacctcaagggacggactcctccctccccccacagggacaaactcctctgagtctgcagaaccagaatgagaacacagaaggctggacttactgctaaccaagtgcaaccctgaccactctgacttctgacttcttcacttcgaacccaatccaaacgtaggggcgtggggtgggggagagtgaaagggagaggccaacatcaaacaccttttggccacacctgcgcacagacagtccgggccgcagaaatcaatcagtcactccaaaggggtggaagccctgggccactgccaacccaaggcccttctggaaaagctctggacttgttaagaagggttggccag

SEQ ID NO: 38136 - DNA, 401 bp, Homo Sapiens
cgacccttcctctcctcccacctcatcggagtgtgtcaattgagtaatgaaaaacatgaatggcgttgaactttttcttgtcattgggaaattatttatacctgaggatggttggcaccaacagatatacattttacataggaaagagtaaatatttttctacaaaagagttgagcaaaagttgtcagttagctgaatatggtgctacagggaactataggatgttttctgtaaagaaatggtaatttggagaacaacatctgtctgttcacagccaaatcccctcgcctgccactgtgccttgagtgtaggtgatgttcagtgtgtctgttaaatggatgaccacgggagagcattggcagcacaaccgttgggttatttgtaatcaactctaacttatt

SEQ ID NO: 38137 - DNA, 467 bp, Homo Sapiens
actgtccggcgctctagcgagagaagaaacagactgaaccgtgactacggcttcagtgtgccacagtgtaccactggctacaactcacagacctaccaacctctgctcctcctgctgtcaagggacgaggctcccgactcatctggtggaggccatggagctgcccactgcccagcccagccccaccagcctcggccctggcaagcccaccccttccttctccttggcagacactcttctgcggggaccttctgagccctaggccacaatcaccacgcccctgagtttctcagcctgattatctttctgctcagctcattccacagaccacactctcctacccactgcacacaatccgcctcacacgttgatgttgaaggagcgctacatcaaagacagaaaaaacaagtagaatatccacacccgaccccacagacgcaggagaggatccacacccgaccccacag

SEQ ID NO: 38138 - DNA, 490 bp, Homo Sapiens
ctccgacccttactctcctcccacctccaagcatttagtgataccattttcacactgaaattctatctataattcaaggttaagttaaatgttacccacctccttcccacctagcctccacagtgggtctgctcacaagctgttttctcacaaaaccagaaccatgaatgccttacacaaagcaagactaaacaaaacaataatgaagttttgctgagtattcttcaaagaccattctgaaatccacagctttcacaagtagactaaaatacaatacaactcatctttccaaagatcctgtctttattgcagttcataattttcacacattacaagagaagacagctgaatgaaactacaaatttcaaaacagattaagagaaatgagttccaagccatgcttttgatggaaagggaagaaggaaaacagtgatatgttaaaaatggagccaggagcagtggcatatgccggtaaatctagttattcagc

SEQ ID NO: 38139 - DNA, 376 bp, Homo Sapiens
ctcaggcagcggcttgagcaccatgggagcactgtcctgctccctctgctgcctctttttagtcttggggctgctataacactttcccttccccagccctgccaacctggtgggacattgggcttccctcttcctggggacaggcgggtcctggggacaagcctgtcctgtatcatacctgcagcgagactctttttttctccaggacctgcggagcagccaggcttcatgagttaaatgcagatctgaaccatacccagttgggatgggggtacacactctactcctctgaaaactagctaggggttcgaacttggggagagggagagtgggacagagccagaccagacaaggactgatcacctgaaaaaacctg

SEQ ID NO: 38140 - DNA, 378 bp, Homo Sapiens
cgaccctcacggtggatgtttaaagcgtgccattgacctgaaggctgaattggagctcgtactgagaaaatacaaggagctggacatcgagcctgagggaggggaaaggcgcaggacagaagccctggaggaggcggaggaagatgaggacgatgaggactttgtggaggtccctgagaaggaggggtatgagccacacatccccgaccacttgcggcctgagtatgggctggaggcagcaccagagaaagacacagttgtgcggtgcttgcggactagagacgagatggacgaggaggtgtcggaccccacctctgcggctgctcagctgcggcagctccgggaccacttggcctcaccctcatctgccagcccctc

SEQ ID NO: 38141 - DNA, 354 bp, Homo Sapiens
agtgttctacaactgcgggagatagctagtgagaagagcaccgtcccacaccagccggaggtctataggctcgatggaatccttatcgtagctgacttcctggcctctcaggacatgggcagagagaacccgggggtttacctctgtgggaccccaggggtgactggaggggactttggtggatctgtccacacagcctaaacaaagagcaccaagctgacacacggcagtggagccttgattcaccaaggatctcgggcaagctagcttattgtattaacgggagactgtgaatgtcccctacccctacccatcacacactagagctggagagatcttaacaagcagtgtcta

SEQ ID NO: 38142 - DNA, 391 bp, Homo Sapiens
agtgtctctgtggagagagagaccttaggctgagctctggcagggctgggccccacgcctgctgctgcacccaggccctgagcagcttgggctgcaggaggtatcggaaactcagtcgtgcatgtcggacaccaccaccagctacaccagagaaggactcgcaggctgcaatttctgaggcccatgggcagggacggaggccgacggacggacaacccaggctcctggagcgaagcgcggtttggtcccaggcgtgtgtctgggtcagattttggtcatgtgtgctggacgcacgtccactctcagtgtgagcctcaggcctgctgcccgcacgtgcaaccgaaccctcgctcctgtcgctcttcacttccgagcagctccgcgacggctg

SEQ ID NO: 38143 - DNA, 361 bp, Homo Sapiens
tccagtatgcgagtcgtatcaggcccctcgggattccacttgactccttaccagccggtatctcacagtcaagcttatcaaccttacacatacagcatcgtgaatttggtctcctttccttcccacactgaacccttcccatacctatccgccaatcactacctctgctgaaaccaactgatgtctctgtttctcctctctgattcctgagaatggctggagaaaagtcacttaactgataaaagaccaggtgcttagaacatagacatctcagtctgaaacccggctctgctattaatagccgggaaagatttcgcaaattctataatctctctgaacatgtttcctagtctgtaaaaag

SEQ ID NO: 38144 - DNA, 381 bp, Homo Sapiens
ccagaaagacagaagggagtgatcaaatgaccacaatagctctgaaaaacgagaaagtgaggtgatctttcttatgcacagtcccacttattcatttagaaatgctgagcaccaaaacaaaaccttatcacaagttcagtatttcgttaataactgccaaggtataatggaatactccccaaagtactgcagcattagaacatgaccactccactaaattaaaaattcagcgaaagcttttctaacaaggctggatggagcactaactcaacggccaaacggctgcacttcctgtatatgcacgttcaaaacacctcgaattaacatgctagggaccttgaagacttgtactaggccttgctcacgaggaaggcttcgtaa

SEQ ID NO: 38145 - DNA, 362 bp, Homo Sapiens
caagtcccaaatacactctccgaagaagcctagagcagcagtttccaaatcaggatgagcttcagaaccctccggagcactagtaaaaattacacaccttaagttttacatgacttggttgaaacctttccagctacaaaaggtataatggaagaataaccagaagctatttactcacttattcaacaaatgcttctttaatggaaaacgctgcctaactgtgtccttggctgtgtagtaggtgctgaggatccagatgtaacagaactgcgttttgacctttagggaacttactagtctggtgggaattccgtgggacagataactgggtaacgacacggtgctgtggcacatgagacgga

SEQ ID NO: 38146 - DNA, 417 bp, Homo Sapiens
cggtccaaagctgactctcccatgagatgcagtagcatcacccagtgtgacaaccataaatgtctccaaacatggccaacggtcaccgggaagacaaactcatgctcagttgagaaccacgggtctaagagtaatcccatcccttcccaattagtggttcaggaataggcacgtgacccaatcctgttgaatgggtcatgaggaaaggcctgctagtaagttcttagcaccttctcatgggtgtcagagagctaaggggagcaggctgtcactcttccactggatgtgaacaaggaagcacacaccctgacggccactggcagccatctggtgaccatgaggatattcgcagctaatgctgtggacagaggaagcctcaccctgatgtcactgtgggcaagctgaatcagccagctc

SEQ ID NO: 38147 - DNA, 355 bp, Homo Sapiens
catgtacatcctgccgaggagccggggatggtcagaaacgtcagtgcagccgctttgccctcatgcccattgcacgccacggggccctcacctacgtggtggggcgctctttccacgtgtccctcctggtccatttgcccacccagtgaggcaggctcatccccttatttcctgacatttgtgtggttggtgcttttagagaactctccttgtggactctgttctgcaccattgtcacagcccagagaggggggaatgttagtcccaaagaggagaggggacttccctaggaccatccagggggtgggaagcagagtgggtctcgaaccttctccgattcgggaaatcgccttct

SEQ ID NO: 38148 - DNA, 442 bp, Homo Sapiens
gaggtatacgttaaacatcattacactgtatatatgggtctgccaagataggaaaccatatattcataacagcacaacaatacagttggcgagcgagaaggcagctcttaggattaatccaggactgagaggtttgcctggtggatgaagtcgcagaggctgccggtgccctcccagacctcccagacactcacctttcctgtgcatgctgacagtttcttcactggagcagctgagactctccacctcagggtttttctctagctgtgtgagcaggcctcgccctcagacaaaagggaggtgagaagctcttaaggaagaagttcccctgggagcagcccacagccagtgacccatgaatgttggtggatgaacaccctagctccggtgcctctggagggaggaccactttgagacgtgctcctccttacagttgtccaaa

SEQ ID NO: 38149 - DNA, 436 bp, Homo Sapiens
gagaggtggcacagttattccagttctattatatgtttagaaatgtatctgatacatggtgagcgttctgtgtagagactgtagtctgttttctccaaagagcaggaatggatttgtttcagcaggcagttaacttggtgccactcacactgcagacactcaccagcagatggcagaagctccaatcccagctcagttcttgtggcctcagctacaggctgcctcgagtccccccaggcttgcgtgtgcagaggccagcctgagacttgggggagagtggatcatgaagttcagggcttgcatctctgcatctctgcccctccatcccgattccccttcctttcccctgggagtggttgtctctgggctccatcctctggtggtcagattctaccagaatcttaggcaccctcactgtgccttcctgctgtagctg

SEQ ID NO: 38150 - DNA, 416 bp, Homo Sapiens
ggttaaaggttagtagagatagatagagatccgtgagcacataaatagtatggctgtaggcgagagaggagatggaatgccagatgtagctctttctgacctgtaatcccagcttgcaaactaaataacatcagtggtactcagctttccttgtgtgtctacaccatccatatactcgcatcagcaatgtgtagcaattttgtgcgggggtgtattagagaatagtatactttttgttctctttgagtattcatggactggactttctttatgtcccttttagtttaacagttccaattttcttggcatcctttctgatgttgtcgtagggccttatttcaagagcatgctggtctgtaggatctggctgctcctccactgaaagcccccagaatgctttgttacattgtcaggaa

SEQ ID NO: 38151 - DNA, 406 bp, Homo Sapiens
acaaatgctcagcctccttactgtggaataaatgcaccacctgctctcatcctacggggcccatccctcttcactccttgagggctttactcctacagtcgccctctctcctgcactgcgggttctcccctctgccaggactttccacccacttacatgcatcccaagtgggtatagctcaatatcaaagaccagagacttccagattctcttcagctgccatgccttgtctctgctccccttagagcaaaactcttccaaagagctgtgtgtgttccccgtctccacttctgcccactcccttccagttttttcctcacaatcccaccaaaagtttcctttccacagttgccagtgacctgggttgcccagtcctatcagtagcattggatgcaaataatcaccc

SEQ ID NO: 38152 - DNA, 357 bp, Homo Sapiens
ccgtacctacgataaggtagctagagaaataattgttaatataaaggagcagaacttcttggacttgaaaataaagctttctcttttccagtttttcctgacggcagagaattctaaaattaagaagattctttatggaaggagagcaaatctagggtactgtcattaaaacatggtttatcatgaagccaagggagtgattgtaaaatcttagttctaatacctcaggaaatttaatgtcatgcctcacacagacggtagtctctctaattatcttaaggacatgacataccttacagatcctctttattaaagaaaaagtcctttgagaattttaagagcattgtctctcggcag

SEQ ID NO: 38153 - DNA, 404 bp, Homo Sapiens
aagaacctaaaaagaaaaagagccaggtagcatttccattatcaaggtataaaaacagttggatttatggacaatactcagactcccagtgctcacctctgtggggtatcaggaagcactcccaattcacagggtcctacagagaggatagcagtgacaccgcacctgcattaacttttacaacagacctgtggtcttaaaggcaggaagggatcaatccctggaaaaagaaaaagtaactgaataagtaagccctcgtgcctctctcctcagtcacctggtgatacagttacactcaagttaacatgatttttacatccacagttttcatgctaagcaattgtggtcagagtcagctttcacaccttacccatttagcatctctactacggaatacaactgtg

SEQ ID NO: 38154 - DNA, 480 bp, Homo Sapiens
aatagggagagaggattacccgtgttgtctgatttctctggggctgtggtttcttgcctctcctgtagtctgtgcctctgactctttccttctccttgaggttaattgtaggggcctgaacccattgctccactccctttgttgtgaaatgagtccccaagcaatactctggcgggcttctcatctgtttcagtcgcagggatcttgggacagttagtctttgccaaacctcctacaggccagggcttgctgaccacaggcatgtcgtgcggtcctttatggcgggtatgctcgcactgcgtctggaggttgggcactgcctcttggcttctgctcttgggagctcatatcaatggtgggcacacccccgatccatcatacctagcctataaaggagaaagccacagaccttctaaggatgcaggtgtaccccccatgaatgtatttctcagctccttcatagagaaagcattttctggg

SEQ ID NO: 38155 - DNA, 365 bp, Homo Sapiens
tattaccgagagagggtagatacactgggctcttcatattcatggatttaacatttgaagttttgactactcgcgggtgaccccagtgttctgagtaatcaactcccagtgttctttgtcttcctttccagttcattgattccttactttgtggtcttgctcttctccctccactgcttagatttctggtccatataaataccttccatgcccttgcttctcacccttcttccatttacctggaaaaatcccagacttgagtgagcctggccactaggcttcttggaatgtggatctggcagctaagccttattagagaacatgactcagcagagcagactgagcctatcatacatgcacattaa

SEQ ID NO: 38156 - DNA, 440 bp, Homo Sapiens
ggaactcgctgggattagttataattatgtgcaagataataaaaaatgtctagagacacaggttaagaaccaatcttgaaggtcattgaatgcctggataagaagattgaacatgtgatcatgggaagcagtcattgtctgcagtaatgtgttgttttaggcaggcattcaatgcacataattttcaacaggcaccataacgagttcaacaggacataaagcttgcaatggagcagcagagattttcaataaggaatcaacatgaaggttaattcttcttctttcggcacctctaggtttcgacgatgtttgctagaatggcaatgtcagtcacaggaggttggcatcattgaagggttctcccacaaagcaccatgcaagttgctacaaaagaggcccaaaaggcaaaatagtcaagcccagatgcccagtgtcctcca

SEQ ID NO: 38157 - DNA, 467 bp, Homo Sapiens
agatgccatttatagaggctgaacacattaacttgaaaaaatgatttaagaaattaccaattgaccgtatccggggctgaacctgcgtgattcagcttcttttaaaaatatcttttctcaacaaattgcttccttaacattttaatttgttgatcatcaaggaagcttgccaaatattagctgttcttttccatttcctaccgcctcaagcttcccgtatttggcctatttcagtggagctgtaaggtcactccctatttttcttcccaaataactgtatttattactgtcaggtattggcgggtttgatccagctgtcatcagaacgtttggaaataccgttttttgccagaatgctgatttaatgatctcatactgacatggcttgttctctctgcagacttgataacttgttgaatatgttccctcttcttattgagcaatggtgctttttgaaaatttttccc

SEQ ID NO: 38158 - DNA, 354 bp, Homo Sapiens
cggcactattcacaatagcatttactgtttttctttccttgtatcctatttactactcaatcttctgccttccagtttcccttcccaccagtctaccaaaactgttcaggcaaaattcaccaaggaactcactggccaattgccaaatcctgtggccactttcagttcccatcttctgccacctctcggtggagcacagtgaatacttcctaaacttccttccccagttgtcaattcactgttctcaccactcttgctgcctcttcacaagttcctttgctgcccacctcttcctactggtgtgtcacagggcaccatccggcatgcctggtctcccctttctctttcctccac

SEQ ID NO: 38159 - DNA, 429 bp, Homo Sapiens
gcgtattgtgttagacaagaggttgcatgggttagcgagagaggagaaaaggagttgattcaagtaaaagccaggagcacacagcctggcctgaattaattgtgatgactgtatgtacttatgaacccctgtctgtggggctctccgatggctaactgcaaagctcctgcctgccaactgctgctctgagctgggggcattagggatgtcagggcaaagggttgcactgaagaaggagcaaacctcaaagcaagaagagccacaggcaggcagctgtactataactgccaagtgcaactcacctctttctggtcctttcctggttcaaagcacccaccgagtcagccagaaacctctgattccaccacgtactccaaaaagtgcaccaggaaggcaggaggccgtgctggaaaaggcggccacacgtta

SEQ ID NO: 38160 - DNA, 488 bp, Homo Sapiens
agggaggataccggttgccgggaggagtggaagatgtcgagtgatgataccaggggttggggccctagcaactagagcggatgttgctagttgaagggaaaaagaggagacaagggaagagcagacctgggggcagaggaaatctggagttcagctttggatattctgagtttgagatgagactgtcaaacagagcgtaaagtaggaagcctgataggaaagtctagaggtcagggagaaggtgtgagctggagatccatattggggagttatcagcatgagagcttttcggatgttcttgatcagctagtggaatttttctccacccagctgcatgactgtttactctggagcaaggattcctgggcgtaaacctaactcctccactcctcaaaggtctgatcttggacaggctactcaactgctctcagtgtctgtatccccaaaagtgcctacttcttttattatgaggaaaaaatgaggcaatt

SEQ ID NO: 38161 - DNA, 360 bp, Homo Sapiens
gggggctggctcagggtcgctgggctcctaagagagtggcctggtgctggatgggacacaggaccagtttggaggactacgtgcacagatgaagccaaacctctggcccatcatctattccacccttcacgtccctcatgcccgggttccactggaacccagcggcctcacacatccttttggcttacaaatttcctagctggtgaccattctccaccacctccccccaagttttaccattctctattggtgccctacaacggctccacccttggaaataaggccgggtctaaatgttactttttctagtgggccttcctggattatccatcccacggtgattccttttcctgcccatag

SEQ ID NO: 38162 - DNA, 365 bp, Homo Sapiens
cgacctctgaggtgcttcatccgtttctcagatctcatctaaagcaatattggacacaatggaatagtggccttcgggccacagtatccttactggggttctaagacatcaccactccggttttactggccacctcgcttctcagtatcctgggctgactcttatggcaacctcttctcctcagtcctctgacctcttcaaatattctctgggtgctggcaagtttcatgggtttaaataccatcctggagtgactactcctaactttatagtctagccctgatctcttccatgaaatccagattcttatattcaactggcctattgggcatctccaattggaaatctaacagacagctcaaatt

SEQ ID NO: 38163 - DNA, 466 bp, Homo Sapiens
taagacgggaggataccggcgctggagagaaaggtgggcggggagattcactcggcacctggatggacgtgcccagtgcccctacagtggactggcagacagggatcagtacctccgttcatcaggaaaagggagacatccagtgtgagctcctcagagcccctccaccacggcacagtgacatttacctcttagtctccggtgtcactggatgaggcgtccttgctgctgggcttacccttccacctctgcccttgttccctttccttcctgtctccggtcagactgcctcatcgtttatggcctttcctgttttctgtgattactccttttaataggctcctctctctcagccggtaaatatatgtgagcccctcacatcctaacatgagtctcccttgatcctatgtcttctaagtgttggctgatcttcctgaggtttctgttcggcactgttgctgctttc

SEQ ID NO: 38164 - DNA, 439 bp, Homo Sapiens
agctcatgaaagccatgctgagtccttccgtttcccatacctcctgatcctccgatcagcaccaagctgtgtccactgtccatcacacccaccggaacactgactgcaggcagggtaggggctcatgcctgcatcccaacgtgtcttccccatgccaaacagcggctgacacatggcggacctcagcaagtatcgtttggactacgatattgatgagttgcctgggactctgtctgctcctctccactccttcccctgtctctcttgagaccctggccattgccagcctgacttccagtgctctctccttccagactacaagcaggatctctttacaatgcacgagcagatatgcacacccccttccttcaggttcttcgtggctcctcctggcacaggatcgagccctgactcctccgaggcctctctcgactaaagc

SEQ ID NO: 38165 - DNA, 396 bp, Homo Sapiens
agtcaaataccagatgcagcagtaaggacacaaaacacaccatgattattagaagcaagcagcaactgtaccaaacctgaaacgtaagtatctccttgtttctaggccgcctgcttattgaaccacccaggagcaccactaacacaaggctatatagaaatgaacacacacagatcaatatccacaatatgacacccatgcagaaaaaagtccattctggctacccggacaccgctcagtggctatctgctcctaacagaacaatattgctctagacactttggcacagcgatgataatcaggctacaagatacttcaccaagccaagcgattgcaattcacatcttagaaatgccagaatcatccgaagtggaggctcagacatgttcaaaaccc

SEQ ID NO: 38166 - DNA, 394 bp, Homo Sapiens
gtagtaacaggcaataggatatgtctttctacaagtgacagttgagaaatgcttcctttggtctctcttctgaggaagagaatcttctgctcctgagaaagaaaacatgagccagtcagattcctttttatgcatatgtgaagaatgtctgatgttctaattttctagtatgtctcaaattatgctacttgaatttccaggctctttcatgccttttatttagttgaggctttggtgttacaaatctgatgttcacatgccagttctcttcaacacagttcttctgctttatcattggatagcatgagcttttccttgccttggtgctcacatgttccatgtacaggatattgactctctcagttctctttctaatggcctctctcgctagcag

SEQ ID NO: 38167 - DNA, 468 bp, Homo Sapiens
taacaccaatagtgacaggaactaagagtgagaactcactcctggcagaatggcaccaagccattcatgagaaacccactcccatgatccaaacacctcccactatgctccacctccagcgctgggatgaaatttcaacatgaaacttggtagaaccaaacaaaccatatctaacctatagcaagttgttaggagagtttattggccaagtaccccattttatttactttggcattcctagtcacattggaaagcggcagcctatccgctattcctccccagtctcatccccaccttgccccattttatgactcacaagtaccaatatgttgctcactgcctttaaatgctcagtgacttcttatcatgggtgttgctgacccaattatatctttgcaaccagcattcaaaaagcccagagcataatggtcagctggctcatctataggtaactgcctgccatgactt

SEQ ID NO: 38168 - DNA, 481 bp, Homo Sapiens
tgttctagaggatccctgagggtagacttcgggcagtgtctgattagggtgggtggagaggggggtttcccagaaagtcaggcagggcagggcagaagccctctgggttaactgtgtgctttgatatgaaggcaggtaagactggacaggtgggggtgttagtgaggggatggactagggtgtgctgaagaactccactggggctcggcacaccagggaaaatgaccacaaaacatcccatcttcactgctcagagaaggctagatctgctgtgagctaggaagccatgtgggggcagctgatgagtcatcaaatgggagaaatctgagagccatgtgttccacaggcctctggtcctggttcaggcagcagggcactgtgagatgtggctccttggccctttccagccaccaccttgatggcctgctacaaggaaagagactgaagcccaagaatggggtcttgctcaccataggatgat

SEQ ID NO: 38169 - DNA, 444 bp, Homo Sapiens
ggtgttctagaggatcccgagggtgacttcgggggaggccatctgctctaggagaaataggggagagggtgggggtgggtatcacagtccatgtacatacaacctacctgtatttcatttcttacctattcttgaatgtctaacacctatgaagttgcctacttggtcctttcaatatacctctcttttactggtgactggtatgagtggtgttcctattccttatgggcaaaaacactttagcattctattaagtcctgcaacagacaaaaagatgagaaatacttagtcctccggccctaaaagaccatatggttaggaccaggtaagtatataaataaccatatataaggcagactataagtggcataaaaagtactatgaggtttcaaaaatagaggatcatatcatatccaattcagaacatcaaaacagtttcaccaa

SEQ ID NO: 38170 - DNA, 424 bp, Homo Sapiens
ggtaggtagagctgggccagtggtgtgttgaggagccaggtaagcacaggtaggcaaagctggcccaccaggtatggtctgaggagccagggtcagactcaggtaggtagagctgcctgccaggtatggtctgaagagccaggatcaagtacaggtaggtagtctgggtcactaggtgtggtctgagaacccagcgaaaagctcaggtaggtagagatagcctttcaggtgtggtctgagaacccagggtcaagcacaggtatgtagagatagcctttcaggtgtggtctgagaacccaggttcaagcacaggtaggtagagatagcctttcacgtgtggtctgagaacccaggttcaagcacaggtaggtacagatagcctttcaggtgtggtctgagaacccaggttcacgcacaggtaggc

SEQ ID NO: 38171 - DNA, 358 bp, Homo Sapiens
ggaccgaatacggctctctgggctacttagggaagaaatgtgacagcatatggaagtggctggcccctagcagttacttaaagatttatgtactccactctccagatccaccctctgtgtgtcatcattattccttgtaaatttgtttggacttgaatgttcatacaacaactttttataaaaatggatggatcataggtcatctacttgtgcagttatttggatatttgtctccttcactagattataaactcacaaggacaggagttctttctgttttgcctgctagcataaatagtgaggagcactagccataatatgtgctccattgatactggttacaggaaaaaaataaggc

SEQ ID NO: 38172 - DNA, 422 bp, Homo Sapiens
tttggaggaggtgctgagcataggaagggagtttctgaggcgaggaacccttctctattttgactgtgatgatgtttcttaagacacacagagctgcacgccagaggggtgaatttttactgggtctgcaggtaagcagctgcacagacagatgtgcgggatggtctcactttaagtctgcactgagatctctcttctactctagacagactggaagggctgcgcagaaagcagcagggtggcccccccagctgtgggctctgttcccagaagtcccagcggaggacccagggctcaaatggttgggtcagatgaaagtcagaatgggatgtgttagggaaggctggacaagaggggcccggtatcaggagcccacatctagagaaggaagacaggtggctgactcattccaacctggccaa

SEQ ID NO: 38173 - DNA, 617 bp, Homo Sapiens
accatctctcctttactatagtctgttaaggagttgacaggcccacctatggtccccagaatctcaacattaaacaaatataaatcccaaaaggcattactaccttagaaccagaaattcttagttatcatcttgtgccacacggccattacttgatcagcaactttaacttaacccctcatcccacataagacattgctaatttttttaggtacattaggcagttagctaaaacctgatattcaaatcaatgctgatgttacttcaagtttaaaaactgctgaactaaaaaggtcaacaattatctatatgcagcattgcaaagattcctttaagtagcacaaaaagaaaactgcaatataaaaaacatctttatagatttgacaaatgcaaccatttcaaagaaatgtcactcagcataaacagtggtctacaaatctaagctcttcaaacaggtacctgtaagttctaaaatggccttctataaagtgcaaccattttccattacatcgttaaattctacaagggtttctcacatagagggatgagaacagttcagaggtgacagttataagcacaaacacaattcttaagtcactggtatacatataaacttt

SEQ ID NO: 38174 - DNA, 357 bp, Homo Sapiens
gaaaacaaaagaggcaagaggcagcatccccagatagctgtgttgcagtgccccagtgctgtactgtggacacagtggacagacatggcccagcctatgccctgacagagctctctggagattccagtggcaggaagcagactgtcaataaacagaaagcaaggcaaagaacatgctgggtccagactgaaccctgcagtgaagcaggtgaagcactgcaggcctgccaatggcacagaccctgtcctgctcagacttcacagccccaaaggggctggcctgcttgttgctggaccgaacatgcttgcgtcaacagccagccgacatcttgtacggtgctggagagcatcccctaag

SEQ ID NO: 38175 - DNA, 608 bp, Homo Sapiens
ggcctagtcactggttttaagagttcaaaaccaagctgccaataacctactctcttagcagtcttatctctattacagataaacaataagcccattttgattcttaggtattaagtaagttgccatgatttttgacttgtttaccttgttagctacacatgtaatacttttatttgaactctgtaagaatgtttagattgctttggggaggagatgggagagatggagatagtatatatcacatttacaatgtgaatttttaaagtgatatgttaccaaactagaagtcctaaatttgtcagtgattaaacttgggatcttgagtgagacccttaaattctgagcttcttttatgtcaaatattacacaaattattcttgtatagcctattttcctcactgtgttccttgtgtaattgggagaatcaaataagattttatgtatatctatatacatacacacttaatatgtatagactgcataaatgtgatgattgctgttaaaatttactgattgctgtaatgtcataaagccaaagaatttgaatttcaaaaactaagcaaatattaggagagctatactcatatctgaatctgcttgtcctggtc

SEQ ID NO: 38176 - DNA, 581 bp, Homo Sapiens
cccaaggggcatttttttcacatttgtttcactttaagcgccggctcgtggagtcacgcttgtgccagaggtgccctcgtggcttggactgtcaccctcagtaggcctgagccactgaactagtactaggtaccttaggaaggtcgtgtgtgaaaaatcgaacctggtgcctttaaattgtaattagctccatgtgtctccactgctgctttagtgtacctgaggggtgggcccaagggggagttttgaagttaggactggcttagagacattgggcagccaacatctgtatttcctcgtcaggaagtgggcatggcgttgttgggagattaaacggggtgtgggtgaagatccagtgagcgtttccagctgtgttgtagatgtaaacctagcagttaatgtggcaggctgtgtctcatgcctgctgagcaactgctggcttccccgtcattctgtcctcttggatttctctgaatttcattaggcctttatttaatccttgcccagtgctcccctgtcccaaatggtcttccccattggtcctttttatacctgtgtctttactatttcttccttggccg

SEQ ID NO: 38177 - DNA, 552 bp, Homo Sapiens
agggaggtgctgaattcggttgtccaaacagtgcctcaggtggaatgtgtctcctggcatatctcttcctgcttctgctatcttgctgatgcacgctacttggacaagtggccttgcaccttggaactgggcctgaggagggagaagttattcattcccttaagcgttcagaccccagggagaatctttcattcctgtctatttggttatagaaaaaaagggacaactttctcaataactacttcaggcatgacataggagtggcatgggcaccttcgcaaaataaaaacttaatttttggggtcttcttgagagacgggttggtatccatcgtgtcattgtagcaggagcatggtctggattgtctggcagctaactttagtttcaataagagttttaatggcttttattattagtgggataacacaggagagaaacaggaggaacccagtgatgaagattactggtcctaccagcattttaaatccccctaaattagagaaacaacctccttaaagatttgtagggccccaccccttccaggtttggact

SEQ ID NO: 38178 - DNA, 377 bp, Homo Sapiens
tgtcggtaccgacgagcgcccagtgatctgccactttggctccaagtgctgggattataggcatgagccaccatgcccagccttaaagacatttctttgccttccaaatttgattggcctctcttcattggcttgaccggtgtccctcgctcccggcttcttccgttagccagccacctttggggatccccctgggtctgagagtggacagctgagctttctttgtcatgtggtcatcacgggagcttgaggaacctgctcctgcatcagagactgatggggccaagtgcttcccccacactgccttgaacgtggcatgcagttgggctgcatttgaccccctcctccatcttctttctccacttggggcggtcgtg

SEQ ID NO: 38179 - DNA, 374 bp, Homo Sapiens
aatattatcccccccattccccagttttttttaggtaactcgtttttagtgtgacttcagaagagactgggcatgacacagattattttttgtagcttttttgtgtaggtgggtgattggtgtaaggtttaggagaacaaaaaaggacaggtaaatcaatattaacagggagctcggtacccctgcttctagaatttgaccaacaaagtgacatttacaagtagtttgctggtttattatcaaattaacctgtgtttactaatgggtagtgtcatgtagctttgatctcaattctcaaaacggttttgtagactctggttggaatcccactttttctcaagtaatgagctttctaggtctgttgttctgaatca

SEQ ID NO: 38180 - DNA, 502 bp, Homo Sapiens
gggggctgcacccttgactgagcaagctgggcccagcctggcagtgggggcccaggacctaagtggggtgggggtgaggaacaaggggcgtccctacctggggttcctccacaaatgagctaaagtccacaaaggatccatttgaagggaccagcttggcaggggccatgtctctccaggtgggggctggggaagggggtgcccctgggctgggtgtcaccaaggagatggaagaagaagagccccagactcccacccagatcccagcctggccagagccagggcctctcagcctgggccttcccgggacaggcttcccctgactcccttcctcagagccaggccactcagtgcccctgccctgacctgggggcccactgagggttagaggccaaaggtcagcatgctgggcagggctggaatgtgtcattactttggctggctggggacagtggttctcctggcagtggggagcagggaggaatgtatgggggtcaccaca

SEQ ID NO: 38181 - DNA, 353 bp, Homo Sapiens
gagtcgcgtaccataggagagaatctctggctgtggctggtgccagagcaacacatgcagtttctaacgggtcacctgccccaggccagaagctccggccactctccctgagccggccctcagaggctgccctgcctgtggcctggggctctcagcttctcctccagagcacgtggctggggcctctgatgttcgcgtgcctcaaaagatgcctggcggtgaagaaggtgctttggtggcctggccacagcaggcagccttgcactcccttgggaaggcgcctcccggaggatgcagctggggcagcctcacactctgttcctgttcattggttccctcgtgaaaattctctg

SEQ ID NO: 38182 - DNA, 384 bp, Homo Sapiens
ggtcaaagctgacataaacagctaaagaaattaacaacagagtctcagaagacaaggccaggggagccaaaaggacacaggtgctacacacccaggcagttgttgtctgctcccagagcacctgacttcagcagccacagcacctgctcctcaagcgcagcggcgcctttgagggagcacagcctggaaggtttacccttcgcagagacgcttgctcttggacttctggctgtacattctgagggttcaaatgaaggatgggacaatgggaaagcttaaatcctctggaaacgtcactgtgatcaatggcttcaaccctcctctacctcataccagttcactggagctgctaacactaagtttccttctttatccgcccatctc

SEQ ID NO: 38183 - DNA, 395 bp, Homo Sapiens
ggatggtgtcatgaattctaaaaggctttatcaaagtgggtgggattccgagtcaggaaagggcctttatagacacagggaccaatccaaacctgtgcaggagtccacacaggtcagatgtgggacagcagagcaaaactccagctgggaagacctctagccccacctgttttgcaaacgggaaaagagccccaggagtggctcccccacggttgagaagttaactcagccccggcttcacaaaccccacgtgcagtatggcagttagtatttttgggcaccacctttcgggtgtacctgtctcctatacaccttgtgccaataggcacaaggcaagtctcttgcccagaaccagtggaaagcaaatgaattcgttagcctttacaaaaaacacc

SEQ ID NO: 38184 - DNA, 510 bp, Homo Sapiens
agccggtaccgtcgggcactggaatgttgtgtccaaggtgtggcagctggagttggcctcctaattatagatgtgaagagaattacggtctgcagagggcctggcagtcctggtgctgacctgccgaagggccagatcttggtggtgactgcaacttctctgagttccttgttggaagcccccttctctggctctgcagcctgccaggcttgtggtgagtcatcctgctgctgactcatttggaccttcctccctttccgtcaggtttccaaatctcaggcgtgggtggtttccaatgggctgtgtatttcctgagaccctgagcggaggcagacaatgcttatgtatctggagacaccctaaaacaccaagcttgcttgcgttggaagtcttccagaactggttacccatattttaaagcaaagcctctgatgcccgtcagtcccaggctgggacagtgggcacacagaacatactttgctgagctttccattcaaccaaggggatcct

SEQ ID NO: 38185 - DNA, 440 bp, Homo Sapiens
ctgctccatacagtcgcattagaggcatagaagtcatactgaatgctgaatagaagaacactgagaagagcaggttataaatgaaggttttcacataaaacagaaaaatagacaaaatcatcggtaagaagctagctttcgaaaacctccctaaaagtacacggcacggagaagtggggtactgggatgtcctggctgctttctgctttgggaactatccaagtggcacatcaccatgtccagcttaggtgtcttgtgaaaccttacttcctccacataaaaaggaaggaacggtttccaaagctaatgtttccaggctctgcctcgtgacactcaagtggcctcagatatgagcactggcacagagtgatgctggagaggtcacttagagagaagctgccgggccaagcacacgacaatcttggccctaagtgctcacc

SEQ ID NO: 38186 - DNA, 393 bp, Homo Sapiens
cgggggacgtggaatggcgcactcccacgttccagtatgcctaattacctctacaaaactctcaacccactctctgttaaaccagtccaacccttctttggcaaaggacgctggcttgcatttctctatcagctaccacttacgttgccactctcattcccacaaaaaactgggtagttactagcttaacctaccaccctcgtaatgaaggaaaaagccccttctaactcctacatatgcagtcattggccaacttctccatcaatgaaatgaccgaaaataccctgacaggtcgtgcagttcaacttttacgctcctacatgtccagcctcacccattacacaagtaatgaaaagcccatacacggccctgtgactacaaacgctgtcttaa

SEQ ID NO: 38187 - DNA, 453 bp, Homo Sapiens
aggggatcgtggaagggagcctccggagctgccttcaatctgggcctgttaggggagcgctggctttgatgtgtgagcgcaacattctgcttctatactcagaaaggagccggccttgaatccgttccaatgtgggcaagtgattacaaacgccctgtcttcagcacagagaggagcacatggtcctggtctccccgtgggtctgtggtcctggcaggtgtggctgcgggggacggcagtcgtgtcagtgttccctggggtagttgctgtccctgaggagagggaagaatatctcgcggcacacagtgtggctgcctgccggaagccccactatggtgttttaatcctcgagagagcctgtgagcccattttagagataaagagagcagatccaaagagaaatcaaaagctagtaactggccagggaccctggtagccttctggcgtacactg

SEQ ID NO: 38188 - DNA, 500 bp, Homo Sapiens
aggggcacggaaggtcagctgagttcagttccacgggcttcacaaaactcgcttctcaaataagtcatgctgagaacattagtattagtaatgagaatagcagtggccaccaggggtgcactcccaccagccaggcactgcgatgggcatctgagcaaacacccgtgagataggtatgatcatcctcctttcacagacacataaattcagaaccgtggctaatatgtcacaaagccacaatctgcgaccagcatcagctccctgctccctccaggctcctgatcgctcctctattaaacaaaagagccaacagacccgagccgaagagagtcaaagaggctcgggcctaggatgactgcaacaacacctggacgcaaagcctgggtcctggacacgagcgcatcctgcccccccggtataggctctgatgtcactctgtcacagtaacacacatgtgagaaacacgggtggaaacggtccctgctggcacattgggacag

SEQ ID NO: 38189 - DNA, 414 bp, Homo Sapiens
cttatgtaaaattacatatacagttatccatctgtatctgtgggttctgcctctgtgtacatggagggctgactgtactgtaattatcttggagataaaaagtgttatgagttcctttctaagaagtttggaattgctgttttaaaattccttatattgactttaaagttaccattacttgttgaagactaataattaacatgtactaagcatgtactgtatgccaagcactgttgcaagttctttacatgtattatcttagtttaccttatgagaaaggtagtactgttttcatttttagagaaggggaaaccaagctacacagaggttgaataacacagaggttgaatagctagagtgtggtagagccactctgactccagaacccaggcttaacaggggactcacaaccaa

SEQ ID NO: 38190 - DNA, 450 bp, Homo Sapiens
aagggtactgtctctcgatttcatgtttttatttgatattgctagcatgtagaaatagaatggtactgtgtatttcttgttttcacaggattattggtagcatgcagaaataggatggtactgtctttatttcttgttttcataggattattgcagaaataggataggtgtttgtgtgttgatcttggattctgtgtccttgctgaactctattaaataaagtttcttggaatttttgatagattccttgtgattttcgacatggacacttacaccatcttcagagagagacagttttattccatttcttcctttctgccctgtatgccattccatctgcagccctcagcacgtcgctcttgatcatgtcagccttgagttcttggtagttggcctttatcgtgttgaggatgtttctccacactcctgttttcctaggaatttttatcg

SEQ ID NO: 38191 - DNA, 442 bp, Homo Sapiens
aagagagacaggtgcacgaaagcagaaggaagaaggagactgaagtctagtgtgcctgcgggacagtgaggggctggagtcgagagagagggaggagaggaaaaaaccaaggctgaaaatttggatgaagccagaccctggaggatcttcagcagtcaggaggaacatgcatgcaaagccagaaagaagatagttgatggtcagggtttcagggcttgctggccaatgaaaccctggtcctgtaattctgtaagctccagaccacttcctccacagccacacctaccaacccatctaaattgacagccccggaggctgggggcacacggaggtcccactgcgcactattctgtgagtctggattgagtagcactgccacggggttcacctagcccaacacattcaggtcatccggccgcacacccacagtccacccttttct

SEQ ID NO: 38192 - DNA, 488 bp, Homo Sapiens
ggactggaaggagggagtcgggggcaagtccagctatagtacaaataactcgacatttaggccatatgacctggcaaatcccatgatgccagagacattcctggtagacaaggatgctacagagtctctggcaagccctgagtgcataagtcgtaacacagacctttaggtttctggagctcagtcagtctttccgcagcagataactagtcactatttagagagtagctcctcacatcagagcacatcaactatgtgaccagagctatccatcatgagctgggtattgtcagatccaccaaacccaaagaatagaccagcatagtaataacttatgttacattcaggatggtgcccaagccgttcctagggctcccacttccatgaaaaggtggcccatgtaacttacctccaagacaccagcaccttcccctcagctcatggcttcgttggggtcaccactactatcaggtgacagaggaggaaaa

SEQ ID NO: 38193 - DNA, 509 bp, Homo Sapiens
taccgtggggcactggaaggtaggcaggtacgtttggaatcatcatagagacgggcattgaattggcaggaatggaggagacggcacagagagaatccatgtggagcaaaaggcgggaagcagagtctggtggaagtatcagtggtgtgggcagaagcctggggcaagaggctatagtgtgagtgggttgagtggaaatagaaccaacaggtatagcccactttttcttaggaaatgtgggaaaaggagggttgagccaagggtctttgtttttctctgacatacaagagtcaatttaatggggtagacctgccacacgagtcctgctcaggtataaatctggtagttgcatgttcagcactgcccggtcctgagataataggagtatcttagcagtatctctggatctctcccacctgcgaatagggtgctgctgtcatgccatgtctgccctgggagctagagcatcatgctccaccttcctggttaactcgccctgggtatggcct

SEQ ID NO: 38194 - DNA, 511 bp, Homo Sapiens
ccgtggggcactggaatgaagagcttggagagaaaccagggggccagggacaggcagaggggcggtaaggaagggcaggttctctggggcctgcacaggccaggacgttcctgtctctgttgagttcggactggcaggttctctggagcccacacaggccaggacgttcctgtctctgttgagtacagaccggcaggttctctggggcccgcacaggctgggacattcctgtctctctcgagtacagaccagcacatggtcctgctctctggcccctgcatcccctccagactgcgttctggaagccctgcccaggcctcacacgctgccccaagggtctttattacctggggtcttctagcattttcctctggagaaactcaggaagcatcctttctctgcatcctttctctttgggggcccagcttctccttttcagtttgacagacacagcctgaatgcccaaggcccctctgcggagacttagagacttaggctggtggagagggtt

SEQ ID NO: 38195 - DNA, 455 bp, Homo Sapiens
cccttacatttcccaaatgggggttgaagaagcgggcaaccgggaaagggaccatttggtccccctaaagccggctttatttagccgaagggccagaaaagtggcatcctagcaagacagaaacctttggattaataacggctctattccactcaaactctgtaggaaaaaatacagcccaatccccacccaggccagcagaggccgtgtggggacgggcctctacttccacactaatgaggttataatgacgctctccaaatcccttgcgggggtggtgtctcagaagggtgagtaaggatctgaggattttatccccatgggctagggactagcccctaccttgtggcatcagagaagaccatgggcagagtcgggacttcactctgccaggcagcagtcctctctctctccctatgggagtgatcagaggaggccttgtagagagtcaggac

SEQ ID NO: 38196 - DNA, 517 bp, Homo Sapiens
gagcagacttagatgaatcagagaggagtgagtcagaccatgttgaacttgggatattttgattgaagggaggaaagtatgggaaatcttcctaggagggcattaaagttaagcacaagtaatatatagaaatgtctgcataaccaggacaatcatctcaggacagcatggtcaatgtgttcattcatctcaggacggcaaggcccaggtgttcatccctctcaggagagcatggctgatgtgttcattcatctcaagacagcatggcccaggtgttcattcgtctcaggacagcatggcccaggtgttcattcatctcaagacagcatggcccaggtgttcattcatctcaagacagcatggccaatgtgttcattcatctcaggatggcatggccgatgtgttcattcatctcaagacggcgtggccgatgtgttcattcatctcagaacggcatggctgatgtgttcattcatctcaagacagcatggccgatgtgttcattcacctccacaac

SEQ ID NO: 38197 - DNA, 449 bp, Homo Sapiens
tctgatgtgtcattcttcatgtgcaaagtgctgtggtttttgctcttctaagtgttgttgttctaagttactttaagcatatccttattttagatacctaggaagaactaagtgcacacatctcataggtaattagtctatcttgaagaacgctttttaaagtggtgtcaacaatcagaaagcttagtatttcttggctatacacatttgatttaccaaaattgcagaatatcttagaagactattttacaaaacgaaatgagggtaagtcatacatttcatgaaaaaaggaccatgtatttgattcaatctgtcatttgctatcaaacagttgtagtggctttcttgttcacctcctcttacatacactgttgaaggttttcatctgatccttgttgcaaggtcagtcaagaaagtgctcaacaagtcttggaggtttctgtgagtgg

SEQ ID NO: 38198 - DNA, 579 bp, Homo Sapiens
gagcggtccggacgagaggtgctgatatcccatagtgctgctcagctgtcacttaacttatgcatttaatatttcacagatttgtctttgtcaactgtaagttcatccttagagaccatatcttagagttgcagtagtaaagaaaattgtccataattctcaatacctagcccatgcataatttcagaacaaggtatcctttctcaagtatacatacctaaatattataaattatggtaattataaccaattcagtatatcctgcataatgtgggtaggtgtcaagcaaataaatcaagcacacaaacaccaatatgaagactctgatagtaaattgtttttaatttaaattttctgtcatgtaggttcaacttagttctataattctgccctcactctcattagaactttctctagcaatggaagaaatgagagatctaacaaaatgctctgtttttaaattgcaaagttgtttctaggtatcagaacatgtgtgtttaggcaaattaatgtaaacagggataaaataaacatctttccatcaaagaaaagaatttgcagttagaaggacaggaattc

SEQ ID NO: 38199 - DNA, 442 bp, Homo Sapiens
tcggcaacttgctggctcttaacttctattttagtctgcctaaaactgtagcagagctgatcctgggcagctgttctctggtccagatctgttaagcgggggtggggtggtagagcaccagactaacatgccagtatcttggtaaaatctcagccctttaacaaagggccatgcagcataagatcatttcatttgcatgtggctgaataagtgatggaaggaaatgatagtccagttccacatagagtgtgttggcacataaacagtttgatagccttgttatatattggaggtgctgatatatttttgtatatttcttagtgttactgtagttctgaagctattggaataagacccaattgaataaggttgaaaccaggagattttgtttgatcttacttagtatgagtttaaatataaacttagaatttctctatgttct

SEQ ID NO: 38200 - DNA, 372 bp, Homo Sapiens
gcagcttcctgaggggaacggtgggatgagacccaggctgacttcagatgtctcctgggcagcctgtgggcctccatgcccacccatcttctacatttctgccccctgtcgtctctaggaatagactggtgactgggggcagggctgcttctgtgtgcctgctggaggcttgtctctgcttccttgagccctttcccactgtcaggcttctgagagcccagcctgctggaggcacgtgtgaccttggtctgtgtccgatgggtgcccctttgcctttgtactcaatgttccacaccgacaagccccctggggctatagacagaagctcccctcaccccaccgaggcccagcaacttcaaaaccctcagaccc

SEQ ID NO: 38201 - DNA, 540 bp, Homo Sapiens
gtctcttcgcgtcgctgctccccgactgtgcgctgagtcgattttcgaagcttccttcccctctgcgtcgttctggtggtcaggcctgcgtgtgggtgtgcgccgtgcctgtctagcctcgatgtgggtcctcctcctgagtctcccagtctgcttgcactgttgggccgggctgtcgtccaccgaggccgctactgaccacctgcggggtgtgtgccaactcagacgcctgtagccgctttgcaagtgcccatgtcgccctgggaagcccagtctcccagaagcaccaggcaggtccctggccagcagcttagcaaccaaaccttggctgaaaggcagttccatggagtgggatctaggggaacacaaaccagagggaatgggggcatgactggaggactgtcgtccccgctgttgttaattaagtagtaaaagggattgagagctagctatggctggatgtgactttagcactttacattcaccttatttaattcttacaattacttatgaagtgatcgattcagagtggccccaagc

SEQ ID NO: 38202 - DNA, 367 bp, Homo Sapiens
acagtgctgatatactgtatgtccctatagcacctagcacagtatcttatacaaaagagatgatcaagaaataggtgtggattgaccaaatgaatccacctgctagcactgcatcaagaaagacatgttagccaagtacacctaaattagtttactgactctttagcctaaaaccctttgatggctttccattacccaccttcagataacattcaagaatcttctaattatttagctcctacctacatttatagcttcatctctcatcaagaattttgcaagtatttggggcataaagtaataataaagttgatttttgagaggaaaatcttaagaatcacacagaatgggataagaatggagatat

SEQ ID NO: 38203 - DNA, 365 bp, Homo Sapiens
tgccggtaccagcgctggagcgctggcaaacagccacagcagcacagggtgaagcaccacatcaagagcgtggtcagcaccgaaaagtaccattgcagggtaaacgcctgggcgttggtcagcaggtagtcgcgcgattcgggcatgaagatcgccatggcgtacaggagcagcatcaggctggcgctgagcagggtgacgatcagataggccatcggggccagcaaccaaccgccgatacgagagtattcagcttgagacataaaggcttcctgattgaaacggggatcacaggcggcatagcttagcgggtaataccggcttcgtcatctcaatcaaccggatagctcggcatcgcggcgggt

SEQ ID NO: 38204 - DNA, 358 bp, Homo Sapiens
gtctgcctctgctctggctctcagtgggctgctgggctccccctggctccccgctggcctccctgtagcaccccatggcctcttgtggcacaatcgaggaaccctctcactccagccataagctccgaactcctgtctcgcttgcttggttactgacttcataaggcagtggggctggaccaccgctcagacttcttccccgtgggcctcagtgacctctgtcatttacggctggaggagaagggcacaaagggggatgctggagaggagaggagagatgaagccccgtgtatttcctctaggaggaattgagcttgcataatgtgacctccttgtgcaagcccacagtcagcagacg

SEQ ID NO: 38205 - DNA, 417 bp, Homo Sapiens
gtaactgcctctaccagcaggtgatgagcactaatccccagagaagagctgccggccagggtgtgctgtgctgctgcgaaggagagaattgaggttgctgggacctggctggggagcaggaggggatgaggaaggaaagcaggagaagccagaaaggagggttcacaggagccagagctgaggcgggaggagtcgggtgctctgcccgagagctgtgtgtacgtccattttcaggttcttccaggaactcagtgacacctgggtttgtccagttccaaagcggaaagttcagattcaggggctgctaccctagcaaactgtttttccccagcaggggaatgctcgctggctccgcaacgttcagttgtactgagggcagaattgtggtttaccctggcgctcttccccagctgagca

SEQ ID NO: 38206 - DNA, 396 bp, Homo Sapiens
ggtagctgcctccagctacttgtttggtgagaatgtgggtcacagctgcagctacattttctgcaaaatgccaatgaaataatgaaaggatctgatacctgcttcatggtagatgcaggcctgtgtggttgagacctcccaaggctgtcagcgtgagcacagagccgcctcctgaacagacgactgactttgttggaagtgtaaatgtagaagctttctcatagtttcctccctggtctgggcaccagaaatcatatttaaaagttggtgtttgtgtaagaaaatatctttatttgggggaggtacactagatgaatgacaggatgctgagaggggacaggtggagcaagtgggaaacgttggcggtggttgaatcagggaatgggtacatgggag

SEQ ID NO: 38207 - DNA, 370 bp, Homo Sapiens
cgtctgaccctagacatgggcttcagtgacactacagcactgaccactgtgcaggtaaaaacgtgaatcatgtgatgatgtctcccgtctttgggtttctaacctgatactcctcttcgcaaccagagagattgggtaagtgtgtatagttgcttgtgattaggcctggaactttgtccatgcttattactgacgcagtccttcccatagtatctgagaatgaatcatttggggcccagatatcttgctgagacaatctgactttgtcttccttcctatgagatttctctcattctgtcacaatgttgtcttcgcgccggcccagccctgaaaatgtgtgagtttctagcattttcattttttctctatt

SEQ ID NO: 38208 - DNA, 412 bp, Homo Sapiens
ctctctgggctgcattttgcagcccagagaggctggaagcctggctgagcttcaagtcaaaaacagcctgggtgtatccaagggagctcctgaaagagatgatgtcatcctggaagcactaagcctggaaagggacagtcaccatctgtgttcctggctggaaggctgcacagtgtgcatgcgtgtgtgtgtgtatgtggcaggcacctgtaaagcttatcttatctccccatcaatctcaccagcagcacctagactcctaccaaggaccactccccaccaacaggcgggtggcagaggcaacaggtcagaacgcgctgggccgctccagtgacaagattgacattggccacccagctcttatgatcacttctctgcagaaagggatcattttgtgatttacgggctgagt

SEQ ID NO: 38209 - DNA, 369 bp, Homo Sapiens
tggagaacattctggggaaccaagaaacaatcccgggggctcaggaacggggagtgggattacagaatagtcacaagggagaattagagggaccaggagggacaggtgatcacacggtattggacacagggaaagggagcagccagaatttgtaagggagcagtctcgggcttggggaaatagcaagagagatcagggacagcccttagggttggggagcagccacagggacacagaatagccagagggagcaagaaacaagcccacgatttagggaatggccccgggaaggatctcccgttggaggtcagggtccaggcactcactgtgcattcctcacagccaacagtgtaggtcttggtgaagccc

SEQ ID NO: 38210 - DNA, 394 bp, Homo Sapiens
aatctggagaggagagggaagacataaaaggggagaaggctcaggaagacttggggacagagaaccagagcagtgactctgactctgttctagctactctgagcttaagaggaaaagaagagagaacgggagcaagcttgtagggcagcaggcatgcactattaattggagtggaggggcggtcaggaatgagagagaacattcttgcaggaaaaatgagggaaatgagaggatatgcatgcaacaagaatgggggagagaggcagggcgggcatgccccacgtctgtcctcccctccctttcccagaagacaaatccagacccttgtccactgctcccacaggaatattccatggcatcagaaagttcccactcccttccttaccagagtagg

SEQ ID NO: 38211 - DNA, 419 bp, Homo Sapiens
tggagctgctcttgcccatcggagggacagaagaagctctgagggagttttgctcaatgtgcaagtccagatgaagcattttctgtaaagctctcgcgggctctcctggctccttctttttccaacctgaacctgtattaatggccgtcctggagccgtggtgcaagcaacaatgcgggccaccacctcgagatctatgtcccaagggaaacccaaattctggtcatctactccctagattatccacctcctggagaaaccagagcccagatctctctccctgagataacccaggctttagaaccaaagagctgagagaccctgtcccttcagagaggcacttgcacctagaggagtctctggggagcagatggggatatgggacagacgcatcttgaaaaagcccccagatgcctccc

SEQ ID NO: 38212 - DNA, 447 bp, Homo Sapiens
ggggacagggaaggctagagaacaggaagggtctatgacaaagggaagaagcttgccctgagtgctgcagcattttgcttagaggatgttaaagcaaaggaggagattctggcagctgtgcggaagacggactgggatggggggccaggtagacaaagagacatcctaaggaaactgaggcccactgctaacacagttctcagtgtgcttaagacgatttaaccttgtggaaaatactgccaggaggatattttctaaggaatttgtttaccaaagaatctgaacccaatgatgaaccaatctttcgctaacaaagctagagaactcagaaccatctaagttagcaagtgttaaaacactggaaagcaaatgtggcaacagcactttcctatttgaccataatcaacatcaatgtggaaagaaaacaaacctgacagcaagtgagga

SEQ ID NO: 38213 - DNA, 425 bp, Homo Sapiens
ttattaagtattctttattatgggacgtttaaaatctgggcctgtctgcttttttcactgcagagttgcacagaataaaaaagactatatgcaagtctcagctctaaagtaactctgcgctctctgggccccctcccttatagctacagtttgctgacccagtggtcagcttgaacttagaacaagtgaatgtatcccaggttcaataaaatatgcttcctatttggtttttgctacaaacaacgtcctttttctgcctcatttcatagaactttctaatctaaaataattggccttctactcattaacttttttcccttaaaacttcagtctgtctctgttttgcctgtgaatctaaatgactgtatataggccaaatgtgatcgggtgctcaggggttgatctccagtttgcttggggatgca

SEQ ID NO: 38214 - DNA, 382 bp, Homo Sapiens
ttgtctggacgaggttgtgggggaggtgagggctgggtgtcccagactggcaggcccacgaagaagggaatgaggaaccctcttgtgcatgggcctctctgtgacgggcctcggcacaggacccagtggccagcagagtccccgcctcgggactgccctggctctaggcgggcctgttatcctaggatgggatgcctctggccactggggcagtctcccatttggccaaggctggcctggggtgggaggacaggcaccaggcagggtgtgagcgacctgactgcccacctaggaaggagaaaagaaggctgggcccttcccagcttggacggaggggacggacaagcaggcaggtgcctgatgcatcttgctgaccccaaca

SEQ ID NO: 38215 - DNA, 458 bp, Homo Sapiens
atgtggtctggatcagagtctgtgtccagtgtatatttgcattttacatttagctagaaaaataaaaactgccttagtacaggaagatggggaaggcagatagcctctgctctaggagcttaatcagcaagtcaccagggctattttcagagcttccagtgagtttttggctatgctaagggagttcacgagccacgtttggcagcagagattggagaaagttgttccacgtaagaaatgagaggaattcggattttgccccttagaagaagacaacaatgaagagggggaaggggattagctgaataacatgcaaagagtctgcaccctgagttatgaaaatgatcaatggatttttaaaaagtcataccagaaatgtctgttgtttagtattatttagtgtttagtgttattgctatgatgtaaagctcttcatttcttcaaagcttcctaagttt

SEQ ID NO: 38216 - DNA, 390 bp, Homo Sapiens
tgtggtctggagcctgattcaggcctagtttctggacaagcatttctagacccaccctgtgcagaaggcaacccaatacccagaaggcaaagacccagtcctggcaggattcaccacctgatgactaaagaactgttggtctttgaatgaacatcagtgatagccaggcagtagtaaccatgggccttgggcaagatatagcaatatgctgacttcaggtgtgatccagcacagtcccagctgtggtggccagggaagtgcttgcatcacaacttccccaactccaggcagcccagcatggaaagagaggctcctgtttggggtaagtgagggaagaaaatgagagatcctgcttggtaatccaggggattcttctggatcttacccaag

SEQ ID NO: 38217 - DNA, 394 bp, Homo Sapiens
acaaggaaaaagtaaccatattcaatattcccagaacattctgttatccttaacaaaggactgaccttaaggaaaattattttaccagaggctaaccaacagcgggtatatcaaagcctgaccaagtggaataaggaaaatatccaactagggttctttctctagctttcttgttccacctaaggggggtaaaaaagctgagaagcatttgtaaaggtgaaagcccaggggcactgtcccacaaaaaacctgagcctaatcacaggactacatacagactattctccccgccccacaacactcatcttactacaatcaacagagctcctgtaaaacaggaaatcacaactgaaagaatggtaaggctcaggctctatttaaaaaggagtctcat

SEQ ID NO: 38218 - DNA, 355 bp, Homo Sapiens
tgggccggtatctacatctcgcctttgtcacccttgcgagaacaggtgaggcagcggtgtgttacctgctgacagcaagatgggagtcaaggtccagccgttccgcccggcatacgagcttgtggagcagccccctttgaaggtctccaggtggacttcacggagatgccaaagtgtggaggtaacaagcatgtactggttcttgggcgtacctactctgggtgggtggaggcctatccaacacgaactgagaaagctggtgaagtaatccctgtgcttcttcgagatgtgattcctagatttcgaccgcccttatggatcggctcagacaacgggcctgcgtttttggctgcct

SEQ ID NO: 38219 - DNA, 458 bp, Homo Sapiens
gcgcagcagtatacagccaccctcattgagtgtgtcatctgctccagctaggatattggctaataccgcatgtttcagaaagaaaaattcgcagttctatttatttttttactgtggattgaagggagaggcaaccaggtatatggatgaaggagtagggcctggctgtcaccactggtgttcacaaaaggctcccgtttaagtcctcttatattccaaatgaggggttataggtcgagtcagggcgttgctctaacagaagcaaaaccaaaaatacacggccgtagatacaaccctgttctggtacttcctaattttgtgtgtacatgtgtgcacctggagcttcaagaaatgaaaatggaaatggcctgagtgtttctcagccctaggatgaggctgtttctgtgatttagggctggaggttatgaagacttggtttacaatatgcacagtacaga

SEQ ID NO: 38220 - DNA, 397 bp, Homo Sapiens
atcagcagagagcagtatacagatagctgaaaacttttgctccaagataaacccaattagtatgtatatggaaaattggtattcttgtacaggatccttttattcaacctgtatcccattccatataaacatctgacctggtttctctgtcgccgcaaatccttccaggctagagaccatggataagtttcaggaggtctacaaacctccaggaacagaatgggggaaaaaatgcacctatacaccctttccccccgcttctcaaaggataaaaagataaaaaccaactcctccaggacagtagagcctggctaactcaagtccacatagtccagaaagaacctcataattaatgatgatgtactatcacacagtccactagcacccacgtctacac

SEQ ID NO: 38221 - DNA, 404 bp, Homo Sapiens
tgcagtggaactggagccaggacaccgaatggtccattgaggtcccagcgacgagccagagatcctcatttccaagggatgtctttgtcctcaaggacccagtcttgcagctatctatggtgtgggacggtgcgtccagggtctagaggcctccccatccgcaagtgggtccggggagtcccccagtttcgcagcagcccgtaggtcagggcaggaacccctggccaactaagttgtgcctgctcaattctcagccgcctctggagcccagtctctccctcctcagtagctctgggtctatccttctgcctcatcaatgaccatcctcagattctctgcctctctgtcggagtcagtctctcttgttctgtttctctggccacctccatctgtccctgtgttgg

SEQ ID NO: 38222 - DNA, 419 bp, Homo Sapiens
taagggactcatgaaaggtctctatgaggaggtgacacttcactcttagtaaaacttgaaatgtctcattttgcactctgaggctcccaacaggtcaaaggcaagggtggcataactttcatgaagaggggctctcttacctcagtcagcgctctgggacaaggacatgcctcgagtgactgcctcagtgagcaagtggccccatctgatgcaccctgttagtgacctggcagcagcagcaacaaagtcgaaagccagcagccccaggaagtacttggaccccctgctgggaggcctgtaggttggtgtggcctgcctgaagggcagcttggaaatacctgccaaaggcgtaaaatgcatatgccccctgacccagcaaatcccaccacgtggaatctactctataaaactccagcatg

SEQ ID NO: 38223 - DNA, 371 bp, Homo Sapiens
tattaaggaagaagatttctaggcgtcgtgggctctgttaaacgatcaaactgtagactcttaaacagcattcacattgtgacatccttcccatcagacaaggttgtgcacccagttcgagcttcatctgtccccctcctcctgtcccacagcaccctgccactggcctctcctattcttgtagctttgctttcatcagggtccatcagcctagatagagcggtgaaggaggtccattccccactgtgagggagattcacctggggaggaggccactggcagcagacaagaaacagatcttagttctcacatccaaataaatgtcggctttcaccctcctgtcccatcatcaccagtctgggtccagacca

SEQ ID NO: 38224 - DNA, 498 bp, Homo Sapiens
tggagccggtctttcatcggtgatgctcatgtacacccaggccatgcgttgtctaagtgggcccctttagtaaaaaggcgtcacacgctgctataatcagggcgctgctttaactctgcaccaagtatcacttgacccgagtggagagccatcttcaggcagggctcacgagccgccatgccctgtaccctgagctgctctgcccggggtgtggcaggtcatgatagagttaagagtcactttgccactggacaatagttcagtgacacgtggctcctacctccctgatccctaaatccttcttgcctcctccctaaaggagagctcctgagtgaatttgttggaagcaacactagaaaactgcaagtctcaatcttcaactcacagaatcaaatgttcctgtgaggtcctaaaaccaggtctgtcccagcaggtgaactaaacagggcacagcaggatgagtttgcaggaattttatatatagcaccgattaaggca

SEQ ID NO: 38225 - DNA, 435 bp, Homo Sapiens
taatgatggatgtatttatagtagagaagcggattcactgggtggtcaggctggtcgtggaactccgtgatctcgtgatccgcccgcctatggttcatgaagtgctgggattacaagcgtgagccactgtgcctggcccttataaggattttatatgcctttagtgtcagttgcagtgagtgtgggaagacactttggcctttccagaactaactataaatggctttcaattctgaggctgatgttttctttaaatcagctttgcaatttaatgatcagctgcctcctcttaagctacgtctggctttttatcttcgtttaactgatgttccagtggatggtatgaataatagtctgtggtttggcatttggtacttttggacttttgcatggcaaggaagttacatcagcaagtgagtttgaggtcttggaggg

SEQ ID NO: 38226 - DNA, 416 bp, Homo Sapiens
tatctgagagtggtaattgatgtgcaagcaattcaaagtggatggcacatgtatatgtgtatgtttcatgatatatatatatgtgcgctgtgtggtgtcgagcactgaatggtgaaggcagagtgagagaggtatttatagaggatccgtgtcgctctcctgcaaaacctgtgtcacgcggttgcccagcctccctggaatgagcatcagtcaggtgtattatcatgcaatgaccttgggactgttccttctggtctaaagcactgagcacctgagtcatgagggtgtccaatgagcagggaggtcctcatgggctggagcatcagggcaggggccatgcagagcagacgcacctggagcctgacctcgaaccttcatatggatccccaagaactagcacatggggagagagacct

SEQ ID NO: 38227 - DNA, 368 bp, Homo Sapiens
cagagcacagtgctgggattacaggcgtgagccacgtgcctggactacttatctgttaaagattattggatctgtttccctcatgagaatagatcagttataggtaataataagcggatctaagctaaatgttttgaatcaatacctacaagctatgccaggctatcttcgtgggctgcagatcaaccatttcgtccataaaacagaaaatagcatctccagacaagggctgaatgcagtgtttctcacatggctcagtcccctcttcaaggctctgcctccccccactggcataagccacagtatattcttcttacagagtcctcgagatcatgtagtcaggtgagataaatgatgcctttctcctc

SEQ ID NO: 38228 - DNA, 508 bp, Homo Sapiens
ggagagcacagtgctgggatgcaggtgtagccacgacccagcttaaatgttatttttactgatggattacatgattaaaaacattggaaaccactgcttccgtgaaaacaacagttataaagtcaccttttgtgtcacatggaataatgtgcaggttaaagggcatttctcctggggttggattctggtgtctggaatgatgagcaaggtttttagatccagtgagagccccatggaatactgaacatagatgctgtttgagaacatccttccccagattcctgacccctacatcctgctccagtgggacccgtggaagatgcataatctcagtgctgacgtgatcccgaagggttctaagagacgcgcagtgagtgacggggagaagtgaggagacaggtgggaccctggagggggacctgtggaggtcatgactgtccagagactcggttctgcggggcgccagcctttgagtcctgtgctcgtgccggggtaccgagcctcaatc

SEQ ID NO: 38229 - DNA, 450 bp, Homo Sapiens
taggtgtctagaggatcccggtagagctgaagggtcctagagctcccgtcactgccctccaggaaggcactgactgcctggatggtgaaggcaaggcttaggaggcagcccctctagcagcatctgaccatgcagtacctgccctcactgaagtgctacaggaagccatcagcttggcccagtgctgagcacccaaaagcctgcacccagccccttcctcttttaaagtcaagattccagggaagagggtcacggacaggaagggggaggatccaaaaatgagacagcaaggccagagtagccttagttggtgcgaaatgcagaaatgaccaagctctgtgcaatggtgccaaagagacattccaattccctgcatccgcatagtcagcacagggccagcttggacccatctgcagacctggacccttcaagcaaagcacgccggctgca

SEQ ID NO: 38230 - DNA, 453 bp, Homo Sapiens
attagaggatccggagagcacagtgctggattaaggcatagccaccgcgcccggctatgggaggaagttctgacatggatggcaggtgtggggagggcagctgacgactctggagcagaggctggggccccactctggctttccctggccctaaaggaagggtggggtctgagagtgtggagtgcccgagagcaggggcagcacagacacccactctgagaccacttggttgtcccagccaccgggttccaggtgtctggggccaggtggggtttactctccaagcccagagtgacctccccactcccagccttgcccagagcaagtcttgctgagttctaaggtgaactcccacttgttccagaccagggacacagggtcctgcaggcctcccggagcaagcactcttgagagggcttctccacgtggccacaggacagactgtgcttcatc

SEQ ID NO: 38231 - DNA, 401 bp, Homo Sapiens
ctacgagcacatgtcacgatttaccttatatatagatgtctgtgttctacacttactacaagatacagactatcttgtctcagaatagtccttgcttctccaagaacgcaatctttcaaaagtgataacaataggagattctaaggaagccatccaatttggacccaggaagacagactgagctttacttcctgtttctctacaaccaggagcttacgagaatctcaaactcaccttctatttcaatgacttagtttctgcctgacacgtccattcactaaacctcagtttcacctgtttaaaaaaggggggcaggaggtgaatgggaagggtctccctgccagaggttatttactgggaggtattttctcccagtagaaaacctctgatcctggctgggc

SEQ ID NO: 38232 - DNA, 444 bp, Homo Sapiens
tggggtcattcttctttcggtacctattggggcccgcacagccatgaaaagccttgaagggctatggttgctacagctatgagtcctttacaaccaaactcagtatattcagagaagccgccaaggatggtcccttctaaattgtcggacactgcagttgccagggaagtcgtggttatcatccctaataacaaggtgcttcacggatgctagggagatgttccaggcgccagtggggtccccatgatctttgttgctaaggaaaaggcattccttagcaacaatgcctaggatgtatagaaaggcttttaggaaggggctttatttcctggtcgcagtgattattggagaagtgtcacctctagcaatacagtggctccctcatcactcatgtcgacagccccagcagtgggaaacactggcccatatgacgccttggtggcc

SEQ ID NO: 38233 - DNA, 463 bp, Homo Sapiens
ataggagtgacagaattcccagatggtgacatgcaagggttgagcagagtcaagagtttctcttggggacaataattgggccatagaaaccatgatcacattctgaataaaagtagagatgacaaggcctaacaaaatattttcctaatcaccgaaatagtcatatgaacaatgacactttgaaaagtaaatcacatttacctatatattaagtcagaccatttctatgtgaagtagtgactgcttaggaaagtgggacatacggtcacatcgccctgacatgctgtgggtgttatttaatttcattatggatatggtttaacaaacataaaagtacaaagaacagtgcatccatcatctaagttcaacaacatcaacattttgcccattccgtagaaacgtaaaaattaaatgtcaatgaccctgaagccttctttgtctgagggttttatatttttaaact

SEQ ID NO: 38234 - DNA, 436 bp, Homo Sapiens
cgaatggcatagtgcattagatggcatctgaatagttggttatcgtgtctgagagggaaaagcacattagaatataaaattaagcaagaatgtatcagagaggaattaaaggaatagcgtagaattagaacaagaggtatttgaggttttcagacaaacaggaaagagaatggaaagacaggaactagaattcgtgttgctgttgagaggatgtcttaagccacataatttgactttaatgtgctattttcaacgcttacatttcagttaaaaatataccaagtcactattaggtttctttagaactaagagtctagccactcagctttagcaattctcaataaatcctgatagcattgcaatattttcatccactttaattcttcattacctaaagtcaaatatttaagtacatgatcaccgtcaggcacggtgg

SEQ ID NO: 38235 - DNA, 485 bp, Homo Sapiens
gggggggtttcgaggacttcaagccagagaacgccaacgtgggagacacaggcaggagaacagactagtactatttccacgtggaaggggaggttcagagtagctggggagtccaagatctctcagtttcagttgagtctgaccaaatatccccatcccaaatctcagggtcacactttttctcattcagtgctttcaaatgagactaggtgtctgtggaattcaacttaagttgtaattctgcaactggcacatttacactctgatgttagcaaggtgaactccatggctataaaacataaaactttttactggggctaccacggaagttctctggttctctcatggtaaatgtgagctgacagtttagtgatctgaacttgccgtttttattctataagtgctccagtatattcagaagaagccacagcttagcacagtctttgtactcatcatttctgccaaactcaaatgtagccaccatt

SEQ ID NO: 38236 - DNA, 353 bp, Homo Sapiens
ggctaagcaagataggcttcttctactaacacagcttagtaatcctctaacttggtgacattagttaataaaccagtactaaagtaattctgtagcacttcagttactataattactttctatgtttgagccttattaggaaacataatccagaagctgtatcattttggcttaaatgatataaatcccttggggaaaaatatcacagcaagcttatatactacgtagtatgcaaacaaacttaaaaatcaaaagcaattctgcctcgactctatgtcaagcactgtctgatgttccttctacacaggatgtctcccttaatcttccaaaccatcctgtgatctatcttgtga

SEQ ID NO: 38237 - DNA, 407 bp, Homo Sapiens
tcatctgggggatatgggaaggaagttatgtgtgttaagagaacaagattattcatagaaggcaagtgagaggttctatcagaatgggggaaggaagttatgtggagtgtgtcatccttggctaggtcattgagaaagagagagcctgtatcgtcagtggcaggcactccaaaatatttgtcgacagactgagtggatgggtgcatgagtgaataatccacctccccacacatctctagtgcagacctcacaggtggaaggaggataggccccactggttgccatagtccttataaggaagggatttcaaagtcctggaatagaaggagccctggagatgatcttatcaacccaatcattgcatggatgtgagaatgaggtccagagagggcccatggcatatccaa

SEQ ID NO: 38238 - DNA, 481 bp, Homo Sapiens
agcggcgaccacgggccatagagtacagccacagccacgacaggtacctaccaggtaggagctgggatggggccgggctgagagtgggggacagggctagcagcagcacctgcaggggcccagggtcagccttcagaactacgggcctggcacctactatctagaggtctgcttttctgtcccttacctttgccatatctgagacttctcagcctcctctcatctttactttttcttcaggattttgttttctgtctctaggatcacccctatttcttctagatccttatccctagataaaaggtggttcgcaattccccttctgagtttcagactgcatgtggagccaccaagaagtcacagaacgtctcccagtttgaacctggcagcaaaggcctaacacacatctcccttgccagcaggaaggtttagtctcaggctacagattgagaaatttgctccctggtgattggccatctat

SEQ ID NO: 38239 - DNA, 473 bp, Homo Sapiens
atctcagataagtgacgggcacagacatattatcggtttccattcgcctacgcattatagccgggggcttaggtcccggcgtgctcagcgcaagacaagctttaccctgaaaacctggtcttccggcgagggggattctcgccccctttctcgctacttattcctgcattctcacttctgatacctccaaagtgggttacccttcttcttcaacggcctacagaacgctctcctaccaatccataaggattccacagcttcggtttataacttagccccgttacattgtcggcgcagagactctcgactagtgagctattacgcactctttaaaggtatggctgcttctaagccaacctcctagttgtttgtgaatctccacctcctttcccacttagttataattagggaccttagctggtgctctggggtttcttaacatggtctccaaaaagagcttgcccgtgagagag

SEQ ID NO: 38240 - DNA, 390 bp, Homo Sapiens
aattcctctctcacggttgttggagcaggcagtgaccccgggcatgggccattcacgggctgcctggtggtgggtgagggggctgaggccagcagcccctgtgaggtcacagcatcccctctgggaacgcagtgacgagctcttccgggtctgtccaggacgtcctggtgttagcaccaaaggtctggcagtctgggaatgcctccattcacccggggggagcggggtgggggcactgccttgtctcagcccagagctgggcacagaacgagtgcttagtagaccctggttccatgactgaatgacaaccaggtgagggaaaacagggagacaggctgtcggtgctcccccagagaaatgtgaggcctccatcgtgagagagggaaggat

SEQ ID NO: 38241 - DNA, 487 bp, Homo Sapiens
gtagtggagtgagatcagcgctgtgatccccaagtgctccaaagcgagattgcctgggactagcagccagccatctggactgctccaacaacttatgtaactggctgggttttccacctttgccttgggggatggggaggtgtgtgtaaggcaggaaacggacttagatcaaaccatcagtccactgtctgaacagcctgctaaacatttggtcacagggcttttcagccttcaaaagcagcataaggtgagctggatcagtctagcttacatgcagcagcagcaaaaaagcagcttgaggtcaaatggatcggagaaaagacttccaagtggactaatgcaatgaaagcctgcacgaggcctcttctatgtcaataaattacagagtaaaatgcagacagagaagaggatagcaaaatggaagcctttcactgagtcgggaacttttgaggtttaaaaagcaaggaatgggtgctgaattcattct

SEQ ID NO: 38242 - DNA, 493 bp, Homo Sapiens
gtctctcagaatacaagggagcactcaccgactcgatacactttctcttccaaaatggccaataatcaacagattcagcgtatatataaacacaaatttaacaaagctgaatatcagtgattcaaatatgggccattaagatgggctccatgaaaatatggcaccttttaaaaaactacatacatttgtgtcaataatatggttatatacttctcttggatagaaattttcataaaatcaaatttgttttccaatttgttggcttatagatgttcataatagtctctaatgattatttgtatttctgagggctcagttgttgtatctcctcttgggtttctgattttattttatcctgatggctttttttcctttcagatgaatctgatagctttagttttaaagcagcatttccaggatgtctgatatttcaaaagtctcttctaatgtgtattatttattcagttgctttctgcctgattgaacattattc

SEQ ID NO: 38243 - DNA, 451 bp, Homo Sapiens
ggatgcacttccgtgtacagatcaggtccccagccccagccccacgggcgatgatgcagcagcgcgtgcgtcacgacattttcacggagggacacagaccctggaggaatgcgaccaggctgagcctcacgggctgcccagaggagcaagtaacctgttgcggcccctctgtcctctcaggactactgtctctttcatagtcagcaaggggctgggggcctaggggtccacccctctggcagctgggaaatgccagcccagttccctggggaaagcactgaccacacagctgggcccccatgggacatcttagctcctgtccctcctgatctaagtgtgggcaggcacagcttttcatttatatcccaggcgccgagtactcatgggcatccagagcagtagggcaagactggtgagctgagtagattggacaaaaacatcatccagatct

SEQ ID NO: 38244 - DNA, 435 bp, Homo Sapiens
agtgtcatatgttctcatcattcacctcccacttataagtgagaacacacagtatagggttttctgttctgttctgtagttggctgaagataagtggcttccagctccatccatgtcccacaaaggacattatctcattccttttcatggctgcatagtatcccagggtgtatatgtaccacattttttaattcagtctatcattgatgggcatttaggttgattccatgcactttactaatatgaatagtgctgcactgaacatacggatgcatgtatcttcataatagaatgatttatattcttttgaatgtatacccagtaatgggattgctggataaaatggtatttctgcctctgggtctttgaggaattaccacactgtcttccacaatggttgaactaatttacactccaaccaacagtgtaaaacca

SEQ ID NO: 38245 - DNA, 383 bp, Homo Sapiens
tctacataaacgcttaatgtgtcactcatttaacccttaccagccaatcttgaacgttggacattcttctccccactatatatggataggaaactgaggcacagagtggttgaggaatgtgcccaagatcacaccactaggaagcaacgagccagggtgtacctactacaaaggctcccttgagaggtggtttccaaggacgggcccacgcacaggtacacagagagcctcagcatgcccagtgttctgcaaagcagccgggagtaagacgaagaaggctcagaattttcctgcattttccctgttccttgcccccggaagctgtgcctgaatataggcctttcactaggtagagtggtacactcagcccctcatcttacagt

SEQ ID NO: 38246 - DNA, 468 bp, Homo Sapiens
ggcgttgtctgagtgagaggattctagctttcaacgagattctcacggaatacatgaccagaacaacatggggtaatgacatgctttaggagccatgacgtgggccattttagttccttgaagtcctctagacttaggccactgtcagttcaggaaagatgccttctgaagattcctcacagagactgtacagctgttcgggatacataggattttatatttcatcttcagtgattcatgagcattacattgttccaaaacagagaaaggattatgtcattcccctgcataacaccttccatggctctccattccctacagtagccttgccaagtgtatgagatgctaattgaggtagactgtgggaggtgggtgtttccggtgcagaacaacccttgatatcaccttcacttcctgctatatggctgcgtatcgaaaggcacgttacttaacttcctgctatatggc

SEQ ID NO: 38247 - DNA, 425 bp, Homo Sapiens
gaaggagtcctataacctaccatatagacaggatggaatacagaagcagcgaatgaacatctggctttacccaccggatcagaactgtatgaaaggctgtctaactccagagactggtaacttttagcttaagaatagcacagatagggcaccaaaactgaccagggtcagtcgtagataaactaccttaaaggagcagaggctcagtaactaggaagatgggcaagaagaaaggggtacgaaggtaggcagatgggctgcacctattaaactttgtgtgcctatcaaactacctacatgtttgtattcactcaataaatcacacagctcaccttaaaacaccttatgaaatcatactctaaagtgggtctgaaacttcctcctttcacttaagaacatgttatggccaggcgcagtggctcacg

SEQ ID NO: 38248 - DNA, 437 bp, Homo Sapiens
accgctcactgtcccactgtgttgtcacagtgtactacatcattgtcagactcagcgtcggagggccatacacacttagattataagagttagtaacgtttacacaacattacaggtcatgaaacaatcctcattttcctataagttattccagtggctcacatagtccttggccacttctccttcagcatgcaatgaggtacaaccgggtatgggtttagtgcttgactctgaccctcttgccatcttttgtaaggttctgtgtctaaatattgcatttcaggcagctgtggtgttgccagccttgaggcagggttctggagcctgaagacatgtgtccttggcagtaacctgtgtgtagagccacctttctgaaattagacccagatgctatctcaaagctaaaagtcattttcttgacatcaagcatttttggc

SEQ ID NO: 38249 - DNA, 481 bp, Homo Sapiens
gtgagtaggaatctcttaggaagaaggagagatcatcagatcggctctaactccaaagttcactgctccagggaatctggaatgcacattgcagggcctagtccctcaggacggaaggagttaattctctcctgctcacctccagttctggtcaacaacattcacatcaaatccaaactgaaagaaaaagcagatcagagacggaaatctgctatcatggtcacacacctggcgtggtagtcaccagcgcactctctaggcagtattcttctaaaaagacgacgcaaaatacaccggagcacaattgttcagagccttatttcctcaatgactggagataagacaagatgcagggcgccaatggtctgaagtgagcactaaaagcctacaagtctctccttctcaattgcccactaacagaaatactttttcccctgtgtctcaactgcatttctacgactgtgtcagtatcccggggctg

SEQ ID NO: 38250 - DNA, 448 bp, Homo Sapiens
ccacgcattgccagcaaccaggcaaataacattacttatatagacccggtgcatccaaacaaggcacggcttctaacagcttcccataatctgcatgctacagagccaggaaaccaggaatcaagatatatcaggctaaaatacagccgcctcatctttgaggcccaccagctgattctgagaacctcctgcaccaccatggaaaagggattccctagccttctactaaccaaataccccagaagatacgatttcagctaaaaaagatagtggttccattaaccttaggagccaggaggcgagaccctgatccggggcgctctctgccacctaccgccagagccaacctccctgcctccctcggaacccccaacaccccagaacctcatgacccttgcagagccagcctgctgcctcctttgaagagaaccataagagaagcttcagg

SEQ ID NO: 38251 - DNA, 463 bp, Homo Sapiens
aactccactcacccagaggaggcatcttagagacccagatagcctgggggtatcctacctcaccctccacctacccaaggaggcatcctagagacccagatgcctgggggtctcctacctccccctccaactacccactttctagggctctcttaaggaggaaatctaaatctaactacgggataggaatcccactctacccgcaggcttaaggaggactcctgcctcattcaccccttaactccatctcactctgatataaagcagcgcaagtcaatatccaggcttagctggccaacagggagggaacgttcccatctcaggcctggtgagtgtctcctgtcctcccctcactcctacctccactgtttaaaaaatgattctatgatcctcgttaaagcacgagcaggaacattttattcaggatcatcacaagagatctctaggcaagactgccatggga

SEQ ID NO: 38252 - DNA, 404 bp, Homo Sapiens
tcacgaggaaggtcataaaagcttcattctagaggtacctcactgtactggaggacaggaacatccttattctaacgacacagagatgccaagaagcatctgaacaaacaggcctagctaaactcccttaagtttattaccagttagatcacatcctttgtgtcccccaatacatactctctgcacaactgatgcattcttatatccaaacctcaagccataacaatatgcagcatttctctagtttctcttgcggtcttacttttctgcaagcctccccatgtccatgccaaaacttcatatttgcacattcaatttgtcatgctctatctccttgttaaaacatctgtcttcttgttcgtaggcagggcaaggcatggggcatcctcatagcagtccgcacc

SEQ ID NO: 38253 - DNA, 423 bp, Homo Sapiens
cactccaacccaccaaggtctgctgtgaggattcaagagttaggaataaactgctgggcacagctggcactcagagctcccagccccatccacagacttctcatgtcaatttcccaaggtaaacttggggaacatcaaggcccagaaccggctgcagaggagctgaggacagagccaggatggaggccccttcctggtggctgatctttgtcctctcacctgggccacttcacccactctgcctccagtcacaaggcccagcaatgacctccacaacaaccaacatcacagcagctccaggagctcaagggcaccatgtctgtctgtccgttcacctagcactctgcctctgatggcagaccaagacaggctgccatgggttaaggccaggggctcagctgcaagaggtgcagatccccttta

SEQ ID NO: 38254 - DNA, 475 bp, Homo Sapiens
aatgttcttagtggcatctagcatggtgactcctttccagaaggttttcaatttacttggcccagatccattggaggaatcactatctatagtggttcctatagcagcaatagtctcacaaaatgtatttctttttttaaattttcatttctttacaaaatgaatttcttaataacactataagactatagcagcaatagccttacaaatgtatttcttaataagatctgaaagtcaaaattactctctgatccatgagctgcacaatagatgttgtgatagccggcatgaaaacaacattcatctccttgtacatgtccatcagagctcttcggtgtattgccaatgagcagcaaaatctttaaaagaatctttttgttctgagcagtaggtcttaacagtaggcttaagatagtcagtaaaccatgctgtaaaccgatgtaccgtcatacaggctttgttgttccattacgac

SEQ ID NO: 38255 - DNA, 406 bp, Homo Sapiens
ataaagcagagatcctgaatgccttcagacattaaggcttataaaaaataagacaatctccctagaactgcacatatgataccggaggtcatgcatcatgcatatcatagaaccataacctccttcactggagacagtgacaccatggtatacgtgtaaacctaggctgtctggaatctatctccaacctacttgtgacctatatgcaatcttctcctgcttgctcactgagacccactctgtgctacagaagaggctcccagctgtcccacctagacgtggattgttcctacaaccctgctactttactcatgctcttccaccaggaagaattaataatgtattttctgataccatttctgttgcatatatgcacataattcttacatacattgggttcaagttt

SEQ ID NO: 38256 - DNA, 512 bp, Homo Sapiens
cagtcttatgataagactcctcagcctcacacccctagctttaatctagtacctgacctatctcccttagtaacagacccggatcactgatctagggtcactgatctactggagcaactactatgtgccaggcatagtaaaaacacgtacacactggatgtctcccctaaaaactcaacatgtccaaaacaaaagtaatactactcctgaatcttaaggatatccattatccagtatttgtaaacagcatcatcaactacatagtggtaccaaaccagatacgcctgtgagacctctggctttctccccaccttcacatgcaatatatcaccttctaatcctctaactctcaaatctgctcctgttctccaactccaagggcagttatggtccttatgatccttatcagtcaggatgtgctaggttatgctgctggaacacactcaaacctcagtagttcaaaacagactttgttctcactcatgctgcacatccctcttggcagagggaaa

SEQ ID NO: 38257 - DNA, 461 bp, Homo Sapiens
gacataaaatataaaaggagtgaagactgtatccctgcttcacactggtacatactgcctctgtgactttggacaagccatctaacatctctaggcctcacttatccttatctgtaaaacgaagggttgagctggatgattcctaggcctttatcagcaccatcatcctgtaggggggtttatgtaaagtaaagtatgtgtgtggttaatactctgacgccacgtttggtttatgtggtgtggtatttctttagaccaagagaggctgtcctggtcagtagactacacaagatagtctatgatgtcaattaaggtctgtgaggtcaaattaagtgatatgcaagattactttgatatgagcaagctgaaaccaatagaaactaaagaaaggcatgagaaacttgaagggcagggaagcccttgaccagataggatcattgagaatatagggaagtttcacg

SEQ ID NO: 38258 - DNA, 455 bp, Homo Sapiens
gagctcacctctcccactcagccctgcgccaagcctggctcatgcctgcctgatagccgctcatggctgtgcgcagccgctgcatgctcccttgagaaagccctctcttctctccatgtagccaagctgactccctcagctcttttctttcccctgtgtcactgaagccctgcttggcggaaggccctggagctacggagaggaaggaaggctctgcggcgctcccagtcttgggagggataggggcaggtgagttaacttctggttatcatagctcaggtatccaggggcagtaagtaggggccagggcaaacggtttatgcttattaattcacgtcatcctctcaagaaccctgggaggcagttattatgattctctccattcctcagataggtcagtggaggcatagagtccacggtcacaaaactagtcactggtgacgctgggctttgaa

SEQ ID NO: 38259 - DNA, 529 bp, Homo Sapiens
aacgtcagggctggtgattctgaggcacctcattaggaagatgtgtgagtgctaggattggtctggggtcagaagtccattatcggtctcagtctgtgtccctagacctactttgactttccttacactgggaagtcaggtcaaatttcaagtctctttagacaacagaaggtttctctaatccttcttgctttcaagaatcatacataatgtacacaaagtagatgagaatcttaagttgcatcgaagaattttaaattacctataattgtaagtactttgttaaatactgcttagtctccttttcttgttagctctgcatttgtgtttagttggatacaagcactagctgtgccatgctaagtgatttatacattttcttaaagtaattatgaaaattctgtcccaggaggaaaacactctaacgtccagattggcagtgcaataacttgtaatgccaatattttcttgctaatttaacatctttagccattttataatatgcatacctgcttttgtatctattttt

SEQ ID NO: 38260 - DNA, 432 bp, Homo Sapiens
ggcgcagagcctcgcctcggccggcgctaacagccgactatagaactggtagcggaccaggagaatccgactgtttacttaaaacaaagcatcgcgaaggcccgcggcggggtgtagacgcgatgtgattactgcccacgtactctgaagtgtcacacgtgaacgaaattcaactgaaagcgcggagtaaacgcgcgggacgtaactatacactctcattaagcatagccaaactgcctcgatcatctacattagtgacgcgcatgacatggatgaacagagattcccactagtcccataccatactatccagcagaaaccacacgccaaggagaacgggtcttggcgcgaatcagcgggcgaaagaagaccctgcttgagcttgactctcgatctggcacgagtgaagagacgtgcagagagggcacggat

SEQ ID NO: 38261 - DNA, 375 bp, Homo Sapiens
accgtcagccaatgtgcagtctctgtaaccacctgtttttcctccctggcttttcacattgctttctttcctttactctctcttctcattctctctgaaagctcgccttctttcaccaagaaactctaggtttgtcagtgggcacttcctggctctctccaatatataccacaggaccctacatggccaactgccagatgcagatggctccagcctggggcaagctgcggccggcctgcccaggtggcatgcatgctgtggtcagtggtgtggcagggcctcacttccgcccaggactactttagtgatagtgatttttagtgacagtacaggcaaagtatccaggttaggtatcagccgtgagagcggaaggat

SEQ ID NO: 38262 - DNA, 372 bp, Homo Sapiens
cctctctcacgtgagaaggaaaagggaaagtatcagactgggtgacatgtttagcagatgcaatgtaagggagatgtaattttggttgtagaatgcacagttttctagaagggaagaaagctgaggaagagagtgtgatgaagaaaagggcagaggaaacggccactgttgaagggcccaggttgggacagaatgacaccaaaccccttagccttaaattccaggtctgccacacctggtcccaacgtctccagcttcattttctcccttccccataaccccctccctaaatacctacccaacacccgccgtgtgtcagcgacagcccacggcagacacacctggcttcccttcgtgacgagacgggacacg

SEQ ID NO: 38263 - DNA, 364 bp, Homo Sapiens
gtacagtttctatggtgagggtgatactgaccaagacgtgagttacacaactctgatctaaaaccactctacctggaaggccagtactggggcacggactgcctagtgagaccgcggccccatacagacacggctctgcaaggtgggctctgcgcatgcgcacagaagatagttaagaaacaacacacccgtgaaatattagaactttctcttcagaaaggtttgcagtctgaaaactcccaattctgtttttatcctgcgagttgtgttattcgtctccattttcgagcaggaggagtgaaagcagcagcatcaggaaatgcagttcctaagggctgggaagtctggcaagcaccggcacttg

SEQ ID NO: 38264 - DNA, 427 bp, Homo Sapiens
gtatcaggacagatagatacaacaggacagattcccataaaaaggaaaacttacaaaccaatactttatactactagaggaatgaatactgtagcgaaaatctaaaaaacaggcttgagattaatacacagtaaatataaggttgtggcatctctgaggagtagggaaagggaatgagatcaaggaggccttcatctgtgtctgtaatgttttatgtgtttttttctaaaggcttgaaacaaatatggcaaaatattaagatctgataaagccatgtgggcgtatgacatttgttatatttctctctatccttattcatgtgtttcaataattctctgaaagcagtttactgagagtacagcatgtctcctgagacatgctaggaagttatgtgcaggagtggagaatatgattcattggaagagtt

SEQ ID NO: 38265 - DNA, 390 bp, Homo Sapiens
tatataaagtaagtacatttatttcaacactacacatacacataccacatatcacttagtggttcttttacttctttgaactggctaatatatctgccagatttccttactaacaatgagttaaatatttaacatgtgcttattttttaaaaatcaatagctttacacatatttcaaaatttgttattatgcaactatatttctagaggtaggaggacaaagcatttattttattttacaatttggtagctctattttaaatgattaaacgtgtatacctctatttgtattcttgtgccagaccataccaatgtttggaacaagttcaaatgattgccaatttgtgttaaactctatagtaggctctgggatcgaggaggagaagcagca

SEQ ID NO: 38266 - DNA, 375 bp, Homo Sapiens
gaggactactcatgcacactgcatttgggccttgcatatctgcctctccaacaagtcggggaacccttgggggtcaggctatgccttgtatgtctctgtgatccccacagctctcaacaccgtggtgcaaaaaccttggcagatgaaatgattaaagacacaacccagccacaacagtccccaagagttgctggcattcactcttctcacttacgagtagtagtattttcacgtgacaaagggcatggactgtggcaaatgtgtacaaaccacacagggttcaggcatcatcttgctgtagttgccaacactttgtacacacagtcacgcacacactcaggaatattcactcacatgttaccacatgcacgctca

SEQ ID NO: 38267 - DNA, 399 bp, Homo Sapiens
tgctgttctcctcctcgtttacagaatcctctgatttagccccatcccaaccaccttcctctgcaatggctccagttttttaagtccttcttaaaacaaagctttctaaaatgagcacaacactccagatatctctgatgaagataaaggcaactgaaaccattaattttcctgatctgggtacaatccttctgtaacatagcctcgataccatgttagctttattagtcacataccaaaacatccagctcttttccactcacagtactgagaagccctatttcccccttcaatatctaccaaccaattttttttaaaaacctcaatgcaggacttcacatgtattcgtattaaattctgcccagtttctgacatacacagactaatgataatctttgg

SEQ ID NO: 38268 - DNA, 406 bp, Homo Sapiens
atctggtgtatcttgagagcagctattagtgaatctgggaaaacgtccaatacaggtgcacatggcaaaattgtgtcatcccttctccttcttcccatctccatggaccccttgcatggaacaagtaggtaacatttgacacaagttctagccgagggttcagattactgtttgtctgaggcattctgacaggcacaagccactaagcattgctatggaaaccattttgttcttctctgctgtgtcatttgttttctggcacggttgcagttgtggtaccgggggaagggcagtggaagaggtacccaaggatcagacacctagtggggcctatgttcctacaggattgtatgaccaaggctaattcctgcttctccctgggtcttgcaatctccaactctcagaa

SEQ ID NO: 38269 - DNA, 426 bp, Homo Sapiens
tgctgttctcctcctcgggataaattcaacataacgtagcagataatatccaaaccacatcattccacctctggccctcccaaatcttatgtccttttcacaatgcaaaatataaccatgccttcccaacagtgccgcaaagtcttaactcattccagcattaactcagaagtccaaagtctcatctgagacaaggcaaatccctgccacctatgagcctataaaataaaaaacaaattatttacttccaacatacaatcagggttcaggggttggggaaatattcccattagggaaaaacctgccaaaaaagggggctataggccccatgcaagttcaaaacccagcatggcagtcattaaatcatgaaactccacaatgatctccttggtttccatgtggcacgctgatatgagggttgggctc

SEQ ID NO: 38270 - DNA, 404 bp, Homo Sapiens
tactgctctctcctcctcgagacgtagcgtaggtcgataccacctgtcagtttgtgggacttaagtggatcttgcattggctgattaaaaattgaatagacgctgtttctgtggtttcagatcttgacattggtgatgttgaacctgctctaatgcgcctggtcctggtgcattttctagatggtgcttctttttagtctctggatttttctattggaagtcatttcagctttaaacatagctcactattgtatgtggctttgtagcctagagtgcgtttttgccatagtaccctgtgtaaccctcaccaccctgggcagggtgtggtgatgacagccatctcgtggatgaggcggctgagggacttgcccaggtcattgtggatggggccagtccagaagggc

SEQ ID NO: 38271 - DNA, 416 bp, Homo Sapiens
tacctgctgtttctcctcctcggctcctacagtgctgggattacaggcgtgagcaccgcacccggcttccatatcctttctaattggtcatggcttgggataatggtgttgcttttaattatcatcatccataaagactttttcttactcaacagatctgagcttgtatttggtgcccaggacatgtgctgggttcccgaaatcccaaagacacagaccctaccctcagggatttctcattctagcaacatagactgatcaattactgattataacgttagaaggcatgtctgaagtagacagccatcaggacatggtgatttcaggctgggctttgaagaatgactaggagtttttcaagtgtcgaaactgaaccctgaccaacctttgcttttgcagacactggaagaatagtc

SEQ ID NO: 38272 - DNA, 431 bp, Homo Sapiens
cgttatactacctcgagaatctcagacttcatatcccatcacctcttctgtgagagccttttctgatatggccccaggactgtcacctcctctaagtttccacagataccttgtgccatctctctagcataacctttatcacttcatgttgtaagttttcagttacatgtctgctgatctcattgagggagtgaaattcatcttttcacttttccttccctcttctccccctccaagtgcttaacagggtctagagcacagtacatcctcaataaatgcccagtggtagaaacaaaggctgccaaaggcgtggcctctgcctccatgtcacttcagtcttcactggagcagagatgaaaccaaggagccccgggaggccttaccttcccaatcattgggagtagaggttgatggaggataaatttggtcat

SEQ ID NO: 38273 - DNA, 392 bp, Homo Sapiens
tgtggagatgtaaatgtaccaccctcagtttaagacagatcaagtgaacagagaataggaagatagaagacttaaacagcgtgatcgtagtaaggtagatcatatgtatgttttctgaactctataccttgatgatagagactatacctcctgcccaggggcccctggaacattcacaaaaattgatcaggtattaggtcacaaacaaacatgtaagtagttccataaagtagaagtattacattatctgatcacactgcaagaaaactagaaattaccaacaaaattaaaatatcaaaggcccttttactggaactttaagaacctattaaactacagtcatgtgccgtgtaatgacatcgcaatcagtgatacaccgcatatatgacaga

SEQ ID NO: 38274 - DNA, 418 bp, Homo Sapiens
cgcgcctgctgcttctcctcctcggcaggggatgctgctgctgatggagcgaaagctgcaggaggtgcacccgctgctgaccctctgcgggcagatcgtggagaactggcaggggaaccccatccagaaggagtcgctgcgtgtcttcttcctggtgctccaggtcacccactatctggatgccgggcaggtgaagagcgtgaagccgtgtctgaagcagctgcagcagtgcatccagaccatctccacactgcacgatgatgagatcctgcccagcaaccccgctgacctcttccactggctgcccaaggggcacatgtgtgtgcttgtctacctggtgactgtgatgcactccatgcaggccggctacctggagaaggcgcagaagtacacggacaaggccctcatgcagctggag

SEQ ID NO: 38275 - DNA, 383 bp, Homo Sapiens
aactcgggcctgctgcttctcctcctcgcatagcctccctatcccacctcacttcccccatccccgacagaggaggttgtgaatctacaggcccttgacgttgaggcgtcggagggcgcacctttgtaattgcggcctcccttcgccccttaagtgccgcttctgggcgcctaggctggatatgaaagccccgttcctaatcctctgctctggtcccctcctctggactgctgggactctaagctaggccctccccaggttccatcactgcggcgccaacccgcggctgggctgtccgcaagagggagttgaaggcgcgcggaatcccgaggtgcagctgaccctcctctcaacgccgactctgccgctcccgcccggccacc

SEQ ID NO: 38276 - DNA, 416 bp, Homo Sapiens
tactgctgcttctcctcctcggcacatgaggctggggtgagtagcaatactggtgcccacagcaggagttgcctcacaatctccgtggctcaagtgtgtgtaaggccctcatgaagtaactgggagctgtgtccatggaagaggtcaaagaaccagggttctggggattctctgccttggattccccctaaaactccctcagtctacagagaggaggggaacacaacactggactcaggtcaaggtaaaagcatgcataccaccagcttcctattttctgcaacaagctcagtgtgccttcatgtagcattagaatgccaggagagtgggtctgtgaaaccctaaggaatctggcccccatgttgctgtaacagaggacattttacccactgttggtctgcatgggagtggggcta

SEQ ID NO: 38277 - DNA, 353 bp, Homo Sapiens
ggctgctgctctgccatctgcgtgtaatgctgacttctcgctcatcatctagcaaactacattcattcttcctgacccgctgaggcaccccttctctgtgaagagtccctctctccttctccaatgtatcagtaagctattgctgtgtaataaaccacccccaaggcagtggcttgaaacaactgtgtattattgtcctgtgggtcaaccagctggttctgctgatccggacaggcttggctaatctcaactctgttttgtatctatcggcagaacaactggaggctggctggtctaggatggcctcatttatctgtttggcattggctagctctcaattcagtggatgaggg

SEQ ID NO: 38278 - DNA, 358 bp, Homo Sapiens
tcaggaactttctgttccttagctggttgcatggctagttccttgtcatcattcatatctaagctcaacagtcacttcctcaataagggttatttgacaatttaatctaaagtaggtccttttccacttattttctattatatcacctaattaatttccatcacagcacttattgcaatctaaaatgactttctctgtttattgtatgtctcttcccatcaggttataagcttaacgagacagggatcttcctttttcttttattaaaacagctttattgagatatgattcacataacatacaattcacccatttaaagtgtacaactcaaatttgccatttaaaccatgtttaagtg

SEQ ID NO: 38279 - DNA, 412 bp, Homo Sapiens
ggcctgctgttctcctcctcgaggacagtgcctttgtccaaccttatctccagcctgcagggcctggcacaggttctggcttaaatgctatactaacagtaattacattttcataaaatttattttatgaaaactaggtactctccaaggtcctttgtaccccatgagtctgagattactaaactaacagtttaaaagattctgggaaccaggtgaccggggttctggtcccaccagtatcctgtattgtggctttgggaaagtctgtttcccatctctagacctcagtttccacactttgaagaggaagtttgtgtggtctctaagatccatttctgcgctctgtaatctccataagccaaggggttcgaacctcccaggcttcacactgtgcagctggccagcaccattc

SEQ ID NO: 38280 - DNA, 440 bp, Homo Sapiens
gacatgctgttctcctcctcgtataaggggagaaaataattcactaacaatgaattattaaatttattctgcaggatggaaggcattctgtgcacatacttcctaaggcactgtttctgcactggggcaggcagccacagaaaacatggttaacacaagtatatacaatgtgcaaataagcaaaagaagggagcaggaactaaacctgtccctggcagaagtgagaaaacttccagaaaaattgatgtttaggctaaattttgcaagtcactttttaaaatgctattaaaaagatcacacggaaaaatgatggtaaactcttaaataagttagtgttcttccttactacctacagtatatcaacattagatgactctgtcttcagtattaacgcaacagaaatttttatttccatagatctgagatatacatactaagct

SEQ ID NO: 38281 - DNA, 416 bp, Homo Sapiens
ctgttctccaactggactcaatttcattgtgggcatgtgcttccagtatgtggaggtgagaacccccactgtctctatactcacccgcacgcatgaccccacagtgctgtgcaaagtgctggcccagcattctcattaggaatcatgctgaggaggaaactgagggtaggaagcccaggtcacatgaccaagaatgctgacctcaactccagggttctccccttagccttgaatggtgctcctggagcctgttacattctaggtacaagcgtggtctcagttaattatgatagcatccctgggtaggtggatgttcccttttcagctcaaaggcccaaaggtaaagtgacttatccaaagtcctacagccaggatgtagggtcatgactccaaccaagtgtgtctgtgtgtctttc

SEQ ID NO: 38282 - DNA, 447 bp, Homo Sapiens
ggacctgctgttctcctcctcgaaattttttcctttcttcttcttattttttatatttaccttttaaaaataatcctctttataacaaaatacacgcttgtgcaaaaattgtttactatgaaaagaggccaaagccctgcttagaagcctagctgcaaaaatcaagtcaggcagcaatttaaggtaccactagaggtttatcagaaaacaagtccagtgatgctaggaggagccaagtaaaagaacactattcatagtatttcaaacgtgcacaatgatttttttaatgctgtataactgtgtttagtggtgatatgcagaatttattgttgttatcttaaaccaagtgtctgcctacactcttttggcagtgaagaaaaaggaagactatgtggtaagaaactttcccaaagggcaggctgcagagcaagttcagataaatcactt

SEQ ID NO: 38283 - DNA, 450 bp, Homo Sapiens
cgtcctcgtaccactaccctaaatatgcacctccttctgttttcctctcttggtgaatgcttactgctgaggtattatatattccaaaggtattgaatttccagtcagcataagtcaaatgcaaatggttatccaccatttcttcatccaccaatatttactgggcaccttctatgtagcccatatcatgttaggctctgggatgcaagtgaaaaaagttatcacctctgccctcatggagcttacaatctagtaggggaaacacacaatatgcagggattattttatgtattaagagtatataaaccagggtactgggataatagttagggaacacttgctttttagatagaatgatcaagaaaggcctctgagaaagtagttaaaactggatttgaaacctgactcctcaattacaagctgcatgaccgaggaggagaagcagcaggg

SEQ ID NO: 38284 - DNA, 446 bp, Homo Sapiens
atgatctcctcctcgcataagtcaccttccagatcattctatgtttacccacatatgccaggaccagctcacagcacaggcccaacatgggacacacctccccccaacacatccacattctcccgaagcccaactcaagcgcacgtcctggaagcagaggcatccctggccatgtcacagtttcttccacaaacctttggatctatcttttgtattttaagtcttggatttcccataagagatgtcaaccatactccctccataccttccagattcacaggcaagagaagccactaggctgcctgcaaagaaatttctcaagatctgagtagggaccaggctctgtcttaaatttctccaagtgagatccacatgcgtggcccttgcacgtactgctatcatctcaaaggccacctggagtgaccagcaaggactgtattcatggg

SEQ ID NO: 38285 - DNA, 436 bp, Homo Sapiens
tcgcactgccatctttcacatgcccaagcccctttctgacctgccctgcgccagaatctcagtcacctgaacagcctcaccagcggggttcaccagcactcactaggtactaaagtcaccatctcaagcgctttacacaaattccctccctccagactcccggtgggcctaggaagcacggctcccctgtcctccctaactcagaaaatgtcatctctaaccctcaaacagggcaaacctggagtgctgcggaagccgctctcagatcccttggtaggcccccgggtccaggtcatggccgcgcctggcccactcagtccctgcacagccactggctggatacctgggtccccttggagccaggcctgaggaactactcaccgcgcctgcttcagcaccctcagctctgctccctcacgggcagctcagggcactc

SEQ ID NO: 38286 - DNA, 378 bp, Homo Sapiens
ctcgcctagggtagactttgaactgtgtgtgttgatgacttctctgttccacaggccctcccccattcttgcctgggtgtggagccctggctgtcccctctccctcagtccttcctgactgtctccagctgggaggtggtctctgtgtgccactcctctgtgtctctattacagttgtgtctctctcatcctgtctctttttcccttgtttctctgttcctgttaatgtgtttctccccatggtcctatttctctcactctgacctctctctcttagtcccctttagctgtcttctatccccagctcctaactgggactctgtgtctatgcagggggccagcacccctgggttatctggggctaagggaagggaagct

SEQ ID NO: 38287 - DNA, 396 bp, Homo Sapiens
cttgctgtctggacttttcaggcccttgctttttaagattgccaagttctaaggcagaggtaccactggctcagctgtggggcagcagggaagttggggccactgcatctccatgcatgtctgtgtttgaccaggagagaaaggcaatagacagttaacagcagtgatcagggaaggaaaagtaaaatatgtaaaggatggagagtgctctagatgagtgacatttttctagattcctgaccatgcacagcacctgctagctaggcagggctcagtcagcacctgtttaatgaatacgttgctaggtactctgcatctttgctaaaagactatatctaatgttgatataccatcatattcttgcttcaagttagttgccaaatgtatataatcttt

SEQ ID NO: 38288 - DNA, 415 bp, Homo Sapiens
tgcgtcatggagagtctagagtgtctttcagattacagaactagtccctgacttactccagaagttaagtagcagagcttttaccatgcttagttccaaattctagaacaacccccagccttctccaaagttaaaaacagtctaattgacagtggttgattttggctggctgggtgatgatgaaagaaaggagagcacttgcatagtttatggtgaagataaagcacatatcaggcattgtaattatctagccgcacactataaacttttccatttcattcatttccgtatctctagctctttattgtcagttgcagaggcacaacacttttctcaggattcatgatcaactctgccctttggaattgttcctactgtctaaaaattaattccacatgcatgtacaaacttacat

SEQ ID NO: 38289 - DNA, 392 bp, Homo Sapiens
tcatctcacgtgacccagcgtactgtgtgtcccacagcccgtccgtccctctgcagtctccctgcactggcatgtcctgggtggtcccagtggcaccttctaggcccggcccctggatgcggtggaggctgcccggggtgggtcagcatggggttgtccctgtgagcacagctccgggagacccgtactcagaatcctccagctctctcgcctgaggcggaaatgtgacttgggaattgtcctccatataaaggacgcaaaatcagggcctaggggtgagctgcttactgtgcttcttccctctctcagcctccaatcggggggcacaggcgtttgattcccgcgacgtctgtgggctgtcactgtccagcctctgcgctccacacctgggc

SEQ ID NO: 38290 - DNA, 406 bp, Homo Sapiens
ttctcctcctcgtataggcttcagtggcaggatccgccctggcttctgctctggtaagctgtgcttcactgtattaccctgctctctaattgctgggggcagtggtttgcccatgacatcaattgtctgatggatccaaaaagaattgttgattttccgtttgttcagttttttttcttgtgaggatgagagtgacgacttctgggctcctttcatgccaaactaaactggttcaggagtggggcagagacatcctgagtttttatacccagggttctttttaagggttttaagggttccacttatctgttatctttcctttcagttcctcctcttgtacaccttatcttctggtggccctggttcctctggccaggaagaggactgatttttgtcttaaatcaga

SEQ ID NO: 38291 - DNA, 376 bp, Homo Sapiens
gttctctcctcgcaggtgctaggaagaaggacatcggtgaaatggaagaggagctggaaggtgaaagcccacctggctaagaaggcagcctaatgcagtaggccctagcctgtcccccatttccaccccaatccctgcacactgagcaaaggcagcagatcccaaacccaccccaatcctgccatctggggctgggaagccactctgcactgcttcgagatgctcccagaagcaaagaggaagggaacctaggcctcctcatcggtaacctggctccagacctttaaaggccatttgctggggacagggcaaggggggaggaaggagaccacaggcccctggactctcaggagaatggacaatagtacctaaaaag

SEQ ID NO: 38292 - DNA, 444 bp, Homo Sapiens
tcctcacagtctcttgcagtggacatcagcatcattccaagtcagacactgagacatcacatcgcctcctcctccacagtaaccactggctgaggacccctaattcgccctcacacacatatcttctagaactgcccactcctctacctcctcgccccagcttcctttatccaagccactgtgtctccttggtctactaaaaaagctgcctaactcatccctgccttcaatctttccccgctcggatccattctctatgtattccgaaacaaatcagactctgactttcctgcttaaaatccttcagtaacttcccattgcccttaaggtcaagcccaaagcccccctaataacttctaacccaaatgagaagtcataacacacacttctgttgcattatctgccagacattgttctaagcacttaacatggcttgtctcatcc

SEQ ID NO: 38293 - DNA, 408 bp, Homo Sapiens
ctgccatgtatcacagctcgtcgtgtagaaccagacaacacacagttctcttttcttccagaaaagtggggctggttccatttctcactcctgtcttcctttggatggaggaaaatgataatgaaacctaacataatgcctatttcaacttcagaaattttcctcaaataattgaatcagtaggtttgaggcttcttgggaatcattatgttagacctgaaacagaaatagccaatcccttggttgaaacgtgttacatttaaattgatactgcttttccccaaagtgcaattagaaaggacaaagacctacttctgtaaatgttgttaagggaaaatggagcaggtgtctcctttctttcatttctctgggtcagttgtactcctgaagtctctctctgtttagatg

SEQ ID NO: 38294 - DNA, 353 bp, Homo Sapiens
atggccatcatcttgttgtgaataaagacagttttactgcagtttgcacacccttgttattcattctggatctccactccagattgagtggaagtggtgaaagcaaacatctctttgccatgctctctctcggggggaacataccagcctttctttgttacgtgtgatgtcacttgtagtttttgcatggctgcatttgaccagtttgtagaagtttctatctatgcaagtgattttgtgggtgttcttagttttgttcatatggtgtattgcatcagttagtgttccagtattgaaccacccttgcattcctgggagaaacctcacttggtcattttgtattacagtgttta

SEQ ID NO: 38295 - DNA, 413 bp, Homo Sapiens
tactgctgcctctcagagagaggtcattcgttgagagcgtggtccagttcctcgctgatagctttgtacttgagcttctgagcgtataactcatctagagggcggaggtccccagggagacagttcagaagtacaggggacagaaggcaagggtcggaatggagtgccacagatgaaccacaagaggaagaaaaaaacacgtgagcaaacaaagcacagactaggagaaagctgtgttccatgtgaaccagatgaagaaaaccaaagatctatggagtttgatctctaagtggtttgaggttctgcagggtggattagccacaatgaagcttcaaaacagtggtaaccagaagtgacagagcttccccccactggtccccacccctcagtaaatttcgggatatccaatgacg

SEQ ID NO: 38296 - DNA, 409 bp, Homo Sapiens
ttatctgctttggacgcatatctgatcatgtcaccctctatttaaaatctcacaatgatcttcgactgccctcaggatcaagtccaaaacctctaagagcattacacggtcctcaggccttggctccctactcattttccttttctccagtttcatttaattaatggttctatggtctcactacagatcacagccacttgcaattctcacaacaccatgctctttcttgcttgaggcttctgtacctgctgttccctctgcctagactttcccttactccagcctagcttttattttttggcctcaatgtaaaggtcctttcctccaccaggaaaccttctttaggtgtctctcccagtgcttcaactgttatcacaggagtaagtttgggtgctatcatacttacttc

SEQ ID NO: 38297 - DNA, 415 bp, Homo Sapiens
agttggtatgtaactctgtaatataatctgaagtcacgtcatgtgattcctccagtttggggcttctagcttaggattgctatggctattatttagttccatataaattttagtatatttcttttctattctctgtgaagtatgtcatatggtatttcgatagcgaattgcactaaatctagtagtttaggtcatgggtaatataggacatagggtacacaatcatggactctccagaatccacgacacgtggaatacctattccatttcatttcgtgttctctatccatattctatgcatacagtgttataatagtatttcatacatacaagatcttgcatattctattggttaattacctaggtattttatatccattctgtagctacgtataaatgggattgctttcttgac

SEQ ID NO: 38298 - DNA, 363 bp, Homo Sapiens
ttgggtcccaaacctaggtgatgtaactctactgcttaggccctgcctacagaggacattgtgacatatccctgcatccatcacacaggtaatgcagctctcttctgcttggaccctactcacagaaaggattgtgatgtatcacagggctcagcacctagctaacatgacttttctcctcttctaggtttttgcccacaggggatattgtgacatgtcactgggcctaatactagggtgacagtactcttgtgtcatggcactgccctcagcaggtgtggtgatatattactgggcccagaacaaatgtgatatgagtctcctgcctggaccctgcctacaaggtgcattgtaacatgggca

SEQ ID NO: 38299 - DNA, 375 bp, Homo Sapiens
cctctctgtctcatccttaggtatcctgaggggaatggcttccagaattgtgactctacaattaaagtaattattgcatgcttaacatgtgctagacactgtgctaggctctttgtatactgtttaatattaaaaacaatcctacaagggaagtaccactattatgctcattttgcagatgaggacactaagatccagagaggtttagtaacatgcgcaaggtcacaaggttggtaactggaaaggttgggattcagaaccatttctttctggggtgaagagcttgtggtcttaaccattatgtaccattccaacaaaatgaaacaattattttatacagttgtccctcagtatacatgggcagggagggggatc

SEQ ID NO: 38300 - DNA, 361 bp, Homo Sapiens
ggttctaggactcccaaggataccaaaattcacagacactcaaatctattatataaaatggggtagtatttgcatgtaacctgtggatatccttgtatatatttgaaatcatttctagattacttataatccttaatacaatgtaaattctatgtaaatagtggtcataccatgtttagatataatgacaggaaaaaaggctatatatgttcagtatagttgctgtttattttccctatgtatatttaatttgcctttggttgaatccatagatgtggaacccagagatatggagagtcaactgtacttatttccacagccccagtctgtaactccctgtgctgtttcttagcctaatgct

SEQ ID NO: 38301 - DNA, 372 bp, Homo Sapiens
cagatctgggttcacatacccggcccttgtgctcggggagtaggtgtctctgtgcaccccacccagaggcactttgcgcctgcttggatgtgagcagacccggggttgttccaaacccctgccccattctgtgggcatggcttgctctgaggcgacgtgcagtctggggagaatgtggggcacgggggctggcctgtggctacctcctctcccctcatcccacagaccccagataaaagccgtctcccttctctgctctgtatgctcaaatacatttgagggtttattacaggaaagggacatgtgtccacaaaacggaatgagaaccacagctggagggtgagtgagagacagtggctgcgcagggggccg

SEQ ID NO: 38302 - DNA, 387 bp, Homo Sapiens
gtgagtgtgtcaatattttacggtaaaatcctccacccggtgcatgaagaaagaaccaagataccgcacatgggacaatgatgatattggtctaatgatattggtatactgccactggggctgccttgtgctcccgggcaggatgatagctggctgctcgggacatcaggctggagcctgatctagagtccagaggcccatgtcattcctcatgcagatggctgaggcaccgactcaactttaccacataaacggttccagcaaacacttcctgtgcaccagggaggcataaggaaggaggtcccttgtgatcaagggaaaccgggatctctgcatgtgccaggatgtaggcggttgctgatgggagagcaggattcctcaggcaga

SEQ ID NO: 38303 - DNA, 437 bp, Homo Sapiens
tccggccggttatgccatgtctcctgccatgtagttttactatagggctgtcaacactcatgcaggtcctgaactgcgtgcgccacaggtgcttcacctcatagactctggggcaggtatctaggtacgccccacacttctagctgggaggggcagggtctctatgtctgcctcttcatcaatctgaatccagggcattgctcaaagaggtcactggggagaggttggcgccttgaagctctggaatcaggctgtccggattccaatccttagacatggattggaagtgacctgggcaagtgggttcacttctgagcctctgtcccttctctacaaagcagggccccgagagctgaaccagacagcttcctcctctgtggtgtggggaaggcaagccaccccgtgtggtgcaggatggggtggagggaccaacgcag

SEQ ID NO: 38304 - DNA, 363 bp, Homo Sapiens
ccatgttactagtatcttgtactgtaggcatttttaccatgtgtatggattatacttaccaaagaaaagaacaacataaatgaaaataactaaaagttggaggaagtaaacgacaatctaaacagcagacctcctcagcctactttctccccactggctaaattccacaacctcccagaacaacgccactgtcctgggggcaggtggatggtcacctccttcccttggatgcaggaagttgcccaaaacaggatgggcatgagcgggacacttacgggcctcggggcagcagcacttgtcttgggccgcagagggacctgaacgtaacaacagccagtgtgcggggcagcactggcaccagca

SEQ ID NO: 38305 - DNA, 364 bp, Homo Sapiens
tcggaccgggctcctgcccatgttgtctgggatgccttctctcccttctgtctacatcaagcatcagactgaatatccctcttgtgcggccttctaaaacctcccgtccaaagcgaaatatattgccctctatttatacttttacagcatttggcacacaagtacagagtagtagctctttatcacattctctgataattatatagatatggtatttcttagctctctctccaactggctaataagttgcatttttgtctgagtgcctaattttgtgttttgtgtctgagtgcctcagttcctcaaaacaaggttttttgattagttcattattcatttgaacatgggacatgggccgggagcg

SEQ ID NO: 38306 - DNA, 443 bp, Homo Sapiens
ggggctccgcccatgtgggtttccagcccactccagtgtgatcgcaccctggcagggccccaagggccaaggccgcattgcccttcgggctggagatgctttgccggactagcctgaggccttgtctagacagggctgagctgtttgtcgttggaaattgaggctcggccagaggcgggagcccctacagtgccacgatcaggctgaggctcaccacaccaggaagagagatgaacccgcgtctgcctgccgccccgccatgctccctctccccccactggcgtcacagtgcccccacccgcgttgctgcctgtggtgtgcgtgccctgggaggggaacacagcccctgagggcggggaccttgctgggggcccctcagcgtctttctgtgcctctgaattgccaatactgtccttgcatctctgagtctacgtgcacgcttg

SEQ ID NO: 38307 - DNA, 431 bp, Homo Sapiens
acgtgtgaataccagactcttctaaaccagtgactgaggggtcatctttggcccatcttggacctctaagacactctccagcctatagctatattcatttggattggtcagttcccaagccaaactagttgttaatattttttatatcacctttatttaactcaaaggatttatattttgatggtgtcatttaagacacagtgtgacaaacttagggagtaagtgagctaaaatgataggataattgagcttccattcctatgccagaattgatgactttagttccatagaaaagctggaaaatacttaaattttcctccagaaagccattttttttctgggaagaaacatatactcttataacgaacatttatgaacattatttaggaaattcacatcagagaacaatttttattaaaaaaacagctgtt

SEQ ID NO: 38308 - DNA, 466 bp, Homo Sapiens
ggccgggctcctgcccatgtcactgaagtgaactccagaatatggacctagatatttagagtccctggacatgaatgataggacaatatactctagggctctgattttccatatcaccttgacaaatctccttgacaaaacatgggcttgcctcaccttctcaaccatccccaccttctcaaatacacacactacatctatatctttactagtttcacaacagcatatctattgattaagatatatttggtaaagaaaaacactcatattgagaaagatgacttcagaccattctcttcctctctctgggccttctctttgtgggcatgatgggaaatgaactacagatactctgcaaggtccctttcatctctaatcttccagaattctatgactgtttctgaagagaggaagcagtttttagaagttctgttgcaacctgtagtgactctgtggtgactcagta

SEQ ID NO: 38309 - DNA, 477 bp, Homo Sapiens
tcagctcggtccgggttactgcccatgtggaatttggaaaacatttcctcagaacaatctagcttgaaaaactgcaaagatcactagacttggatactgaaggatgaatgggtttagatttgagatctacaaagatatgagttgtgtgatttgggatgaattattcatggattccttccttaagttgccatttgctgaatacctttttcagctcagctcaggtgtaacctcctttaggaagcctaccttgattctactggctcatccttgggccttagctgctccctccctgtgctcccattataccttgttcatatctctgctaactctcttttcacatggaattaaaaattctataatatttctcaatattcccccactaaactgcaagctcattgagaaaatagcattgatttcctgttctctggggacagtactcatattttccttgaggaatcacctctccccctctcttga

SEQ ID NO: 38310 - DNA, 360 bp, Homo Sapiens
gggttactgcccatgtcgggctcccccccatgtatagctctgtttctgatttctgtggaaccctgtcacatgaggacagtgttccacagaaatcagaaacaggagcttcatggggatggcgttgatgtcacttggaaggaaagggtccctgtgaaaagccctttgaaaaaggagattggtatcccagggatgcctgccacccccagaatctgatggaaataacgaccagcaattgtagtaataaaatatccgcacatgttggtccattttcacatggctctgaagagctacctgagacagggtgatttaggaagaaaagaggtttaatcgagccacagttctgcaggctgcattggaagc

SEQ ID NO: 38311 - DNA, 437 bp, Homo Sapiens
ccggaccggtctcctgcccatgtatgggcccaacctcatgaacaaaataaggatagaaacaagtctcagtcgcagcctgcctagatggcttcgatgccaggcaataaaacagtgtgagcttctatctgagttgaggttccttttagcaagtgaaaccaacttgcaaaacaggtaagacaatgtgggtatgcaactacataatttattgcatacattcactcagcaagactcaatgggtgatgcaataagcagtgcccagagactcaggagtgtatagcctcatgccagccctttcccaatgagtcaacctcttcatctaaagcacaagcttttcccaatgtctccctctgacctgttgcactgagatggagctagctagaccacatgttgctctatgtctatttcttacttttttatatgtggttttctcattataa

SEQ ID NO: 38312 - DNA, 420 bp, Homo Sapiens
aacctggctccgaaagtctcgcttataatattctatccagtcatctccatcagccatcaaaaaggcctcagaaatctgctcctttggcaagtaagagttgaataactccattccatagcattgccagaaaatataactggttatacaagattgagggctgtatcggtctgttctcccattgccataacgaactaccggagactggctactttataaagaaaagaggtttaattggctcacggttctgcaggctttacagaaagcatggctggggaggctccagaaaacttacaatcatggcagacggtgaaggggaagcaggcacatcctacgtgtctagaacaggagggagagagaaagagaagggggaggtgctacacacttttataaacaaccagatctcatgggaactcaccatca

SEQ ID NO: 38313 - DNA, 396 bp, Homo Sapiens
ctactactgaaaacaccatcaacctcaggcgctgccccatggtgtccgcctggggtgtgaatgctccctcccctaagcgccatgggaccatgtgattctttggcaaaccctgaaataggctgcctctcatgcctgcttgctgctgcttccttctaagcagccatggcaatgataggctgcatgccctgctctgttcctcagtctggctgagcagtgagactccctagcaatacagagcaagtcctctggcaaggtaacactttccctgaaattccaaaaattcctattgctcattaaatgactaaaaagccatctgaatccctacatttcaatgtacttattttgcatggttgcacagcattcacaatggcattatactgacaagctaggaagtat

SEQ ID NO: 38314 - DNA, 389 bp, Homo Sapiens
cctgtcagcactacatgctaggctaatgttttgtatttgtttaagagatgcagtttccctaagtagcttaggctacttttgaactcttagactcaaataatctgcctgcattggtctccccaagtgctggaattacaggccatctaaatcttttatctcagatttgccttgtggcaaaaggtggggtacttattctgacatgatgaggcggagaaagatgaggtgggtgcatcctgtgcatatgattatcttaagagtgactgggaagatgcttgaagaatattcttttgtcgactctcatttaaggagcgttgaatttagcatgcattcaaaacctaaacttctgctgactgctgggtaacaatcagatgtggtttcttggtattttc

SEQ ID NO: 38315 - DNA, 426 bp, Homo Sapiens
ctgtgccatgttgatcttacatttctgggagaaatggagtaataaagcagataaattagtaaaaaaatagtgtgtcaaatagtgataagtgttgaggaaggaaaacaaagcaaggatagaaagtgttggtagggagttgaaattaacagggaacgtgagacaataatgcttctgctaaaagctgcattcctgcgatgtgtttctttgtcagagaaacgctataaacagacagagaagtaatagtgaaagcacaacactacaatcctgggtatcacctatgggtctacataaaaatccattaaaaattccctgaaaggttaccacattcacagaaagcataaaatccgaatctcgagttttgaggggcaggatatggattctctggatagcagtgactcaggtaaacaaagggagcatgacatggaa

SEQ ID NO: 38316 - DNA, 453 bp, Homo Sapiens
aggaccgggctccgcccatgtggtcgttgggaagatcaaatgagataagcagaaaaacctgtgtgtagcaccttgcctgctgttcagtgggtgctgagtatacttgttattcctataattattacaactccagctctctctagccctggtggtccacaatgtgagttctagacccttccttgtgcatgttctctctgtctctttctctcagcttccacagctccatccaaatcttgtaggtactttggtgtgagcactgcaggactgggagcgggtaaccgcctgagcactcttgaaaaccaatctcccacccctcccaagttcctgagcctcatcgcgatgacatcaagacagagctaaagcatacttagtcctacttcatgctatgagaaacagaccatgggaacctcatattctgagccaaaagtcacgtcacattcacaagaaaaatct

SEQ ID NO: 38317 - DNA, 430 bp, Homo Sapiens
ttatctgccgggctcctgccatgtcagaggttgggagcacctgtggtggtgaagggagtatgtggaggaagggctggaggtatttaccccccgccagataaacacctgttggcagaattagccttgatcttgacagccccaggaagcttagaaatctgaagatcctgaccatgaaagccatccaaagatggcaaggaccgcctgagaagtagtgagctccctgtcactggggggtatgtaaggacatggttagtggctgcttggcggagatgctggagagaggattcaagccaggaaagaaggtggggtcctgagattctgtgactgggtagagggaagatgcggccagtggggattcattagttcctcctctgagatttctggactcctccttccctggctctctccctgctctacatacggaatttgc

SEQ ID NO: 38318 - DNA, 399 bp, Homo Sapiens
gcctgctcctgcccatgtgctataatattaggaattctttatggacacaaagccctcttagtttcaacctgatatctcataacttctcatcataaatcctagtgccctacctagccatgctaaactttatgccattcaaaggagatgacattccttctcagctttgtgtctgtgttgtgataacccatttcctggaatattcttttcttcttccttgcttatcagactgatacatacttttcaagacattacttatgtgtcatgattctttcagaactctctctcccaaattcaaattcccccctctgagctggcacaggtttacctttatgtgacaaaagagcttgtatattagtctgttctcacactgctatgaagaaatacccgaaactgggtaat

SEQ ID NO: 38319 - DNA, 429 bp, Homo Sapiens
cagacacctatatgctcttgttagggccaaacactgtgcgagcttaccatcgaaagctatccatgtagagatttgtagtgaacatggcagattccaattataggactaaatactagatccactattgtattggaaatctacaagaacaccctcagatttgatgattcactaggaggactcagaaaactcagcacatagttgtactcatggccgtgctttatcacagcaaagggatataaagcaaaatcagcagaggaaaaaggtacatggggcaatgtccagagaaaaccaggcgcaagtgtccaagtcttctcccagtggagtcacacaagacatacttacttcctccagcaatgaattaaaacaacatgtgtaaaatgctgtctccaaggttcttcttagggggtgatcacataagcaccctctgcc

SEQ ID NO: 38320 - DNA, 359 bp, Homo Sapiens
aaaatatcggaccgggtcctgcccatgtactgagcactttaggcaccaggcaaaaagcactgagataaataagcagaggtcttgacctcaaggaacttgcagtctaatcggggaaaacaccaatacataacagatgagtaaatgtaataatagttttggtgttacagcatgtgcctagtcccagtatgacacaaaaacagatcatttccccagaggccccaggagatgcctttgatcatccctataaggagagccctcccttaagtcatccaacccaacctcatcatcctaccacctaaacctgacccttccttacaagagccctctgctgttatggggccccataatcctagcaatca

SEQ ID NO: 38321 - DNA, 369 bp, Homo Sapiens
agtgggacgcgggaagtggggctgggaggtggctgtttgcacgtgtggtcagcaaatccagtgagggggtcatgtactgtgggcagccccacagatagagtagggatgccctggactgagtactggctcatcagattgcaaaccgccattctcaagacatcgaggcccaggctggtgccggagatacattgcagtgtgtcagtctttcttccatcgctcctctccaatgacagttcccgattttccaccgaggagtcactagtaccccacggcatgtgtgtgactagccactccccaccctgatctggggctggggcatgtggtcccagcctggatgtcaatatccttccaccacaatggcacgtggat

SEQ ID NO: 38322 - DNA, 419 bp, Homo Sapiens
tgatcagtgcattgtggggatacttgtggatagcggagaaattccaatcgaactcggagatagctggttcttcccgaaatagctttagggctagcgttatcttagtttaccggagttaaagcactgaatgggctaggggccgataaggttactgaaccctatcaaactctgaatgccggataaatgatggatagcagtcagacagtgtgagataagtttcattgtcaaaagggacacagcccagacccacagctaaggtcccaaatgtgcgctaagtggaaaacgatgtggagttgcgaaaacaaccaggatgtcggcttagaagcagccactcatcacaagagtgcgtacactagctcacctggtcgcgcgactctgcgcgccccactctaaacgggggccccgccacacaaccgaag

SEQ ID NO: 38323 - DNA, 395 bp, Homo Sapiens
gggtgctcagaggatcctgatcagtgcattgtgatagtgggcggtatagagagagagtgcattcgaaagacactgaggagattgcatcagtaggacttggtgacacattagatgcagaggaagagggacagaaatgcttcaaggaggacttttaggcatctgtcttgggtaactagatgatgccaatggctgagatggggaattcttgggtagatgaggtttggtgggatggtgattgttataactttgactttgaacgtgctgagttcaggtgacattgtgataccccaaaggaggtgcagagtaggtagctggagacacaggcccgaagatgatgagaggtctggcctagaaacatggatgcaggagtcatggatccacaatggcacgtggat

SEQ ID NO: 38324 - DNA, 391 bp, Homo Sapiens
ggtgtctacaggatctgatcacgtgcattgtgagcgtgagaaggattctttcagtgtagaaggtgctgcttgctctgtgcttccagaaatccccgagacttaataaggcacctggctccgtcactgatcaaagaatgggtaccacaacttactgtccactgcaaagctccatggcacctagctctagccagtttgttcacagccgtgattaaggtgcccacagcatcctcaccagcctcaggaacgtggcacagtcagctcgccacaggggtgaccccagaaacaagagacaggactgttacagggacaacacgtgggacgccaaaaaccagaaacaagagacaggaatattgtaacagggacaaagtccagaccacaatggcacgtggat

SEQ ID NO: 38325 - DNA, 456 bp, Homo Sapiens
atgtgatcaggaggctgtgtggcaggagagatgtcctcactggggacaggtggtcatgactgctaaggaccaggcccctttcctcctgagcacctcactccaacagggagctacctccttctcataaaaacaccccctggaaagggccattcctcccaggcccccatggggaactttgggaacagggccagaaggaacgtcagccacagcacaggcgatgctccctgcctagggcctgtagagcccactcagccacgcctggctcccatgaccacctgggtctgagaaacaccagacactgcacagcacctcaggaaggtctcccccaagtgccctgaaggtccaaaaggaaccagcattttagatcagtgggccttccatgaggggagactgttggtcttgctttaacatctgctgcgaagaaaaatacaaaattggtcacaatggcacgtggat

SEQ ID NO: 38326 - DNA, 531 bp, Homo Sapiens
gcaatgtggaaagatgtgaagtttacgtaaaagtggcacaaatactccaatgaactccaggagtcatccacctagtctgccaactgccaacattttgctacattgctgaatcctctatctgaatgctgaaatcattggagagtaagttgcagaagtcatgttcctttgcccctaaatccttcctaagaacaaggacattctcttaacacaccagagtcagctatcaaaaccaggaagtgagcactgaggcggtcctaagccacaccctgttcaaacttcaccaacggacctgagtctccgatcacaggcctgtccctccccgtccaggaacattgagctgtctccttagtctctgatctggaacctttcggcctttctttgtttttcctaactttgacattggggaaggcccatttactttaagactgaccctgagtctgggtaggctgatgtttctgcgtggtttgccctagatggacacaactggccagaaaaccctggaaggacctctgtgtcttctcgagcatccgc

SEQ ID NO: 38327 - DNA, 526 bp, Homo Sapiens
ctacatgttatagcacatgcattagctgtttttcctgatgctctccctcccgtgaaccccttcctcaacaggccagtgtgtgtcgtccctctctgtgtccatgtgttctcgttctcattgttcagttcccacttatgagtgagaacatgtggtgtctggttttcttttcctgtgttagtttgctgatgataatggcttccagctccattcatgtccctgcaagtacattatctcattcctttttatggctgcataatattcctgtaatatgcttatgccctgaatggtattgcctcaattttcttctagggtttccttaatccagtctatcattatggacatttgggttgattccatgtctttgctattgtgaatagtactgcaatgaacatacttgtgcatgtgtccttacaatagaatgattcgtattcctttgggtatatatctagtaatgggatcgctgggtcacatagtatttctgcttctagatctttgcggaattatcacatcgtctttcacaacgggc

SEQ ID NO: 38328 - DNA, 393 bp, Homo Sapiens
acgactagcagtagctcgcggtttgggggagtttcttgactatatcacatgctgtcatggtggtttccgacccgggcaggtggcatggttctggggctagcagatgtggcaccgtttccctacgccactggtgtctgctgaattcgaggaggggcattagattctttagttcttcagggtggctttgggtcgtgttcttaaaagatccgtctggaatctgatccttcagtcttcccaaagagtctgtaaaccacttaatatcctgtcgcaaatccctttctgcttaaactaactagatggaattccgttctctgcaagccagcctgggcgatagaccacagaaccctctgcgctgttcctctccctgtggattctttttttcccaaaccaagt

SEQ ID NO: 38329 - DNA, 360 bp, Homo Sapiens
ctatcacgtgccatgtgccccagcttcacttcttcaaccatctactccacagtcagcacatccacaactgccatctcctcagcttcccctacctcaggtaccatggtaacttccacaaccatgaccccatcttctctgagtacagacaccccttccacaacaccaacaactatcacctacccttctgtgggctctaccggtttcctgactacagcaacagacctcacattaacattcactgtttccagttcctcagcaatgtccaaatagtgtcattccagtcttcccccagcatccagaatacagaaacctcatcccttgtcagcatgacctctgccaccactcccagtttggagacca

SEQ ID NO: 38330 - DNA, 392 bp, Homo Sapiens
tgttatctgctctgagttaaggattcatccactagcactggcaccttaaggccatattatatgtggtggacttgtcttaaatggaatttcctgcttcttcttaaatgtataattcctctgaatcgaatatacctttcttcatttctcctcattgactttcacagctcttcttccttttgatatacaaagtttagccttgtcagagagatctgggatttcccttacgttacgggttattttgtaaacagaacacccaggctcctcccctcatgtcctggctggcggtgaaccattcaacagggattttaaagcagggccccttactcccttccttcctggtttgtggccagggcacagggcagctctgttctatccaccctttgtccctgtgc

SEQ ID NO: 38331 - DNA, 451 bp, Homo Sapiens
acgtgcattgtgttcactgtgtgttgaaacatttcaaacatacacaaaagtagaaagaaatgtattatgaacccctatgttcccttgagccaggttcaacaactatctacgttttgcaaatttaagtggatttctaactctactcaaccttcccatgccggggaaggaggaagagatagaccatctgtttattaattaatcctaaagtttctagaaaacttgcacttctaattctgttttatgaaacctcctgccttctgggctgatgatgggcaggcccaggctgcagggcccagggggctctcggcaggagaggctgctaaccgagaggaggaagccggaagccctggagctcaaccattcattcccacagcagaattctctgctggggaggcgctccgccattcctcagtctgggctggaactgaggctttcaagggctaaaggtacc

SEQ ID NO: 38332 - DNA, 387 bp, Homo Sapiens
gtcgtatacacgaccattacaagtctgtacatatttgtctatagctgaaggaggaaaacatgattcttctctatcaccttctaattaggtatcagtaactcaggggtggccctggggtcatcaacagctccaccattgctctcagagttaggttcctgttcctgtcgcttccatgacagtgattctctcatacccaactcaccgaacccatggcagtgattctactaaacccttttcaccgcatccatgacagtgattctctttacccaactacaacgcaccaatggaagtgattctctttacccaaatcaccgcacccatggcaagtgatactcttaacccaactcaaagcacccatggaagtgattctctttacccaaatcaccg

SEQ ID NO: 38333 - DNA, 363 bp, Homo Sapiens
gtggtgtgggttttgatatggggcatgtcactttcaggtttagaagtatgtcaatggtttttagctttaaatattaccaaacttggaagttcactgaaggtttatcttttattaaatatttcatgtgtaaaaagttaaatgtggaaatattagatgatgcatgtaaatcgatgaaacactgtttcttgtaacaattatatctttccaaagggaaaagctgaaataattaatattccacaggtagaaatcaattcataatgatgcacatacttacattttttatcaggactacccataaatatttactacaaataatcagaaaccgcaaaatctacaatctggagccatcagatatgtccagtg

SEQ ID NO: 38334 - DNA, 433 bp, Homo Sapiens
ggatcgcgaaggggctcatcttcctcaacacgtgggatcacaatctgggattacaattcaagatgagattcgggtgaggacacagagccggaccatatcagagagaaagctattactgaagacctttctaactcacttctgtaaagatcaattcaataaaagcagcaaacacacatactttgctttccttgtgattaatgccttgacttttttgtggaaagtaacaccccaagaaagccagctactcatgtgggcaataaaggtaaaagtatctatggaataaggaccatttttaggacaatactttccctactacttagttctagtcccttttttgtagaattctgaggactttctacatacacaatcatgtcatcagcaaataaagattattgtacttgttctttgccaacccatatgtcttgccttactg

SEQ ID NO: 38335 - DNA, 489 bp, Homo Sapiens
tatcctcaatcttccacaaggagagcagaatgttaccagattcaatcaaggatctatggtgcttaaatgaagattctaagagcgggtgttatggtctttgccctctgtcacactgctgcggatgctctgagagacatacacacatctgatgtacttgtgtctctcccaatttcgagaactgttctttgcacacagtcagtaaaaaacatctggtggatacattcactccacagatacttattgaatgtctgctatatgccaggcattgttccagatgctgggaatagagcaggaaacaaaattgacagaatctttgcactcctagcttttagatgtgcaaaataatgttagcaggagataagtgctacagggaaaagcaacgcaggacaagcagccaggaagtatggaggctgctgccatttcaacaacagttgatcctggcaagttcactgggagcctgacgtatgataaggtcctgaaggtgaggca

SEQ ID NO: 38336 - DNA, 459 bp, Homo Sapiens
attatcgtactaaaacaactctgtggagcacctgagaaacacttagtttctccaagcttcagtttccttgttagaatgtgacccagccagagtataaaataaggagcatacagaattctaatactttctaaggaggttggttcctgaggaggacccttcatcttgctaactggggcaactgatgggcagatcagagaagcaggaagtcactctgagtaagaaatggtggcctagagctcttgtgagaaaagggatccaagaagggggtagtagagagagaagtgagagacggagaaaagagaacagctgccacaagaagcaaaacgctggagagggacagatgtctacagaagatgttttgggacagttttgctgttgaatgagtgccagtatccttccatagtggcctcgggagacctgtagttcagacccgtgttgtaggaggtgtcttttgaatgg

SEQ ID NO: 38337 - DNA, 392 bp, Homo Sapiens
ctggtatatataaggaaaagaggttatttggctcacacaattctgcaggctgtacgagaagcatggcacagcatctgcttctgtttgagggctcaggaaggcttcattggttggtggaagggaaaggggaacccgtgtgtcacatgatcagggaagaaagagaagcagaagagggggagggaagggtttcagatttctttttaaccaattaagatcttcacaggaaagtaaggaagtggagaacattaattccccatgaaagaacagcacccaaagcccatttccaatgaaggggatcttgccccccgttaaaccaaaaaacaaccttcccaagccccgggccccggccctcgggttacccggaaggcttcggaatttcggttaaattcatg

SEQ ID NO: 38338 - DNA, 404 bp, Homo Sapiens
atttggcggcggctggaactgagctcttgattgggagaggagcgagacataagcagaaaccagcccggggctccgagaggcagtgctctgggcagatgtgtggggtgccaggtgggacttagaagcttcaataaggccttctggaggcagcaaatgcttggacagagcttgacagggttagtaagagtgagcctggcaaataagctaggaagagtattgcagcccaagggaacagcatgggcaaagcatagaggtgccacagggcaggcagggcaggggcaggactgaagctgttcaggctcattcacggggaatgagacagagggaggtgggaccatgagtgctgcactggggtcgcaggatctctgctgactgctggacacccccagcccggcccggcgggt

SEQ ID NO: 38339 - DNA, 546 bp, Homo Sapiens
gggggcttcgctgacaaggggtctctgaataaaggcctgaaggaaatcggggattgagcctcacagttatgccagaggcgacagccaatgagtcctgagggggtaagtgggcttgttcaaagagggggcaggaagctggcgctgcaggcatcgggaagagccacgcatcctgcactgtaccagcctgcagacgcagacagggagcagcgatgagggatggacgcccctccctgggagcagcctccccacctgactgagcagaggagattcgtgtcctgctgctctttctggacagagatggcttttaaggtcccttggcccagtcccccagcctgagcctggagtctgggtttgttgatggagcttcctgagtctttggaagctatcaaggttctaaccctggttctgctgcttcctctaagtgcaactgtgagcaagccatgtcaccctcactgagccttggtttcacatctataaagtggttaacaagccagatctctgatgttgtcagctctacaagggtaggcattatcatgaggcttcttc

SEQ ID NO: 38340 - DNA, 440 bp, Homo Sapiens
atgtaaggtactatagaggatcttgtgcggagctgggagtagagttgagagtgagtctgagaatctcattgtgtatgtgggggtgtccctgctaaaagcctggaggccggggcaggtgggctgcccgtgctgacggaggagagggaggccatttcccatctcctggcagccaagagcccacacagacccagaactttggagacaagagtcctgggaaccctggcaatgagaatgcattggagttccaaggccgtggccatggtttggggcagagcagacaggagcagtgggtgggaggaaggaagggagtcccctcccacagagccatgttccccacaatgttcatccacaccccgatgtcaactgccaagccctgggcagcatccaggtctccggataaaccctgggagatgcctaggaccatggcaccgagtgcccag

SEQ ID NO: 38341 - DNA, 378 bp, Homo Sapiens
cgggcgggcgggtgcgattctgggaggttataggaagcaactggatctacccttgagggaccatcagcttagaaccctgtcctgactatggagccattaagaagctggtatgctctgaaggaagtcaggcagtggtgttcatgctgccatcctgaaccaagcccctcggagaccattctatctcattccaagctggcaagctccttctaagtgcccaccatggggcaggtgctatggaggacaccaagatagaggaagacagggcatttgccctcctgtcatttccatatgtttagggagataggcagacaggtgactggaggtcatggcctgtccggagcttaggatgaaaagcagctttattaatagtacctacaa

SEQ ID NO: 38342 - DNA, 383 bp, Homo Sapiens
ggagtgatctgcaccacagcacagcacataatgttcagagtgcatggttagattctatttctaagagtagaaacaattagattgtaagaaatacgaggggtcaaataacagagatggtcccccctcactgggagcgtaaaactgaactgaagagcagcagccctccccttcagaaaccttatctggcatccactgtatccagtgacaaaagacctgttgtatcataaggcctgcggtgtgaccaaatcacagcacgcaggggcctacggggcggggtaagtgggcctcagatgcccaagagtccagggagaacagaagccaccacccttactggccctctcagcagggaggctgagcatggaacgagccagaatccctctctt

SEQ ID NO: 38343 - DNA, 391 bp, Homo Sapiens
cagagtaataacccagacagtcagctttggggagaaagcagagtagagaagggtggaggatggagctccactcctagccagcatcaggccatggtctcctttattctagaacaactccttcacttctgtgagtctctcatggctgttgacagttttgaaatattcatgtgagttgttttggattttaggaattaaactccccacttgatgtgtgtgcggcatttttctcgctcggtttgtactcattcactttggatttagagacacgagtctcacctcatatggccctcggcatggacgtgcagctggcaccaatcactagctctgcagcccttgaacatccttggcacttaaagcgaatcctccatgcctcagaactcacaagctagcc

SEQ ID NO: 38344 - DNA, 581 bp, Homo Sapiens
aattctgcaccacagcatctagaaggggtatactgatggctcccatctctcacctgccccgttttggatttgcttctgtggcattaccaacaccaccatctggtaatctagaacctcagaaagacttgccatagagatgagattgtatgtagtttagaatacctttaacttttgtatatataatgcttgtcctgatgatcaatatattgaaagcgaatttgcttcataagccactgttcactccctgtctttgaaatcaacaacgtaagttttaaaccccgcaagggatttaaggagatagtagacagtatcaatgcctggcatctgaattaagaatatgtttagtggagaagttttaatacaaacctcaatgaaaaagcatcaatatcatattcagcctaataaaatgttttaatgaaaattgtcatggcgtttgacaacatctctttattaattggtcttttccattattattttcttagtagcaaacacactctggttttagctctcattagttatagtcctcattggattcacattttgcgacttcagctgtgtttatcttctcattggtctcagtt

SEQ ID NO: 38345 - DNA, 534 bp, Homo Sapiens
gtgagatccaattctgcaccacagcatcctcttgacaccgctgagctgactgatggccggacatgtccaggcccatgcgcacgcagttagatggcatggtctggcagtgagagtggcagccagagacacagtagtaacagtcccccaggatcttgatccgcatgcattcatgttcctgggagtgtgtatgtgggtgtgcagaggaacctggttggaggtcagaagggtaggagggagttgggaaaagtgggcagcgagcggggtattcctgaagaacttccaaggtggggtagtgtctagatcagatctagggactcctttcacttgatatggggctaactgtctttcatacagatctctttctcagaagagtttccccaagggctggatggctgtggctctttccacttttggcatgttgaagggggtacccagagttgagtacgtggtagtggtctcaggattgagaggttggggggaatccaagaattggttgcttggaggcatccctggagtctaagcaggttgctgggt

SEQ ID NO: 38346 - DNA, 472 bp, Homo Sapiens
ttatgggattcaaagctctaagcagatccgtcaaaagggggtgcgtggcagacgctcagttaagcaaatgctgagagtcagaagggcagtgaagctggcagccactgtttccattccagttttcagccgctgcctgtctccagcaaagcttcactaagtaattttctgagaacaaaagagattgaaactttctcctcaaatcgcctggtgtggtcgaatactcctgtttggtttggttctgcttgtgctccctctcgtctcgtaggtccactgtgataccgtgataaccatcggagggcggccattaagcggctttgcagtattctgaaaatcttttacagaagcagctgcttggtatttcgataacttgaccccactgttctcttggcttagctatggttctaaactttattgtaagtaaacattttaaagaaaaactgacgcttgttttcaaggaaaatcatacataaag

SEQ ID NO: 38347 - DNA, 404 bp, Homo Sapiens
agctagagagcagaggttttattagagtgtggctgagatgcatcctgaggtgggaagtgtagctctgtagaaactgaaagcaggcacttcaagggagaaaggggtggaatagaaacttattccaaaagggttggtcagtgtacatatttaacaggttatgggaggagctatgaatattcataatgggaggaggtatttgcatatacagtaagcaaacatacatgttacatatgtcccacattcattttgggatggagacttaacatttaaatgcattaaaattagcctctataggtcaaaaggtgaaatggaggacacagaggcatcttgtgcacagcctctgtaaatcagccagaaccattccgtggttggtggtctcttaccaggaaggaatgctggtcagt

SEQ ID NO: 38348 - DNA, 531 bp, Homo Sapiens
tagaggatcgtaatctgcaccacagcaccaacactgctgaattatgggctagaagagctggtctccagtcttgccagatcccaatactgtctggaattaggcaatgagaggaactctggtcattcaacccatgtcggatgtgcaaggtgaaacttcacaaaaataatgtgtaaaccaagaaaggaccacacagaaccacagaaaagtcctctctctttctcatccatctgtcgttctttgaagctcagcattatcttgcttcccagaagaggaaaaagaaggagggagatgacaaagggtgctcagatcttaatctcagtgtcccaaaggaaggacagactgttccagctgaatctgggatgatcaaacacatctcaggcaagcaaagctgacagtcaggtctgtcatccgactgaaaactagacagggaccagggatcctaactagttgctgggtaaaaactacagggacgtctgaccaagggcactgggtctgcagaagaaaatggatccccttctcttgatgtctagt

SEQ ID NO: 38349 - DNA, 351 bp, Homo Sapiens
tattctgcacccacagcttacgtatctatttgccaatgattcccaaatctatacccccacttagaattcttccctgaactccagattcgcatatccaccatttagtctatatctccacttggatgtctgcttttcctctcaaatttaacacacctaaaacagaacatctaaagcccccacctctgcagtcaaaacctgcttttcccatagcctttcaaatttcggttaatggtaactctcatcagttactcaagccaaaaatcttggattcatcacagactcctctctttcactaatctcttctttcccacatctaatccaagaggaaatcctattgttctaccttcattg

SEQ ID NO: 38350 - DNA, 403 bp, Homo Sapiens
cttatcacatctcacctgaattatggcaaagtcacctcaattctctcacccatcccagcctccactatggattaatatgcctaaagcagagctgaccacaacggtgagaagaatctgagagggaagcagcagaaaacacaagagtcactggacatgcatgcctcgagacagtcccgaacaaggagaaagcatcagaccccgtcttccgcctcgaacaagaggcgtgcggacttcgcccagaatgctgttcgcccctggacaaggacacacccggggcgtgaggcgcgaagtttcaccagttgctcaagcagacccagcccaagacgcttcctctttctcctactccactccagttcagacggctactaatcccggctccggcgctgcggcctgtgggtggcag

SEQ ID NO: 38351 - DNA, 560 bp, Homo Sapiens
ctagatatcctttctgcaccacagctggacatggtgtctcctctgctgctgtccctgctcatcctggaccctaatgctgggagaggtgattctgaaaagtcagtcaatttatccatcaaaacagaactagatcgacaaatactgattgtttaaaaaactttaagatattcaaaggcaggacaatagaagatacgcaaaaggggacagatcttcttaaagggacacgaatcttaagagacaggaaatgattctaaatggacaattaacaatttaaggcaactgggtcttttagattaccgggaaagtaggcaaaccaggtgaaggagacctttcctttctttcctggcccagacccacagagcagagccgacggtagggtaaaaaacacccaacctttctcctgggctccgacagctcctgaagcagcagaagaagcttgcttcagcctaacttcctgaggatgagcagggtggtgtgtattggaggtagggttgaagctcagtattttccgaagcacgcaagccccagtctgagatgtcccccttgctgccttatgccac

SEQ ID NO: 38352 - DNA, 412 bp, Homo Sapiens
cggatcttattctgcaccacagcccgtctttatttttcatgtgggagtgacttgagcttgtctgagacttgtggagaaagtctgaaaaccccaaaaggagaaagatgactagggtcacacttgaggatttgccaggtgggcagtgagggcctggccaaggttgaggattgctctgtgattccagccaggctgctgtgccaagacctctggcaactcctggcaacctgtgtgcaggtgtagagaagtccaggagttggattccccagggcttttttctgccagctgggagagaggtgcgcagtgctgaggatacttgcagcaggcaagtgatgggatggtggctgtggatccaggctggggaggaggctgtgcagggaaggtacagaagagaaggtaggagggagctagcagg

SEQ ID NO: 38353 - DNA, 391 bp, Homo Sapiens
tgctgggattacaggagtgagctaccacgcccggcctcttgccccttttaattgaggcttaacttacatacagtgaagggctcagatcttatggtattgcgtgatacagttttacaagtgtgtacaccctgtgtaaccagcacccacatcaacaaattgagcacttcctcctcaccggtaattttcttcaggcttccttctagctgatacccctgtacccctaccaaaggcaatcactgttctgacgtcttccacggtggatgagttttgcctgtttctgagtgtcatttctgttgaatcgccccatgcatcctgtggtccttgtgtctggcttctttggctctacatttagttggtgagatccatccgtgtagtgtgtgtatcagcagtg

SEQ ID NO: 38354 - DNA, 464 bp, Homo Sapiens
attggtgttggagcagagttgggtagatgtgcacctgtgttgggggtcaggtgcagcctggtgtggcatgtagagcatgagcatgttgagggcatcatgcgtgagggtggctgcagtggtgtcagagcccagcagcatgtggagggtactgacacagtggggtggcctgacgtgggctgtccaagtccaagtggcagaggagtgagtctgagagcattggggcagcctagcccggggagtcaaagcctaagcagggtgaggagctcccctgggcagagggtggccgagtgtggggtggcagagcccagagagtctgggaaagcatccatagggagagggcgtcattgtggaacatgggagaggaactaacctaacagggggctagatcagatacgtcacgtgtatatactcacggcctggagccagcggcgttgccattagcgccagcgcggggtaccggaggt

SEQ ID NO: 38355 - DNA, 417 bp, Homo Sapiens
gatcttacgctggccaatggcatgtgatttcctttggtaggccagctgtggttggttggtggcggctccctagaccactggattgactggggttcagagtgcatgaggaagaagatctggcatgagggaatggtgacatgtgtctgggcatggaacaggggagtggcggataatgcttggggtctgccatcttggacagtttatcttacccgggtttgttggtttttggctactctcatgctgagctcagacaacttctagtggaggctctgacttaaagattggcctcagaggtagtcccttgccatcagctgttgacattgaaatcctcaactgtcactctctaaagtaaagcccccttttgttcctctcaccccagtgtggaggcctgtgcttgtttgccattgggccagcggg

SEQ ID NO: 38356 - DNA, 350 bp, Homo Sapiens
ccggtggccaatggaacctgaaaacttcacagacaacatgctgccaagtggtagtgggcatggtctgcgctctttgtggtaaccctggtacacaggcgtgcgtgggaagtggggttcccttcagaatgaaacacttttattttccctttttgccctgggggtcccaagctgttctcctggtgaggtgggctggagggacacctcagtcttcacattgtgtggcgggggggagaaacttgcaatatgacagagcaccactgctcgaagaatcatcacatagaagatatggcgccccctcttttttggttacttggcttggaccgctgggacaggacccgtcctccttcatg

SEQ ID NO: 38357 - DNA, 359 bp, Homo Sapiens
agttgtggtgttgggtctctcgccaggcagagaggaccaatgtaatgtcagagccacgctgaactctggcatgggcgacgtttcttttttctttgagtagtgtgtgttcgtcttgtgatatttccctaccaggccattgagaaacgttagatggcagcaagggtgtgcgtggctcgatcccagataaagagggccaggcacagagacggcgggatcgctggaggaatttgagagtccctcaggtctcaccacccatttgcgggttggggagcaggggtacccctgtgggccgtgccttggagctcaagtgactggcctaaggtcacatggcggcggctcatcgaggacttcttattccg

SEQ ID NO: 38358 - DNA, 370 bp, Homo Sapiens
gcgcgagtgattgtcgcctgctgccctcttatgtgccccagcccacaagcccatgctgccagctcacagggtcagctgagtagcgaaggagccctacccaggatgtgcaggcaccaccgtggtggggctctggcgccccaaggtgcccgacccaggaactgcaggtgggagtcctcattttgggacacacggactccctcgctgacatctaagagcccatatctgcggggcctcagggtctttgctgaggcctaggagaggaagggtttccttcttggaaagtgccaacccaagcagggaccccctcctcaaacctccttccgcttaacttcccttccctaaaggcactgtggtgtctcagcctatggtg

SEQ ID NO: 38359 - DNA, 372 bp, Homo Sapiens
actcgggggtatcagctgatacggatctaaactcacattacaagtacgagacccacggggtaggagactctccctggcctactttatttcatctctatgtacatactttcagcagtaagctatatctctatccttttagccttccgtgacagcagaagctcagattcagtgatcattctgaatggcttcctcggcatgggttcctaactactcctccactattggcaagcatctttctacccacacaatagactcaaaccacgagtccatggccaagtccctgaggttaccatgcccagtgccatcttaccatgcagtgatgctatttccttcatttaacctgagtcattggtccccatcccccacattctc

SEQ ID NO: 38360 - DNA, 404 bp, Homo Sapiens
aggagtgagacatcaaatacccccaaatatgtctcttcccatagtgtgcgtgtgatgtgaattaaatgaataaagcataaaaatgtcatctttaagatgagatgagagagctctccatgcatagctcaattagaaagggagaaatggagaatggttgacagtgtcaatcaaaacacaccaagcgacgtgttcttaggagggttgacttctagagggcagatgaacacagcaataaagtgcatgggatctggaacctgaccaactcggttcaaataccagtaccactacctgctagctagctgaacctggctacgtgactccatctctcagtgcctctgcatccttctctataaaacaagcataactcatgaagatgactggaggaagtcaggctctgtcccgag

SEQ ID NO: 38361 - DNA, 403 bp, Homo Sapiens
aaaaccaatgactggcagctggtacgtgatggcgggcttgcctttatggcagctcgctgtggatggggagagcactggcattggagctagccaggctgggttaccatgtactcatgatacacctgaacctcagcttttcagcttcactgcacataatacctacctggcagagctgtacgggttagagagaagcattaagtgccagatatggaataggtgctcggtaatagtagctgttattgttcatccccttctcagaatacaggaaaaggaaatagaactttggttacagggttgtgggcccccatagcactaggaaaacacacccgtgtgagtacagtctctgttaataaaatggtccagcaacagagctgagttggttggcttgggccccagggccaca

SEQ ID NO: 38362 - DNA, 393 bp, Homo Sapiens
ggtctatcagcttatcatggtgctcctgtgtgtcagacacgtcgctgatcataggcaactggtgatcaggaatgctgagtaccctgcacagtacccctacccccacctctgtgcatcccttcaccttccctggctaggagtgcagctggatttggaaagtatttaagcagctataggggtgcccagctggtgagggaatggaaaggaagttatcttggttgacaagtgtcagtaggggaggaggttggcacctgtccttggggaaacaaggcttggggcagagggagggaagtcctcagctcctcccttgggggagctgtctggggacccaaggggaacggggtctgaattccatcagtggatctttttcctgctccaaggggcctggtctga

SEQ ID NO: 38363 - DNA, 417 bp, Homo Sapiens
tcagcatcacaccattctccacagagaccatgctcacttagtaactctgaggagcccttgagtatagatttacgtagcaccctccccaataccaggcatgatgctagacgtggggtgccatgcacccacagtacagctgccagggggccggcgcggggcagagcaggctgccccgccctgaggagctgcagacacgcagccccatgaaagcccagactgtgggaggtgctatgaagggcgcctgggaaaccccagtgcgaggtactcttctagtagagtctccccaggttcctcaacagcatgtttccagctcatccgagttcgtatagggaggaaagacccatcagaccagaagcatgatggagaacattaaccacccggctgctgtgcgccagggctgctggagggggccgcgcg

SEQ ID NO: 38364 - DNA, 507 bp, Homo Sapiens
catccttatccgtcaactcatcagctcttcctcaaggcaacctgaggccagacaccaagaaaccaagcgtatctgctctaaaatgacttgttcctggggaatgccttcaaccaaaacacagctagtatttctatgccccaaatccaatcccagtctttcatgatccatgccggcggttgggtggggaggggaatcattggttgggggaagggaggaaaccccacctccagcccccgccaccgggctccctgggcacccagcaagatctggggctgcagagaacagaagagctggtgcacttaatccagctctgcccttggggggaggaggacctgtgtgtcaggctctgccatgggaacgagtgtaaaccgtggctgtctcctgcagtgagccaccgcggcaggcacgttgactgttttactgacatcactcaaaagctaaagcaataacattctcctgcgttgctgagtcagctgttcatttgtcgccagctcctggacttgatgt

SEQ ID NO: 38365 - DNA, 499 bp, Homo Sapiens
cagagaccaacagcatctcaaaagcaggctctgtcttgtttatctttttattcccagcaccagaacagtctcagaatcaaaatatcagggcatagtttttgagtgacttttcaagaactagatttaatcctggcttggtttttttgttcatcctttaatcaatgctaatcaaatacccaggaccactcagcaggtatttattaagcatttgctctgtgccagacgctaaactaatcgtatctggttcagtggtgaagatagatgggagccttgctcttgagtgcagttacagtacagtactcattctatgatggggcacacaggagggatatgtgagccaaagcaggttggtgggtgggacaggacaagtttcccagaggaagtaaaacctagctaaaatcccaggtatgattaggagctagccacttgagagaagagggaagtgactaaattttcataccacttcacatatatttttcaagaaaatactcgaaagtgc

SEQ ID NO: 38366 - DNA, 469 bp, Homo Sapiens
cagggaatgtggaagtcgttgacattgcctgggccaaaagagtgggagatagtttttctcccctcagcccactcctggtagcacctgtcgccagcctggtacaaagccaggcctttttcttctgtgagcatctcatcactgtccagcagcaggtggaaaaagggggacaacaaccagacctattttttctcccccattttttccaaattttgctgtgccaaatgtttaaaattttataaatatgaatctattgaaatttccttaatcaagagcttcttcgtgtaaagtttgcttttttagctatagaaaaagaaaacagtaaatatctcttaatggcatccagccttgctgagctcaccttttttcctgaaggaatgggtaggagtgaaatatttaatgtaaacatttcaccaagtcccttaccctaattttgagctgcattaaacccaactcactaacacaggggatg

SEQ ID NO: 38367 - DNA, 422 bp, Homo Sapiens
cagaaacaagcctgatattggtccaggaggagtcattgccttatctctccaggtggttatctgcaaatacaactctgagaaatggctcaggtaagaacatcacggtcttgcattggtggcatacgcagcaaggatgctcagggctgatgaagaagtgcctcttccaacacagggatatttttgaaatgaatttattacaatggagatgaataaagcaaacatttactcatcatatgcctgagaaaatgtcatgtcccaatgccaggatataagttgtctaagttaattttaataatcctgtgaggttatggttatttttgtcctattgcagatgatgaactgagggccagagagattagggagctggacagagttcaaccagccaggaagtgagctaggactggtggagcagagattctatc

SEQ ID NO: 38368 - DNA, 363 bp, Homo Sapiens
aattgcttaaatgtgaaattattcatgtaagccttcatgtattagtccatttgccttgttgtaaaggaatacctaagactgggtaacttgaaaagaggtttgatcagctcacggttcggcaagctgtacctgaagcatagtgccaccacctgcttctggtgaggcttcaggaagcttactgttaggacagaaggcaaaggggagccagcgtgtcacatggccagcactaaagcaagaaagagaagggggaggccccagactcttttaaacagccagatctcatgtgaagtcagtgagaactcactcatcaccaaggggacggtgctaagccgttcatgagggatcttcctccatgatccaata

SEQ ID NO: 38369 - DNA, 541 bp, Homo Sapiens
catttactctgtgtgagctcagcagaattgaattccaacttggatataggtgtccatggtgttctacttaccctgggttccgccttcttccttgcctggtggcctttcatgacatcataattttgatcttcctttgttggatactctgatcttgttcacagagaaacataagcctaaatatatggtggttattttttgtgttgtggcagactctaaatactgagtctactcagcgttattttgcaactagagtggaggaatcctaaagtgttaaaagggctttgaagattgagtcagcatccttattcatacagtgcagaagtctgaattacagagattatgcagtgtatcgtggtcaaccagtaaatttgttgtccgtaaagtacggtgcagaaatctgagattacagagattatgcagtgtatcatggtcaaccagtacattttttgtcgttaacatccagagccactgacagggagggtgaaaggcacagagtgaatttttttgttccttgggcttttatcaagttttgaagggatag

SEQ ID NO: 38370 - DNA, 452 bp, Homo Sapiens
caccttcaaactgtcacttcacgcaagactttaaaactggataataatattgcctcattatgttaacttttacggatgtgaaaagaatgatccctaaaagtataatcataattgttatctaataactattttaattcagtgtgaacatatgcatattcttatattacaatttctaaaataggaggcttgagagatgctatagtccattctttgaatgttctgatgaagcccaaaaagagttagtaaactgcttaacataacatggggactttgtgtcagagcattcagatgaggcttaagatatacttgccctgcatctttctaatatagagtgatagatgacttttaaaaatgtataaagcatctaaaggctgcacctggagtgatactgaagtaatgatttaacttacataaaagcttcttttttcttatttaaactaggaaaacctctg

SEQ ID NO: 38371 - DNA, 531 bp, Homo Sapiens
ggctaagccaggactgcttttctggagtgataatgtgcttgcctgtgtctaagagaaagtaccctggctgataaatgggacttggattttaaataccattggataataaatgtatgtgatggctttggagcaaattgattgacaatggctaggagacagcttcccaaggctggaaagaggggagtgcggaacatgcctccaccataccactgcccacctcctgtgacctctgcagcaaaacctgaagccccaaagaggcagcttctcaaagtaaaagtggaatgaagttcctggtgacctgaattcccatggaggaaagaggaaaaggacattatgcaaggagatggcatctcgtgtccctggtgaaccaattccattaggaagacggtgcagtgtgaggtggacctggacctggataaaatgggtgtttaacaagtatttgttgagtaggtggtggaggaggcacgactagatgcagggtctagctgagttgacaagagctaacaccaggtgtggaccaggacaggggga

SEQ ID NO: 38372 - DNA, 385 bp, Homo Sapiens
agctaagcatttgaatcagacttctcatagcaatgttatgggctgtctgatatattcaggatttgttgagcagataagctgtgtgtgatcttactcattctcagccatgccgcagacatacccatttccctttagtaattttttaatacagagaatgctattaactgttactggatatcaaataattttatttttctaatagtattttccaaatatttcttaaaattcttaaaatttaggttaaagtttgctggtctcttacatttaataaagctgggacttgaagacttaccatagttttcaactgccttgcaagttcataaacttctaagggtaaaagtgaataagataattcagagttttaaggtaaaggctttatattagc

SEQ ID NO: 38373 - DNA, 462 bp, Homo Sapiens
cgcaaaatttgtgtataaagcatatatttaagtgttttagcataaatttaagttactccatatgaaatgtttaatttcagctactgtgaattctttcgatcagtcctttgcttttttaaaaaatcttttccatcgtgttaaaaagaaaattagctattaggagatattaaaagattgatgtcttagaaggacagggttaaaaccttctgtaatatatttaaatatatatttttaagagagatgctacattgccaatgattttataaataatttaaaattaatttacaaatttatagatgcaaaccaaaagatctttttaaaagagagagagaggaaaaaaatcaccttttatttgtttgggtctcattgtcagaattattattcagatcaagaaacctgtgtcgataaaacctaatctcatattggagagtgaatgtcgttaagtatttctgaaatgtttct

SEQ ID NO: 38374 - DNA, 473 bp, Homo Sapiens
gcacgagggaaaactagcttaaatctctcactcaacctgatttttgaattgccttctctttttatggtggagggcaagcaattcagatctctggattatgaattttgtgaaacccatgatagtactattacttgaagcctgtgttgaagatatgagttaatctttaatgtgctttgtgatatgtatttatttagtctcaaactaccaccaagtatcattgtaggcttgtttgcactggatttttagcttactctcattatacagagttattggatgtatttgtatttgaagctatatttgtagttatagcaagtgtactgcttatattgtagcattgtgtataaaaatctgatttagatttttggaatgctagtatctggaaaatacccttaaagtattttccagacagctgggccaagtatttcagtaattatgcttgttaacttttattatttatatctcttgtgtcttag

SEQ ID NO: 38375 - DNA, 369 bp, Homo Sapiens
tctgtcatttaatattgggacaaaattgtatttctaactcacaacaaacagaaaaactacattagatgtactatcactttagatttgaaaacaattctttaaaacttttacaagaaaatcaaaataagactctactgcctttaatttgaggaagcacatgtcattaaggaaaagactgatgagttcacatttgctgataaaaataatataatctgtccatcctaagttaggtgtccaacaaatagttacatgtctatcctctcacctttcatgtcctccaacacttctctttaaagagtggcatagataacatcatgaaagaatgaggaaactccagtgcaccaaaaaattatagagtttataaatatc

SEQ ID NO: 38376 - DNA, 388 bp, Homo Sapiens
gcacgaggggcctcgcgctggggacgttgcgtctgcagctgcggcgcgcctcccaccctcagagggctcaggactgtgtatggtcaaggaatatttaccaaagaagtgaggccacctgttccccctcccccaacctgtgaaaaggaagcaaccatccctcctgccctgcagcccaggaatgaagctgcaaagttctgatagtgcctgccatgagatgttacagcacagagcagtggggcttttggacagctgggaaagaggagtggcataagcgccccacctagactgcccaataattagggataaagctgacaccgtgggaaaagcctagagtttgcctggcactaacagatctaacttcagactttgtaggtggggtgactcagga

SEQ ID NO: 38377 - DNA, 404 bp, Homo Sapiens
gcacgaggtctgatttcttcacacttgtaaacaattgtattatatatgcatactgtatattttgtagttataagaagaaaaataccagaatttaaaatgcagtcacaatgtgttatgttttcagatgacttacgtatgtttttgttcatcagtattttaaaaaataatcacctgtttgtgaaaataatggttttgaaaacagcattatgatgagagggaacttcgtaatttcatgagaatgtagatggtgactgtttaagtgggagctcacataggcattaacatcaccctccttttgcacagtccttttaagtctcctgttaaacatcttttattgtgtgtatttaaaggcacacagatgctttttcctgtattcatcttacaaatttacctacatattcagc

SEQ ID NO: 38378 - DNA, 465 bp, Homo Sapiens
gcacgagtatgtttgtttcggttgaaatttttccttaagtgtctggtgatccctggatttctgctcataattaaggaaaagaatgctgactcactggacccaggcagggcttctctcccagattgcaggcttgcctcggggatacacgggtttcccaaatgctagaatgaaaagagattttattttggcttgctaacatcaaagatactagtttctccagatggtttattcagaacactgttgtcttatttttatttgtctgagattaaatgtcttcccctttaattaaagggaggtctctgatgaagtaggtttgggaactgctaccttggtgacagcttgagtctttcctttagtgaagtgcagcacaattccacgtgcacggtgaccttctcttgattagggtgccttggaatgtacagaacctaacttgaatatacagcactggtttcttggtaaggagtg

SEQ ID NO: 38379 - DNA, 460 bp, Homo Sapiens
ggaactagcccggttgatgagcatgttgatattaacggcctggcttggccaaagcttccggcccagcacgctttagcatcagctggttattctgagaacattcttttcaaaacactctacaggacaaacaggccgagaggttcctttgtccacagctggcctctgaaactgagcagactctcaaagggttgagaagaaccccgaggaggctatcgtctgcactcagaggctgaaacgtttgaaaacaggtgcgggagggggcggggaggatggtcagtgacagcacattcttcagcaaacatgtgtcatttgtgcttttaccagagcggagttttaattcctaaaatataacagcctggtgcaggggctggaagaagagggcgcgttttatgtgcaactctgctaagggcttggttgctgaatgaaaggtttggttccatggaggttcaggtacctttcg

SEQ ID NO: 38380 - DNA, 429 bp, Homo Sapiens
taaataaaatgttacagttcacagcatgtgtttccagagaggatgttttcctgatagtgctttagtggcatctcttccttagaaaagttagtttagtccaagaataaagtatagcctgagagtacttattgttgaaaatactttatattttctataatagtacagtactcctatactgtctcttattatatctaacccagtcagtctttcctccaacactggaaaagtgcatttgagggacatgttcagtaaatacactggcatcagtgtacggcttagggatatggtcacagttttagagggatgcagaaacagaggccctatgtaacagattaacacagcccctctcatagtctgtatcctttttatattcggggatgggaaaggttacctaacctatctatagtattaactgaatttctgaaaatg

SEQ ID NO: 38381 - DNA, 527 bp, Homo Sapiens
gttggatcaatgtgagaaagactaagataaagcatatataagcgtgttttataaatggctaagtactatataagtgctattattaataatcatataattctattacattattagtgaagtagacttttggggccagttcatcctgtcactcggcaaatatgtgggtgcctctatatgtctagcaccttccgaggctccaaggatatggtagtaaacaaaatggacacaaaatgccttctaaagcccagacaactaacgtacaaatacatctttagagcacaacccagtcgtaagttagggacttccagtactaacttttggtcaactgtcaatgtctccaagagcgttgagggtctacatttttgcttagtgcttttggacagacattgagttagaggacatcagtcttggcatttaatggtagataatgtgaacacaagaattgtgtcttctcattaaagcagtagcccagtcatctacctagacaggcaataatagagtgggagttagatttaggtaaaagtgac

SEQ ID NO: 38382 - DNA, 423 bp, Homo Sapiens
caaagttgatttttaacgtttgtaaaggtttgaatgtttatagaagtgcatcatgaaattttgtgtaaatccagatgaactgtcattatagtactataaattagagatagtccataaagttgggttgaaggagattgaaaatatttcctttgattaaaagaaaataattaactaacttgggcttgcttgtgattgaagagggagattagatagtcctctgtccccccaaaaaagaaactagcagagaaagacataaaaagctctttggtgtctgttcatgtgctgtacattttttccgttttaatgtcttgtgtagataattcaaagtttgaactatttctttcttggaataagtaataatttattcaatatggtgtatctctgagttcaatttaaaacaatccaactcagtaatatttattt

SEQ ID NO: 38383 - DNA, 479 bp, Homo Sapiens
gagagaatagtgggtaggagttaaccaggaaagcaaggatgaaagcgtgttgcgtttagataaaggataggcttcaaggtcagggaacgttgctgggtggtgagatggaaccctgatgtggaggctcagcaggaagaagcaggaaggacactgggcccccggtggttttagttccagaaacaaatgtgggccccagggctctgcaatggtaaggctggaactactcaacataagagctccacctttaactgtgccccctaagagtacctgatgatccccctatctccttgtcaatgttgctgttcttctccagaatctatttcaacccttctctgatttcaaaccaccagtccctttacctctcagagaaaacagcaaccacaaaagcctctccacttcctactatcttaatattgacaacttccagatcagggagctgagatatctcaagctcaggtttctcttctgagcttcagacg

SEQ ID NO: 38384 - DNA, 500 bp, Homo Sapiens
tccagggatgtgagcacccactccctgtgctagttagtgcctgattctctggggggggcctcagtaatgggcccccccaacccctttctctggtacagtgctgtctgcctggctgcctcccttaaccctgacttctaagccatcaatttcatgttatttattattgccctatgtggggtggggagggaacctctcgggtctgcacatctccccttccctaacagttcctgttcttgacttgaagagaattgacccgtgggggactccccacctccccaacccagactttggagcgggtgggagttgtaagacaaatcaaaatacggatgacaaagaggatatagccgtgtataccccagggagaggaggcgccgagttctgatgggagaggtacaggttgggttctctgcctaccattgctgtctctgacttccagagctcaaccccctcctttctcccagtggtgacaagatatcaataaacttatttttaatacaatt

SEQ ID NO: 38385 - DNA, 367 bp, Homo Sapiens
tgtggccttttattctgtaatctcttctaaataaaacattgaacatccagcaaacataaaacctgcctcatttgaaaaggaatttcaaaattccaattaataggattctctagagagttttgtactttaatatttgtcagtgtagtgtcaactctgttaccaaggtagcttcttggtaaatccagtagctactcaatgctatttgtactgaataaagcaattattaacatgatacttcccactattgattaatgcaatattgatatatttggcgttgtggtagctgttgcagaatgaatagtgtaatgaccataagattgcttggaaaattgtaatacagatatccacaatgaattctttcccaaaa

SEQ ID NO: 38386 - DNA, 505 bp, Homo Sapiens
gtttaagaagcctgagattttcacaagaaccagcaaaaccaggagtggagagttggggagatagagaagtaggcctaaaactccctcttcttgagtcttttttgacttaatacaccattgggtctgtcctggtgctatggcctatcacaaaggactgttttaagagagaagcaagccacagccttgccagataagtctccaacaccagcagaaaagcacggaccctgatctgtgggaggcaagggtctcccattatttctggaggcaaatggtgccttctagtgaaatggtgccaccatttgctgatgggggtgcctgttctcaggatgtgtggaaactcaggcctgagggtttctacatggtttattcaatctaactgcatacctagcttggcagaatggaggtggacaaaagtgctgaaaggatgagggtaggcttttagggcaaatcaagtcacaaagcagatgattgagggaggttacaaagcttaggcagagttaaagtt

SEQ ID NO: 38387 - DNA, 507 bp, Homo Sapiens
cgctcccccatccctgctctgctctgaggtgccagccagagccgctcagggtcctccgtccggtttcccgtgggcctaacagcagggccctggggccaccacccgcacctccctgcctccatctcagaaactgaagcctgggagccccctgggccacctgagtctgggagacgcaagccaatcccggggacaggccccggccccttcctagtgaggggcacgctctggtcaatcgtggggcagagaaatttgctttttaacataaaacgtatcctttgtccctagaatggcaggctacctccctgccttattctgtgaagatgtagttcctttattagcagagcttactttgaaggtagaataacaataaatatataagcagttggagagtaaaatcactacagtattcaagtctaaatatattacaaatgccaagttttattggaaaattatatataaaattcttatatacattttagtaagcctccatcttagtatctaaaactt

SEQ ID NO: 38388 - DNA, 475 bp, Homo Sapiens
cctcactcctcattccagggtagaggagggtttggtcccaggctatggacaaactgctaatttgtttgaagtttgaattatttttcatgggaaagggaagtgataggaaatgaccaagaccatccacttttgacttgagtatggatcgagtataagtaatagtttcctagcctcactgattgtaccatgaactgacagacctaccagtcaaattcatgtacccagataatggtctctcacatggcaacaaagtacacagcagtttgcagtatgtgtctcttttaaagccagttcagtgttttcaccttgacgaccactcctgcaaacagttctcatagagctcttctctgctccccaaatcaatatattttgaagctatgtcaaatatttacatagaaaggaaataaagttgtatgtgctttgaaaccagcaaaatcctttgtacaacacctctcttctccttctatgtttatga

SEQ ID NO: 38389 - DNA, 379 bp, Homo Sapiens
tttacatgttcctccagtgttgagaaaaacctaatgcctttttttgtgttaagtttacctattaattttaatttttgtagagatagaacttagatgacggatttaaccttgaagtaggtttgtatttttaaatctatttgctttgattaccacagacagtgattgaggtagatgggcactatctggctgcttatatgaaggttttgaaaccattctgttaatccttttaacaaatggttatctgtccttttctatcttataataaaagattgaagatatgacttagtatgctcattgtactgtttgcttagagatgggaggctattttgatttttcatgctgttctaaatcatgaaagaataggtaacttgtactcatt

SEQ ID NO: 38390 - DNA, 512 bp, Homo Sapiens
tgaacctccctaacctggcagccgcctactcgtccatcctgagctcgctgggcgagaacccccagcggcaagggctgctcaagacgccctggagggggcctcggccatgcagttcttcaccaagggctaccaggagaccatctcagatgtcctaaacgatgctatatttgatgaagatcatgatgagatggtgattgtgaaggacatagacatgttttccatgtgtgagcatcacttggttccatttgttggaaaggtccatattggttatcttcctaacaagcaagtccttggcctcagcaaacttgcgaggattgtagaaatctatagtagaagactacaagttcaggagcgccttacaaaacaaattgctgtagcaatcacggaagccttgcggcctgctggagtcggggtagtggttgaagcaacacacatgtgtatggtaatgcgaggtgtacagaaaatgaacagcaaaactgtgaccagcacaatgttggatgtgttccgggagg

SEQ ID NO: 38391 - DNA, 414 bp, Homo Sapiens
gaaactccttgttggctcaactgctcttcacagatgcataattttggagtccatacaccaccctggtcactctctttagaatacactccagttttgtacatttattctattttcaactgtatgttaattttaaagtacagcatgcaacatgaaaattaacatgcacacaatgagaggagctgtgttaggcgaaggagcttattgatgattactttgctttttcaaaaattgtgtttaatgttggcatataccccatcttccatagaaataaagtagggtgttcaggatctaatttcaaatgtagactagtaatctcaaagtgtaatgggacaattatatcccttgttcaggagacaaaattgctcccaaaccttcttttgttctgttttttcatggcatattttaagcttaaaa

SEQ ID NO: 38392 - DNA, 469 bp, Homo Sapiens
caaccagtgagagatttatttcctataaagggttgtagcctgcagggttgtccttctgacaggctgggaagcatagcctccagccagaagccagaaacagactcttcaaggaggaggtaaaggaaatagcaatttatgctgactggaatggccaaatacatttatttaataagctccaggaggagtcatgaatatttatggaaggagaaatgcatgcatgcacaattgagtttctggcttcttcatgggtcccatgtacaaaaatggcagtgttagcatgatcccagggttgagttttcagccctctgacattaaaaggtgaagcagaggacatgaaaactcgctctgtgcatcctctgtacggtggccagaacctctctgttgtgggtggtctcttatcaggcaaggaaggagaggttgatatcggtagtggaggctttgaaagggttgttctgttaaatccttaggt

SEQ ID NO: 38393 - DNA, 478 bp, Homo Sapiens
gaaagttgatggcatggctagtgctcagtcatctggtcaccacaactctactgagcccctcccctgggtgctggactggctctaacactgtgcgaacggacagaggaaggctcatgcttgtggagccaacgttctaagttggggaagagtcaatgtatgaattttaaaaacagtaaaacaagatcatttcagagaacggaagacaacagcaagcacgggccacctgtgaccacgtggaccctaggacccaagagcatggccctggagctgcctggccctactggcctagactgggcctcggccacgcgctcctcaccttcacagtggcattgcagtaccgggcacagccgctcttcaggctcccaaacctgccactgtagacacatctgtgtgtgaagagtgcctgggagaaagccaaggagggaaagcatggcagtcagcatgtttaggtccttccaggggactttgaacaaccctt

SEQ ID NO: 38394 - DNA, 506 bp, Homo Sapiens
acaaatcccaggaatctcatgattttaggagagcccttcccagtgagttaaagctcattgctcatcagcaaactcaaacaggagtgagaccctactgatgcaatcaatgtcaaaaagccttcattacaaattcagggcttgtgtatcatcagaaaactcatcatagagaagggaaagtctgtacatgcagcaaatgtggagaagttttcccttggaagtcagaactcattttatgtcaaagaaatcattcaggagagagaccgttcatttgcaaagtatgtgataaaggctttgtggttaggacacatctcactgtacatcagagagctcacacaggagagaaaccatatgcttgctcagattgtgaaaaagccttctcaaaaaaggctttattcatgattcatcagtgaattcacacaggagagataccctattaatgcattcaatgtcaaacagctttgaagaccagatctgagctcagttatcctcagaaagttcttcatagg

SEQ ID NO: 38395 - DNA, 431 bp, Homo Sapiens
cttttgagggacttcatttctttgggttattcatgttttcttggacattttaataaaccgtaagattatcttaattttaattccttagttaatattattgagtgtagactgcatgctgaaagtggtcatacattcttttaatttccatgtatatatttttaatactcagcgaaaccttttgagatagatgatatccttattttatgaatgaggaaacggagacttacagaaattaatttgccccaatcaaacaattggcagacccaagaattaaaatgcatatcttctgatgtcatgtcaagaactattactaataaattcattactgtgatctcactgttgtgatgtatgcctttcccccaaggttttggggtattttgatgtatgcctgttttgatgtatgcctttcccctaaggtttgggcacattca

SEQ ID NO: 38396 - DNA, 360 bp, Homo Sapiens
aaggattataatatgctgagtaaacttttggcactaaggaagccagctacaggccacgtaatgaaaactattcagaaaacagttcagcaaatactactatttgaatacagttcaaatcgtatttatataaatactctgcctacattatttaacccaaactggattattcaccattctttgaagatgccttgtgttttctgttatctacttctgctcgtgcagtttacttacaccttcaccctttcaaatcctaactcttcttcaaggcctgattcagattttaactttttaaaggctatctgaatcattcaaggagaagataccctttctctcataaaaacacttagagcaaactaccac

SEQ ID NO: 38397 - DNA, 501 bp, Homo Sapiens
acaagatgttgaggaataatcagtttcactatataaggttggggttttaatattccaaagaaagctcaaaatgatctttgttctcagtgacatgcatttagctaaaactggacatttatatcttgatcagcccattgttatagactctttatatagtcccttctcctgccttactagaaagggaaagtagcctgttttaatttagtaggtgattgatttagacatagtggctaactctaaacacagtatacagaaacagtttaattactctgtagaaatacgtatttgggtaccagtagtcttatttttgttttgtgagtgtaggttaggtctgtaattttgaattatgttccacagagcagcttcagtgacagaggagccagtcatttggggatttggttcttttcctctgtaaacctaggataaattttacttaggtcagcatgaaagtacagtggtatgattggtcaaagatatatttgaaatattatcataaggtat

SEQ ID NO: 38398 - DNA, 425 bp, Homo Sapiens
agttggacaagcttgctttatacctcatagttagagaaggtaatatttagcaagcagagttgttaaagaggaaggccttggctactcaggttatatgacagataggattcatttaggtcaatgcaaggatccaggggagagaacctctgtttacttcatttgtctccccatctcaaaaggactaatatccttgtaaataggagtgtgcagagctgtttgagaacactgctcgtcacttccaaaccccacaggctgaatgatgattgccctcctgatctctaagaaatggagtatgttagggcttaggcctggggccctttatcttctctgtcttcatctcttcttaggtgatctcacccagtaccatgctgtcaataagctgatgactcccaaatctatatatccagccctgggtcctctctggg

SEQ ID NO: 38399 - DNA, 515 bp, Homo Sapiens
agaaactcgtgggcttatgtgactacacttttcaggttacggaatttctttaaggtgtactcttgagtttaatatacttattaataacttatcattacagagaaaaaattaccagaagtacagggtgtttttaacggactttcttctcttgcacattgctgggcatggcgtgtactgtgacagggcggagtgatgggctgagaatgtgtgtgtgtctccaacagttcccaaacgtctacattttcaagaaaaaggcaatctacatcatctggaaaattgtaacttagtaattaattaggataatttccctaggttctctgtgctgcatgagaccacagcgtattcattaaagaggaaagctgaatattggcggaaaacagggttgtaaatttgtaacaagttgttctatcagaaaatgaaatgcaattttctgtcctctctgagcttttaccacatagctcttagcaatgggtgttttttctgtcattccactcaattctcactcgagtaaacct

SEQ ID NO: 38400 - DNA, 405 bp, Homo Sapiens
tctttagatgcacgtctgcctctggcctttgagatgcacacattcatcaagcaggaggatctgtagtcattaaaccaaggtgccagtctggggcccagccttcaatgaagcatcagtggctttttcattcccatagagcaactgcgaggaagaccccatgctcccaggggcccaattctccaggccaggaccagatcatttgttccttctcagaatctgagatcttttgctgatggttccaaaattgaatgctgaaatctaaaaagaaaattatacttactctggtcaatgggatatgttggagacctgagagtgaaaaaatcaaactgaagaccagtttccttctttaatggaaggaaaagtaagaaagttaacttaggaagaatatttaggagttctgaaaat

SEQ ID NO: 38401 - DNA, 442 bp, Homo Sapiens
tgctttgaaagagcacagtcttgtcctgtccctctgcatcccctctcctcatttctaatgaaaaaaatagtcttccctttccctggttccttcaacagtctcttccttaggttatttttttcctctctcctttcctactccatccagacttccccctgcctaatcttaaagagatgaattggaagaatatgcagtcgtgtcagaaggatgccattgtcagttcacacaggcagacactaataggataaagtattatctgacttcctttaagtccagaaattaagtcttcttgcaatggcaatagattataacttataaccactgtggctggcaggctgcagaaacaggctgttagtatctgaggcctcagctccatttctgggcctattgtgagggatgcactcagcattcctccaaacacagctgcatgatccagggaact

SEQ ID NO: 38402 - DNA, 374 bp, Homo Sapiens
aggaaatgtttttagggaattgggctaattgatagcaatgcagtgataggatcttaaaataacagtgacaaggtcgtagtgtttaactgtcagataaatggcaaggtcaaagtggcagtcaggaggagttacttgaggagatcagtggagttggttaatagaaaataatattcttaagggcaagatagatgggcagctaacaaggctatatcttgaacaatataatggaaagaaattattaaaaaacggttgattaagaggcaaagtgcaactacacaaattaaaaaagcgttatcccttgactagtttctgatcctgagccagtgcttaggcctagaacccattgatcaaaaaaagaggttgaatgtacagga

SEQ ID NO: 38403 - DNA, 500 bp, Homo Sapiens
caaatgtttgttctattttcctttctccttgcagcctctcttgtctttccaggcaggtgagtagtttcatctgtgatcatttatgctctgtaccacctcctcatggcagtatgttacagcagcttttctaccagagcataaggagtcttgcatttttgtggtaaaagtcctttctggagaagcagtacaggaaggtttctgggttgctataaccaggatttttcaacaacaacactattggtatttggggctagggtaattctttgttgttggggtggtccagtttattgtaggatgtttcacagcatccatacctttatcatattcgctccaaggtaagacaaccaaaaatgtccccagacactgccaaatatcccctggagggcaaagtttttatttgagcactatttgctaaaatattgttgtggatgctatttacataactgtgtgttcagtttatgaaaatgcagagttgtacatatatgatatatgtagttttc

SEQ ID NO: 38404 - DNA, 519 bp, Homo Sapiens
taagaatgccacataggacttgtgagttcctaagtacaccaaagtatggacacagatgtgacttctggcaattataaagttaaaggtggatattgcaccttacagacttagggagcctttaccagagacgcctaaaaagccccaggttcagccattgtgctgaatagagtggaatatagaaccagggacagagtatttcatttaacgttgatatatacttgctaaggaaacactaacaatactgtaactttgttaaaggacatagtattgaaatgggaaatagaggtcaggctcacatcatcttagtttaatgctgggcaactttttctgatttctgtagttccctgaaaatgtgtccttcgtacccataaagagatacaaatgcatttgtaacatttttgattgaatataaaacctttacagaaatacttatctcatggaaaggtaaagctattgtttaaaaattagtgggaatattttttcaattatatttaacatgcctataaaaatagtccttgc

SEQ ID NO: 38405 - DNA, 437 bp, Homo Sapiens
agaaaaattatttgtatataactttaaaaggagtagaagggctttttgcagagttattacgtttgaagtatactttatttcttgaaaaaattacagattttttgtaaataatgatgtaattcaactctcaaaatatttcctactgtttctttattccagttgtattcacatgtgaaagcatgtgatcagttattgctgcattaaaaacatgagtcttttttattaggtggccattatttatgatcttttctatgaaagagtaaggacattaaaatgtaagatgcatgatgaaaaattaagtgaagaggctctttatggttaatttatattgaataatgcattaggtaggtgttcagagtaatattttgcgttgtgagaacatttttaattttatttaaaattaaatgaaaataaattagtatattattgtactaatt

SEQ ID NO: 38406 - DNA, 476 bp, Homo Sapiens
ctccggtagacgttcaggggagcctgcattccccgtgagaaacgctgagagaggaccacgggtgtgtcgagccttgaaggagggaaaaggcggtgtaggaccggagcgagtggttgcctggggagcatcttgttggggagacagtgaacagatgagcttgactgaattgcaggactcccctgagggagtaatgtggataatgtacaccgcgcgatcacttagtctggagaggctcgccgcgggttttcctcccctggaccatcatttgtagcaataaaggggttccccagccgataggaggggcttggaatgcaggaggcttgtgatgcggctccaaacagtctgcaaaactacaaagcacagataatacacaatggagaaagccgatttcatggtagacccccgaagatcattttgaaaataactctccatttaatttgctgcccttacccccctttttttaacttactgctttt

SEQ ID NO: 38407 - DNA, 432 bp, Homo Sapiens
cgccgttgtgtttcatttattcttcgaactactataggtggtcttcttggagaaaaggctcagcttgctgctgtaaaggatatttgccaggccatctggaagctaaagaaagttatggatgccgtaatgagtgatggtaatttggaaacccggcttggttccacagatgtagccgctagccaacatatgctggtttgtgctttacaagaacttggaaatctcatacacaatcttggcaccacagcggcacctttgctacaggattcaagtacaggtctccttgacagtatcttgtcagttattcttcatcctagcatttctgttcgactagcagcagcttggtgtttacactgcattgccgtggcattaccctcctacctaacaccactcttggatcgttgccttgaacggcttactggacataagtcttca

SEQ ID NO: 38408 - DNA, 468 bp, Homo Sapiens
gctacctaatatttctttgattaatacaattcatttaaccagtatttgctatagataagtacagtttgcagtttgagacttgccaaaaagtaaaaaagtaccctggtgaacaaattttattatctttgtgtgctttgaatctatctgaagtttaaattactagtatggaacttgatgggtaaagggtagccgaatttttgatattatgaaattgctctccaaagagaccatgccagtttatactctaataaatagatacataggtaaggggtggtgtatgtttctccacacttcggccaacacacttttcatcacacttttaaatctttgccaaactgataagtaaaaaatagtatctattttaatttgcatttccttaatagagcgaggttgaatctattcagacacttcctgttcttagctccagtattaatttttccactgagttatttgtctttttattcttgg

SEQ ID NO: 38409 - DNA, 418 bp, Homo Sapiens
caaggagcgagtgaaggtcaaagccacacatggggctgaggggccaggtggccgccttatgagatcgaaggcgggaagctttggaacagggcaaaaaggggagcccagggtgaggggagagggccgagcagctcggatctctgatggctgagtggcctgttctgggtctgactaccctaccctggggcctgactctgccccgcccctcgcaacactcaacaaacgcttgtggaaggagtgaacaaatgacaagtcacgaaacctaaatacagagtcttcagctttggaggagactgaggtgcgggacatggaaaagaaggtcattctcttggagccccaacaatgaccaggagaaattcatttggcggtaaaaccacacgaaccctattacatcaccaagccctcaccgtttccagca

SEQ ID NO: 38410 - DNA, 460 bp, Homo Sapiens
ttttaaatcactatttaaaattgtcatcattctcagataacataagcgtattgagattctatcagaaatatcaaatggcctcatggttaaggacccgaaaggtttttctctgagacaactttgtgcggtattttctgtgaatcccacagctggggaaaggaagggagtaagccgaaggttttcagatgtatgctagagtgtctttcatgaaataaaatgctgctctagttgtcagctgtttttttgcataccattgcttctttaagttatctttagattcccagtcttgaatttgaagagttttggggagaaggtagcagaaaacctaacgttttgtttacatttcatttgttgtatttagtagtagagctggtctaaagtaaatattaccttctcatttttgtgaaccttcattatttttacttggtaagttaaatgcaactgcgaaatcagtactcct

SEQ ID NO: 38411 - DNA, 412 bp, Homo Sapiens
ccttttcaaaggtgagaaaacagaggctcagagaggttcagcaacttctcccacagctacttcgttgtagaactgcagttccaggtgtccccgagctctcccttcccgagccatctgctcctgccctcctatccgagccctggccctcccagtcaaagccgggtagtggctgttcagaagccttggggctagtcaatcccagctgtctcggaccagggccccccccaggaggagaccctgaaggatgcagttgagaatatgtgctttctttggtaggtgatctcaggaattgcaggggaaagagggggagcgtgttagtgtaggctctccggagaagcagaaccaacgcacagaggagatttaggatgaggaatctggtttatgtgactctgggggctgagaaggcccacca

SEQ ID NO: 38412 - DNA, 419 bp, Homo Sapiens
attttgagcattcctctgatatttgaaaaggaagtacaacaggaaaggaagtctgaggatggaagctaaaattggtatgaatttatattttagagatcaaaatgtaccttatgttgaaacctatgtaagaagtgattatgtagaaagagtgaaagtgatagctcttagtctggaaagcccactggcttgtttgggcatttctcatggcttcccactcaaagtggatccccaaaatcacttgatggatttccttgctgatttctaagtaaactatggtttaagaaagaaatgacagggctcagcactgccctacagtaccaagaatacaaatgtttccatgaagtcttcaaaggcatttgtaaaattcaggctgtaagtgattagttagttcattctgcacttatttattaactgtatat

SEQ ID NO: 38413 - DNA, 406 bp, Homo Sapiens
ctacaactggagaatccatccatcaggtgactgagttcctccaaaggggacactactaatgtgtctcagacactaactaaggtgagaaggaatgcactgttgagggggcagcacatccttaagaagctcaatggtggctgtcccctgcaggctggaataatgctagggatgttttatagaactggatcccccagtagtgagtaaaatgatagagttccagaataacaggggccaagtggcagcatttaactgtgaggacaagataaagtaatttccgtaaggggcatcaacgttagagtgacaactgggaggcctgacctgtaggtgtccatgaagatggctcttaggacatgctgttcctctaggcaagacacatattgctttagacatataatcaaaagaggat

SEQ ID NO: 38414 - DNA, 471 bp, Homo Sapiens
ttgtgccacaagctgtttcagataaggaggataaagcaatgaacagacaaattccattcctccttgagtttacaattattgttatctagatttaacgagaacatttttcaatgggaatgacggtgactaagagggggtgaatgggcctgtgtcttgtaactagatggcattgctaggcaccgtggactcagggggctctctctgagattggtatagtgtatgggaaagaaaatctgtatccttgaatattttttcccagctctcttactatcctattatcttaggttatgttgcatgtattctatattgtatattatgcataatatatttataatttctgtctcagtaatgaagtgatttcagaggaggtaagaatgaatcctttgctaataagttattactttccttgaaaatccaaatgacaagagggttattcactttgcaaaaggattatttatttttataatgttt

SEQ ID NO: 38415 - DNA, 541 bp, Homo Sapiens
acttagtttgccacagagattgttcttttgcttaagcccctttggaatctcccatttggaggggatttgtaaaggacactcagtccttgaacaggggaatgtggcctcaagtgcacagactagccttagtcatctccagttgaggctgggtatgaggggtacagacttggccctcacaccaggtaggttctgagacacttgaagaagcttgtggctcccaagccacaagtagtcattcttagccttgcttttgtaaagttaggtgacaagttattccatgtgatgcttgtgagaattgagaaaatatgcatggaaatatccagatgaatttcttacacagattcttacgggatgcctaaattgcatcctgtaacttctgtccaaaaagaacaggatgatgtacaaattgctcttccaggtaatccaccacggttaactggaaaagcactttcagtctcctataaccctcccaccagctgctgcttcaggtataatgttacagcagtttgccaaggcggggacctaactggtgacaattgag

SEQ ID NO: 38416 - DNA, 431 bp, Homo Sapiens
ggcacgttcggcacgagcaaaagatacaaacttagtatttccaggcattgaacagcaggctttccaggactgtcatccttgagaaaatggagatacatgaggtgagccccacgtttctcccacctttctgctcagctttctgcgacagagcacgttcccgttgcagcacaagtggagctgcagtatcagaacctaaggaggcagagagtggaattctgggttgctggcatgactggaatatttgctagagaggaggaactgctccaagaagttctagaagtctctggacattcaaactaggtcctgagaactgtatattttaaatgcttgcattggaactgttttaaaccaatgatctcaagtctttgtcttaagttagaaaaagaagggcaaattaaacgccaagttaatagaaggaataaaatagcaca

SEQ ID NO: 38417 - DNA, 481 bp, Homo Sapiens
cctgtttctgcaggcaggctaagaaactttccccataggctctttacctgttggtgtaaagcccttttgggcaaagccccacctgggctcacctggtcagtaaacattgattccgtggttccatctggctgtggtgacttagcacttacaagctggctagctccttgtggattacggctctgtgagtgtttcctaggccccatactgccaagtcggggcagctctctcttctctcatccataaagccaggccaagctcctcattttccctgtgagcaccaagctcataaacctatttgtcctttgcctttctttcctctttccctagccctaccactgccattcaggaagtatttattaagcacctactatgtacagggtaccagaccatatacttgagcccttgatcacatactatcttatatgacttgagttatgtaatttgggcttcctcaacaagactttaagctcctaggagggcg

SEQ ID NO: 38418 - DNA, 496 bp, Homo Sapiens
gaaaaataatggaaaatggaagtaattactccagctaaaaaaagcttggacttagatttctttttatgataccaaatgagaaataaaccaggcaaatcagaaggaagttaaagaagcaaatataaattcaacaagtgtcctaattatcctggatattggaatatttgattttccttacaatcccgttctagaatgcctgccgcctttcaacactttcaagagaatttcaacacttacagagtatttatattgttaacagtaattttgctaccaaaaccttcagaataactttaataataaaatgacactgaaataatagactatacaaactctatattttttcagttggtgttaaaataagtcacattttgataccagtacaagatgtcttttaaataaggatgtcatcagtctgatttttatagcattaatgttttatgaaggaaaagttcaaaatggaagcattaattgctgtgattattaggattctatcatg

SEQ ID NO: 38419 - DNA, 400 bp, Homo Sapiens
tgtaatcccagaagaatcttagggtcctaccatgaggccagcctcgctgtaggtactcgctaatgatggcaggtgtatttatcagttgtttatttgagaaccctgctctcccaatttccccagggctgatcaagagcccttaaaggaaggagtttgctctactttggatactgagaattggtgactcttatcagggaaaggagttctttgcttcagggatgacaaaacttgtacaatttttgggagccttgacttgtaaaaagtcaccccagatcccttctcacttcttgcccacgccatgtgatcattgttccccttggagttagggagtctgtgttgaggtggagcacagtgaccatgtgttagaggtttaggagttacaggaactgctccctacagg

SEQ ID NO: 38420 - DNA, 477 bp, Homo Sapiens
atgaagcctccagtttggaagatttgccgaaagtgacaatactggaggatcctgatcagaacattcacctgaaaaacttgactctccatcaggcaaccacagaggaagaagctctgaatttgctttttttaggagacaccaaccgaatgattgcagagactcctatgaaccaagcttcaacccgttcccactgcattttcaccattcatttgtcaagcaaggaaccaggatctgcaactgtacgacatgccaaactccatctggttgacctggctggttcagagcgagttgcaaagactggagtagggggccatcttctaacagaggccaagtatatcaacttgtcactacattacttagaacaggttatcattgccctttcagaaaagcaccgttcgcacattccttatagaaactccatgatgaccagtgtcctaagagacagtttgggagggaactgcatgacaactatgattg

SEQ ID NO: 38421 - DNA, 517 bp, Homo Sapiens
attatttgaatattacgcttgaatattgatgggaaaaaagctgccaacttataggtgctcaacaagcatttgttaaggtatagttttgaccttggagtttcatttcagtccccgttgtccccagcttggctatgtgaagggcaccctgaccctggactaaagagaggcagccctgccttctgattcttaatggcatttggtctcatgcacttccaaggattgtgcctggtgacaccccccaaaaaagtatttgaattctccaaagacagactatagaccacaccgtttgtcccctaagttattaaccaatcatgtgaatataaaccaacaaatttctgatacttctgattctctcttaattgggatgatatttgaataaataacttccagtgtacattcagtgaaataggttcctaagtattgggcttacaatacacattcacagaattccccgggtcttaaacttttatattccaatcaatcctaaccttttttttaagctacactttaatatcag

SEQ ID NO: 38422 - DNA, 396 bp, Homo Sapiens
ctctgtgaacctgtgccagtggctgtgtgtcagtagcccagggtgattcagaagctccatgaagcagccatctttcctggatctctggaatgtacacatttgctgagatcacaaagatgaagctggcagaacccgagtggatattcattattacgaacagaagaacagccaacaggagccgtgccatgtgcaaccccgagttgacagatgcctccccgcttcttctgtgtttgccagttgttacaaaatgatctagagaaaaactggaacttgatggagaaagcaatggcttacgattcagcaggctttcttggagagtttacctaaagtctatgtggacggtggctcagctcacctctgagaacaatacgatcttcacttttcaatctttctgca

SEQ ID NO: 38423 - DNA, 464 bp, Homo Sapiens
agaccctgagatgggagtgtgcttggtgtgatggagagacagggaggtcagcaatacctctcattgtatcagtcacaaccactttggtaaaagcccattatcatcttaatggaaccattgcagtagccaagatgagaggaagggggtgattaaaacatttagctgcaattcaagaattgggctatagggctgacggtcttggaaagaggtaggaaacttcacagagcatgtctggactgaggaccccagtccgaagtttggactagcagttgttgtgattatggcctgttaccatttaaggtctttatcagtgctgtccgatagaaatataatatgaactacatatgtcatttaaaaaagtaaagaatcaggcaaaattaatttataatataccgtattttatttgacactgtgtctaaaacattcattgcagatataatgaatattaaaacatttataatgag

SEQ ID NO: 38424 - DNA, 428 bp, Homo Sapiens
ggggaggcctcaggaagcttacattcatggcagaaggcaaaaagaggccaggcacatcacatgacaaaagcaggagcaagagagcaagcggggaggtgccacacactgttaaatgaccagatctcatgagaactcactatcgtgaggacagtacaatgcggtggatagtgctaaactattcatgaaggatccaccctcatgatccaaccacttccccccaggtccctacctccaacactgaagattacatttcaacatgagatttgggcagggacacacatcccaagtatatcagagggggtccttcagagtgtccttgctgtattttggggctctcgggccttttcagcccacatttatcagtcatttccaaatagaaactagttcaagagcattcctaggaagctgagttaatgggctacaccatg

SEQ ID NO: 38425 - DNA, 473 bp, Homo Sapiens
tgaaatagacatgcccaagtcaccataaaactcaccacaggcctccattacctaagcatcaacaataggaggccagtggcacacgcttataacgcttgcaatcacaatataatataaagcatgagtaaactttgtttttatacaaaactgaaaagaatcccgtcccgcccctagccccttcaataaaaccccgaagaaacaaaaaagaaaatcctttagcttcgattgactggtgtggctaaaattaggtttctatgcatcactgctgctagggtgatcaattttttcctttctcaagagaagggatcttgtcatgcaccctacaggaacagcaaagccacaaacctcaattctgcatagcaaattccatcccaatttcataaagacaaatataacaatctttccctgttttgctcagcttcttcaagctttgagatcaggtttaattgactacatttactatagctctatta

SEQ ID NO: 38426 - DNA, 523 bp, Homo Sapiens
tatcagagctttgtcaatctccacaaagttctaagaataactcaagtatataaaccacaacagatcgatattttcttttctcaggtgctttttactgttaatattaaattttgttacaagattgatcttttctaaaattttgtgcaaagctatttaatttagtgcctgatattaaataattacattaactgaaactacaatagtatgatttaatgatacaagagtttcagtggaattagtttccaaatatttgtgctggcttgacttttcagcagactggttccttctgtcccaatcatgactgtgacacacagtacaaagtcaagagcctggtattattcagctctctgcaatgtgagcttcttttactagttaaaccatggtcttctcagacatggccttgtaaggacaacatctttctattggtggaagaaaggtggtggtggagaaaccattcagagccccagagagccctaaaattgcctacgagcatgagtttaagcaaatagaaccccttttaccc

SEQ ID NO: 38427 - DNA, 513 bp, Homo Sapiens
tttgagatcttacttttatttcctttgggtatgtaaccagaagtggcactgctggatcctatgatagttctatctttaattttttgaggaatgaccatactggtttacatagtggccacaccattttacattctcaccaactttacattaagttttcgatttctctacacccttgtcgacactttgtttttcctattgtagccatcctaatggatgtcaggcgatatttcattgtggttttgattttcatttatctaatgttagtgatactgagcatcttttcatgtgcttatttggccatttgtatatcctctttgaagaaatgtctattcaaggcctttgcccacttttaaattgagttacttattttgttgttgtagctgagatttaaatgttctttatatattctggatattaacccctcaccagatacataatttgcaaatattttctctcattctggcaggttgcctttttactgtgttgactgtgtactttgatacacagaagttt

SEQ ID NO: 38428 - DNA, 447 bp, Homo Sapiens
ttactgaaatttatttgttaaatcaaggtaattgtagattcacatgcagttttaaggataacagagaaatcctacttacagaatcagaatattacagactatcacagaatattacaaaattatcacaatcaaaatattgacattgatacagtcaagatacagaaaatttccgtcaccccaaggatctctcactttgcccttttatggctacacccactccccttcccctctttcctcttcttggcccctggtgagaactaatctgtcctctatttctataattttaagactttctcttcaaggtaaaatttaccaagacacgaattacacagtgactgaggcagccaaagagtgaaaacatgcattcagtcaacaggtgaagaggattttacgtgaattttaaacagctggcagccatcatgctgaaaatgaaagcacctggaagct

SEQ ID NO: 38429 - DNA, 571 bp, Homo Sapiens
tcaatatacataaagcaattttatttgtatgtacttgtggtaaacaattagaacatttcattcataataggataaaagtataaaatattcatgaataattttttttcagaacaggaatggaagtttattaaaaagctttagagcaggaatgaaagaaaggaaagtacacttggaagaggcccaagcaggcatcttggaggtcaagtgcggcatttgacctttgatttagggtgttatatgttggcatacttctggggtcctgcctccctttttccttgattcttcccttagggtgaccgagcaaatgactctttaagcctgtgtccacatatgtaaaatatagttgtgaaacagaatgagattatgcatgcagagttgctgacacagagcctggcacctactgtccatagcataaacattattcttctctcttaactttccaagtggatttgcatgcacagtgtggggagtggcttggtagggagaggggttggtgtttggagaggcaggagtccaagaagtgccttagaagctatcacctgaagccagttgagagataagccctgaacta

SEQ ID NO: 38430 - DNA, 496 bp, Homo Sapiens
tttgacaactagtatattaattttattttgagtttttttatctaagagcttataattcattccttttggaaataaaattttatagaattccaaagaaatatgaattatagagaggaagacaacaaacttttttttactcttaaatactaaattccttggatgaaatgcctaaatacacaagttacaaaatgggctttgaagagtgggatgttgacagattcccagaataagactaaaggtgcattaaatcactatttactttaaacttataactgcctgccagctatggcctttaatcatcaaagacttattgtgtttaacattcaatttgctgtctacatgcaaccaatttccccgacactgctcttaggcagaagttcaagtttgaggaaagggctgatatttcctacatctgtattgttaatgtctaacaacgacttcagagaaaactccttgtcctatattagaaagtaccttggatgctctccaggacaaa

SEQ ID NO: 38431 - DNA, 452 bp, Homo Sapiens
tttttaggtgtacaggaagtagaatttattggtgagtattaagaggacaagaaaatgaaccaccttccatcttttgctggatagacaatcaaatcactttctggcttttatctagttttaaaatacatttcaagggtcatttgaaaatgacacaaagcacaaatatgaaaagaaattcaaatattatcacactccctaataaaacagcctaattaccaaaggctcacattttagcaagttaattctaagacttaagctgtgtacggtgtgtgcaaatttgcagataccttaccatcacatgcaagtgtcttactgctactgaaagctatcagaccctttcaggaggcgtgttgtaccaagcagacctaaatgtgaactttcatcaaggacctttttaggaggcgtattgtaccaagcagacctaaatgtgaactttcatcaaggactatgtg

SEQ ID NO: 38432 - DNA, 479 bp, Homo Sapiens
tccaattttgctacaatatgtatttagaaaagtttccacattaaactgtatttcagtgtggccaggtttctaggcccactgcatttacatacttttcatgaacttagacataccataattttttgtgttttaccaaaatttgcctataaattaggtgctaatttatgtatcttcacacattacaggataatcctgagcatcacaaccttttccaactttcataattagagtattggaaaaggttagctttccaattatttttcccagttaaaattcatatttccatctccattttcttttctctcttaaggattcttgattttattctccagctcggaaatgccgagcactttgatttcccatgagatgcttttggaaactactttaatatccagattttatgatctgtaattttctaggttcataagaaaaacaaaggactattcctcacatgtatccaaattccctgagggggtagg

SEQ ID NO: 38433 - DNA, 436 bp, Homo Sapiens
ttccgagaaagaatttatcatgatccccagcagctctgagagatcaaagggcacaagtgttacagaatcctgagacatcacttttctgcctgaagcctctggctggtggtgcctttacctgtgttttgctcgggcccactgggttcgttctgtccactcgggtcatgctagtggtttggatcccacacttgccaagggtgatctgggtacagagcagtgaagggtgtgtgagcaagcaagcatgggatctggccactgcacacagtcaagcatgccagctgcagtggggtgggcagctccaggcaccggcacaggtgccagatccctgtgaggctgcagctggaccaggccgactgcaaacagcttccactgtgggtatcagggaatgagtggcgcccagaaacttggagatgcaggaactgcagaaccccaaaga

SEQ ID NO: 38434 - DNA, 401 bp, Homo Sapiens
tattgctttgtgtatctggcagctttatcccaaagctgctctcacgtggtccctctgtcccatcctgccattttcctccctctggggccccttgcatgggagactgggagcagcgtccacccgccacccagcagaggctcaggtcctggagttaaaagagaagcacaggcaggggacgctctccaaactgccttcagcccgcatctttgaactctgcagtaggaagactcctgggcccccatgtccccatgcatatgcacctgcatgcatgtgacacacttctcggcccatggagaagactgtccgcacgggggtgtgagctgcccagcacccactgatcaattgctgcattcccagctgcctttaagctggcatggggcgccctctgaggcacgcccagc

SEQ ID NO: 38435 - DNA, 485 bp, Homo Sapiens
tctcatttgattttttttaattgcatgttcagagaatttattattccattttttaattaaagaagagccttgctatcaaaatgctctcccacacatccttttgcgttaggtagcacgaacacagtttgagatggaaacaggctgcccaatgtacttattaaggaactttcctggcgaaccactgaaaaatatcctcaagtgtgaccatcacatctgcatcaagttatgaaaaaagtaaggcttgttaacctgctgtttggaaaccagaacacttttatcagttcatataattgctaaccccttattcactgctcaacgctggagagttctttacctcctaagatcccactaattgctgacagatttgatttctccctgacagcaggagtcctgtttctggcctttacatcaagtaattgctttatttttctccctctgctctaaaaaacggaattcccttctcccctgcttgaacccctttaatg

SEQ ID NO: 38436 - DNA, 383 bp, Homo Sapiens
tccaaatggtggtgatactagtttcttcaagagagaaggctgggatgcaggctagggaaactgtaatataagttgagctgagaagatgagcgcctaaattgttgacaaaaggcacctcagggtaaaattttcaagtgtcaaaaagcaatttaagagggaatggactccttagaagagtaacactcctgaaagctgagactcagactgaaggaaccacgaggctgatcctaatcctcagtggtctgcacagaacttaaaggcaagagccctcctgattcaagttaaaggccaaaatggaagtttcaatcacaaataactcctttggttatcatgtcctaaaaataaaattgtacatggaagttaactgatcctttgctacagcc

SEQ ID NO: 38437 - DNA, 400 bp, Homo Sapiens
aacagtttgggtaacatttattatgattttacataaatgagcatctaccattccaaagcacagcatgacttcatcttggatttggagaatcttaaaagtgagaaactcttccccccactcctctgcccaaaactccaccgccacagcacctcggcaggcgcggcttttcacctgctcctctggggcagatctgcagggtacagagcagcaaacaagtccgtgagagcatggcgtctggtgaggcacgggccttggaagctggggggctgctgcccagggagggctatctgcggagggtcgggttctgggggcaggaaggtcttccgggcaggggcacagctttgcccttacttgctgcctgcctctagctcggctcccagctttccctggggccccactc

SEQ ID NO: 38438 - DNA, 440 bp, Homo Sapiens
tttaagtttaaaaattctttatttgaattttagagaaataacaggtagtataaagacttgcttgaaagtatgaaatagtctgttgttattatttctttaggttttgcaaaccaacatcattattaagggagagaatggtacatctctcctcctcatctttaacacgttcttcaattggcatgggtacaacctgagcaaaaagatcctggtgaaatggcatctctaacactcccccctcagttctaatggctccatggatgaagccctactggacttagaccatccatacttgccaaagtggtaacaggaaaccagtgcctctaaggctagtagtgcatagtagttttcatctaaagctctgtttccccatcatctcctctgtcctggtgactggcctggaaattatggcaaggatgagttaaaatggatcaatatacaat

SEQ ID NO: 38439 - DNA, 432 bp, Homo Sapiens
aatttacacaggaaaaaggtttaatggacttacagttccacatggctggggacgcctcacaatcacggcggaaggtagggaggagcgagtcacatcttacatggatggcagcaggcagagagagagcttatgcaggaaactcccgtttttaaaaccatcggatctcgtgacactcattcactatcacgaaaacagcacaggaaagacctgcccccataattcaatcacctcctacccagttcctcccacatgtgggaattcaaaatgagatttgggtgaggacacagccaagccacatcaatatcctaacagctgccacaatgattaacttatggccaaactttctccccatcatggcccttctgttcttctcactactgcttcatagtaacttaccccaaaccttcacagtttaaaacgattttcttttct

SEQ ID NO: 38440 - DNA, 430 bp, Homo Sapiens
ttttttttgaaagcctcaatcatttgatttattcatgtcccacacagggggtctgacacatgaccaggtttgcaaaatcacgggtttagaaccacttcactgggtcatacacatgtcccttccattctgcctgtgccatatatccttctaattacgcttcaattaatactggaagaaattcttccttctttggcaccagactttcagcacagctactaacaggcagaatttaattcaatagatttttttccttgcctctccccagttccctgtgttcttcttctgctgaacatctataacaggaattcagtttccattgctccctgacctccattccaaagaaaaggcagtggaaggagctgtcaatggagagaaaaatgtgttttcttgtggaaaaagtagaaacaagatataaagtctttgcggtcta

SEQ ID NO: 38441 - DNA, 530 bp, Homo Sapiens
taacatgtttaccaggatattgatttcgttatctctctgtttcagaatatctcgtagctttctatattcttcttcttttaatggttcttgacaatcttggtctttgctttcagaggagactgtattgttttcaaggatcttcttgtcattcaatagtttctttaaatgatgaaaacagtgatgaactttacgcatatccgcgccaacctctaatctactgtctgaatcctggtcttccaaaaaggatgttattagtttttccagctgaaggagctctgcttctgtgagtgcctctgtcctctgctccccagtgaccatggccagttcatccttcagttcctggatttccttttgtaggcgtttaatcactaatctggggttaatttcttcattaagaacagcttcattctttatgagtgccactcgctgtgcaaatctgcaggttgatatagactcatcaagattccttttctccaaggagagtgttgcaatcatagttgtcatgcagttccctcccaaactgtctctta

SEQ ID NO: 38442 - DNA, 394 bp, Homo Sapiens
atttctatcttattataccatctatgtcttgaaaagttgtagttaatatttttgattggctcatagtttagtctacttagagtaagagtagtttatacatcatagttacagtgttataacattctgcatttttctgtatacctactattaccagtgagttttataccttcaggttgttacttattgctcattaatgtccttatctttctgattgaaatactccctttagcatttcttctaggacaggtctggtgttgacaaaatccctcagcttttgtgtggaaaagtgtttatttccccttcactttgaaggatattttcactggatacactgttctagggtaaatgtttttttccttcagcactttcaatatgtcatgccactctctcctgg

SEQ ID NO: 38443 - DNA, 368 bp, Homo Sapiens
taatcaaaatagggaatgtgataatctacaggtcacatttggcagtttagtttaaaagtaaacaggctttccaattaacccaccttgggaaggtcttgtgattcatggtgaaatcttgtccctgaatcttatcatgagtctctcaaattgttgacacagtgattaatgcataacccagtgaccctgaaaaggacactgatttatttctggatcttagagttttactgattgtcttgcatgtatacatttgagcctgcatgttgcgatctgtatccaatgattgtaacttctgtattgtatccttcaatgagaaaggacagctctggtgtgaggagtccctctcccttctcctaaactcttctacaaaa

SEQ ID NO: 38444 - DNA, 394 bp, Homo Sapiens
gcccggggcactcaatcttttatttttttaaactggacacaaacgtacaatactttaacagcaagtctatgggaaaattgtttggttttaaattattatgaaacagaatctaaggggagctttattaaataaacataaagatgaggatttaaggatacacacctgcattctatcatagtcatttttactctaccttctgggggggtaaggatggaaaagacacatcaaaccgaataaacaaaatccattcataccctgaaacgttggcaggccactcaagggactggtcaaaacgtccacctcatctcagatggcctcaccgtctaataaaattaaaactgatctggtggcctctttggttccaaaattatgtataatacatttaactggattc

SEQ ID NO: 38445 - DNA, 455 bp, Homo Sapiens
ttttgttggctgaggcggtattttccttttattgctgttatgagattcaacattttttccagaaataacttctgaaaagtgtgcctagattttgaacacttgtgatcctaacatgtggtgagaaaggcttttcaaaacacacacgtgtggacagaggtccacacacggatacgtgtgcacacacgggtgccttgggcgtgcgtcttccaaaaggggcgagtacagctatcaacttgtgacttccaggaggcctgggtttgcctacgaaggggccgtgttcccagttggcgttcacacgtggtgtacacacacaggcacaggcaccgtgtcccaaggccatctcccaagggcacccgcagacactgggcagccttctccgaagctgtcagtgtccttcctcgtgagaggatgatgaagaggatgtggtttccgccgcctcatccacaggccggctg

SEQ ID NO: 38446 - DNA, 384 bp, Homo Sapiens
taatgttagccatcctaagagatataaagtgatatcgcagtgtagttttaatttgcatttccctgctagctaatggttttgagcatctttggtgtgtttttcaacgtatgtcttttttaaggaaaggtccagtcagatcctctgtccattctttaactggatagttatctttttattaatggcaaaagtcctttatatattctagatacaagttgcttactagatttatgatttgaaaatatcttctcctgttctctggattgccttttcattttcttgatgatatcctttgaagcaggaaagttttttaattttcatgaattttctctatttttactttaccacttatacttttgttgtcacatctaaggctttgcctaatcc

SEQ ID NO: 38447 - DNA, 432 bp, Homo Sapiens
tttaacgctgaaattaatttgctaacagacacaaaacttgtcaacatccacagagtaatatcaattaaatctccatgggacaaaattcatttgcctctatgaacaagagtcattcgcattaccctcagttctttacaattcacagaactgtaaaatagctcaatgacaaggaaagatgggacccctgtagcatcacgtcagtccggaaggtctgctaggtaactccctagatcttgtccagaagacacccaggaattgtcttgcccatctcaaagttcttcatagttttcatggcaaacccatgcccacacacacgaggcagctcataatcataataatggcactttataaaagtcagcatttttctctgattataaaatacatgttgtcaaaaagcttaaaaatgcaaaaagtgcaaaacattaaagacaa

SEQ ID NO: 38448 - DNA, 368 bp, Homo Sapiens
ctgtttttcctttcattctctctgtcttgcctccaaccattctggttgccgggcgggagggggcaccccgaggcccctgcctcagtgtcaccacctgtgaggtgaccgctcctgccacggccccggggtctgaatcgtgcaaagacccctgtcccccaccttccctgcagccgcccacttccaggggaagaccctggaagaggctgggggacccccctcggaaggaagcaaaaagacagtgacaggactgcatggccacaatggtggcgggggcagactttggtatcgcccgctcgagcctgcctggctgcaggtccacacccatgccaggccgggcctgctccggcattttacattcactggtttat

SEQ ID NO: 38449 - DNA, 411 bp, Homo Sapiens
ggagcgctcacccctaagggttttaagtcctgtcctctggaacgagaaaggatccctttttgttaccaggagactgaggcctgagggacatggccacctccaagatggcacaggtagctcaatctctcaatagccatatacgagggcctcctgagtgtcagggcccatgctggatactggagcaccacgctgcaccagaactcatcccagaagtgctcaaccagttgggactcagtggaagaacccaggtctctgagttggaagctgggaccacagcccatctggccctggtgatacggaagctgcagtccgaggtcgagcatttttggtattccaattactctccagccaagctcagctctgcaagctcatgggacccagccagcaaatcctctgtgcaacgcacacctt

SEQ ID NO: 38450 - DNA, 406 bp, Homo Sapiens
aggtacaaactggactttatttgagttaaaaaataggtgtttccaaatttctccacgctcactacagtggccccctgcccctgctcctgcaccaaacttggttaactccctcattcccagacagagcaccccagccctgacagaaaaggagggggccccaaatgggccctaaacctgccagggccagggctcaaccaggctgttcatcagcacaaaacctggggcctctggcttttggtcttttgtgaaatagaaagtgttgtgccattcgaaacccatttctagaatggtcagtgtcctaacccttcctggtaaggcctttgtcaacagcccctgctccttgggcccctccatgccatgccggaatctctcccactctgtctcaccccacctcagctccgaagca

SEQ ID NO: 38451 - DNA, 411 bp, Homo Sapiens
attcccataggtttttggggaacaggtggtgtttgattacatgaataaattctttagtgttgatttcttagattttggtgcatccatcacctgagtagtatacactgtacccagtttgtagtcctttatccctcacccccctcccaccctttcccaccgagtttccaaagtccattgcatcattcttacgactttgcatccttgtagcttagctcccacttatgagtgagagcatacaatgtttgattttccattcctgagttactttacttagaataatggtctccaattccatccaggtaactgcaaatgccattatttaattctttttcatgcaataaatatttttgagaaattgaattggaatgttgaaatttgaccccaggataatccttaaaatcgatgggaatt

SEQ ID NO: 38452 - DNA, 404 bp, Homo Sapiens
tcacatttcaaaaccatttattagagtcagaccactcaagttttacactagacagaaaccgtctctaaacaatatattggtggttgttgttaaagtggcctttaaaaaggggttcactctgctaaaaggaggctcatcctgataattgcaatcactaacaactagaaaaaactaaaccgtgagtacaagcttgaaaaataaaatgtagcactgggacgctattaaaactcattgtaactaagttgaacagtaactttacttaaatgacatatcgctcccatatgaatccacagaagaggaggactacagggaaatattaaggtggcagaggaaccacttctgtcaagggggtaaagaaaaacactccttcgctatagggaaggggagaaaaagagaaaggaaga

SEQ ID NO: 38453 - DNA, 535 bp, Homo Sapiens
tcaaattatggatttattataaaaactatacaaactttttatcactcacaaatgatgaaaaattttaaacaattagtatcctccctccaaaatagtgtgttctgtctttacagtcttcactggcagtgcattcagatagtatagaaaataacaaacattccatataactttgtccctacagtaaataattttttaaaacttttcatcaagtttcagtgttactgaagttaattatagacagtaaggattacagaataagcagtaaatggtcacctgcactgtatttttcaaagcaaaaattgttttatattttctatgttgttttatcctgccccaaacacttaaagcaaaagttaaagatttttccagttacctgaaacttcaaaaatctattgtactttgaaaaaactttaaaaagcagcatcatttaaatagtggttaactcataaacgtgtatgcaacaacattccacaaccctaataccactcaggcctgcagagtcaccagctcacaataattcagtgctctgaaagct

SEQ ID NO: 38454 - DNA, 362 bp, Homo Sapiens
tcttcctctgtgcatgtagtttattcactcaacaaacgttgggtccatgtgtgcagtgctgaagacaccgtacagaaatatatcgggggtgggcccagctggaagggagccccgagtccgtgtaacccagacccacagaactcagggttcagacatggatggttctagaccacagcatcacagcattcacgcctgtagaggcccagggcctggaaaccacagccggtctgggcctggggcagagccagccgtgttaatagtcacagaggtgaacatgtggttggtaccggcgtgggtggtgtgtaaaggtgaacgctcagagaaacctggacagccagggcaggaagccagggagggcttct

SEQ ID NO: 38455 - DNA, 460 bp, Homo Sapiens
ttttggtatttaaaatttttattatagaatttttcaaacataataaaaagtagaaagaatagcattatgaacccttgtgtacccacatccagcttctacacttatcgatttatggccaaacttgtttcatttatactccccatactatttcctctgccaatagagtcctctgaagtaaaccccagacatctgatcattttatctatctatacctcattctccacccctccagcttagccttggggagcagcagactgaagagtgtttcagatgcgttaaaaatccaggtagagacgttaagagggcaagcaaggcacacagggtatgtacagactggagacaagggaatgcggtggaaacccagggtcttctaatagggcactccgaccttagaggattaactgtgatggccccagcagggtgcccaatgcaaagcggctctgtatattataacaatcag

SEQ ID NO: 38456 - DNA, 415 bp, Homo Sapiens
taacagagtttgcatatatatactttttatactatcttaacctcctggacttttaagtccagatcattttcttgtaacttctattaataattaagattttctggttgtttcagaaaattacaattattttgacattcatcctgagtcttactggtttactgcttaccaccatttctttcatatcacatctttcccattcttaagatcttcagtagattaatctcttatcatacagaatcctatttctagtaatttctttcaggaagagtccatgcacccttgtacactgaacttagttgtggcaagaaggctgttgcctttgtatatgaaaaatcttggcctatttcaagaattttaggtgatcgtaaaaatgttccatttgccctttgatatttaagcaagaaatctgaacctg

SEQ ID NO: 38457 - DNA, 400 bp, Homo Sapiens
ttttttgttagtttaagtttcttttataaacatgtatgtactctcgaactactgctgctattacagggagcaggcattttttaaaagcactattcttcttacagtcaggaaatacaggacactattacttcgcgggggaagacgggcactgggaagagtccacgccggcgaaggcaggcgaagacagggctcgctgacgcccccggtcgcccgcgcctcttcccacagctctccgaggagcccagctaccggaaacacgccacatcaggcctcggaattctgggcatcggacggacagctcgtgacctcagaaggaggaaaacggtcaccttctgaaagaaacacgaactcctctttcctgtatcagaacatttctcattcacctgagcgcggcgtttct

SEQ ID NO: 38458 - DNA, 409 bp, Homo Sapiens
tttttaatttggaacacaaatgctttatttaagggtgcatcacaattcccgtgtggtgagcaaaaaataaaataaaggagcatatcgtagcacaccattcccactggccaagtggttgaaccctgcatccaagacccagtgagcagccaagtgaggtgcaacctctgggcctctcactcatgactccaacagaattagcacattgcccttgtgcatggggccttttacatttcagattttggagcagcaagacaatgtatatttgttcgtaactcttgttcttccctcctgatttttaaaactgctgtaatataaaactatgttgatggacatataattattataaagatgtagtttgtgacaataacagcatgggcagaatgaaggcatatagagcaaatttttcatt

SEQ ID NO: 38459 - DNA, 459 bp, Homo Sapiens
tggactaagaaagcttatcactttattaggaagagaaagcggaccatttctaggcaggtattttcttgcagaagcagcctctcactggaagtcttgcatccctgtggaggtacagccagaatgcctcatgaacaacacgggccacgctgtggtcagcacaggtgtggttagcctgagaccggctactcaggctccaagtgcagttccagctctattggtgtcagtcattcttgtcatctaatttcaagacagcacgacactgacttcgcttttactgctgtggtgtcaacgatcccccaggtaaagaatatagtccattaacctctgagagttttccttctgggttctcttcagggtcttggaagtcaaaactctgcccttgagcaaaagcagctgcatccatcctattccccaaatggatatcaacacgagaagccattttcattccatggtccctgc

SEQ ID NO: 38460 - DNA, 467 bp, Homo Sapiens
aatttataaacaacagaaatttattgctcacagttctggagactgggaggtccaagatcaaggttgccagcagattcggtgtctggtgagggctcattctctgcttccatagatagtatcttgttgctatgtcctcacatggcagaaggggcaaagaggctccttcaagcctcttttgtaaggggcactaatcccattcatgaacagggagctctcctgacctaatcagcccccaaagtcccacctcttactaccatcaccttgggggttaggatttaacatacaaattttgggggacacaagcattcagacaatagcatccattgatgatccttgcctgaatcaatgatttcattagaaattgccaatgatggcttcctgtcattcatctatattgattagctatactttccctcaccacctggagccaccctgttaccttgaagtagatttctatggcaaagcag

SEQ ID NO: 38461 - DNA, 445 bp, Homo Sapiens
ttttagctggaaacctcttatattttaaggttttttaaaatacaataacaaaaacagaaccccaaatagaaattatgttcgtattattttacataaataagtgatttatagttaatttccatttttcattacttttggtggaaatttaactggaaaatgtgcatttgcataagaggtatctagtgttcatttaaaaaatgtcatggctcaaggctttcatcagaaatcacgtgtcatccccctttcagctcctcctgtccttagtcatgctgttttcttcctcgtggctgcatgatacctactgcatctgtcagcatcaggaccactcacaaggcaggaattaggagaaagcagagggaaatagcaacattcttttctttctgaggctttgtcccctgctgtggaaggaaagcctctagaaccccattcacctgcatctcactgg

SEQ ID NO: 38462 - DNA, 374 bp, Homo Sapiens
gccaacagaaagcagagaacacaagtttattaggaagcaagtcacttctcttttccccgtccccagacaaacctcctcttaatgttccttacataccaagaaaaagacatctctacaccacagtgatctcacaaggggaggtgagaagctgcaaccatcctcaagtctacttgctacagtaagactggtcattagagactctggcttgtggcttgccgaaaacactagccaagcctgcaaattgaggcttaacccactccggagataacctgcctttttttgtgtcaaatagaagtcaggctctgcaggcttccaagatcatattacccttgcatgggcattccagactaccacacctccaggcccatttctga

SEQ ID NO: 38463 - DNA, 487 bp, Homo Sapiens
gcggccgcgcctgcctgccccacctcgtaagggcctgtgacctcacgaggccagccgccgggcgctgcattcgagcggtggggctcctgtccgtgcgctttcctcccgcagccccggccgggattccgccctccgtccttgccacccgctcgccactcttccctaatcgctgttcattctccggtgcgctgtcccgccatggtctgaccccacttcaatcttatcttcggtccgtcctttgaacaccccgacccccgacccctttctttccaaaacattccatccttcttggcttctgctactcaataatggacagcagctcgaaggccatgtgtcccacggctttgctgaaatttgtctcgggttgcctttaaggagactgtcgtttccttttgaaagagatactttggttggtttggttttcttctgtgtgtttgtttttcctatgtatttatcgtatgcagttgggcaaaatacttaacgctcc

SEQ ID NO: 38464 - DNA, 466 bp, Homo Sapiens
tttttacaggtgggcttgtatttttgtttcatttccttggggtcaaagaaaaaagacaagctgggctaagcagtctccaattacaccatgttaagaatgaactgaaagtaagacccctatctctgccttttaccaatcatggaacatgtggtctggtgtattcattgatgggggaaggaagtgaaattgggcctttttcctggtaggagaaaattaaatcatatttgcatgctctagagaatataggtaatagggtcaccatgatcatgataggttgtaattgatacctggaaccaatattacagaatgctcagaatgcttgttctttaataggtcatattgaggacagtgaggtcagtgctgccataaagtcccgtttctcatcacatggtttttgtttcttttctactgttttgttttgagacagagtctcactccatcacccaggctggagtgcagtgatgca

SEQ ID NO: 38465 - DNA, 419 bp, Homo Sapiens
atctccaaagtttattttatatagcacacatttatatggaactgtaacagtgtttcaacacaagacatttgtgcagaaaaataacaggaactcttttgttaggatgattgtctctgttttatacatgaaagagctagtatataaaaatagtttttaaaccaaaggtaaccttctctattctatatcaaaagtacaatactctgagtggcaaagaaccagggaatctgaaagaattacctccttttactaatccaagactggcagccaaaaggaacactggcctgcttcagactatttacgattcaacactgaaaactcattaggagaattaatctgcatttgaattttatggaatcatatactgtgtgtgcatacatacgtgtatgtacatctgtgtgcatttctgtgtgcccatcaca

SEQ ID NO: 38466 - DNA, 447 bp, Homo Sapiens
tcacaactaaagagaatgctttatgatagctcagacagtggtaggaaatcaaaggcaaattcacatttttgattactcaccctaaaatatgctgaaattgaacatttgtgacccaagtaactaaaaatacattgaagaaaactataacttaactacatattgagttcatttcaatcgcagtagtctattttaaaaacaacctcccataaggaatacaggaatggaatccattgaaagcaacagctgtcaaaaactctgccaagaaactcagagtaacttattgcatcataaaaggtgaggtgttcaggaaaacaaatagctcaatcatattcttttctttcagattctgtcacttcaatctaagagaaatttctagaactaaactccctaaaacatgttttcaaatttaaagactaattaagtcaatgaaattcaacatgataaaca

SEQ ID NO: 38467 - DNA, 426 bp, Homo Sapiens
aatttgaacacatgaagttttatatttgtttcactttttgaaggttaaaacatataaaagtatacattaaaaatgtacacaactgtacacattgctgaatttttacaaagcaaaccacccacatagcgagctcttgaagaaagagaatgtcaccaacacagaaggaccctcatgctgcttcctgtcaccaccaccccaagggtatcttttgactttcttggcttttaatgccataggttagtgctgcctgtttttgaactttatgtacatgaaataacacagcatgtgctctttgtagctggcttcttaagttccctaacttcatgagattcatccatgttgttgtgtatagttctaatatgcttattctcattgctgtataatagtccacacataaatacattcgaatttatgtccattctactg

SEQ ID NO: 38468 - DNA, 402 bp, Homo Sapiens
gctagcaggggattgggccagacaacccttgaagccatgtccctctctttgattctatgaaatggcagcacagtcacctacagacatctgaccttaaacactggcccatctgcaatgccacggctgagtttcccaaccacaggtaaaggccccacccaaaagccaaattctttcagtcaaagctcaaaaatttcagcccagcaattggatccctgtgaaggctacgtaataagcatagacaaaaacgtaaaatcaaaagaaaggtttggaaatgaaagtttaaatatggcaactgaagtccaaccaatggtatcatctacccccacccttctttcctcataaatgtgattcaaaatgacattaactccaaaaatgaacacagctcaaacaaggtgaccttac

SEQ ID NO: 38469 - DNA, 492 bp, Homo Sapiens
ttgaggcatttacatcttcattttataaacaaggaaatttggagagattaaggtatccaaataatgcatcagagagtcaggtatgacatcccagattcctcaagcaccaagaccaggctctatgttgtgtctcccgacgaacatctgaaggtcatgggtgtgcacagtaagatctataggctctaaggtaccacatctggccatagattaataaacaaggctatactaaactaattgctggcaatagtcagcctctcaattctttatccttcatataccccattttaagaaaaggtcatcacaatgatcattggtatagtacatgacagtttaccatgtgcctccgtatttccacatttgatgtaatattcctaaaatacagcatgctaaatacccatatctaactggcatgcattgggagtgaataagctcaaggcagtggagccatttttacagtcctcatagataatatgaaccttgcatcctacttca

SEQ ID NO: 38470 - DNA, 490 bp, Homo Sapiens
tgatatggatttttgctctgtcttccaagctggagtgcagaccaagactcatgtaattacagtaaataatataacaactcattatgtaaagaacacaaagaaactgttttaaaaacactaaaaatttttaatgtgacatatggtttacaaaacataagtataactaattaatacagaggttccaaccagatacttcattccacacatgaaaactagcatactcaggaacactaaataactccataacattaacagcaaaatctaccttcctactcgtagttcactgactataatggctaaaatatgaaaagcagcataaactcttaatccattggacattcttataatgggaactgaccattagttatgcctttcttaatctatagatgtacctcttctgtgaacccacaagctactgtaatggtaagttcccctgaatacccgcatatatttgagcataaaccagcaaatatatgctatctcctctgat

SEQ ID NO: 38471 - DNA, 406 bp, Homo Sapiens
cagaagtaaatttgatttttattgactatatttacacttcaggcagtattggtcaaatcctgttatacttgacttcaaagagacacccaaaatattcccttatgctaggatttcagtgcatagtacaaagagcctactggatcttgcaaatattttcatttcacagtagttgtcatttaaatggcattggttgtaatgggactgcagatcaatgtaggatctcaacatcctgcaaatatagccatacctgctgtcttcctcaagccacctcaggttgatctagcagttcagatttctctgagtcagatggaaacactaattctttcacaaacctaattcttctagcattctggagcatcctctcctctgccttcagttgcatgggctaattcttcttctatgagtt

SEQ ID NO: 38472 - DNA, 446 bp, Homo Sapiens
ctctcattttaatgtgaggaaaatcatctttcagagacaaggcaccgcttagaaatgtatgtccaggtatgaaagaacctttttaaaatggctggttgttccagatccagatttctctgcacactggacttcgtagagtaagtgtggtagacaaagagactacactgcacaaccaccagtgaatatcattgctaagaagactttgggtcgtgtttctcagccactctcacagcttttgtagacttatttgattttgaaacaagcagttagctaaatctattttccttttatgcatatatgttaattggctcaacttaatatggtgttcttacagaatatgagcccatttgaaataaggttttaggcaattttgctgttggctctgatttgtatatagcaaatttaaaggtacagagtgtttcctagatagaagattagttcatttg

SEQ ID NO: 38473 - DNA, 402 bp, Homo Sapiens
tctgtaacttaaatgtatttctatttgaagcctccatttacctgcagtgacaataatcttatcaacaggaggccctcctcctttctttcaatttgaaacctccatttatctgcagtgatattcttatcaacgggaggcccggccctttctccagggctttgtcaagattggggagacttctgaagtgccaagatgagaagagagagaccttaggtccttgtgtcactggtccccacacaagttcagagatgttctttgtccactgtagtgttggttttcagtcttttggtttcaggcttgagggttagagatgtctgtgacttcaattcccatgtggtatggcagaattctctgtgaggcagcccttctgcctggacatacttgaagcatcacctcagaact

SEQ ID NO: 38474 - DNA, 460 bp, Homo Sapiens
aggtattttaatggaggaaatttatttattacagggaaattggttatacaggcattagagggctgaaaagcaaaatacaaaggctgaaaaaccaaaagtcatctagaaataataacttcagaaagcagctaccacctctagggctggaggaacaaaaggaaaaatatgaagtaaccagaacttagaagcccagaattgcaaccacaatctttgtggaaggtagaaccatctggctgctgtggataatctctgagcgggtacagggggaatcactgaggctgattccagtagtgctgaaagaagctgaagtggcactgccactgctgggagaagtgtctctaggtgaagaagcattgctggtcctgtaagcaactgaacaggaagcaagcttaaaaagaagtctgagaaacagtttgaggacaactagccccataattacagggaagaagagtacagaagg

SEQ ID NO: 38475 - DNA, 384 bp, Homo Sapiens
atgaggaagttgattttccatagccaatcctgtatttattcattaaatattccttgaaggaggaatatttaagttaaaaacagaaaggtaaatagagtaaaccagaagaggtagggaaaagaatattccaagctgaggaaacagaatgtaaataggaccaaaagggaagaactttctccttttcagggaaaggaatccaatatatctagagaaatggagttcttcagattatgaagtggcttttgagcttcatcaataatgttggactttattttaaaagcaataggaagttggctgggtgcagtggctcatgtttcattaaatatttagcaatccaaaaactatcactcttagtgggctttataacacgtggtatacattcac

SEQ ID NO: 38476 - DNA, 424 bp, Homo Sapiens
cagttcatatgttaaggatttatttattaagtaaaattctattgaagactaagaacgaagacacaaagatggctgagacacagcccttgcgatcaggttgcctacagtgtagcggaggagatgaaagaaaaatcaatcaaggttaggtgtcaaatgaaaacaggtgaagtactcaagaggcattcaccttgggaagatcagaggacatcctgcctgaactggatctccaaggctcaacagtttgtcaggtgaagaaaggagaaagagagacaaaagaactaacagatatatggaggtgtgaattcacacggcaggtaatttggactggtgaggatatgggatattaggggacacaggctggagactaatctggaaaggaaggcagcagccagttcatgcttaaagtttggaccttatcctgaag

SEQ ID NO: 38477 - DNA, 446 bp, Homo Sapiens
tttcctgtttattccacaaggggaagaatattttccaaagatcattttgtctggatacactctcttcttgttggcatcttgatcagaattgtattaagccagttcatttatttgggaagatctggcattcaacgatattcagctttccaacccaggactgtggtctgtctctccatttgctggagtctcctttaagcccagcttcctcacatgcctgcgtgctgagcagtgctgtgtggagaaaaataagcagcaatgagagaaaactgaggacaacatagtgacttttataaagcaaaactaatttcttttaaagaactgtactttatcctgtgattccctcccccactactcagagttgaaatggcgttttacaaaaaaactatgttagatatatttttttcttgtttctaaatgcataagttgatgaaatgtattttggaaat

SEQ ID NO: 38478 - DNA, 453 bp, Homo Sapiens
gccttttgcctatctctttcatttaatcagtcctggatatctgaaatatcaaaatgattctcagttggcccagacacctcacacatcatccagtgccctcacactttgaaggtgctcaatcagtgtttattcattggctgacccatgatatagaaattcacactactcagggttcctttccaaagtcttatacaagcaaaatgttgtggcaaaacattcacccaacattacaattcaaatattccagaaacctgtaagcatgctgtcttatgatctcattattgggtctcaatttaagtactgcttcctcaggggaaacttcatggactatccccagccacacctgcccccagcgccaggcctccagcctgattcacaacacttacacaattgtttgtatcaggtctgtctttccactgaccgtgtaccccaccaggcagcagcatgctgtct

SEQ ID NO: 38479 - DNA, 378 bp, Homo Sapiens
tttacaggtaacttctacatttattttataccaaaaaagttatgtgcaacaaataaacattcttacatatttacatttggttttatttaccagttagcaaaacagtgccttaaatctctgataaagagtatttctatctagattaaaggggaaacctgcccagtgaactccattttaaatgactgtttactctggagcttaaagcactagtaagaaatatttctgatggaacatactacacagatcatatacctaataaatacttaggccatgcttaatacagttttataacaaaatatttcaccttttctgggcgaaatttgtagtaaaaaaatgtttaacccaagtagccggggctcccacccttgccctttttgt

SEQ ID NO: 38480 - DNA, 374 bp, Homo Sapiens
ataattttttattgtcaattgcagaggaaaatttcaatattgaatcttacatcaagaataatctatttacaatgcatgtcctggtagagatgggataatgaatgtcacataaattattgggtaaatacatattttttatatacacgaagtcaatgaacctgcaacatggataccttatccaaccaactttacaaatgactattaatatgccttacatgcttgccatctataattactatatcccctaaacttaaaaactatgggttgtggtaaccagaactctttaatcactatacctatattccttaagggtagaagtctcctcttctttccccgctgtgatattagatgaagagacgagtgccttggacaca

SEQ ID NO: 38481 - DNA, 403 bp, Homo Sapiens
cattaaaacatgctcattgtgaaatttaattttacatatttaaaatagtacatttaaactgattagttacattacaggtacaacgatgagcactgtgacgccatcatattgcacatcctgacttcatccatatgggtttctttaaatagtgcaaaatactttatacaggaatgtgttcggaagggtcttgcaaccaaaataaggaaaagaagtatcttacaaattactatgaacatatattcaagtgacggggtgaagggaaatttttaaaaagttacaatctgtacagaggaattgccacagacaaccaaaaagttccctccctcctgggagaagcagcgggcctctgaccttcacaggtctggcatttgtgccacggtaattttcttggtgtcaatcaaaa

SEQ ID NO: 38482 - DNA, 371 bp, Homo Sapiens
ttagaaaaggccactgtcatttatctttgacttagtatacattacatttagaggaaaatttcttcatagtctcaggatgagatctgggaaatgaaagacgggagtttcactaggggcttgtaggaaagggcaacattgatccatgcagctcaggaggtttgtgttgttttggagggtattattttgtggagttttgatagctaaaggttttaacacagggtcccagatccttgaaggatagaaaaggagatatggaaggacccaaatcaaactgcaaatatttatcctcttgttagtctccaagcacagtcaggacattactgctcaaaatgccttatgatgagcttgttcataagtacagaacctgcgct

SEQ ID NO: 38483 - DNA, 445 bp, Homo Sapiens
ctagccatttatttaaaatttttattttcgcttgaagaaaaataatgcaatgtgacaatgtacaggtcctgttgcctaaatccgtagtagaaacagatattattacttagcaagctcacgtggtgccaattctgagatcagacggggttgttcctccttaggaagtggccactggaagcattgtttttccatgctatttccgtgaagccttttgcttggttcgagtttaaatttctccctttgtgtgagtatgactatagttctggcctggcgttttctatttatttagttttagatgtcagcattttactatacttggtcctctcacttcagaataacagggctatctattgatacaaaggagaggtgctcagatcatcttgttaagatgcagagctcataataaacactaaatctttatttggagatccacatccttcctcaa

SEQ ID NO: 38484 - DNA, 391 bp, Homo Sapiens
tttaaatacaaataaaacagaagagcatttattattggtgctacagtccagctttcactattcatacagggatttcaatttaactcaacatttttggagtccctattatgtctcctgcactgtgctcagacagtatgaacaaaaaagataacacaaggttcctacctttgagaagctctagctagaaaattaccttcagattactcagatgcgggggataacctgaatccctaaattactcgccattgtcgtgtcaaagcttcgcatcccatattcttcaaatgagctgatttcctctcattcctttgctcagatttatccagagcaacctactgcctccacaatagctaaatcgatagagattctgactaaagatatggacttcctcctc

SEQ ID NO: 38485 - DNA, 428 bp, Homo Sapiens
taaggaatatctgtccaaggggtatggtttgttatggtcgtgtcatagatactggagaaggagcgatttgtgggtagtgtctcatggtacagtggaaacagctcagtcacagggtgtgaatttgagtcctggctctgctttgtgactgggcttgagaactctgggctgacctataaaaacctgacattgggggttgaattaaaccagtgggtttgtccccatgagaagtcatggctaaactatgcatagaaaacgactggaaagaaacattaacagtgactatctttgcacagtggaacaggagtatgttttattcacctctttatactttcaaaaatattttaaagcagtttctaaaatagcccttaaaatcaagaacaaaagtgttattgaaacaagcaaaaatatcttgaaccatgctataccta

SEQ ID NO: 38486 - DNA, 353 bp, Homo Sapiens
tttttttcaacaaaaaatatttattctctcacagtgctgtatgctaaaagtcaaaaatcaaggcatagacagggccatgcaccttccaaaggttctaggggagcatccttccttgcctcttctaagattctagctgttgctgacaattcttcagcatttcttggcttgtggctgtatgactacaatttctgcttccatctctacatacccatctttcccgtgtatgcagaagtgtttcttcacgtggctttcttataaggacacaagtaatcagatttagggtcaaatctgtgccagtgtgacctcatcataactctgaaaactctacttccaaattgcactctgagtttcag

SEQ ID NO: 38487 - DNA, 478 bp, Homo Sapiens
ttagaagagaaagagatttattttaaggttatttaaatttaaacaatattaaccttaaatctgctaaatccatgtttctttattaactggggtaatatagtgattctacttagaaacagacccacatagcatctatggcaagaaaccctcaccataagagttagcagattaagtgtgtaagttttgatcttggaattatcgtcactcacacgttgcatgattctagcacttctctttccccccagggatgccgaactctgccaattcgccctttagtggaatgagtactgggggagaaaaagtaaggtttctctttgatcatccccaatcactggcattaatcctgtttttcacacagctgggttttgtctataaagtttgatccctccttttctcatccaaatcatgtgaaccattacacatcgaaataaaagaaaggtgggcagacttgcccaacgccaggctgacatgtgctgca

SEQ ID NO: 38488 - DNA, 469 bp, Homo Sapiens
cctccaaattttcacaatgaccactcataacttttcatcaggaaaaaatttatttaaaatatgtacggagagacaggaagagagatagacatacactgaacaagtatatagctgatttatatattaaatagtatagataaaaaagttgggctaaaatttggaaagatttatctttacttaatattcaggggggaaaacccccagacacacagaaggcattctatttctaggaatctgcaagtctttgagagtccttttcactctctaaagactaatgacttctgttgctaggaggaagggatcaagggtagctcttggtaggacactagtacaaagccacactgcacttgctatgaggaattttagcaagctttcttaaggaatcctgatcagtacaaagaagacattctcaaagcactggctctcatattcctcttccacccaaagtcctccaatgtattaagagtac

SEQ ID NO: 38489 - DNA, 360 bp, Homo Sapiens
tgcctagatccttgtattaaaacacatacttaggttagaatcattcctaattcatctttttttatccacatttcgacaccccagaaaacagaatgtgccttacaaatgatagtatagtagctattagccaggcagcaacagtcatggagttgttacttgctcacatgtgaacttggtcatatctgcgtatatgactgtcacttcagttgaattaggtacattattggtggtacgtttgtgctactacacaccaagcaatacatctcaaagcaagagacattgataagtcctttgaacagaaccatttcaaagcaaccagaatccatgcattgtgcaggattatgattaaaattcagatta

SEQ ID NO: 38490 - DNA, 472 bp, Homo Sapiens
cttctggcgcgtcggactcaccaccctctcctgtcgctagctgcatgttctagtttatcgatcacattctttcgctggattgcatgacgcccattggtgcatgcgcgtgtcacagacttactctgcgcggggaggcgcggaattgctgcaatgcgcacctctcgcaaacctaatgcctgctcttggggacaactggccttaggaagctttggcaaccgatgaaacactggaatggtgtcttctcatcatcctgtgcgacttcgtagtccgcatactaatacacaccatatacaccctgataacgttcacgttcgatctggcagccgtgcttgagatgagaaccgtcatggaagaatgtgcagctgactgccacgctcgccaagccagaatcctggcaggcctctcaaatgtctgactcgttcatcccagcggcgcgaagccactttagatgcttgggcgctcttgctgggcc

SEQ ID NO: 38491 - DNA, 479 bp, Homo Sapiens
ttttgattttccatcgtctctttataaagtttctttggatagtaacataaggatatctgtaaaatagctggccctaggtatttgctctccaaaacactgcagttgtcatcattatcatcatcttcactgctgtcaacactgtttgctctgcagggaaggtagaggagagtacctgtgtcttgctggtttgtgttgcacatttacaccatcctgtcccatctatgcttagggccaggtctcttagtttcctcaaagtttagaaggtctcggagaaaggagtgacctgagtaagatgggggaaaacttccagggtccacaggggatcctgaggctctgaaggacttgagaggatagtgaggcaatttgcttgacttttgacctttcttcctgggtcttcccctcctcagtgacagttgggccttgtgccatccaccaggtgagatcacagcatttctctcctctggaggacacagcatcaa

SEQ ID NO: 38492 - DNA, 500 bp, Homo Sapiens
gcggccgctgctgccgagtcaaggaggaaaccttcatgcacggaagtttctcgggggcggccgggctttgttcgcgccagaggcgctcgagacatctccgggaggggagcgcgggcggagcgcacagggctagtttccagcagcggcggcgcccctttccctgccccaccacgcgacgtcctggccgtggcttggggggacccgggcgccctccaggtgcaggcagagggtcgggtgccctcgcgttgctgttgggctcccctgaccagggaggatggaaaggaaggagcaggcaggcttagctgccctagaccggccctagaccgggaacctggaagcagatctgacttccacttccaagggagaaaccgcctcccgcactggcgccccgaggggagagagaagcccagctaggtttccgcgtggtccgcgtggttggtgaaccctcaggctggggggtgccccgcttggcgtgcaaggccctctttggagctgccgtg

SEQ ID NO: 38493 - DNA, 351 bp, Homo Sapiens
tgagccaccatgcctggctagaactagactcttaatctcttcatcctaatgcatggcgtgtgttgatgttcacttaatgtctgtcaactgggtgtagttacaccagtagcggagaggctaatctttgaaagcctgaagtgttgtcttcatctttgcagggtttttagttgtgggtgcatatgggaatgattgtaagaccaacaaatgttttctgattccatatgggcttcttacatttttcaccttggaatctgggaacaattgaaacctaccatatgccttgaacagtagcagtaaagagccagtttctttaaactagacattatggtgctgcagctcatctcaaaactg

SEQ ID NO: 38494 - DNA, 427 bp, Homo Sapiens
tggcatgagccacgcacccttcccattcccttcttttaaaactctctctcttctcagcttgatacccacctttcactttttcactactttgaatgcttttttctttgtaccccttgaaattgaattaaaaattagatttgcaaatgtataggaagattaagaacatctttgaggtgcaggaataaagttgtaagtgcctggactcgagtgatagcactgaaaaggaatcacctgacattttgaatagagcttatacagtagatataataaaaattgtattttgtcatgggctgtaaggaatggtggatataatgtcaatgatcactaagttttagaggatttgaaaggaagaatagtagaatgttttcaaaattaggaagtcagttgggaaagaaccagttttgttcattaggaatggaagtgatac

SEQ ID NO: 38495 - DNA, 442 bp, Homo Sapiens
atatgaaagggagtttattaaggagtattgactcatatgatcacaaggtgaagtcccacaataggctgtctgcaagctgaggaacaaagaagccagtccgagttccaaaacctcagaagtagggaagccaacagtgcagccttcagtctgtggccgaaggccagagatcccctgacaaaccacttttataggtctaagactccaaaagctgaagaacctggagtccgatgttcgagggtaggaagcatctagcacgggagaaaggtgaaggccaggagactcagccagtcaagtccttccaacttctgcctgcttttattctagccatgctggcagctgatgagatggtgcccacccagtccgaggactggtccgcctctcccagtccactgttaatctccttggcaacaccctcacagacacacccaggaacaatactttg

SEQ ID NO: 38496 - DNA, 520 bp, Homo Sapiens
tttttgtcccctcacttgtttttataaacatctattataggcgaaacaaaacttacccatattatatagataagtgtctattcacatttgtacattaccatttttaacagcttgagataaactctacgtcttacaacacattaaacaatattcaagttactgagtaacaacaataacaacaataacaaaagaacacacagcagaagcctcaagtgtttcctcattgtctacaactcaagtatggtttcctttttatgagtgacaaagcaaattaagataatgaagtaaaaaacgattgtttgcaagatgaaagccaatttgtacttccttctaaaactacctttaagttgcaaatgtaaatttaagaggctcatagccatttctgcagcacacattaggaatactattaatacattaaaattaacttttaagagttttatcacagaaaaatgtatgtattcattaccttgaccagaaacccagggcagggagaaggggaaggaggggtctgcagggtttg

SEQ ID NO: 38497 - DNA, 514 bp, Homo Sapiens
ttttcttcttaaaactttttattgtggtaaaatatacataccataaaatttacaattttaaccatttaaaaatgtacaattcaacgtcattaagtatattcccaatagtgtgtgcaaccatcaccaccatccatctccagaactctgtcatcatcccagtgtgaaagtgttttagaaaccatatatgtaaaggcaggtcaattaggaatgtgctagctgaagtcttgaccggacagcaaattcatccatccacctacctactgtgtttatgtaccaggcttgataaatacagaaacaaatgagaccagaactacaaggtaagaaccttgtcgtctgtgatgctgggccccctgtcctacttcaaaacagagtgggaagatagaaaggattcttagatgagtctctaattgaaggaattcaagttttacttattctcctttcccagggaaatgggaggtgctctcacccatggcctcagcctttccagttaccaagaggtgtgggattttctctc

SEQ ID NO: 38498 - DNA, 428 bp, Homo Sapiens
gtttcgctcttcctccgccccccgaccacagccccttaaagggccagcccctctacaggcccctctcccctactccgcccccgggcaggggtaggggagggtctattcggcagggggtggcctagctgtccgtactccccaaacgcaaccttccagtcccaaacccaggcgttctaagcgctcaggacgacgatttgcgctcacgccaggaccctagtcttcattggacccttcctcattctgtcctcattgaggccatctgagaataggggctatctgagaatgcaggggagtggacatcgtgtgcagacagggagtctggagaggagacgctgcggtccccgatgtccaggtcctccagccctcggccagcgaggagcgaacgggctcctccgcacggaccgacacgtggactgagctcctggctc

SEQ ID NO: 38499 - DNA, 427 bp, Homo Sapiens
acagaaaaacagaaacttttatttcaaaattttaacaggaacacttttctccttcagtaggagtccctcagctaaggaaattaatatactgaagctaaaatacaagattcaataaaacactgaccttaaactagatctacttagctgaaattatatgaaatcaacctaacataatgcagatctctttaatatacaaatatgaggttgctaacctattaacaagagaaaatgttgcttgaggtcttctatttgtttgctcattttttgtttgatttgtgattgccatctacatccttcctaggcctatgtgggaccaagaagatttttggcatagctgggcaaaacagagaaatgccattccaattttccaccagattaaaaaagaaaatttacaactcgcacatgacaacatttccaagtatccctt

SEQ ID NO: 38500 - DNA, 585 bp, Homo Sapiens
tcaggatttattcattcatctaacatttattgagcatggaccatatgctagacactgctagagaagagaacaaacacagtgcagaaggggaggctgtgtgtatatacacagtgtatactcgcacggattaagcatacatacatgcacacatcatgtgcacatttatagaggctttgacattacacaagcctgaattcaaatgagacccctgccgtgtaacactgagtaagttgcctcccctctctgacacttatgatgcctgtgtcatgggattggtataagaataaagcatttggcacgtggtaggacctcagtatatgggacctctataatctcaataaaggtacataatgttgtgagagtgaaaaggaagaatcactataaaagataatatataactgatctatgatatctatctataaagataatataacactttttctaagctgcaaagtcatatgcatgtaatagccacccagctcattctaagcactcgtgttatatgcaaagggtgttcttattttaaaggagggagtgaggactgtgaggggtgggaggagggcagctgtttgagtagggccttga

SEQ ID NO: 38501 - DNA, 386 bp, Homo Sapiens
agtgatctgccatttattgactctatggcacttgcattgtatacataatttcatttaatccttacagtaggtgtcattatttccatttttacagatcagaaaacagactcaaagatgttaaatacttgttcaaatacttctccaaataataagttgtgaagccaggatccgaacccaggtttctgactgcaaagcccaagctttctccactacgccagccagctggagatgtgtcaggggtagttttcactccaggcagagaaatagcataagcaaagatggagaagcagtaaatcgtggaggagcattcagggaagtgagcaggcaggctgttgaagcacaggggtacctgcgctgcctggctctgcgccccgcccgccggcccg

SEQ ID NO: 38502 - DNA, 489 bp, Homo Sapiens
cggaggtctgtattttttattggggtaaaatagctataccacaatattggccaacttaacgatttttacaggaacaattcagtggcattaagtgcctttacaaggtggtgcaactgctttgagtctctgctggtgatgtcactttggcaaagggacgaaatgagccaccagtgcgtcaggcctgctcaaagttgtttggaggtagcatggacacaggtgcctgtccctgccccctagctgggctgcagcgcatcctaacaatgctccaggggctgggccggccctgagcctggaggtgggcagggctgcaactgcctcctgggccactagagggcatgtgggagccactcacatgcaccccaggccccacttcctgggtagggtgcccggcccctcaaaacgagtgctgctctgagcttgttgggatggatctttccctccttcagcttccgcctgctggcaatgcatggcgtcctgcgcccccatttc

SEQ ID NO: 38503 - DNA, 519 bp, Homo Sapiens
tttcaggggtacgattttatattcaacagacattacattttctatacttctacgggtgcagcccacagggaagggaagtgcagcctgggaagtccctgtaagcacacacactgctgcatgagagccaggggtgactcagaggcatgctgggccagcttcagcactctcccatcccatcatctccactcctgtaagcacacacactgctgcatgagaaccagaggcaactaagaggcatgctgggccggcttcagcactctcccacactactgcatgagaaccaggggtggaacatccctgtgagcacacacacactgctgcgtgagaaccagaggcgactcacaggtctgctgggctggtttcagcactttcccgtcccatcatctacacctgctctccctctaccatattcctgattatgaacaattgacatgttctcagtcttaaagtgccatgtaaacttagcttcaagtccccttttccaactagattcatgcccacccacctccctttgataaa

SEQ ID NO: 38504 - DNA, 378 bp, Homo Sapiens
gccacagcacccagcccaagttacatctcttaagaccaaagaattttaattgactaatgaagcaggactgctttgctacttggacacagagctgattttgtgttcttccctctgtcgtggcttttttcatcctatgtactcttgggtataacacagtccacaccttcccagggctacgctttccagagcagaactgaaaaacctaagccatagtttccagctagaaaccgccaactttaacactactagataagaagagtcaagcttttctagttaaaggtataaaggacgttcccgttcaattgtttttatgattgaggggaccgaggcccagagggggtgtgagcgggagaggagtgaccagctccaaacgtctcg

SEQ ID NO: 38505 - DNA, 574 bp, Homo Sapiens
tagggataaaacacaatagtcatactttgggaacatttgcggtatgaaacatatacagaaatcaatttaattatcacaaatctaatctatcataatatgttaacaatgttcataatatagctattttacaaacaagagaagatacaattcaaatattatacactaagctggccaattatattcttttgttaatggatatcaagccagctataaaactattgagataaaaatgtgattctgtaatcactgagaagtgactgcttgctagtatagactcatggttttattgttcaagatttaaattaaaatctgcaagtatttaatttcactatctagaaaccttaacatcctttacaatttccaaatataaaatagaaatgattcatttacctgtatgagatgttccaacatagccaacaattctaattccaagactctgcccatcttttctcacaagctcaacattataagttgcaaaaagagaactgtcctaaaaggaaaaaacaaatttaattatatatgcttagtggcatacctgtgtgtacatagtcaatctgtgcaaggtttgtcaagt

SEQ ID NO: 38506 - DNA, 459 bp, Homo Sapiens
tcctcagttaaaaacagcccagaaaacaagacaactctcaggtaagaaaagagtttctgaaaaaggacccagcatatacatgtataatacaacggtgaaaaaggaaaaagtatttacaggtgaactgtttttacattggctagttctgtacgaaaagcagacattacgtgtatgagttagctgctccagagatatgaatgttattgctgttgtttttcccttcgttaaaaatcttctttcagtatagaaatataatgagaattaaactgaatacacaatcacttagatgaagggcctcacacacagaggagtcagcagcccacacagcggacacctcttcccccttctgctgaaaagaaacggactcgcacctgtgccaaggggagccaggcgtgcacccctcggggcctgggacccctcagtccagagcagccctgcagccacagctgccccctcagg

SEQ ID NO: 38507 - DNA, 468 bp, Homo Sapiens
tcatatggagtaatttatttttaaaactgcataaattccattgagtggtttatataacagtgctgcaatttatggacatttcagtgacttccaatattttattattacaaaggatgctgttttaaatcccctggacctttggattttattcctggtgaagattcatcaaaagagtacattccagaaagcaggattgaaaagtgaagatattaatagaaattttgttgcatattgtcaagtttgccttaattttttggtaccatttccatttgcagaagtaatgtataaatatactcttgccttgaaactagctaacaaaatgtgttattacaacatttttaaagttttgccaatcaaatggtaagaagtgtatttaaatttagttttaatttatatttcttgttttttaaataacatagaacatttttgcatatttcctgtgtcaatattatttttctttttgtaaat

SEQ ID NO: 38508 - DNA, 510 bp, Homo Sapiens
gcggccgcccagccccacactacagcatgctgccagtgaggacaacctgtccagcagcacgggcgaggccgtgtcccgggcagtcggacatcatggggacggccccaggccctggctgcgtggccagaagaaaagcctgggcaagaaaagggaggagtcgctggaggcaaagagaaggaagcggaggtcccgatccttcgaggtcaccgggcaagggctctcccaccccaagacacacctcctggggccccatcaggcggagcgcatctcggaccacaggatgccagtgtgcaggcacccagcccctggtatccggcatctgggaaaggtcacgctacctttggccaaagtcaaactccctccaagccagaacacgggcccgggggactcctcacccctggctgttccccccaacccaggtggtggttctcgacgggctacccgtgggccccgcctgccccacggcacaagcacccatggcaaagatggatgctcccggcataactgagg

SEQ ID NO: 38509 - DNA, 453 bp, Homo Sapiens
tttggtaggcacaaactctggatttttattctccatttccacagaattgaaagtctatttaatatatcaaggaaaatattttctttcacaagtgcccttacacaaacactgcagaggctgcttaagaggttgtagccttaaacatggatactacttaaagactaaaaaagtatataaagaaaattactttgaaacttttggttctgtacttggtgtcatcttggtgatgctgaagagaatttctgcgaaccctgtatttggaatatcttccatcagttctctcagatgaactgcaggaatctctgaagtctttgaaatcttctagtaggctcagtttctcaggcacagactccagatggtccaaggccacttgggtactctgaaatagaaaacataaggaaaccaaacattataaaaaattgattaatactctcagaatccacatactaaaaa

SEQ ID NO: 38510 - DNA, 454 bp, Homo Sapiens
gctattattgtctgcctgtcttatttcggaaagataggcttcaagctgtgagattctttcacctgcttagtctattctgctatgaatacattagattgcattgtgaagttggtgtctttttcagctctaagagttcagctatattcctctctaaactggctattttggctctcagctcatgtattatcatgattcttaccttctttgcattgggttacaacatgcctctttagctcagtgaagtttgttgttacccgccttctgaagcttacttctgtcatttcattcatctcagcctcagcctagttctgagcccttgctggagaggtgttgtggtcatttggaggaaaaggggcactctggctttttgagttttcagtatttttgcatcgattctttctcaactttgtgggcttatctaccttcagtctttgagattgatgacctttggatg

SEQ ID NO: 38511 - DNA, 443 bp, Homo Sapiens
tttaacatttgtgtatctatttactaagcattttttatgtgcaggagagagtacaaaccaacatgcaacatagtcttcattcttaaaaagtacatagtaaaggtatgaaaaacatttgtattcagagaattctaagacaaatggtcaaatattcaaatggcctggcactagtggtaattccagcagacaaacagcatgagaaaaggccgggagacagtaataaatacgtgcccattgcaatgagttacccaatcaagcccttttacctccttaagatggcagattagaagaccctcttccccaggagagtgggagcgtctgccttcgggctgtcagtaatattaaataagagtgcttgatttataaattttaaaaacataagaaggtttgacattctgcccagagcaacggagggcagcggtggtttaccagcgaaaggactg

SEQ ID NO: 38512 - DNA, 350 bp, Homo Sapiens
aagggtcaggagagtttattaaattaaggggatcaccagctcagccggacataggtccagaaagtttgagccccgaacaaagggctttttctacttgtaaacatcttaaggcaggaactacgtgaggcgggaagcaagttacagaagcaagaaacaaagacagcattacatttcttatatcttgagagaaacatgtcttgccacctaaacttattggtcttgtgaccctgcagccatgctagggaggtaagcaggaactcgctgggcctgtaacaaactttgaggaatgtggagttggggagtatagataaggtccactgtccacagagagaagacagactgttaatatt

SEQ ID NO: 38513 - DNA, 480 bp, Homo Sapiens
acagtgaaagcagggcatatagatagctgtattgatcacattgattaaaaacatttttttcaatgggaaaaaatacatttaacaagaaattcaacaaataacacactagggaaaacaaggctttttccgaagatattttacagaaacaaatgcaatgttacatatattttgtaaaattatcttaaaattatactgaatacatgtcccaaattattgttaacctatttttattcaaatatgtttatgctttaaatgaaacacagagattttaattagtttcacagtcaaaattatttttgtaggcctttattaactcatgaaaagttcacttgctataaatagagccttaacataaagtgattttcggttctttagcacaatttttaaaacaatttctccaacagaattaagtgaaatctcatttatcttaaagcaaattagaggacttataaaaaatctttccatttctatagagatgaa

SEQ ID NO: 38514 - DNA, 409 bp, Homo Sapiens
gttttctgggtttctattttctttgtttttggcatttgaggaattctgttgtttcctaagaacctagtacagtatgaacaagtatatttcatctaggatctgacttaactatagcaagacagtcctcagaaaacccaagctttcatacagatgccaaaaaagtccatggggtttaattctttgaccattttgagtgcagggacttattcatgcttacatcctcacaactcagcttggggactgcctcacacctggcagctgatcctttttgttttttaaatgtaagaagccacactgagggctctccaggcggaaaaagttaggacacaggaccagcatttctttccagccacttgtggatccctgattgaatgtcacccttgactgcctaactcatctctttcccaag

SEQ ID NO: 38515 - DNA, 399 bp, Homo Sapiens
ggcatgttttgaaaaatctcatgtttgcataattatgtttgaaaaactcattatgagatcttccttaccctaaactgtcattttttcctaacgctgacagaaccccacctatagcagcataaagtgcctctactctcagtctttttaacgacttgaaacacagtaagaaacactgacctggtttgacattaaggattttgggtctggaggactcaggagaggaaagtgctggggctgcttcccagtgtcaccactggtgttgggaaccctgcatgtaaacatggtcggactcaatcctcaactgctggcagtcagccttctcaaccatacctcagggccaagtgaaactaaacattttagctttttcaacactccaaacctacgcgggcataaactcga

SEQ ID NO: 38516 - DNA, 415 bp, Homo Sapiens
ctcttctattcttctcttttactcttctcttgcatgtgggaggtagctgctttcataaaccaatatacattcgtgctgcactagcctggtgattgccggtccctctctgctgggtgcctgatgccaggctggagagtagctaccacccaactgacagactgaaaagcaaactagaacctacagagtgatgccccaaaatatatattagctacagtctggggttgctttgcttatcattgctctatgatatagacagaattcttttctacctctctttggataatagcactcacgtgaagagacaggtgccctcctgtgattacacagcatatatgtcacacttctaataataacaatggtcaaaagggtgatttttcttcatgcttggcactgtgctgaacaatttagatgtatt

SEQ ID NO: 38517 - DNA, 392 bp, Homo Sapiens
ttaatcaacttttattttagattcaggaggtacatgtacaggtcatttgtttttatttataaagaaaaatatatttagctctagattctatttaaagaaaaaataggattagcctttttataggaaagtgaacaaaataacaagctggtaggttaaattgttccaataataaacattccctgagcgtatgaccttattccatttgagaaataaggcagcaataagaaattgatgataaaaatgaggttcacactgaggcctgtgtgttgtcttccaggaccaggtctgcgaggtgtacccccaggagccgtagaaataatgtacccaatgatcgaagaagaacctcagatattgcaagtgaaagagatagtccggaagtacttccctgagac

SEQ ID NO: 38518 - DNA, 360 bp, Homo Sapiens
ttaggtttgggggtacatgtgaaggtccgttacacagttaaacacctgccacgagggtttgtcatacatattattacatcacccaggacccaattaagcccagtacccaacagttatctttctgctcctctctctcttgctaccctcccccagtgtctgctgtctcctcctttgtgttcctaagttgtcatttagctctgatgttctcagtttctattacagatttacacttatcaatgtttcaggtgttctgcagggtgctcatggcttccaggtaggtgcacacttcaccacatggacacatttcagaactgttgctttaaatgtgtgcacacttcccactgtcttaccacttgtctg

SEQ ID NO: 38519 - DNA, 472 bp, Homo Sapiens
tttagtatcaagttataccccattcccgtttatttgcttttacaccaggggagtagaaccattgttagaaaaaaaatgtcccactattgcggtgtgatgcatcactgggcaagctgggcgggtcagatggagatggggcagaccagccccactgtgctgatgttggtaactgctcagatgagatgccttgacaagcgtgggaaagacagtagattccattcatctcctgggtatcctcattgacacagtgcctgatttatggaaagtctgaactccacagagggtacaagtagagaatgtctttactttttccaaccactgccatctcttactctgatggatttttcttcccagccctgtgaaaaatcagaaaaatctcattgttctctgtgattttagttattagaatgttttgttttggtgatcatgatttatatttaattattaaaaagtagtccaggccttggcacga

SEQ ID NO: 38520 - DNA, 683 bp, Homo Sapiens
tttttgcagatgtagagatttactgtggttgccctttctcacccacacaagaaaaacgatggaacagatcatgagattcgactgttctgctgagcagcctccgcagggcactttgtatgtccctgtttctcaggctgtagatgaaaaggttcagcatgggggtgaccacagcgtacatcattgacgccactacaccattcctgggggtggtgacaccagctgaagtcaggtacatgccaatgcctgttccataaaatcagcaaacaactgctaggtgagagtcacaggtggagaaggctttatacttcccatctgaagatgaaatccagagaatgaaggtgacgattttaaagtaagacaaaaggatccctgaaatgggaagaaaaccaaacatagtactatggaaatacgtgaatatgctattgatgacgctgtcagaacaggcaagtttgagaaattgagaggggtcacagacaaaattagagatttccacattcttgatgatggtgaattgtaacacaattcaactgtgcagctgggaacctacatgctaatgagaaggacaccaaaacgaagaagacacagaggtgaggattcacgatgactgggtaatgcagagggcgacagatggctactaagcagtcataggccatcacagtcaggatcatgcatgcttacatgca

SEQ ID NO: 38521 - DNA, 503 bp, Homo Sapiens
tagaggggggcctaaggaggccagtcggggcggctgcctggtctctgccctccccctctgctttcgctttgtgctcacaatgcagctccagtaaagcgcttccctctccccgcagccgccgccatgttagacgctctctccatgtgccccgagtcccagccatcctctccagtctccccaggacccagcccccaacgaatctaaatcgtggcagtcccccgccccttcacagtcccctaggaacaaaaagtcgctgcagaaaatcatctcgcgattgagctgagcctgaggctcggggggacacctaaacaattgaaacaaagagggaaacgcaggggagcccatcgcatgggcgcgggggtagcaaatcgaagacccattcaaaatgggcctgccggaaaggcagttctaccttaagattctaaacacacttctctcctacggaagaagaggggacgctcgacaggtctcgagtgcatggtaaccgagcggacagaccccaa

SEQ ID NO: 38522 - DNA, 525 bp, Homo Sapiens
ttttttcaaatgtataaattgtttttattttcttatatatttttcacaattcaaattcgaaattgatgaaaatgtttgtgtgtatgtctgtgcatgttttactgtgaactacaaataactagaagtagcataaaccataggtcttctttttatgttttgatccaaactacttacactaatcacaaagaatattcctaatattcataaaggagatcagaatatttttaattgagtcaagtccaaatgtaataatgttttattagttcttaatctgtcctaatttagaacaaaccatgaacaattggaagaaatgttgaatcctggagcatccccgatccctaagcctcatcaatctaaatttgcccattattaccagattcctgtaatgatacaaatatatccaacattaaattaaacaatgataataaatacatttaaagtcattcaataaacaaaatgaaaccagtaaatacatttggtccaatacagatatagtatcactcaaaggatggcgggtagagacag

SEQ ID NO: 38523 - DNA, 435 bp, Homo Sapiens
tttttgggtaaaatatatacaagataatgctatacttttaaaagagaaaaagcactttacattgtttaggtctttggatctgcatatgtccctgaggtaagtattccagccatgggaaactgaagcacagagaggtagtcacccaccaaagctcagggctggcctccagagcttgaacccttgcctgagctggggtcaccagcctgggtgggccacggagcgatcatcatttctccatctgatcggaaagtcacccaccactctgttctggggcccagcccgcctggctccaggcaggctcggaggccgtgctctcctggacctggtgcatctggctgcagccagcactgggcaggaaaataccgctggagcagtgccaggtgcaggacgtccccactacctgcttcctcctgggtctggagggccaccatgagc

SEQ ID NO: 38524 - DNA, 454 bp, Homo Sapiens
tttaaacttaatgatcatgattttccactgcagcaaaagtgacattagccttgtgatcaccaatttttgatttctttctggttatcaaacaatactctagtcagatgccccaaagaacaccatggttcgacagacattgccacagatctctgtgggtccagcgttcctggtcgccgctctagcctggggcagaagcagaaatgcaggaggcacgcgtttaaatcaggacgccctcaatgtgaggtgcgcaggccgaggagggggctgcggcaagctgcgagtcttcactttcttcggctcttgggtttgactctgtaattggttctaggcccacgctcaggacggacgcgcgctggacggctcttccttgtcggagcgccccaggggtcggggaagagggcccggcaagggagccctcgcgccggagctgcagctgcagccgccgccccgccgc

SEQ ID NO: 38525 - DNA, 534 bp, Homo Sapiens
tgaatccaagacttactgttacgatagaagcaagaagcaattagggacctacccctgacatccattaaagtcaacacctacatagctatatcacaagaggtggaaaatgagattaaaatgtatatttgctagcacttaatagtttatagccagtctaaataaattatcaatctaaatagattatctcatttgattttcaaaagcaagtaaaattatgtatggagatactaaccctgtcttagaatgaagtcagaactttgggaaagatcataattttccttcaaaacactgacaacaatttgtacttttctatttttctctgtaactccacttcatccattcattccacaaatatttattaagtatctactacatgtcaggtactgtactggatgctagagatacagcaatgaatgcaacagacaaagactgtgacccctacattccagtaaggattttttttgtttaatatctgtctcatccaaccagactataaactccacaaaggcaggacaagtgcctgtttattcacct

SEQ ID NO: 38526 - DNA, 456 bp, Homo Sapiens
cacagtagctcccttagtggcaaaggaggaagcaaaaatagccagaggcttgttcagaggtgggacacttgggaaaaaggtcagggtcacttagaagcccctgggcagtcattgcatttgccgtaaaaccctgccattcagggctccacgcagaccagaatgccacagcgaagccacagccatgactccacctcagaatcactcaagattttttaaacgtaacatgcccaagccccaccaggccaaacagagaatgtatgggtagggcctgggcagggtgtgtttggagccccaggtcattctaatggacttccaggtggatgatcttgttgatggccaggtgtagccaataagtccctgtgctccaggtatagccagggtacatctacccctgcacacacatccccgtcttcccagcaaattgcattgtcatatagaaatggcaggatttgacca

SEQ ID NO: 38527 - DNA, 543 bp, Homo Sapiens
taggacttaatatttattatccacatagaaaccaaagcattatgtggtttttagtggcacttattttgaaaagcacatggcttacccatgaacaaagcagtagtcatttaaatttggcttactcagcagtcctaaaggctaaattctggttttgtttgtgctgctgagaaaacaaaacaaccacaatcccagcaagtttgcttatgaaccttatttctcttatttttgagaaaatatgatcctactaaaccttgaatgaagatttcaaatctatatgcaaagacacataggcattattgttttgcagatggaaaaataagggctcaagtcatagacatatatgatggcagagcaatgagaaaatcctgggctgttttctaacatggtaaaatagggtttcatacctcctgaattcagcaaggatgtaatttgcaagtaactactcctttgaaaatcagagttatccacacttgtagtgaaattcattcctgatggtgcttactgggttccactctggtgtcggaagctgaaccggagactgac

SEQ ID NO: 38528 - DNA, 458 bp, Homo Sapiens
aatcatgttcatctagccttttatggagtaagtctgccaactccagtctaggttgtagaatgcagaatgatacagggaaatactgaactgatccagctccctccactgaatggctgtatgtgctttgacaagtcacaatctctttcaaaactagttgcctcatttataaaatgcaaacgcctgagtcccacacccaatcaaatgaaattcaaaatctctgggaatggggccccacacatagcctcccccaggtgattctaaagcatagtgaggaccgaaatcccgagattaaatgatgactaaatctcttcagctctgctattctttctataaataacatagtttgtaacactgatttttttaaaagaactgcatcctaaaaataaccttcctcctgatataatccaaacttaagttctatgtattttatacaattaaaaacaagtagctacaagtta

SEQ ID NO: 38529 - DNA, 491 bp, Homo Sapiens
tatagttgtgtgcaatttaatgaacacaattaattttaccaccattttacataaaaggaaactgaagtgcatttcttagggtcccactgtaagttgagggcttgagattccaagaaaagtcttatttcagagctcagtgtcttgcccaaaacgcagcctcactgctcaatcacattcttgaggtttgattggctgaacgcacgtggaacatcaggttcatgtttccaagcaagaatcatgggttggggaaggcaagtgtttactgtggtccagctgaggactgtggtgtctgaaactctgtcacatgggaggctacaggcccggggctggcttggctcccgtgaaaacactgcagcgggcagccagtccggaaggcagcatctggcagggcctccaggccttctgagtaaggaagaccccagcttgcaaaagacatagaggcagcactgtgactggaactgaatagccacacctatatcacccatattcaa

SEQ ID NO: 38530 - DNA, 434 bp, Homo Sapiens
ttttgcaaaccagaagcctttaaagtttattagaactacctcaaaaagacacacaactgtgagaaattagataaagccttctaataagcaatttcaaagagaaaaaagaaaagcctgggagtcactgagtgtactgcagagacccaaacacctcgataattgaatcataactaggcaggcactcattcattttgacagtaacgctgagtcttcaaaagagtttatgctcagtttagaaaaacaaataaggctgtgatccgtttcttgtaaacgtttatccaaaggtttttaggggttggacagaaagggtttactttggcggattttttgtcctctaataaaagttattactgcggtgaggcttagacttgttctgagaaactgaaagctgtcccgagagcacctgaaactgcatgctctgttgctgatgcaac

SEQ ID NO: 38531 - DNA, 506 bp, Homo Sapiens
ccaataaaattttatttatggacactgaaatttgaatttcacataattctcacgtgtcacaaaataattcttttgattcttttccaaccatttaaaaaatgtaaagaacattcttagctctcaggctacacaaaaatatggctatactttgtcaaccatccctagaccctgaacagcatttctgaattagtaacacttaggggtcctaaaaaacagggtttggaatagctgtgtgttaaggagtccctaaaaaattcataatgccaattagcataataaaggctctaagccttgcggttaaaaaagcaagcttaacttccgtcagctcagctagtccttcctttttcctagtattaagttgcaacagtttgaaaaatatttaaataagaatagtcaagtcaaacttcctgggatgactaaaatgatagctaaggtttaaaacagacatccaagttcctgaaactaataaagccacaacatgacttcagctatgccatcagaaactg

SEQ ID NO: 38532 - DNA, 456 bp, Homo Sapiens
tttaactgcaaatttaataaattccaacatgcccaaacttcctgacttccactgtccaccactggtttctttggaaacttcaatagcgagagataactggcgaggtctgctctgcctaccttcacggcacatgcataatccaggatcaggcaaataagctttcatcttcgaagcacttaagttaattacatggaggccggtggaggccccagagccagttctgcgcacagccctcccaaagccaaacatcataggatccagatgcaaacccttggcaacttaagcccaacaaatttcctttgtcaagaaatgcaaacagccaaacattgaagcgtaggctacttcagtgagttggcctccttgggtgctagggcctgcagagcccaggccagaaacccagatcagaaatgattcaaatgcgcaagtggtcgggacctagctggttctcaggaggac

SEQ ID NO: 38533 - DNA, 367 bp, Homo Sapiens
tttttttgtgtgtgtttttactagctggtgggctgcaattttcgagaatctgcacacacccatgtcctttgtctgagccgcaggtcccctgggatttggggagacgtcaatacgttgaattttgatatcccttttataaatcatttaaaaatgtcttctcagcgtgttccatatcaaatccacacccacaccccccgccgggcccgcttctcctgagactcagcggttggtcggcttacgggcatcttcaatgacgcagtgaagaaaagcccctgtttccccaaacccttgttctgggttagaggtcctggtaccttcagttaacagtcgggtttcgtttgattttgttacggcgcccctgggcctt

SEQ ID NO: 38534 - DNA, 538 bp, Homo Sapiens
tactattcttggaatttggtagtttcatgtttaatattgtaacctgtataaaaatgaaatctgtaatgttattttcgccttttaaaacttttttacatttcctacataaaaggcagcaatgacataattatacataaagtacccttaactgaaaatgagatgaggctgcattcataggcttcagagaatagtaaattgcatagaaattcatcaatttaagttacatggtaccatgacaacttgtatattagcagcttgacagacagcttcgaattttcacagactactacatgaactgttatggcaacggaaacttttacaaatagtagcatgttaaaagacctgtccacctaacagtacactacccaccgctcccatcagagacatgacacggtttgtttacatgatccaaatgaccatctcaatggtgattcgctgttatcactcacatcagctaacactactctgtgtatttatatgtgtgtatacatatttatgaaatgagaatacctggacagtctgattggttaacagcgta

SEQ ID NO: 38535 - DNA, 426 bp, Homo Sapiens
tttttttataattatgaatctttatatttttatgatagttgatagtttacaaagctagtttcacttgatctttacaaaaaaccctatggggtgatatttttattacccacattttattgataaggaattaaatctcacaaaggtttgaagactttcccaaaagtgtcacaggacaactaaaactagttaaccccaaggccctgtatcagaatgatcacctgcctttcccccaccaacccacactcaccaggcacagtgtccaagaggctctgcctctttctcaatgccatctttgggttgcctcatcctacctgcaatgcttaccttcaaagcagatgctgacaatgtgtttggattttggaggcttgattatgagataaaactgaatagtgctggacacatgttgagtttcagttttctgaccct

SEQ ID NO: 38536 - DNA, 454 bp, Homo Sapiens
tctggaattagtcaaccctttattcatgcttgcatatattttcacatattgggttagttatcagtttaaaacagttacgtactttgatgtggaattccaacatttccagagcattcaaaaaagtcagcttggacagaattaaaattgtctttctttggtctcactaaaataggagaaactcatctgactgagaacaaatatttccatccaatacccatttgcagaaaagtcctgggaaaattaacgttaatgccccctgatcctggctgctcttctctcatggaggttgagcccatcctccaccagcttagtctggaggtctccggtcccctagagagggccctggggactttcacctgactctcccttgggtggaaatgactttggttcaagaccatgaagacattcaagaaattcaactcaccaaggtggctctgaattaatagtttcttgg

SEQ ID NO: 38537 - DNA, 536 bp, Homo Sapiens
ttcaaaaagaccatgcccctgaaaggggactggtgttcacatgaataaaagcctcttaagctgatattataaaatataacttgtgatgaaataccttaatggttcataaaagctgacttcagaccaggagagtaatagcgaatattagtgatgtgttttcatgaagagtttcttaccagtttcctatcagaagccaggccttttggctagagtaaatgaagacacgtttacagtgatttacttacagagggtcctgggggaccagtccgtccagcagcaccagggaaaccagtcataccctaagagccaagcacattagaattccacagtcaacatcaactccaagaatttgggtaagatgggaatttctttgttttggaaaatcaggcagcttcatatagggcattatttagccaggaccctgaaggccctccttctccacacatcttccttaccagcatattaccagttgcaatgcccatattttgcgttaaggtttggatggtcctttctgaaatgctgacatattatcttat

SEQ ID NO: 38538 - DNA, 435 bp, Homo Sapiens
ttttcattatttattccatttattttttattcttctaatgggtctttctcccaagtccatattttacatccatccatctaatcatatttattgagtcattattaagcacaaagttctatggatggcacgggaaaacccagtgatcaatgcgatggagtccttcccacaggagcctacaatctcaagcaaagttcagaattaattagtggttaatctttactgacttcataaaacgtatcaagcacagtgcagagcacttgacactcattatcacatttaattttaagctacctatgaggtggacgttcttttacagaagaggaatctgtagctcaataaagctgagtactttatctaggctggatccaaacccaggcagcctgactcccaaaccctgcatgcatgtctacatcacaccccaggcccctcagctct

SEQ ID NO: 38539 - DNA, 362 bp, Homo Sapiens
ttttttcatttcaaataaatttttattgaaagcaaattttaaaactacctggggttgtgttcagcaaggcttgggaatttgaactttttcacatgtgaaagtttaaacctttttcttttccctgttgtgtgcaaaaatctccttttgtttgtcctcctgtggaaatcgttactttcacccatatatggctccaaaaatataaaccaacttagagaggctgttgaaattattcactcttggcctaaagctaattgtggcttttcactcctaacagtatcttatgagaaagttgtaagtgaaattagggtcaaaatgcacatatgaaagccgtgtagcattctcagaaaaaccacacatgggct

SEQ ID NO: 38540 - DNA, 447 bp, Homo Sapiens
taacttaagtaatttatttgtttgcagtgaagcttggtaacaccatataatgaaaatgtacaaagaaccatgttgcaattattgggtagatttaagttaaagacattcattaataaggaatctttgaatatgaatattccaggactatctctaagccatttgatcagaacatctgtctttgactattaccttatttgggaaggtattggcataaatttgaattaagctcagaatttttcaaaataagccctcatttaaaaaaactatattctatattcaaataaaataatatgaataggactttccagaaacaataataaaggaaacaaggtatcttgtaaaatgtggtcctgaacaaatcatggtaaaaaaataaatgtatacttaactcccaactcctcacaaaagaggctactttctgtgcctcagctgtggaaacaaggggca

SEQ ID NO: 38541 - DNA, 522 bp, Homo Sapiens
ttttcctgtagagacagggtctcactctgttgcccaggcaggactcaaactcctgggctcaaaaaatcctcccacctcagcctctcacagtgctggaattatagatgtgagccactgcgctcagccaggacacctcatgctttcaaaaggatgaaactgccaatcaataagaagtggctgcaaaaactgtgatgtctccatgtacagaacagagttactacagcaggcctgagactgctaaccactgagaggcctgcttgcaagactgcctgttggcctgaaacattctatgggtgcctggatgtggggagtgttcccaaaattccctaactgattaggtggctcacactgggcctgaattgtttatacaatgtggtttatgctgaacgcccgagtttcttctgggagtatggcattttggtacatgctgtccagaaggtgcttacaggactagccttcattaactcttggggactgagttcctaatgagcttcccgagtggaccacacttcctgtgtgttg

SEQ ID NO: 38542 - DNA, 449 bp, Homo Sapiens
tttatattttagttgtagctatttagctcactttattgtaaataataattatgctaattagcaacgatagtatgtttaaccaattaatcatcagattaactttcggtcagaataatggacttcaatttttaagtcaaagcaatgtacaggcgtcccagtcaccatatttcacttctgaattccaagagagaaatggcgttgcgccttactgacgcaaatatgtacctagataaagtaagacgctttcatttcaggtatgtctaacccacgctatccttgctttgttccagggcactctcgcagggaaaacgccgcctctgactacacttggggtggttaagacgagatcttcaaatgaaaattctcaacgctaccgtccactctctcatacgcttgaattccgaacaccccaatactggccaaaagactccatttctcatgcttggtct

SEQ ID NO: 38543 - DNA, 465 bp, Homo Sapiens
tcgttttaaatggtttcactttatttgtgaaaaataaagccaaaatgccaacaacttccaagaaggaaccatttcatcatctccatcccctcagataaaacctcaattactggtaattgtacatttccatcaatatcccttttaaagaggtttattctgaggaattactgagaccaggagctttaaaagcttcaatttccctaatcactgagaggcaatcttgaacttctattgaacttggaaagcggtcaagactcactccataataagaagttaaggactgtcactacttaaggtggaaacctattcatttgcagaaatagtcctctttctaccaagaggctaatgagcctcccctccccttcccctctctaaaataaaatcagtttgccttctaaaatcaaataacagttgccaacaaattaggatttatcctaagagtttgtccattcatttcaacaaaca

SEQ ID NO: 38544 - DNA, 417 bp, Homo Sapiens
gatccttctcccacctagcacctccaccagcctctttccggttcagcggcgcggtggcggcttttgctttgctcgtacgttggacagctatgagtcgcgcggcgacgcaggctgcagtgactgtgcgttcaacggctcgacccagagaagccactcatcgacgagcgagagggtgacggcgacgcccgtctccgtaggggccgcggcttccctgctgtgcaggcgcttaagattgcgactgcaacgctggtgcaagaacgtttcccagcgcctctcgtcgacgagggtcttcaaacgcgcaggggacagtcagcggagccgtgccacttacgctgcggtgccaagccgtcactttggcaacgctgatcagcacgagatgcgccgcattcgcctactagacgaggccgtggcaaatca

SEQ ID NO: 38545 - DNA, 433 bp, Homo Sapiens
tctaaaaacaatatacttgttttatctcatagtctttctgtgggccaggcattggtaaacagagtagttccagctcagggtctgtcgtgagattgcagttgagatgacagccaagggtgcagttatctgaaggctcgactggggctggaggctctgaatccaagacaggcctgccaggttgttcttcctgttgacaggaggcccctgtttctcaccacatggatctctccacagaactgcttgaatgtcctcacggcatggcaggtgtcttcctccagaataagtcatctgctgtatggccttggacaggtggcttcacgtctctgggcctcaggtgcctcctgtctcctctagggtggttttgagaatcaaacgagatcctgtacttgcagaggagagaacgcaaatggactgtcgcctcctctgccttcct

SEQ ID NO: 38546 - DNA, 397 bp, Homo Sapiens
aaaggaccaacctttttaaaaccagctgaacaaaacaatttacattacaagggcaacccgggcttgctcacctttgacccaactgggggacccaatggccctacccgcccggtggcccacccttccgggtcccaacaacattgaaaccccctactttcctgacccaaacgggcttttttaaaaatttggctaaaaccttttctttcataaacctcaaaccatcaacctgcccagttaattttggggcctttaaaccaaagttaattcctacccctatgggggaacgggggttacaaaaaaccttggtttacccgggaatgctttcaataaccattcacttcaaccgggcccaaaaaattattaccattattattattatttgggaatttaaacccca

SEQ ID NO: 38547 - DNA, 437 bp, Homo Sapiens
cttattttctacaatgagcagttattattcaggaaagaaatccaatactcagtaatcacatattctaagaaccaggaataatgtttaagaaacattttgcatcatggcagcatcaatgaaaagagggcaaacacagccccagacattgagagctttgagagacagacaccaaaatcacgtgtgtttgtcaactctggggggggtcttaaaaatctgcccccttagtctatcccacaccagctggaagatggcatggaaggcaaccctgctggtgtgcaccagctcttcctatctgcactgaaatcacctctcactcagaaacatcgtatttccctggaaagggctggctgtgtcccctgggatggatgtgtcccctgggatgggtaagtcccctgaagacagggaacattttcagaaaagcaacttcactttaacta

SEQ ID NO: 38548 - DNA, 360 bp, Homo Sapiens
tttgaaactttactgtttaattaatagtacaaaacaggtacaaagactgaggtcttatacaagagttgaggtgtccaagctttagcttaagctgtatctgttattaggattgaatcttcttgagtgggcctgttgaactggtaaagtatacctgctaggactcaacttgaaagagaatttgaggagacacccggcacatgcagatggggaccaagagtggctggaacatgatggcaactctaccatttgtacctacagccttggtgaggcctgggaaaacactaggggcacttatgactcatgaaattcacaaattaattcttgattcatacgatcttttaatcttcacattcttcattc

SEQ ID NO: 38549 - DNA, 372 bp, Homo Sapiens
tttttcaagttgacgcactgactttaatattttaaccctcacatgcaattttaccaaagtgcttataaacttgttgcttgttgcaaataatgtacacacaaggaaggccgttttcaggatggcatggctatccgatgagtcagtatctttttgatctgagagattccaagctccctgagttccttggtggtcccagagatggaggaatgcaggtgtcgttcttcaggtggcagaagtgttgggtcaactgtcctgtgtggctccttgggccggctagggcggcaggccaggatacctggagcgcgcagctcccagcaggacgcaggaaaagcagagcgtctcccagcctgcgactgtcccgattctcacctt

SEQ ID NO: 38550 - DNA, 406 bp, Homo Sapiens
tcctggttcaaagtctacatggtttttctttttgaaaacctacatggtttctttttgtagcctggctctcttgcttgttcctactggatccaggacgagcgcccttcctgggacagaagccccatggctggaaccccctccccactggctggccttcagatttggtcatcatctgctccaatcccccttggctgagctcacaccataactgtgcacagtgtctgggatcctcttttgctttctaagccacacagtgagcaaaagacaacagcagtcccctggtcccagtgccttctgcgagacgtcttcttcctcagccctctatgctatggttctctgctgcccacccaagtttgcagggatgtcaaatacaaagaaacctgctgttacctgggtaaagagatat

SEQ ID NO: 38551 - DNA, 390 bp, Homo Sapiens
acttaaaacatgtacttctttattcaaggatattctcttgactaaacttcccaagaatcattacaaataagtgagtgactctcactggtctggtggcagcaaaatgacttaacaatctaagacctgatggtactgactataaggaccaatacgtcaattacatacagaaatttgatttttttaaacagaacgagacaccagctaggattataactttagcattctatagcagtctgctcacacagccctcctccatgctggctcttgggccacactgttcccacatggagcttgagtctcctccaacacattccatgagcttcaagtgcagagacatggtgtacacttcgggctgttctacagagcactccagaccatacgtggctgaat

SEQ ID NO: 38552 - DNA, 385 bp, Homo Sapiens
atctttacggcatatttatataatactgtttcttacaataacacagctagagaaaagaaaatattgttaataaaatcataagggagatagaatatgttgactcttcattaagtgtaagtggatcatcatcctcatcctcaccatcttcaagttgagtaggaagaggagttggtttgctatctcaggagtgggagagatggaagaggtggaggcggtggaagaggaggcagaagaggcaaggacacttggtttaactttatggaaatacatcataatttcttgtctgacgttattggcttttcatttctctaagaatgtttctctatgataccaatctttcactgtttgctttagtttcagtgtccatatcattgaagggtccatg

SEQ ID NO: 38553 - DNA, 415 bp, Homo Sapiens
tgcaataaatgcccatgtttattacaagatagaaacattaaagatttcttaggcaaaagggcaacaggtatgaaagtattcacagggcgccaaatttacaacagcttgctccaggcgatttacgtgaatcctggcctgtcccagcatgaggccattgacaacctggcgcctctgccaagcctgtgtccaggtgcctggcatgaccaggcgtgatgcccaccaccacagtccctgctgcatctcagaggccggggacctcccacacaaggatctcgttgcgggcggccgtgaagagcagcctggcggacggtgtaaacctgcacaggtgcactgcgttgtcgtggccggcaaagtcttgggcagtccccatggcacagtctaccagcctcagcatgcactcagcaaagccaacagc

SEQ ID NO: 38554 - DNA, 422 bp, Homo Sapiens
ttttacagtggttgccggggatgaagaggggcacactatcagatctgctgattctttgaagagatctgcaagtggcaatggggagaagtccatttttgtccaagtcggctacacagtgatgctggagagcctgggccatgtggcattttggctgccaagaggccaggagagggtgacagtagttaggtctagtcttgggtgtctttcaccatttaacagagaaatggggaggtgtctaattatttttgagggtgcttgtgtgaagtgttcctttcaaaagatagttcttaaagcactgggtcatttaatagggcctaagctatgtaccgaatcgctggatttaacttttaagagccttgcaccttgaatttcactttgagacttccaaaccacagcctatttaatttttcccatctcatgtc

SEQ ID NO: 38555 - DNA, 368 bp, Homo Sapiens
ctgacccactggaagaatggagtacttattgcaccaggttatagccatcattttcctttgtttggttttatctgtgcacatcattcaaccttgagcatctggggggcaagaactattttgcatccatgtataggatgctagtacttacactgacttgattttccactgctttgggcacatggaaagagtacaagtgcctctctccttgttctgctgaacagggtatgagtggcagtgatggggttacctctacgctgaagcatttgatcgctcttgtaggactccctaacattctcttcctcaagtctgtgactaaggggatcatatgttcagatggtgcaggctgggttcttgccccccaaaaatct

SEQ ID NO: 38556 - DNA, 352 bp, Homo Sapiens
tttttttccgagtcaacgatgactggacaagaatcatttattcttcagatcctaagttctggggccattcaatagtgtatcttataagataaaaggtgaggtgtcaacatttggaattattttattcctaaatagcacatgaattattttgtgactacttaaagcagattaatagagttggtttgccgagaggcagggatgagctgttcttggtcaatatcaacactgaaggcagggcaatatttgtaccccctcctgaaaccaagtccttgagctcaaacattccagctttttgctcattactcatcatcctagaactggatttgtaagaatcatctctttaagagtgtgt

SEQ ID NO: 38557 - DNA, 459 bp, Homo Sapiens
taagcaggtcaatttgaagaaaaatattaggtagttattagcacaggagatacgtaacatggtaaaaaccatgaaggacgtgtgcaaatgactaaagtttgggaaacactgttttacactctctgtcatttctcccaccaacagtatcctctctcagccctctcccgagcagtctcattcactgcttttttccttctgacctatacaagctgacagtgcctccgcttcatcttacatcctgacacagggtttggtaactcatttcaggtctttatttcctcaaaaacagactgaaaaaactcctccagggcagactccctatccttaagatctcacccagtccactgtaaggtacctatttcaaagtttcaaacacagcaaaaacttggcaaacaccagttactgcaccaaagcccagtcatcagaagatttcaacttctaccaatttggggtgacatc

SEQ ID NO: 38558 - DNA, 512 bp, Homo Sapiens
ttattttttttccattgcctcagttttaaatatttatttaaaatccagaggggaaaaggagaaacggaacccattgggttttaatacactgacatgtggacagagacgtaaacgaagacagcaggaaaacccaagaatgagacagaggccagtggattctggcagcaggagggatccgagcgctgagatgaggcccgagctgctacaaacacgcacttccagcagactccaggctggggcggcagggcgaggatacagaagtgttgggaggggggacgggccaaagtgaggtattaaataataaaaatcaaatccaattcccaaagagacacaactttaggagagaaatacacaaatagagactttcacatacattttccccttctataaaaataattccatggttaaaataacctcaaaatccaattcaagcgccgacttgttcgctgatgtagcacaattcagaggacgctgaacgtcactatggtgtcgaactccgagattcccattat

SEQ ID NO: 38559 - DNA, 352 bp, Homo Sapiens
gagagagtcttgctttgtctcaaaataataaaaataaaaataacagtagagctgggacagagagatgacaataattctgagggtggcagggaggccctgcccagatggttataagccatcccatacccggtcctctcagcccaggtattactattctcatcttttggaggatgcaggctcagaacggctcagcctcctctttctctgcccagcctcctaatttaattcagttccacccaataaatattccttagaatttattttatgcagcctgctctgggtaaaaagggtcccttgtcctcaaggagctgacggtcaatggaggcaactgacagcccctgctttcgtattt

SEQ ID NO: 38560 - DNA, 464 bp, Homo Sapiens
ccctttattacaaatttgccttagcaattagcaaaaaaaacggttaaccatccttaataaacccccctgggaatttggaaaaccccgataaaagtggccaaattgattacgggacccagaacacaatttcccccccagaacggatagacggacggaggccacggaaccctgccaggggtcaacaggggatccctttggcgggatatgcagaaaggatgggaaaaaacccaatggggaaattccaagtttcaaaaaccaacctttctttaccaaccccgggcaaaaaacatgtcccggggggtccttaaagaacattggggatttatgtacaatttaatactggggttggaacttttcctctattggaggccaaccttatgggggatggtgaaatctgcggccaaaaactttggaaaacccctttctaattggcacagggggcaaagggctatgtgggggaagac

SEQ ID NO: 38561 - DNA, 414 bp, Homo Sapiens
tttcatgatatgatccaacttacatttaatcagttacagaagaaacagacaatgctgaaagaaaaaatcatttaattttccacaattgattaaggataccattgtacaaattcaagaatccaaaaaagtctcaaacaggaaaagaaaaaacctacaaacaaaccacctagtgtgccagtcacgtttctattctcagctgcaagctcatccttgtagtctctactgttctactgtagctgccactctgtaaactacatttcccagattcccttatcagctggcttcctgttagggtctaccaatggaagccactagagggagattagacggcagtagatagcaattgccctagacccagtggttttttgcatgagacaattttatatattaagcccctgagatttagggattatt

SEQ ID NO: 38562 - DNA, 471 bp, Homo Sapiens
tagaaatatacattttttcaggcacagatggaacatttacaaccacatactaggccatagagcaaatctcaaacaaatgccagaggattcatatgtattcattttctacagctgctacaacaaattaccacaaacttagtggttgaaaacaacccaaatgtattatgttacagctctacaggtcagaagtctaaaacaggcctcaccaggctacaatcagtgatggcaggtacagctgcccctggaggctgaagggtcaaatccatctccttgccccttccagcttctagaagccgcccacatactgaggctcatggccttcttcttccaacttcaaagtcagcaacatcttgatccttctcatgcagctgcctctctggcgctgtctcctctgcctctttgccacttacaaggatgcttgtgattacactgggtctacctggaaatggctggtgacagaaaagtcctcag

SEQ ID NO: 38563 - DNA, 442 bp, Homo Sapiens
tccaaaatggctcaacataatttattttttatgttaaaatgtacagagttcttttgaaagtacttgctagaaaggggaaaaaaaggtattacatacaagggtaggtatggaggccggctggccaggagcgcgtgacatggagagatacaaaggcatctaggcaccccttccccttagcttacaagtcaccatgaacaaagtacaaagaggttacaaaacaggaaaagcaaatataaacagacaggatagacgtggcttcctttgtacatgcggcttttagaggcatctggagctctattcacacacgctagagatctctttaaagagaatttatctttcttaaaatagtttttaatattctacaacaaagataaaaaattttaaagatggaatgaaatgaaaaagctcttattttaaaaggcatcaaagtcactaacagtga

SEQ ID NO: 38564 - DNA, 442 bp, Homo Sapiens
tccgtaacaaacatgtcctattcgtcttcacatctagtttgaagttagctgaattagtgagtgatttataatcacagatttcagaaaattagagctaagtgattttagggactgttgtcactatatatctagggggggaaactgaggcctttagaagttgccacgctcttccagtacagagtaccttcccacgctttacagattcccaccatgtaacattcattaaaagcctttatgggtaggaaatgaataaggtacctgctgtgtatatatttacattataaagtttacgtattcattcttactctttttccttcctatgaagacacacactgttcttattcttacaatctcaaagagagagcagcgaaacaatgaaacttcaggattgtgtggcctggaggctactagttgaactgggcatgctcagtcgccaggcaga

SEQ ID NO: 38565 - DNA, 466 bp, Homo Sapiens
tttttcaaacaaaaaactcttacatttactgttttgaaaacctattgggaacatcagtttgacaagaaatatctttaaaattctgaacaagagacttaaaaatgaactttgaacatacgacagtttaaagcacatttatatgcagagaaagacttaaaaatacaatttctgccaagtgaaatattaaacagcatgtttcattatatttgctatagatgccaaaagagttgccattttcaatgaggtatgtttcctgcttatgtaacagtcatttatcatagaagctgtaaaatgcaatctggaatttctcttgccaaattgctgcctgttcttgacattttatattattaaagctataaaatctataaatacttttagcacactttcactaaaagcagcactagtaagtagcaggccttgtcttgtatttcagtagccacgtcaaaacttctgagccaggcgaaat

SEQ ID NO: 38566 - DNA, 352 bp, Homo Sapiens
tttgccatttaataagtactttattgatattatatcacacagcactttacagtatactcaaagatagcctaaattatgaattaaacatgcaaatattttcttttccaaaatgtggacaaaatgtcttttagagtgcttttgaacactagccttagctactaagcattcatggttttgatctttcttgcgacatgactttaagtaagttaacaaaaaatgtagctgtagacagtaattgtttgataaatatgaacagttttaaaatggcactgaatttacatctttaatcattttaataggccatccacagcctctcttgtgtctctaattctcaacctccgagtcttaaagg

SEQ ID NO: 38567 - DNA, 355 bp, Homo Sapiens
ttagtaagcactgatgtgtttattcgatgaaataggggtgggggtgtagcagccctagtcccacattgcatgggctggtgactgagttaacagcaaagtgggatgcaaaaggttcctgattggagacccccggattcgggttctggatttgctgccacttactctatgacttggggcatgtcactgtcatggcctcagtttccccttctgcacagtgtgcttattggatagttccagctctgacatgctaggattatgtgatactgtcaatcaagactagggttggcctaagcacatggtgctgaaaacacctcgggctcatggacatattttctccgcatggggagtgggcagc

SEQ ID NO: 38568 - DNA, 381 bp, Homo Sapiens
taacccagcggaggttctcttggaatttttccccttcttccaaaaatacatgtgcgtgcgtgtgtgtttgcaaaaggccttgacggtgaaggtcgggattgtccccgggaagggaagggaagggcgaaacctgaggcggggagggagacagaaatatctttctttcttcctgtgcccaggcctcctcggggtcgccaccgctgctaagggtcccccatcctgcgcccccccgggaactgggggtgcaggacaggatgggggggtcctcctccgaccacccccacacccccaaccccgggatgaatgaatgggctttttggaaattggggtcagcagggaggggtgggcgcctcctccaggggtccctccccggagctggtc

SEQ ID NO: 38569 - DNA, 383 bp, Homo Sapiens
cgacaaatacaaattgagtacccactatgtgtcaggccaatgtttaagtggttggggataaaaagatcaaattcctggtcttgtggagcttgtattctgaatacaaataaataaatagactatataatttttcagatggcaataattctttggagaaaaataaagcagagaccaggatgagagtgttgcagttttaatgaagtctgctagggaaggcctcgcgaagaaagtgacatttgacaaaaacctgaaacggtgggggagtaatccataaagatatccatgggaaaggctttccatgcagagaaaacctagtgccaagccatgaggtaggaagactgctggtttgttccaaaacgatggagtgccgttgagatgagaaa

SEQ ID NO: 38570 - DNA, 366 bp, Homo Sapiens
agagtgagccactgtacctggcctcatttttctattttgataaacacttttaaggcttaacatgagctaagtattattttagaacagattgtctcaaccttggcactatagacattttgtccagaaaattttttgttagaggctgtcctgtgaatgcattttatccctgacctctacccactagataccagtaacacccctaccctgagttgtgacaagcaaaaatatttccagaaattgccagatgttccctgtgtggcggtatgggtttgagaaccacttttctagataataggcatttgtagataatgaatactgaggcaagtggaggagtaatggttgaaatagacatgtggttaagtacag

SEQ ID NO: 38571 - DNA, 403 bp, Homo Sapiens
atgattaatcaggctgtacaaatcaagaaaccaaggcacagagaggtcacattattcactctaggtcacacagcccatgagggatggagctgagatttgcaggcaggcaagaggagggtagtgggcaggaagcagatccctgaaggcccagatgctctgacaaggctctgcagccacctacacacccagggacgtggacacactgcagtgtgcccaggaaatgctggccaggtcagggaggcagccactcagcagccccgccactgacccttggtctcttcagggctgctcccagggatgatgttctgagagttgtaagaggccgaccagacaatcctcgatctccagcaggatccctgagctggccaggtggccagcgtgggctgcacctcccacaggcatt

SEQ ID NO: 38572 - DNA, 363 bp, Homo Sapiens
aacatttattgagaactttattcagaatagagcactgttctatgtattttacatgtcttaactcatttgaccctcataataattcataacaggtattatttttaatcctattttacagatggggaaactgccatacagagaggttaagaaatctgtacaaaatcacacagctattaagtggcagagctggtttttgaacccaggcatccaggcaccagactttttgctctaaaccactacagtatatctgcttccatgacttactgagctcctatgcatcagatactatgtcagccactttacccacattatgtcaatataacagcagatgctgttgccaaaactttactgggaagagtgtta

SEQ ID NO: 38573 - DNA, 432 bp, Homo Sapiens
gactttttaaccatagccatcctgactcgtgtgagatggtatctcactgtggttttaatttgcatttctctgatattagtgatgtggaacattttttatggttctaatccatctctctgattcattccacctttccaattgaaaaagaacccagtgacaacttagaagaaaaaaataaacaatttgcagtttgagcttatactattaatgctaatactcatcaaccaaatatccaaataatgtttaacctaatgaccctcaataaatggccaaataaatctcaacaaattacatcaaaaatgataaagctaaagtgacattcatttataatttaaacccaaaaaatgcaacaattaaaaaccaaaaatcaactacttgttcatgttcatagaagtagcttgctagtactgccaagcattgcattaaatatgg

SEQ ID NO: 38574 - DNA, 363 bp, Homo Sapiens
ctattttcaagtaaatttgtattcactggctgcagtttaaagggaaaaaacaacaaatttcaaagtcatggatttacaggaaggacttgacacactgactctagggcaggttaggtatatttcacaaggaggtccaggctgtggtagagatttggtggtcagtcctgaccagaccttagagggtacttgtgagacaccacaaaaatcagggggaatggaagcctcttaaaataattatttgaagaaaagcccataattccccatacttccacagaagctaaaggcacatagaatattctgttctacataaaaaacattcgttttatgtttccacatgaccttaaaaggacatacagaacaagg

SEQ ID NO: 38575 - DNA, 389 bp, Homo Sapiens
ttttttgaaagtttaaatattaaaacaataaatctttattaaacagttttcacggcattttaaaataaatttaaaaaataaatatttgcattatagcagaaagtcacatgtattgcatcaactcacttttacaatttaatggcatgagacaactaagcatcagcaccataaaactgttaagatttgtttcttaaattcaaggaaatagctctaaagcactgcagcatcaataattttgaaagctataacccagtgattggtgctcatagtagccaatgtttctttttattactggcaactgtggagacagagttcttccagtactaaatattaataagttctctgatcgacaatcccccatctatcagtgtgtcaggattcacaaagaa

SEQ ID NO: 38576 - DNA, 361 bp, Homo Sapiens
tactactactaaattgcggccggtcgacgaaaatactgccaccagctgacttgttttaatcccatagctatatttctgctctaatctccagttttaaaaatgatctgctaattacatttctctacacaccaactgaaaattaccaactgaacattttccttgttgacagtttcccacaagatgaatttgatttatcaaaaatacagctttctgaacttagtattattgacatttacttggtgcagttaacttttttgttaaaggtctgttgtcaagcatttaagtaatttgtagttgtaaaaagccactggtggaaagtaataaggcagtattttgagtgcccttctcaataagtacatac

SEQ ID NO: 38577 - DNA, 403 bp, Homo Sapiens
gtcttaagaccactcaggaatttagagaaacatttattcagaaaaatcaactgagcctttctgagaacagtgagagtctgtaacatttgacacacaaactgctaccctccccacccccattttggtccactctgagagaaactccactgtgggctgtgaaaatcacaagatggaaccctgtccctctccagttctcagtctatggtgacagcttttccctgagagaggcacgatgccactattcttaacttctctccccctgccagtcctgtgttcctgaagctggtttcatgtaagtatagttgagaagtgtgtttgggtgtggacctccttgaatttattcttggagtttgttgagtgtgctggccttgtagattcatgtctgtcttcaaattttgaagtt

SEQ ID NO: 38578 - DNA, 364 bp, Homo Sapiens
ctttcactcattggtttattcccgcactccttccctcactcattcattcattgactcttgcaggtagtgcacaccaagggtgtgaaggggtgaggtgtctggttctctgctcagacctctgcaagtgcccgcagaggtgttctctgctcagacctctgcaagtgcccgcagaggtgactgggcggcctccacttctggcctggccttgcacccctgtgctcttgggggccatggctgggcagggcaggtgtccccctctgcacaggcccagtgtgtctcagcctcagagctggcagggcagggcaggcatcccctctgcactggcccagtgtctctcagcctcagaaccagatgtgagaagacg

SEQ ID NO: 38579 - DNA, 398 bp, Homo Sapiens
gccccccgccaccaccccacgccaggccttcagtcttccgaggatgaggggatctcagagctccggacagggaatcggtggtggctgggcgtggccgggcccgggccccagccgacttgagggtggaacccggcggcggaggctctaaagcctgaccgaggcggggccgcgcatcccgctgccccttgaccggaagcgggacccagcctcggccaggaagagatgatgggcgaggggtgggcggcggcctgcagcctagtgttttggggccttggtgcgcgatggcaaccctgccaacgtttcccgggagctcagtttgtggcaggctctgcatagcactttatgtatcttgtatttcctccgcctcctcccagctctgtgaggtagatacaatcttt

SEQ ID NO: 38580 - DNA, 416 bp, Homo Sapiens
ccagcatttaaattacatatatataaacataaaatttaaattacatctgcacaaacatgccctgacatttaaattatatatatgcacacacacacatatatctgtaaaccaccagataaaaataaaaatgattgcttctgtttcaataaaactttttttctgcctgttaaattagaacgggtggcaggtgaggtaattttatttgaactatgtctgcagccatttaagcctagttagaactctgtcataataaggtaactgattttgatctccatctcttaagaaggagggagctcagcccactagaagaaatgttgaaaacaagactctgcttgatagaattttgggaacctctccattgagaagtgtcaacaatgatgctgtttatcagattctagaaagtgagcaaccaaaga

SEQ ID NO: 38581 - DNA, 407 bp, Homo Sapiens
ttttttactaaagactaaggaattttactggataaatgacatacaaataaaaaaattataaatactgagcttaggtaaggaacccagttgaatacacttatcttggtgagttgggcttccaaaagttcaaaggaatttccactacttggccggtgtctaagtccagttctaggtccttggggcactcttttcatgatggctgcacatccagctccaaataaaaactgtgttctacgaaatactcaactgaaccacagaccaactgcttctatgaaatcctttaatacattcttcttaggcccttttaacttgagtgaagtccaaaaactgttacttttgctgttttggcttgatgtattcaatctcactgttttctatactctttaggccagtaatccccaactttt

SEQ ID NO: 38582 - DNA, 358 bp, Homo Sapiens
aatttccaatagtatcttttattttttctctggggaaaacaaaagccaagttctgtgtttaacagatgctttctgcaataatacaatctagtggagtattacagaagagcatgggactaaggacaggctatctggattctggccccagctctgacttgcagcataatacctgggcaaaccccctctgttctccactctgtgtaacggggtgattaggactagattcactgcttatctgggaaaggcaggatctgtgcacaagaaatcgtacccaagtgagccgctgttactgccggcatgtgtcgcatccctctggtatgcttgggttgggagaagatctctgtggtccagacttctc

SEQ ID NO: 38583 - DNA, 489 bp, Homo Sapiens
tgactgaactactataaatccacaagcaacggttcatacactatgcttctgaagtgcttcaccctccccgccagcgcaagtgctatcaagccgagggtcgacttccacatctctgctcaggcatcacgctacagatagtgccgttactgctgaccacccgctatcggacactaggcatcccaagcgggtttgcaacagcactcactggtgaacctgtcagaagtccaaagggtgaagtggttggcactgtacaaatgcctcacatcacactggcccttatgacgtgcgtactgtccctggcatgctagatgaaccagtcgagcctggtccttcaccccactgtagaaatcatgttgctccagtgcctctcttgcattatcccgtgactggtagtcagatcgactcagtttctccaagatatctacgcctccggctgacacagttctgctttcgcttttgacaaacgttccatcgctttcagagtctctg

SEQ ID NO: 38584 - DNA, 397 bp, Homo Sapiens
aaggtttttggaagtaactttatgtgtaactagagtaatagtagcttacatttaagtgctaggagcaggactttgcttaccttaggttcagttttcttaatagctctgaggtggatatttttattcatcattttcagatgagatgaggaaatcgagcttggggagagttagcctatcttgccctgcacacagacagggtggcagaccatgccatagatctggtctgccacaggcccggtagttcctgcctgtcacccctccagttgtattttattgtttattaactcctgccagctaccctagcagggaagaggaaaaaactaaaagtgcaaagagctccgtagttttgttcaaatggaggaagctggcattggaagctggcattggcagcagctgc

SEQ ID NO: 38585 - DNA, 418 bp, Homo Sapiens
gttctaggaattgtttatatgtctctgatgagacaagttctcaggacatagacctggggtagaatcacatccgtgatgggaatgtgggatcagttttgggcacagccttggcacgccatccttcatcctatgagtggactgtgtcatagttaaaaaataaatatctaaaactgatacagtatcatttctcaaatagaccaaggaaaatggaaaacaaaataattcagcttttcagaatatctgaaaagatgacattgatattgaacagggacctggttatggaccacaggaggccagtcattggcattgagtccatgatccaaggtcagtggctctaagtggtaaagccaaggaacgggaacccacgtaacgtgtccttcagtctgtccttatcaagacaggacaatggctggtattt

SEQ ID NO: 38586 - DNA, 407 bp, Homo Sapiens
tttttgagacggagtctcgctgtcaaacaaacaaacaaataaataaatatgcatgcatgcatgcttgaagactagatccctgaaccaggaaagccagttattgggaagaaaggcctggatgctagtactttcactaagcaaacaatatcctctaactgaaaaagcacaaagctttgagcagaaattcaagggtaaagtcagtcttcagaaagcatcaaaatttgtaaatatggagactgatccctgtgggaatcagaaaccttctggctgagagggacacggagacacatcctgtgaaggatcagacagtggtgatagtggccactgtatcatggcattaaattgtaagctatcatgcttccagaataatgtttctaaaagaattgctttgtgaccaggacagacca

SEQ ID NO: 38587 - DNA, 403 bp, Homo Sapiens
ttgcataaacagtcaccaccaataatctgctagggacagagatcaagtagaaaacaaaacaaaaattcctggtgtgtggctttgattctgccattggcacctctgaaaactggcccaagtctcaacattccagctggatggtgcttacaagagaggcggcagtgttctcaaaacttgaaaatatagtctactagcagctcagctgtttagtatctctgagcaaggggacaaccaaagtctaacagcagagacctgccagaaaccctgggctaatgggtgaagctatctctgaggcctgcgtgcctgttcacgcttttccccagactcctgctcaattcctaagattctggtttttccaccagactcagctacttttccttggtatttctgtcaagtggatttg

SEQ ID NO: 38588 - DNA, 447 bp, Homo Sapiens
atataaaataaaatttattttaaaaaagaaaagtttgtcttcaatccagaaagaaccactattaccattttttggtgttccattccaaaatatcccacaaatatacaattgttcaatcaaatttaacattagactttatacttgaacattcaaagtacgtaagaaattatagaaaagtgtctgtgtgactccctgtctgtagggcacaggcttcatctccactaacacacacacgaccagtaccttatacagagagtccttgtttgtctttagtctgacaccatgggcgagcccgaggtggcccgtggtccacattcctgaccaggtgtctttctcacccactggtttcaacaaagatgttactgggttatagaaggctgggatggaaacaggataccaagttcgcatgaagacaatatcttaataaatgaagtgttcttggaaatt

SEQ ID NO: 38589 - DNA, 396 bp, Homo Sapiens
aaacatcactaatgtgtgttataaaataattcaacaaatacgttagaatatatatcctcaaagagctgatggtacaatctgggctcagactactgaacactgctggacggggggaagaaattcacatactaggctaaatggtgccactctaaatccatggaacatccttccctggtcaacattcttccccattcttgtgactattcaaacccctatttcctctcttcaaatctctgataccctacttcttcctactgcattctcaccagatgactctgcctcctagagagtcatcaaaagggagctcacttgagtttccaagtccacaaacccacctctacttatatctccgaatataaggaaagaaggcagttgcttctctatctaaggctaaac

SEQ ID NO: 38590 - DNA, 432 bp, Homo Sapiens
ggtttaaacaaagaagtttattttctcacagttctggaggttagaagtctgagatgaggatatcaccagcatggttaggttctggtgaggactctctggcttacagctggctgctttctcaccatgtcttcacatagcccaaagagacagaacaagctctctggtgtcttttcttgtaaggacaataatcccatcacgaagtccccaacctcttcacctcattcaaacacacttaccttccaaaaggcccatctcccaataccaccacgttggaggttagggcttcaacatacgagttttaaggtggcacagtcagtctattaacttcctgtccatatattagttatgtattaggcattatgtattacctaatacatagctaatctgtattagtcagggttttccagagaaacaaacacatacacacatcct

SEQ ID NO: 38591 - DNA, 512 bp, Homo Sapiens
agttcaggaagttagggcagggtccctttattaaaaataaacatcctcctgcttgcttccttttcactcttttctcacaaatctgttcccaaaagcccttggaatccgggactccaacatgcaatgattgccccagatctctgtactacacctgaccactttctgaaatatttgaagccgaggatacaggaagttcttaaaggtaacaatacaggttgtatgtgacacaaaattaatgatctgataactaccctgataggatcttttggcttcctataacgaaagttggcacaattatcctagcgaatgagacacatttttagtctgaatcttgcattccttgtttttttggcactcactgcctttctaattaaagatggtggcctataacacttcctgtcccgtcgaaacaggaaaagttcccttgtccccctcgcagggtgtgcgatgcagatgtggctcgcttcttcattgtcccgctgctcagacctctaggggagcatgcagatggg

SEQ ID NO: 38592 - DNA, 417 bp, Homo Sapiens
gagtgaggaacaaatttaatgtgatactcagtatcacagtatcactgtcatttctggactatgatattctgaattgtttgagggcatccactgcataggtggccattagcttggtgttaagcattcttagagctctggtgatgggcttatcttggccaaaatgtatgttaaggaagtactcatatgtgccaataggaccttagtgtgcaaggcagatagagtagtaagcgggattacctgacgtgtaataggctaaagggctcttcgcctagatagcttgctggatgatcgtcgcagcaccggaaagaagtccttcggggctaacgagttgagcaatagggggaaatctcgctgtgctaacatgtagtcctgggcgtagtcctccagtatcactgcggggagatgggccagaatgtc

SEQ ID NO: 38593 - DNA, 481 bp, Homo Sapiens
acttttctcagtgtcattcctagttctgatattttacttcagttcttttgatcacatcccatcatctccctgaaatatctctatgacaatttcttaagtgaagaatgcaaaatctactctttctcaccacgtgggacatgagtctccaaaatctacttcttccctggccagatccttatgagctatatggttcttcttcctctaaatattaatgtaaaaagatgcttactttggcaaatttgtatctctgtaatatactaagtacaaggaaggcatcaactacacattaattatgattgacacctcgtaaaatggtctgatcctctcaaaatgatcacaggggaaatgggatgtctgcaggcagtgagggacgtacctctcaactctgcctacagttgttgctgattagatcaaagctgggtcaattagagttcctgtccagggaatttggaattgggatgggaagcggcagaaccttctc

SEQ ID NO: 38594 - DNA, 461 bp, Homo Sapiens
agcttaaagacttggtgtgtttttattattcaaaggtttgagagtttcaagagtgtagaaatggatgactgtgatctgagaagcaggaaatccacaaggaacgcagagcaagcccggcacgatgcccccgtgcagcgcaggctgtcgaagacgggcgggttgtgcagaaggaggaggaagagccgggctaaggctgaatcagacaggcagcggctcaccgctgtgagaccgtgacggacatgcgtaggccgcactgggtacagcttttatacaaatcaaagttggttctcggttccataaagacacgcagaggctgcagactgcaggcagtttagacgcccgttccagaccacagcagtcccaggtggggcccgtctctgcctgtcctcatctcccacagccaccgccccctccacccttcctgaagcagccacatgccaagacggggccacgaggtcatg

SEQ ID NO: 38595 - DNA, 496 bp, Homo Sapiens
ttaagggttgaaaaggtaagtcctatattagatacatagtggctggtagtcttatcctctctataaatacacactttttgtcactgccccttccctgccatgcagagtccccatggctgaatctccctatgtctccaagtgtgcgtcacttgctgtcctctgtgctgtgtcccatgtgctgtgcccacagtcttatacagccagtgacttcagagccaggacacagctcagcagtctgtcatgaggctccatgtcttcccattttcctgcggcctgatccaggggaggctttggtgttgattagcatcttgatttagcctgattcaggacagacacctgggcaccttctccatatgccctggttccaccttaggtggcttcagggtggggtcagtcagtcactgggggtgctgggagcagagatgggggcagagtctgagctgctcctccatcacccaaggggcttcctcttctcatttaaggaaaaagtgtgagc

SEQ ID NO: 38596 - DNA, 411 bp, Homo Sapiens
atcatatagtctagtctttattgaaagacttacttcaactgttgtttacagctttggcttaagttggccattttagcctctcactgccagcagacataaaaatcaagtgggaatggcacgggggttgggagtgaaaatactagtagagaaattatgagaacaaagaatatggcagtcagtcagaaacacatcaccaaaataaatctcaaaataattatgaaataaaaaacatttccttgcatgcccaaaaagtctctgctgatgtttttgatgaacggggtggggagcaacgattcttaggcttaagttggatcaagatagcattgggtcatgttataaaatcatctgttagctcaacagccatacttttaattaattcatttattttttgagatggagtctcgccccgtc

SEQ ID NO: 38597 - DNA, 451 bp, Homo Sapiens
ccttagtatgggtcaaactttgtttctctacatgtcttttaatttttgttgtgatactaaacatttaaaacaatgtgcttttggcaactctggattctgacttttcccccactaaggttggtggtgatgatgagttgttttttgttttgtttactaactttcctgcactaaaccaccaagtctgtctcctctgcaatgtgtagttcctgatggctccggtttttccccccacctttttattttgaagcctgacttgcaggagatacccctctaactgtatagcttcctactccattaaagattagtcagagatggtaatcaacccacctgagctctttcactacctgctgctgcaactatggtcaggataaggggagcacactcacacttcaggccttcacgtctgttccagttactttttgcttggctttcccacacatctttgcattgg

SEQ ID NO: 38598 - DNA, 436 bp, Homo Sapiens
ccattatttaagatttctttatttaaattcacggctcataggccaaatcagctttatctaaattgagttcatggacatgttttattttgcccagacagggttttgtttaaagggaatcagtggacatttggaaaactaggaaatttgaccttcaaagttaaaagagctggcactatgtgtggagatcataatgctattctctgatacaaagaatgtttttctttttgtcttttgatccctaaaattattcttcacaaaaagacaacagccaacagctatctggttcatttttatttttaagttccccaaatgtaaacatgtccagtagttcatgagatgaatagaagagcacccacctgatttctcatagctatgggatggaaagaagaaggaggaagcagcagatggaggaagtcagagatggagattgagagtc

SEQ ID NO: 38599 - DNA, 425 bp, Homo Sapiens
tgttcggtttcacaactttattaaaaataaatttataagtaaacaaatcgtaactttatagattaaagttgattgggattaaggagaacctgggtataagaggatctggtacagagaggtctcaggatcttttcctgagtgggagtacatacgaggtagggaagagaaaacaacaaaccagaacaaagttgctgctcccaggtcctctttcatcctccaccttcccacacagcattctgacagcccctgagctctcctcaactgcactacaaaagggcaggccacccccagcacagtcaagtcctgagctccctctgcttgtagccaggcaccatgttagtgatttccacctcagggctttccttttaaaatccacaccccacatgcctttgcagtcagctctctcacctctcttgtcacttctc

SEQ ID NO: 38600 - DNA, 436 bp, Homo Sapiens
taagttggatagtttgctttttaggtgacatcaaaatgtcctcatgaccatatcaaaatggctgtaccaaaacctcatcgttcaaacttgctggtgacttcacaccactcacatagactcacggtgtcttggtttcctcaactagggaatgacatcacaaaaccaaccctgcctacctcctcgttggtatcaagggagaatgagacgaaggtgtgaaagcccagggcaagtgggtttactaaatggaagcctgtgtgaccccattttttatcacctaaagccacagaggtctagcggcactaggagataagcagaaagagttgctttcctgactcctggctcagtgttctttctgctactttagcacatccaggggcgggacaaggatggagagagaattccagatctggctctgggaagacctatgtccaggcac

SEQ ID NO: 38601 - DNA, 475 bp, Homo Sapiens
ccaatctttttttattgtgataaaatacatataatgtaaaatttactatcttaaccattttaaagtatatggtttagtggcactaagtacattcacattgttgtgcaaccatcaccaccatccatctcctgagccttttccttttacaaaactggaactctgtacccattaagcaataattctctatttcccttttcccagcaaccatcattctactgtctctttgattttgactactctaagcatttcagatgagtagaatcatacttgtctttttgtgactggctgatttcacttagcataatatagatgtcctgaaggttcatctgtgttgtagcatatgttagaacatcctttttaaggctgaatattattccaccgtgtatattgtgtgtactccattttgcttatccattcatctgttgataggcactcaggttgattccatgttttagctattgtgaataatgctatg

SEQ ID NO: 38602 - DNA, 380 bp, Homo Sapiens
gcctacaattccttatcagattttgtgaaacacattgattaaactgtgtattgctaataatagtaacagttcaatccagaagaaaatttgcttcttaggaccctaatgatacagtctgatcagtaaaaaactttgaaggatagagcatattcaattatgatagaatcctgtggtagaagtgaaataaaaatattttcagggagaaaaataatcaatgcaaaattttcaactggtcaaaggcttaagtatttttgaaatgaatgatggggtggatattaagtcactataatatttataactcactgcatacatttaaaaattttctgtaatcactttattttcaaaacatcattcataactcatcagaacttcataactac

SEQ ID NO: 38603 - DNA, 395 bp, Homo Sapiens
cttgtatcaaaactttatttattaaacaaaaaatgcaccattggaataacatttctataaaaaaatgaatatgagactgttctacagtgtttacaaaacccccttttccttgtgtagtagtatacaagatcatgtgtagaaacagtcattgttttaaactgtaagcaagtttcctttcttgtagaacaagatttacacttaaatattgcaatcactagtctaatttggttaacaatgctagaatctgacagtttaaagaaactttttgtaggctcaaaatacctttttgttaaaaaaggtgttttgtaacaacaaaaaatttcttttctcactaaggctagttaaagctgtagtatacccatttctaccaaataaacttatcactagcacactaa

SEQ ID NO: 38604 - DNA, 408 bp, Homo Sapiens
ctttttttccgttttgccttcaacaaaaaaggaatttattggctcacataagtgaaagctgagaaatagatctcaattcaggtccaatttgatccagaagttcccaagggctccaatagactccctctcaccctggtactgcctcaggtggttcctttatattagaaaaacgagctgcagcaagttcggaatgtgactcctcccagcacactatctccaacaagatgtcttcaattgctcctgaaaaagcctaggcaaacatctttatctcagtagtctggtctgggtcaggtgcctacccctgaaccattgctactggggaagtggggcactgctaaaaggtaactgggttaatctagaaagccgagggtgtgacaatgccacccaaaccacatgcacaattgtttg

SEQ ID NO: 38605 - DNA, 430 bp, Homo Sapiens
tcctcatcaggtgagcagctgttctgagaggcaagaagcctataatctccttgaattggaaggagccttggagacatgtccaagctgccctctcagctgaccatctaacacaggctgggtttactgaatgcccatgatttgcatggcattgtgcaagagcttgggaggaagtgattcaaccaggaattaaatctattccctgacctcaagaacataacaggctagtgaaggaaacagacacgtacccaattatagctcaagacagaacaacacatgttgaattaaaatgctaagtgggtaacattctagaactgtgctgtccggtacagtggctgttatgtgtggctatttaaatttaaattaattaaaatgaaagaaaattcaaaattcagttcttcagctacactagccgcatttcaagcattcaata

SEQ ID NO: 38606 - DNA, 367 bp, Homo Sapiens
tcttggtaatgagcatttttattaaattccccaagtacaagccccggtgtacacaataagcaatttcagttttgagtaactgccagggaaggaatgtccccctttctgtttgttgactgccttctgatttgtttgaaagcttttttcttcttgcattatcttgaccattcctggtatgaaggatgttgtcttgtttctcctcagtttcatcttctgcagaagaagaaaccatgccaggcggcagtctcttactgttcatggcttccatggctttactctgttccctttttctctcacaagtcatcagctcagatctaaaaatactctaagggtaaatccactggtgaataaaatggttccaatgtgc

SEQ ID NO: 38607 - DNA, 507 bp, Homo Sapiens
gtatttttagtagagatagagtttcaccatgttagccaggatggtctcgatctcctcaccttgtgatcctcccgcctcagcatcctgagtgcaggcactacaggcacgtgagcaagagaagctgacagattcaaatgttcacaaacatttatgttctattttgatagatacataaactatgtttctcattcttatatactttatattagggcatgggattaaagtcaaaatagtggaaaattagtagaaataacatattttatatccaatttagtctccaaaatcccaacatgcactcttctgtatacgtttttcagtatgcttgactggaacggccaattctacagtagtcttggaagcaacatactgcagattaaataccttagtagcctatgttcttgaatgcggacataaaggagcaatgcttttcctatcttaaaaaaacagtttatatgaatgaaacttctgttctgtttaagatattatatgttgttgagtgtagttgtc

SEQ ID NO: 38608 - DNA, 387 bp, Homo Sapiens
cctttatggacttgctttcactttatggactcgccctgaattctttcttgcatgagatccaagaaccctctcttggggtctggattgggatccctttccagtaacagcaccttcattaaaatattcctgatgtgagcacatccgttctttgccaggcagagtgggaggccctggggatagaatggagacaggcagggataaacagacattcaattgcaacctgtcttgaggtgtgggtgccatgaggttatttgaaagggggatatttctagtctaggggatggatgcaggctgctctgagaaggtgatgctgggctgagagacctgaaggaggaaaaaggtgacagagagaggcagaagaagaggtgtgagcgagagagagcccag

SEQ ID NO: 38609 - DNA, 446 bp, Homo Sapiens
tactaaatattgactttattctccaaaatttttaacccaatcttattattcaaagaaagtcattttttaaacttaggtatttttccttttttaaaaaaattaagtttacacatctatgctgtaacctcccctccccgcccacacgtgtacttcacactgtgcaccacccaggctctcaacttgaaggaagtgacccaggacccccaatcagaattgtggccatgtggaaacaaccactctgcagctagaaggctcttacggctctggtggagggatgtccacagtgcagatgtcctcagctcacgactgtgacagcgacttctcggcaagagtgccccccacccccaacccacttgagacaggtgtgttttgtagaagagactgggccatgcacagcacacacccggtcttccagccaaaagcaaatgagtgctggtggagggggc

SEQ ID NO: 38610 - DNA, 454 bp, Homo Sapiens
taagcagcgatcgtactttccttcctgagccttgagagcctcacccagattctcaacccttcctcccgccctgaaggtcacacagcaagtcatgggactccccaaaagcgagggcgggaaggaaagttggagatctcccagccaagtctccctgctctgcaaggggctgtcccaaggcccccagcaagtcaggcaaagcaatgccctgccctgggccgttcagggccctgcagttccacactcactcacttctaggagggtggggagaaaggcaagggtgagggcagggagctgggggcacagaccctatgcccactcagacactcccctgaaggagagttccagggatgtgggtaaatagggggcagttgttttgagttggcacagtcagagatggctctcaggagggaagcagaggttctgaattctgaactaaatataagagcgcaactat

SEQ ID NO: 38611 - DNA, 376 bp, Homo Sapiens
cctagctgttttcacttcctagctatttccactatgggtgcaatggagatggtgacaggagtgtgggccagagagagggggaagccagtgtgagacggacctctcccagctatacatctgggaaggggagtctataaacagctggggttttgtttttgtttcatttttatgataatttgtttgtattagtgtttaattccataactaacacatagatggactttcctcacaacaaaggacgtcaaaggtcagtgctcgctcggcctgatcccctctcactccttaaggggtggacgggcgccgtatcctggggggggttattctacctatttacacacaagttggaaacttgcagaactgtgaaaacttcgaaaat

SEQ ID NO: 38612 - DNA, 403 bp, Homo Sapiens
gtgtatactatatataattattgtcatttctgatatatgtgtgtatgtatgtatgacagatttacaaataggcattcatactctcacagactttgagcagactattgcaatgtcaatcaattaaacccttccaaaaggcaattttgtactccttttaagcccctcccagataattatcaaagaatttaaattagcaccaggaaattaatgatttttcacaagttatgtcctttaaccctcagacagcattatagcattttaaccataacaatgacaaatcaaagaagtaaatctttaaaaatgaaatttcacaccttgtgccaggctacagcagaagatacttttgatggtggggagttagctggcaccgcttctgtcactgcaatcagtgctgtctcctcta

SEQ ID NO: 38613 - DNA, 412 bp, Homo Sapiens
acttaagcttgaaacagattctcaaacttcttcaaaatagttcaactatgtggatatttatttaaacaagaaaatgaatttctctcagtccaaattcaaatatcacgaagtctactaccaagagtaattaacaatttgcccagccaaacttggaactaactggcttgggtcaggtgaatatcagatttagcttttgtgtttaaacccctaacttcttcaccagaaaggtgaagaaggttctgatggtgatgctctttggcatatggactgcaacattctaaaccatacccaaccatcaattcctcccatgctggtctctgaatctaagtggcgatgacagccattagatagacactgctaaaaatgaagtgctgacgagagagaggatttataccccattaccaatcccctg

SEQ ID NO: 38614 - DNA, 415 bp, Homo Sapiens
ttgaatgtaaaggaaaactgcaacttctttaacaatacattattcaaattcaaagatcatagcacattttgagattcagattggtaatgtatctttgattacactttgcaaatgtatttgacaattaaccatatcccactactttttattactgaggtaggaggcaggactagactctggaggtggggattgggctccagaccacactgaagacaagctgaaagggaagaggtgaaagagtctctccataaaacacactcaccagtgccacgtcaggttaccattgctaaggcaacagctggaagttttggctcctttccatagcaacaatcccacgacctggaagttacgaccttttttctagaaattttggcataatccacccctaaatttgcatatagttgaaagtgggtat

SEQ ID NO: 38615 - DNA, 351 bp, Homo Sapiens
tgttgtagtatttatattatacttaacaattgaaacaatcttaattttcaacaataggagaatgactaaataaaatacagtgttgtcacttgatggagatattgtcaactaaaataataatgagttctcagacatggaaaacattttatataattgtagcaagtacgaatcttagagtacatactcagttgcagcaaaaacgtaactttctttgattttctatagtaacatttacattccttttcaagccccgttttgactagtggtccaccccggtgtgtgtcctgttatgctgattcagggtaatctcaggcaattcaaagtcctgttgccacgccctattcccaactg

SEQ ID NO: 38616 - DNA, 423 bp, Homo Sapiens
tgcggccgcccaggctcgtggaatgccaagcgcctgtctctgctcggggctgacatcacctccgcgtgggaacagagcctgtgctcatgccgagctcatcgggattggcagaaatctgcatccttgtttggtttcaaaacagggggcccagaaggaagactcatgaaagatgcccttgtcggcggaaatttcaggagcttggcccacagcccctgtctgcacttcggctgtgaagaggccagaaccacgcccgctgcccaagagctaggctctgatgaggctgcaggtagcatcgacccggtacctgcttccaccagggcccaggctgagccctcatggcacaagggtgccataggcgtgtggtggatgggtggacatctcggctaacgctcccgtcacctgtacctggtctccccatcagta

SEQ ID NO: 38617 - DNA, 367 bp, Homo Sapiens
ttattcttcatcactcagattccaggaaaatctcttttactgcaaatccgacccaaccccttgagaccatccatcaccgcagtgtgaacctctcccctgacctttgctcaccatgttgattcatacctaattagttgtcacttcatttccaggtgaccttttgtaactacccaaggggttcttcctgcccactgcgcaaataaagaccacaacactgcaataaagaaagagtttcacagacaggaggccagccacgccacgtgggaggtggagttaacactcaaatcagtctcatccaaggctcataagcaggagcttttcaaagacagtgtggggtaagggccggtggttgctaggcaatgagtgc

SEQ ID NO: 38618 - DNA, 416 bp, Homo Sapiens
aaagttagaatttttattggaattacatcaaatctacagatcaatttcagaagaatcaacccccttataatactgagtcatctaatacatgaatagtatatataccatcatttaaaaaattcttcttcaatttctttcaacacaacttatagttttcagtgtaaagtcttgcccatattttgccaaattattcctagaatttgaaaatatcaaattctggaatttgatattttctgctgccactgtaaatagccttttataaagtaaattctattttctgtttgtagctggtagatagaaatagttggttttcagtgataccttgtatacaatgattttactaaaaatcataattctagaatatgcttttggctttaatcatgttcattggttttttgtgtttaatttgattgttt

SEQ ID NO: 38619 - DNA, 373 bp, Homo Sapiens
tgaaggcttaaaacaatagaaatttattctcttacagttctgaggccagaagtccaaaatcaatgcattagcagggctgtacttctacgggaggattgaatatctgtccttggccttctccagctttagtggctgtcagcattccttgatttatgatcacattactccattctctgcctccacggtcacaactactccctcctcttctccatgtcttctcttctgtcatatatgaatacatgtcattgactttacagtccaccagataatccaggatgatctcctcatctcaaggttcttaattacatctgcaaagacctttttatccaaataaggtaccatccacgattctaggattcggaggaaggcttac

SEQ ID NO: 38620 - DNA, 356 bp, Homo Sapiens
accaccaaatggaaaagtcatttaattcaaaaatcatacgtccactcatttcatagggattgtcacataaaccaaccacatgtaagaaagccaagtttcagaggcctctgaacagaaattttgttttctttatagatatatttggtgacacaaaagcattttttaaaagcctgaacatggcaacagggctactaacagggacaaaggtctattctagtcacagattactttctaattacagcattggattctatgcacgagtcaatagtcaatactgaagtttagaacagtgcgttattttaaaagaaaacattaaagtgccatttaataagtactttattgatattatatcacac

SEQ ID NO: 38621 - DNA, 423 bp, Homo Sapiens
ctgttcccttggactcctatcagtgtcacaagtgaggttgctttctggattctgactcaataatgtcaactctgatcaaaaacagaacttgtgaatatggtgcgaagtgcttcttaccttccaactttcagattgctggacttaggccaaacgaagatacaatccccttattagtgacctgcagatgtatattaaaaaataactcatataagaattacattaaaatctgtaagtaaaaaacctaggtacaattggaaaaactgctgaattaaaccaggaagaaaagtataccttgtggataatggtttttacatttaaagaaaaggaactaagagtttctgtggctattcatgacatttttcaagattattaaaagtctcacatcccaagaggaaaggcaaagagcagaattctcattcccca

SEQ ID NO: 38622 - DNA, 363 bp, Homo Sapiens
aactaatattatcttctgaggcccacttcctttcgagtaagcccaattctagcagccttttttcatcgcctcgatatttaaactacctcccatacaacttgcactgttcactttgttccacgtgcacagctttcgcctcctttctgacagttcacgaccaaaccttcttccgagaccccatgatctccgcttcctaacctacagcccccaaaacgatgtttccaagatgcactgaaggcctggaccgtggcaacagacctgccacacattcctaaacgagtcttcggtcaggggagggtgacggagggttccacacaccgaacacacggtcatatcatcctcaggccagcccgtgcacacgca

SEQ ID NO: 38623 - DNA, 412 bp, Homo Sapiens
atgtgttgtcgtgcaggtagaggcttactagtacttcacactaagggtcgccgactacacaccacagcactctccttggcatgataacatctatgtccaatgttttcctcatgagtttcttatactaaaaagcagtattttgctagctgaagatcacctttcacttttataaagcatttcaccaaatgtgcttttctattccagcgagacaagaagtttctccatggattataggcaatttttcaggaacagaaaatagacattcttctctggaggattttctctgaccaaagtggcatcaaagaatagatatccttaataagaactggcgactaggaaaacattggacatagatgttatcatgccaaggagagtgctgtggtgtgtagtcggccacccctagtgtgaagta

SEQ ID NO: 38624 - DNA, 410 bp, Homo Sapiens
tttaaagtgctaatctcattttatttactgacttcaggtttggctagttacaatgcaaaaaagatacatgaaacagttccaatatggaggaatccccacaggtatgaggaacaggaacagtccgtgccgctggtagggctactttcttagagaaatgaaatttccagttgacccgtgtgcccagggcattctccaaaatgattcacattctcattcatattcatgaatcctgctctgtttccactcatttgtatgcacaaattcttccctgagttcacacaggtcagtgctacagaagatgtggtcgatagcaattctacagggtcatgagaaaaagcagcaccttgtccacaaaagtccatggaagtttgttcgctaacatgccagatggctacaggtgccaattcttg

SEQ ID NO: 38625 - DNA, 509 bp, Homo Sapiens
aatttttaaaccaaggatcattttttattgtcattgggatattatggtcaaagcagttagtatctggacataatctataatgtcacatggttttattgctaacttgggttattatctaaatttgccttaataatctatttgttgctttaaaggaaacttcttaagaactactataaatttattggattctagaatctaggatttaggctactaatgctgtaggcatactgggtttctcttataatttctatttcagaaagctatgttcagcaattgtatagttagagttagccaaaataaacaaagtcctgatgtatttgacatgtgatattaccaaatatcacacagaaatggagactgcataataaaggcatggctgtaatgaaagtgaaaattctactttttagggccatcacatttatttcactaagctatggttaaatgacttatccaggcacatcacctctatgggtatttgtacatttgaaaatgaaaaaatatatatatag

SEQ ID NO: 38626 - DNA, 425 bp, Homo Sapiens
ggctacaaagtttttatctttattgtacataatcaagattaataaaggcgtggtccaaagaaagtccggtcattcctatcacatggaaaaagcaatcaggtgatgataaggcttcttttcctggctctcgaggaggtaggaatatgtgatattttttccttctgaaactttctctagcttggttgtatttcttttacccagccctttccctgagtgtcccacactagacagctggagatcagtgaagactttcctcatccccaaatgaacttgacctttaacccggggcaaactgaacaaataggggcaaactgaacaagtgggggcaaaatgaagaaaggagtttgctttccatgccggccagacttgcaaattcctttacctgggctcttgttcttgctccttcctgtagcacggtaaaatga

SEQ ID NO: 38627 - DNA, 370 bp, Homo Sapiens
catgttccaataaaactttattttaaaaagcaggtgggggcaagatttggcaggtgggctgtagcatgcaggctcctggttcatctaatgagtcagcgactgatccccacactccacaaacccacagaccctctctctgacagccctccctgtcctggccatgcctccaccccagatctgtaccatccataaacttccaaggccaccaggacatttgcagctcttggttctttgggcccctggagtccccaaggaggaggctgggcaggcacaattctccccattctttttggttccctctgaaagaagactttctaaaggatgattactgctgggctttgaaggatgaatagaagttcaccaaggaaaa

SEQ ID NO: 38628 - DNA, 350 bp, Homo Sapiens
cctgtgactaagccttcattatgcaagcctgagtcccaacctcaggtctgcactggttgtggaggaattctcctccttagaggtggaaataagccacctctgaccctaccacctcctattcccagccacacccaaagtctcaacacaggttctgggctgggggaggggagaaccaagtggcctagccagagcgaggggccaaggttggatttcagaaagtcctcttgatggaagtgggctcctgtccctgcaggtagtgaatggggtggcaggacttgctggcccagtttggcgacagggatactacttggttaaatgaatggtgagagattgaagggtggcctcgtgcc

SEQ ID NO: 38629 - DNA, 429 bp, Homo Sapiens
aacaataattcgtgtttattaaggactggtctgccaggtacagatgcttggtctgtgccacctactttcatccttacaagggctctttacaggtaggtaaacccaggcagggcatggctaagtcacctgctagggtcccacggcaattacaggcagaggcaagatttgaatgcgagcctctgactgtaggaccccggactcagccttcatgccctctgcgtttccaaggttccaacagcttgctggcttcggcattcagttctactcttttacttctacagacaaaaagaaatgcgctcaaggacgttcccaaggtgaattgggacattggtgtggcaccactggccctcaccagtgcagaatgcaaagatgtttgggagaagagtctgtgctacacaggaaacgcttgatgtgcactggcttcctcct

SEQ ID NO: 38630 - DNA, 412 bp, Homo Sapiens
ttagattgaagaaaacataacgtttaattctcagaaacaaatgcaagcctcggtccaagtcttccttcccaaacctttgtcatttagggattgagaagctgagttgggtgaaaggttgaatagaaaacaaaaaggaaagctagaaacacgctgagctcatggagatgcagcttcttctgtagctcctaaagcccagctgaggtatcatctaatgagaattctctctatgccaggcactgcgctaagcatttcacatcattaaccaatgtgagttttaggcaaccccgaagcaggcagtctgttcatcccaattgcagctgagaaacacggtgagtgaggccaagcagctggcccaaggtcccctgcctggtaagtggcacagcctgcagccctgccaggtggtcctgctaac

SEQ ID NO: 38631 - DNA, 393 bp, Homo Sapiens
ttaatgtttaaaccagtttcacttgagattttagttacttgcaacataaataatccaaactttgttccgacccacagggttctcatttcaccaggggctgcaatcagtcgcggccaaacaggagccagtccttgcattgtatgcagtggctttagctgccgttgagctagaaaggaagaaaagcagtccacagcccccgccaacagcttcaaaatgccaatccctgttgaggtctatgtgcgaacacacgcagttcagtctgtcctccccgctcacaacatcacacaggactccacgggccgagcagttcagtctgtcctcccacgctcacaacatcacacaggactccatgggctgagggtcttactggttaggtaagctggcaggcttcca

SEQ ID NO: 38632 - DNA, 461 bp, Homo Sapiens
taatatatatatagatatcttttaaaattttttaaatgttctatacactattggggggttgtacatgattttttccccttggaatgcagttagcaaacttttaccagatgcataatgttaaaactgtgtaaaatactattgcaatatacaggttggtctgctcagttggtctcctcctggcccttgccgccctcttccgtgaggtctgcagagctccccgccttgacagctgtaggctcctcgaaattcccagaagcctctgagtcgaccctggagcgcttgaacctgcggtcgggatactggctgttgtcaaaaggcatgcgatggacgcagaggacatgggtcttcaggttccccttctgagaggcactgtagggacagtagcggcactggaaaggcctgtgacctgtgtgtatcctcaggtgcaccttaaggtgatgggatgtccggaaaattttccc

SEQ ID NO: 38633 - DNA, 426 bp, Homo Sapiens
ggttgggggagaataagatcttttcttaaccaatgggaataatattggatcggaaggtataccaggaaggttgagaagatacattggtaatggactggactttgcaagaggccctgaccttgggcaggcgaatgtgtgattctcaaagtggccacaggggggcactaggagttggtaatgggaagtgtcatagccagcccgtgtctctaagcccggtgcgccctgtggtctagggttcccagctttcgtttccctttactggggcatgttcctgctgttggactcctttctactcctcgatttaacttctagacgctctgccgtggctcccgtgcagcagtagatgaagtagttggccatttctgtgaagcatgtcttcccctctgtgcctaaagcagtgccagcgcccagatggggttagtaaat

SEQ ID NO: 38634 - DNA, 416 bp, Homo Sapiens
tgaaggtaattaacatttattgttcccctttcagggaacttcacatgcagggatgatcaaaggtcagttcctggtcaacataacaagattgtttaagatcaattcccccacactcccttgtacctactccttgccctctgtctcagggttatagaacagctgcttccagctattctccccaggggctctgcagacccttccaacctttcagaaggtttgtgtcctttccctatagtttttcccaccactctgagtgatctcctacatctctcccttttctgttttttgcatcaggtttagttgattgaagcgtacagatgtgtgcagcgacaggtttgacaggtgcagcggttacagcttgtgttccagctttgcatccttacaagagttgcaatgtacaacagacagcatagcaa

SEQ ID NO: 38635 - DNA, 421 bp, Homo Sapiens
taccgtaggctttataatttttatttgataatttatattcatgtattcattcattttccaacttgctttctccagttcagagtggcaggtgaccagggcccatcctggaggctcagtgccaaggtgggcacccgccctggataggacaggcctccatgggacacccacactcactcggactaggcccatgtagacatgccgtgactgcaggtgtatacttgggatgtgggaggaaactggaggacctggagaaaacccgcgcggacctggggagacctcctcaatgctccctagctgcgggcagtggcttctgccctggggcaggcagctgctccaggtctggagatgagccccacctccaggtgcagctgctccaggtgtggaaacggggctctacctcgtggggagcgtccgctgcggg

SEQ ID NO: 38636 - DNA, 374 bp, Homo Sapiens
gctagtacaatgacatttttgttagaaaaaaatatatggagagagattagtgtgtacataaacgaaagaaagatgttaacaatagttatccaaggtttttatttttctatatttaccaagtttgctagctcctctgggccattgcctaggcagaggcacatggctgggccccctggctgggcctgtacccctcatgggggtctgcttagggccttagcacttgggtgtggctccgatcctggcccactgactgtcctcttggcccgtttccttacacatcccaccagatccccaggctgaggaggtgggtcagtggcccacccgctgttctcaccccacagctctgtcctgtccccgtatgagaggcagcttaa

SEQ ID NO: 38637 - DNA, 524 bp, Homo Sapiens
attttccagtacctataaaagttatgtttaatctatattatagtctattaagtttgcaatagcattatatctgacaatgtacatactttaatttaaaaatattttattgctaaaagatgctaacgataatctaagtcttcagtgagtctttgttgctggaagacagtcttgcctcactgttgatggctgctgaatgatcggtgtggtggttgctgaaggttagtgtggctctagagatttctttaaatgagacaacaaggaaggctgcaacatcaactgactcttcctttccgaaagatttatctgtagcatgtgttgctgttggatagcctttacccacagtggaacattcttcaaaattgaagtcaatcctctcaactctgctgctgtttatcaccaagtttaggaatattctaggtccttgttgtcattcaacattggtccaggatcgtcaccgagtagtttcctctcagaaacccttttggggcactatttagagccaccctccttgttcaggtttatct

SEQ ID NO: 38638 - DNA, 352 bp, Homo Sapiens
gagtttggaacagaagtttaataagcaaaagaagaaagctctccccagcagagaggggacccgaaagagggttgccaactaggaggctgaatctgggggttttgtgaactgggaagaggaagaatgtgctcactggtctgtgagctgtcttggagatagcacgacttcgcttggcccgggaccttagcctgggaccaatcagaggctgaagtgaaattttggcccaagaccaatcaggggctgaagtgaaagtttggcccaggaccaatcagaggctgaagtgatgattcatagaggctcggctcacagtccaaagcatgtccagaaaaccaagtggccggccggaccctgt

SEQ ID NO: 38639 - DNA, 496 bp, Homo Sapiens
ccggaacaccagtcctaaaaaattttaaattaaaaagaatccaagtgaaaggattttcccacagccagatcaaaacggctaaaaaaggtaaatgggaattcctgcaacaggtcaaaactttaccgggaagggtaaaacccctgcaaaaccaccttgggccgggcaagccaccccgcccaaaaaccgggtggaaaggaaaggggtttgaccttcccccttaagtttaaatttaaaaaggggataaaggattcccaaatccccctacccaaaggccaagacctttggtaaaaacctttagaacccggggagggggccccccgggggttatggcaaccaagtcaccttttaccaaccaaaatttgcccaccccaattgggaatccgttgggattgggtaatattgggatccccgtcaagccaaggtccaccagttccggtttaaacaaaccccagggcctgggaaaatgggtaaaggacattcctttgggataaacccc

SEQ ID NO: 38640 - DNA, 583 bp, Homo Sapiens
aatgtccaagagaggagtgaaggggtgaaaaaaaggagtgaaaatagaaaaacaaggaaagtttaaaaggcacctaggaaatcaggacaatgaatttgaagggagctgggctcggagcaggagctttgcttccagaatgcttctccaggctgagagagggagccaagcggttgtaagtgggactgagtccaggctgggtcatggaaaatctgggatttgaggcaggagcaaccttggaacgtgaagggatggctctgtcatcccagggtagggccaggggacacggatgtgtgcgtggctgatcggaacacagccttaaggctcctccccaccaaaggaaaagggggtttctttctccccctctctctcttttttcccctaaagacatttgattttcctaaaaactatgggcatgaaaataatttcctcctcctttttctttttccagagttttcacatctctaaatgtcccaggcaactcccatcagcaagccagccgagttccatgtaacacatttatttccatgttcctgaagcaacgcgagctgagaccagctctgcaaaggggcctaaaagagctcat

SEQ ID NO: 38641 - DNA, 405 bp, Homo Sapiens
tttttcgagcaagaaacatgtcatttaattatttccataatagcagatcatttagtatatgtgaacacttctaggaggtgccaagtcctgtctcataacatttggcattaaagtcggacatccagatagcagtagaatatggaacacagatatccactgtcacaaatcctccactgcaaaagagaggacctgatattttaatgaatgtttgtaattgaccaattaatctagcacactttctgtggaaatgtattcgttttctacagccaaagtggaagagagattgtccctatttcttttccccagcagcattcctaagctgagccctgggattttgaaatcgctgctccagaggaccctaaaccacaaaccacggcggcaggcttcccatttcaccaatcgctg

SEQ ID NO: 38642 - DNA, 400 bp, Homo Sapiens
ttaaaatgtgttgagtcctttattggttattaataattgattttgaatactacatgtaggatattatgagttatatacattttttgctacaatgaagcactaaacttttgaatcatctgaagttatagaaacacactagtattaggcaggccaatgaagaaaagcctaaaaacttcagaaacacagcataaccacacttcattgaattccataaagagtgtatataataaaaatctttcagacaccacgttggagagaacttggtatgaaaagtgcaatgacagcagtggcagacagggtgagtttacgtttcaaatataaaagttttacacacaactgttacaagctttaaaaaccagtaagattttgcattcttggcaaagtttttgttcctaagccc

SEQ ID NO: 38643 - DNA, 486 bp, Homo Sapiens
atgagtcactgtccctggccagtatttacagttttcaattatctatttctgtatataacagatgtcaacaaattatggtccactggccaaatctagctttaggcctctgtctgtctcgccccatagctaaaggaaatttttatattacttcaaaggaagaagaaaaagaatgtatttcagagattgtatgtgtcaggcaaaagtctaaaatatttatctggccctttacagaggaagtttgctgatccccggtttaaagaaacaaaattaatttttaaaatgttgttgtatctatttttgttaatcttcatataacaaatctattttaaataatgtgtctgtaaagtcgcttggatattctatataaacaatcatatagtttacgattgtttttccccaaactttagaccacttttttttccatctttgctgattaataccctccatcaaatgctgactagaagtggtaaagcaggtaactgtctt

SEQ ID NO: 38644 - DNA, 642 bp, Homo Sapiens
ctgacagatttagttgatctaggatgacaacacatttttatctttgcagtttcaggtttaattaagcacagaagtgacaattcagtttttcaggatacccaacctcaaaaaaaagaggttcttcacctaaagttttcagagacaatagccatctaactttacccttagaacttcagtttcttataaacccagtcagaattcatcttcatccatttatgttgtccagtttacaatcaaagtacaagagactcttctttttcctccttaccactagcaaattttctctaagcttaaatacagtcagaaatgcaccaagtgatatcaaaacagaatatgatattacattaattatattatattatatttatcacaagcagtattggggcacactatccatcaatcaaggaagttgttattatgctgtagtattgaatgattaaagtcattgaaaaaatgtttgtcagggaaatgttcttcagttttggttaataccagggcttttctggaaagaaattatgcatgtaatcttatctatgataatttttggccaccatgtatttcagtggcttattttttggatgtttctccaacctacaaaatggaaattggaatatctgctccatcagctcagatagtagcggg

SEQ ID NO: 38645 - DNA, 560 bp, Homo Sapiens
agtatgtgctaattatgaattttattaaggtttattcaatgtcacagaggaaagaacggtttgtagttttgcttacccgcagtgctggcaggtcacagctgtccaaccatgatccattcacatgctctggccccgtgcccctcgtcctcccacccctaccccacaggacaccattaagccagggctgggtaacaacatatgctcaatgcatcttctcaggtgagaaccaaactcgagccacaacagcaaagggggaaaaaggtagcaaagtaattatgtgctcccaaggcagtcatttagttgaatccataactggaaataaaaaggcatttatgaagtgtagtccgcagtctgaatgtggaaggtggaagatcacacatttactaagaaacactcaaaacatattttggttcagaattctaaaaaatcccgaattttccatgatcttcccaagacaaccaatgacccacttaaatttaaggcaaaaacacccttgaatctaggaatgtgcacatatgcaacagctaacatctggtaactctaataatggtccttatatg

SEQ ID NO: 38646 - DNA, 358 bp, Homo Sapiens
cgccattcccatttctccttttcttcatcttgatctcccacatatatcaaaggaagtgttgaaggagacacaagattttagaaagtatatgtaaagaaaattgtgtgcaatttttcacttagaggttaaaggggaaaaaatggtgatgggctaggggtatgttttttgacctctgagcttttttccatcttcagaggactgtgtctgacattgttcccactgcagattcacagccctcaggagagggtacatccatctcctaaacccatccaagggcccttgtaactaacaccaaccagtgtaggtcacaggacggtacacatactgcatagatacatacattatgcagaaaaccaac

SEQ ID NO: 38647 - DNA, 362 bp, Homo Sapiens
ataagtgcacccccccactttttctctctctttttttgcatcaaataaccagtggattcctccccccatcccctatcctggtcgggtttatacttgccaaatgcaaatatcaaaaggatacagagagtggaccagtaactggtgactctcaaaggactctatcggttcaatctgtctttcatgacttcaatttcaaaatcagcagtttatagggagattttgtacaaagcatgtatattacttacatgtcactatagctctagacagttacacctcatgcaaactcagtctagagcagcactggctaaaagaagtaaaatgtgagccatgtgtcattttaaattttctagtagccacatcgg

SEQ ID NO: 38648 - DNA, 441 bp, Homo Sapiens
ccgacttccaataagacttatgagttggcattgatgcgcttcattcttgcgaaaggtgctcacatccttgagaaagcgccgattgtactgcatccgccgcttagcccgacctggctgctacagcttcttctcatgcatggccagcttaggagtctgaggtcttacttttccagcacgggccaggaacaccatggactttacctcctagcatacgtactgctacttgtagagtactcagggcctcaacgccgcactggcgcagagtggctcatcatctaagggcgccctgacagcagcacgattttatcatcccgggctactgctactgtgactctacattagccttgcatctgggcgaccgtatcctgggcgatctcatcgcatgagtgtagctcctgggctcttacaaacagctgcatatttggcactaaagagtggtcc

SEQ ID NO: 38649 - DNA, 753 bp, Homo Sapiens
ataattcatatacttttatttactggatcctaaaagaacttattcaatacatgactgaattgcataataaaattccaaatgggaaaaagtatatacacaaatatattgaattaactgcacatacttatttctcttaggaaaaaactaccctattctagacttgcaattaaaaatacaaaatgtgtctaaataaattaaagctttgtgaccttacttcctacaatcctaattctgccatccctacctctgactagcaggcagatgggggccgggaaggcaacagtagctctgagaaggtgttctctccttgagaaaatgatttctccataagcataaggtttggatcctttgaacaccttttagaccctcccatgatctactctactccagaaaattaggttgtgttgtggaggaaagcaggtaaaaatgctaattacctcctcccatcctgtgcttggatattccccacagtattggggctgtatatcctggtttttcaattctccattcggatcacctatctaataaaatgtatgccactggataatagattgagcatcaattctatatgtgatcaactcagagacccttataatgagcgcctacatttactactgtctgataacatctagcgagatgactggaagagcagaggcactgtcgcgcagagtaatcaagaccggatagcgaactagcagccagtgcactccagaggatctcattacctgtaccatgaactgggtgcgtcggatt

SEQ ID NO: 38650 - DNA, 742 bp, Homo Sapiens
gaaataattttatgtttacagaaaagttgtatagatagtagagttcctgtatacctttcacccagctttgcctaatgtttctattttctataaccatgccatcaagttagagattaaaaacttaacattagtactacacttagactgtattctcatatcccagcttttctactgtccttttcttttcagcccaacttatgaaaccatattaaatttagtgcattaatgtcctccaagttgtgattgtttcttcttctctcctcgcctttcaggaccttaactgttctgaagagaactggttaggtattttatagactgtccccattttgagtttgtttaatgttttttcatgattagactatccttatagctttggcgtgagaaaacgagagagatgatgttaggtcatgaatggttatccttgatgtataagataaactccggagtcaataaaagcttctacttctggacccagagatggcagggagagaaagaggccgaaataggcaagtaatagatgatttagggtttaggtttattctctctgcaccacacctttggggcaacgttatgggaggcagctagtacagctagtaggaaaggtaccagtcatgggtagtgccacttcagagcagctcggtggtgcagctgtattgttacacggctggatgttgagtaggatgtggagcgattgagattgcattccagattatcccatcaggcgttcagctcaatgagcctt

SEQ ID NO: 38651 - DNA, 468 bp, Homo Sapiens
gtattttttatagagaccggatttcactccacaggtattgacttagtgtattacatgaccataggcactaactgctggccactcctgtcaacctcaagtgaggtatcagtagtaaagttcatccggactgtgtttacacactattccaaagggaaaattaaagtatccagaagagtttaaagagtctcaaaaactattttgaatgcaaactggtagtaatgaaagtgtacacattattttcagatgaaatcttcaaaacagacgcacttttgaacttagcatccccagtttgatgcacctggatacatgggctgtgctagacctaaaacgtgtgtctgttcgtttctgaaaataggactgtgttgttctacagctatagcctacctccttggtcctctcctacatccatttgaaaaatctttgaaaatgggaagagattttaaaactccgacaacggtcaacttgagg

SEQ ID NO: 38652 - DNA, 581 bp, Homo Sapiens
tttccctgttgaaatgcacgcatgatatttattgggattggaggacaattcaggcaacacaaataattgatatttagtaatctttggattgttccttgtgaacttattcagttgaacagcacattttttcaagtggctgccctttagcccctgtacactcactgtgtggccactgacttacacccactgggcatctgccaagtccctacctcatctccctcccttccaaatgtacctgtctggggacagccctgcagagcccctgcagcgcctgtttgatgatagagcttgccacccagtccctctcattcttccaagctcctttcctgcccaagtcaggaaagtcccacagttcttgtctcatagtacacacagggaagttcagggatttggtgctaactttagttagaccccggcttcccagagccctgatttcttccagggctatagcagtttatctctgtgtgcccaggggttgctcaggcccaggaattgtgaatattagatgttccctttagtatttctaagatcccatagggaagagtgggaaattgagttaagggacaactagcaggtgagaa

SEQ ID NO: 38653 - DNA, 588 bp, Homo Sapiens
ctaagaagcttggagaattaaattgatcttcttaatgttacataatgctgccttgcaacaagtagtatgtttattcttcaaagaatgttagaaatctttgctaactaactagcaaatcacgagcgaaaccagcaaggtgtaaagaaggtcgcaaaaagaaatgcaaatggttataacagtatcaatctaaaaacctaaccacattctagagagttgagagaagaagttgttcatttggtggtgcactggggctggagtttttattgttggtttggtttttggtatcaagagagtttatctggctttgatattagactgtgtctccctgaatagtgtctcttcctgcaaagagctcacaatggcagcttttcacacactggatgctagggtttttcatttcatatagcagaacgggaaacaaataaaacattatatagtgccctttttactgaggcaccaaaacatgcttcagaaaacttgtcagagggagatgggaagagagaggagcaaaagagatgatggaaaagcacggttcccagttttcataaatgaaccgaatactagaattggaaagaaaatactcaaata

SEQ ID NO: 38654 - DNA, 587 bp, Homo Sapiens
caaaataactcatattttaatgatgtggccagccacgtagagtacttagaaaggaaaggagtcctgtggacttcggagaggaagaaactttccacttataaacacaacatggggccagcatcaggaagaaatgtttccattacaacacctcgttaaattgctctacaatttcatgtttatctgcttcaattttttaacaatttatatcaaactcccatagagataactcataggagcagagtaaatccagttccaatagaaatacagagaccagacttgtctacttgacttccgtattagtctgttagggctgctataacagaattccactgactgagtggcttaaacaataggaatttattttctcacagttctgaagcttggaagtccgagatcaaggtgtcggtggggttggtttctggggaggcctctctccatggcttgtgtgtgatggccttctctctgtcttcacatcatagcctttcctctgtgggctcacatgcccggtgcctggtgcctctttctcctctcataaggacaccagtcctattaaattagagtcccaaccctgtgaccccatttaaagt

SEQ ID NO: 38655 - DNA, 506 bp, Homo Sapiens
tagggctctactatacaattacttaataaaacttcatgtcattcttactatgcttgactgggaagtatgtggggtctgttgtcaactttaaaaactttaatttgtttctggtattaaagaactgccaccaattaaaactgagtatacagaagttcattaaataccttaagtctcaagttatgggctagcattgtgttacacaaaaagaatataaagttgaatgaaacaaatggagaccttattatttctcagtttacataccaatactctcctatacatacacaatatactaagaggaatactgttgtcttcgtacccaaattacacataaacagataaaaactgacttttgccatccctttgcaaatgttgtagcaaattctaatgttctcaggccacgctggttcatgatccgagaatctgagacagttatagtcgaaatgtcataggaggcaggcgtggtggcttgccctgtaattcagcacttgggaggtcccttggacgag

SEQ ID NO: 38656 - DNA, 524 bp, Homo Sapiens
ttaagaggcagttgtatacacatgctttatttaacttttaaaagttcaggaaagagaagtatttcttctcttctaaaaagaaatcaagagactagaggaaaaacgggatagcccctggcccaagtcctggctctgctacttaccacccccaaccccaactagagtaagtcctggacacacagggccatagagcatcgcccagggaccgccaggaccttcctggtaccctcttcaaagtggccatcaggacgggaggccagactgaccacctgtgcagggaggagcacactgtggctggaggtcacctcgtgaagcgttcccaagccacctggctggagggtctccatcgctagggtgttgaccgttgggggagggggagtgacagcgtccagtgcgcatctgggagagaggagctcgggttcaaggaccgcgacaggttctccgagcccctggtctcagccccagcagggggcggcacccacctcggtcacaatggtggaacaggtgaacgtctgactgaactc

SEQ ID NO: 38657 - DNA, 381 bp, Homo Sapiens
atacaaaatattgcttttttcccattctcacatttcaagtaacaattttattcactctctacatgcatcttggacatcaacgtcttcatggtatctacagtccatttctcaaagtgtatctccttcacttgcatctaagctgtctgagatgcagcacttctcaaatacatgtctgactcactggcaagtttgacccaagttaccacattaggaccatcctccccggcccccaatttatcatgtaggtgtatttgtaatccttacaacaaaattacttattgcttttgtaattgctctttgaaaggcagattatgaaacctaactcttgcaatagtgagggaatgattttcctggtataatgacttaagtttcttccttccc

SEQ ID NO: 38658 - DNA, 612 bp, Homo Sapiens
tttgggtgcttatgaacaacagaaatttatttcttatagttctagaagctgggaagtccaagatccaggcattcacaaatttggtatctggtgagggttcatttccttgttcatagatgacttttccctataaccttacatggcaaaaggggtaagggaattattttggggtctcctttataaaggcactaatcccattcacgagggtttcatctttatgacctgatcacctcccaaaggtcccatctcctgagatcatcactttgggggttaaatgccaacatgtgaatttttggggggcacattcagaccatagtacaagtgttaaaactgcaagaagaatccccacactcaaggtaacccaagtaatagactaatatgaatcaatccaacccaattgttgggaattctcatagttcttgcagaggttcttttcttggttcattttcttggaacttccaagtcgtctttagactactttccatgctacaacttccaagtattaggaaaatccgttccctcatcttttgtcctatattcctcaacttgcatccacccctttatggctcgcatgtactttaatttctcctggagcatcaaagcctcgtgcgt

SEQ ID NO: 38659 - DNA, 612 bp, Homo Sapiens
ttttgagatgtcacccagaaaaacattcatgataaactgagtagaacactcaagtcaccaaggggcatttaaagcatgtggtgcttaaaagccccgtggttaacttttttttaaacacgggaatgtttttaaaaagcatgtggaggctgggcgtggtggctcagctgccgcactctcccgtgttcccatccagtagcctgatccaaaaaagccatgaggttggtcttgcgtgacttcttagaaaaggaaacggtgatcccagagatcagtgtggattcaccagttgcccataagcgatctagttaatcatttctggaattttgccagaaatatatactccttgctagtctaagagttaaatctaagatggtggctgtgaccctagaggaccttggctttctgtgtgatgctcttgtccagccttatggccacacagcccatttgcagcttgcaggaaacactggaaaaaccaagcagggcattctaatgaataataggcataagcttaggcatactaaagcactcacaatagttttagtgggcacagtggctcgtgactgtaatcctagctaagcaggacatcccttaggccgaattcccctgccgattctt

SEQ ID NO: 38660 - DNA, 369 bp, Homo Sapiens
cagtcacaagagctgactgtcctgtcaccgcaggtagcaaggtgactagattaatttttttaaaacaggtaactgatttctctttaaaaaataaaatctctggtctgctaaggtccctcaactggttttaaagtggcgtttctctgggatagatgggagttgtctcccaaaggggcccgcctttggggccttttgcctaagaatgtttgacttggagaaagagacccgcagggggtggttctcccccagggccgtgtgtttgcgggccatgaaggcctgacggcctcttccacggggcccatctggataagtccatcttgcgggctttctggaagaacttgaatcctttggcgaagccccattgctgga

SEQ ID NO: 38661 - DNA, 603 bp, Homo Sapiens
taacagatgggggtctagttatgtttggcaggttggtcctgaactgctggcctcaagcaatcctcccacctcatccttccagagggctaggataacaggcataagcaccatgcccagtcaagatttgaatccagacagtctggtgccagaggtatgcactaaacctctaggcatgacattgtctctcaaaatgactcattatacttaaaaacataagggacaaatttttgcttcttcgggtttttatgctgtggcaccaatcacatactttttttgaaaactgggcacaatgcaaaccacaattacgtttttaaattacaagaaaaatactcccagattttaataagcttctacataatgcttagatttgggctttgcatggtgttttaattggatagtgcatcggctcttggccttgagccggcaagattagccattttgggattgcccgtgatggtgtgaggaggggcttcaacaattagtgaggcgatgcttcttctggggaaattcttttaaccatatatggataatagaaggcaatatacttgttcaaaacctgtaccacaaggcagaggttcttaccgaatagcacatcactggcgg

SEQ ID NO: 38662 - DNA, 450 bp, Homo Sapiens
gccagtcctcaataaatatttattaaattgaaatgaggcctattagccagcagcacaatttaacacagcacttcacaaacaggttttataacaaattaaacatttgccttggttcttggtaacaaaaatattcaaattaggggttttaattataacaacttgtatttgcccacaaaaacatgatgttccctggaacaacctcccacatcacagatgtaaagacttttcttctcccaggaattcaaacttgaggctacatgtgctaggaaggggacaaaccacactaacaggtacctctcttgcctcccaaccctgaacctcaaaacttccatatttttcttcagcaaaggaatttcaaaattgtcagattacaattaatttttaaatgagttcattttctccttctcaaactgtattggctaatggtgtcagaagagcttggataaggtc

SEQ ID NO: 38663 - DNA, 623 bp, Homo Sapiens
ttgttccaaaacgttttaattatcatgaatatcataagtcatacaaaaaaataaagaataatacaaccaacactcatgcacctgccatcctatagcttaaacatactatatcacatctgactattacctagtctgtctttccccaattagtgatgcctctatagtgagatctataaatgttggttctgtttcttttgtttctgaaactctagaacctgttcagtacatattgaataaaaaagcaacttttcactgaaagagaaggataagcggacatctttcaacagcagaaaatgtatatcactgcctgttcttctccatccacaaggctgaggaggggatgaggctgactctcaatggggagaagtcagcaccgccaccctcctttaaaggatttcttgatgctcaccaaactatgcaaaggaaacctctcttctgggttaaagggacctgacgcgaatgcccagaaagacaagttattgtctgttcttacccaggtttttttaaaaaggactttttgtggctcctacccaaggtttggtggttagaattaatttcaagggcatgacatgtctttgatattggtagacctttggggagcccctagggtggactccagaggt

SEQ ID NO: 38664 - DNA, 520 bp, Homo Sapiens
tgacgacaacacatactgtataactagttttttttaaaagtataagcagtttctcaagtaaaatgtcatttcaaaaatgacaaacatccctaatgcaaaactctagcaaaataattagaataaaacctacttatgctcacgtaatattcatcagtatgaaatcattcctctttgttcctatctcttcaaggtttgataccctctggtttgaagagtaggttttacttgcccatttagcaaacaaaaaataggtgataatgatatcaagataccttatgaacacggatgcgcatttttatcacataaattatatgctcagtattcccagtcacaaaggtgggcgggatataaaatgttccataaaatcaagcctctctagcatctcattaaattctcgaagccagaattattcagtttccgataattactaagtctcaccaattatgagagccaattagatatctaaatggctactagctcccaaccccctgcaatagtactacagctcggggcggattct

SEQ ID NO: 38665 - DNA, 477 bp, Homo Sapiens
ctactttcaataatttatttagatattattagatatttgaaaggccaaggaataaagaaaattaaaattaaagccttaggaaacgttaccgattcaagaccctaaattaagatacagctgcttggcaattataattacattcagagtgaaagagaatttgactcataaatagaaaagcagcttccaccaggcttccaagtacggctaatcccaaaacacaggtgcctggaagatcctcagccacccccttcattcaaaccccaacccttgtggactgcctgctgtgttcacagaatgttctttactcaaaaggacctctcatccttaaagccaatactcattcttctaacatcccagggagaaaggcagctcatagtctccacaggactcgaccctggcgctgtctcacgatctttttgcaaagggagagaattggaagagaactccatgtcctcaaaggcaccttcagcctcgtgc

SEQ ID NO: 38666 - DNA, 457 bp, Homo Sapiens
agcagcaaaaagataaccactccactttacatatgaggaacctgagattcacaacagataatgtgcttcttccaaatttacaatgtgagtgaatggaagagtgaaaaacagctctgatttcaggtcaacttcacccttctctcccaaagacggtggacacagtggtgtgcagctctcattttcacttacagaatgtttatagaaaacctttaacaacaaaattagagaaactagaaccaaaagcttcatactttaaactgtgaggaaattatatatcattttttacttttgtcaagtcattcaaaattttactgactttagatttcaggcattacattggttatatttaaagtaaaaatattcggcattttatccattttcctcatatcaaatgaggcctggggtgtggtccttgaaaattataaggtttcatgataactgaacctgtaactaaaca

SEQ ID NO: 38667 - DNA, 506 bp, Homo Sapiens
agaatttgcttttattacaccttcagttaaagtacactaagcaaccttaaaacagcatgaaattcctacttccgccttgcctcacatactgggccacatttggtctttgtcacttctgaaggactcaaagtggaactgtggctttgtgctagcccctggagcgtggattacttcttatgttgaaaacaggcatgtttccgaagatgcgctgtttggggtttgtgttccagaatcttctttgtcctcaataagccagaatttcacaaggagatattttatgtgatgagaattcggaaaaagtctagaagctactagtgtccatttactcttcacaactgtgttgcccagggtgtggcagggtgatgtctcccactcaatgcttctggaagtcagcgtcgggcttcactattctgcccttgtggtcttccagggtcctcacaggagctcactcagagaagtacagtccaacagcaagccccagttgacagtttacaaaaagtgctgca

SEQ ID NO: 38668 - DNA, 529 bp, Homo Sapiens
acaggtaaaacatcattttaataaattctagctcacctcaaaattattaaattggaggatgatgttcttgattggcaaagagcccaagagatgcaaactattgggaaagaacctggaagggatggaatcagaggctgtaaagatagaggttgctcttggtcagttcctttgacttgaaatccacaggtcctgtggatgaacaggttcagattttatgaggtcccaccagcatcctggcagtggaaggtgtggcaggtctagtgggcaggtgagctggccctggcacaggctgccagttgtacttacctagtgagggagggagccttcttcctaagggttacatttgctttatgctgctttggcaagagcgcatctggaacaatgcatacagtttgggtcccacctttcaaaagagacattaagagattagaaagcatttagcaaaagaacacagtaggaagctgaatgggcaggctgactacttgctcagcacattgcaacatcagggcgctcttgtcagcctggatta

SEQ ID NO: 38669 - DNA, 373 bp, Homo Sapiens
acttagtgagtgaccaaaaagttccccgggggaaattcttgtacaaatagagaacacgcccaagaagcagtttatcgggctcctcagacttcagagcccgtagtatctctttggctaagggtaggcgtcttcttctacttagacttaacgtgggttaggtctctgaatctgccaaaacctcccataggagacctgctcatatgggccatcaccattattgaatgggttaccggtacatgttccacaggacagttgcatctgaagtttctaatgttatccaaacaacttacttcaagtggcacaaattgaccacgcctcctgaataagagtctctctgaataggataagtaacagcgctgcgggcaaagtcata

SEQ ID NO: 38670 - DNA, 461 bp, Homo Sapiens
ttttttgaaagaccaaaccgattgcctttactggaattcatgatcacagatctagaagccaggtaactctttgtaagaaacactgttcattagcgtgaaagctgtggtttcctcttttccatctgcaatttttgtgccatacgtcaagtctatgcaagttcagagacccacgtcatggggccacatatccacagctttccgtgcagctccagaaagctccagaagtttcctgagcttgcttcagactttctttgagaagtggaccttccatccacatgtcccgtctgtttggcttagaaagtcaacttcagggccttgggaagggcctgggaaaccttttcctctaagtctgtggtgtgtcggtataaatttgtagggagtgtgttcttatagctttcacaaaacccttgcggcatgcacgcctcccttattgccatttatcgacgcccaggctggagtgc

SEQ ID NO: 38671 - DNA, 629 bp, Homo Sapiens
gtctgtatgtttgcaaaatgattttgttccctctccaccattctatctaattgtctcttttaggaacaaataaactttaatatcagttagaaatattttcagctacatgtaatggaaaagccaactacagtggcttaaatacattgggattgattttccacatagcaagaagtcctgcgggaagcatatgtcagcaccaaagcctacatgccgcacttggtctttctctcatcaccataacatggaagcaagtacagccatcgaccacatccgaccctgtggtggaaggagaaggcagcactattgcacttccactcgtgtctcagaggcaaggaatctggccgcccccagctaaatgcaacactgggagcatgaggcttttagtctccagtctctatggcacaggcaggcacaggcggtgaggatgggaacccgactctgtgctcagtccatgttgtctgccagaccattgatggcgtggctcattccttctcctgtctcacatctgtctatagtttcatcattaacttattggtgaatctgggaaatgctatcattcagaatctttagttaactcctacatttaaacttaatctagatggatttaggagtttccattctgaagttat

SEQ ID NO: 38672 - DNA, 574 bp, Homo Sapiens
aacttgttttctctgtcttcccactggaatgggaaggccatgttttaagagcgaccaccctgttaatgtttgtcttgttaagggataaacattaagcacctaatgtaccaccttggactcaggacacagctggcactgagtcgggtgtggggagagggtcactgcctgcaaccgagcagggacagtgccgctttgggactccccaggccctttccccaaagggcccctggttcagctcttgggccgggattcttctctgaccataccagctcccaaggaaaagctattctgctacagaaaggattctgcttggtgacccttcgaaaccaattaaaactatgtgatgcgtccagctctcttctccttttgcatttcagcttttcccttccaaaggaaaccatgggcaaaaatgtgaaaggtgcagagctgctctttcccaaatgtggcttctgcttgggagcctgctgtatccttctctctagggcaagtagataaaccagaggctcaggtcagagcctttttttggcagattcgttcatggggttaaaggaaggtgccctctgtaggctttctt

SEQ ID NO: 38673 - DNA, 597 bp, Homo Sapiens
agcagctaccatttattctgtgtctactctgggcaaggtgcagggcagttttattttcccatcttacagaagtcctacaagtgaggtggtgcccagaagccacgtgtaggggctcagggatgccgagtgcccagccagtgcagagccgcaggcacctggcacttccccttgtctggcatctaagcactgacaagcacccctctcctacccattgctcagatgggggaacttttggtccagagcaggcagatctcacaccaggtgttctttggctcccaggcacctcgttctttggggtagaggaggcagagtccccagaaaggatccagggttggggtcacaagtgatccataagaagggactaactgtggctgctaccctggctcatctctccgcttctccaggaaggccaaggctccccagccagccaggcccctggcacagagtctggcctctgctcagggtgtttgagtgtgggggaaggggctggcacttcccagcaccggtgtacactggccctggtagtgctggccagttctttcattttcccctaaaccccgaaaggaaagctggggttaccagagcggcttagaggcc

SEQ ID NO: 38674 - DNA, 455 bp, Homo Sapiens
tctgaaccaacctaaaacacataggtagaaccagtcatcaaaagcttcccaacaaaagaaaagcccaggaccagatggtgaattctaccaaatgctaaagaatggacataaatccccaaattctcccaaacattgtggaggagaaaacacttcctaattccccgtattcatgtgaggggccagcttccctcccattctgccccagcttcctccagtggccttccccaacaggcagtggcccccacttctggcccctgtaactctacccactgtgggtttcctccttgccacccttccagccttccaggctttgggggccattgagacagcccatcctgcctgccctgagtgggaaggcaagacatgactggctcaggatggcctgtgaaccaagttggactcaaagaaggaagggaaatcagtgcagtcggatggcaacatgcagtaggttttgg

SEQ ID NO: 38675 - DNA, 490 bp, Homo Sapiens
ttacaaaacagacaaaatttagttgtaatagcaaatcttgggatccaaatgcaatgcttgtaagcaacccctgttcaggtctgtctcctccagaggggtgggcctggttacctgcttcattctctctcttcccttctcctccctaactggctcctgtggaaggtccctccaaggttggaaagagagggaggaggttagaggaaaggggtttatatccatacgtgactgacagagctgtaatctgcaattggtgccttctggtaaggcagattctaaagtggcttctttctgtcaatgagacgttggatatttttggagctcctgttcggtacccactgcatttcttggtgtgaataatgcctcagctagctttttactgcagagtacacctccagagatggtcagttttatgactcaacttgggcaagttgtagcaccccgtaactccatccgatactaatcttaggggttgtgcccccgccgaattctt

SEQ ID NO: 38676 - DNA, 490 bp, Homo Sapiens
tgtaagggaggtgtacctggaagatactctttaataggcaatgcatgtgtggggatatttttaagttttatcggtacaaatgaaatatattgaacacaaatcgagcaaatatgacttggtcgttaacatccctctgattaaacaggagtgctgctatgagaacgggctgtgcattctgcaggcacacgagagtcgctgggttttagggtagtctctgtggagaatggtgactggaccacgtgggagaggggcttgaggcaggaaggtgagcagactccagagttcaagagatgtttgcatacagcgccctcttgtttccccttacagtgtggctgtggcagtattgagaaccaagtgttcaggaactcatgctggcctgccggtcccacctgacctgagagtggcgggcactcagcgtttcagcaagctgcttcctcaacgatgcttttgatctcttattgttgctggggaagctggagtcacccaattc

SEQ ID NO: 38677 - DNA, 494 bp, Homo Sapiens
gaggctggcattgttcattgattttaatgagaaagctaagagaggaaataagtagcctttcaaaggtcacacagaagtaagtgacagatccaggattcatatccaagcattctggctctagtgtccatgcttctcaaccattatgacccaatattcaaccaaatcaatactgaaggacacgtgaaatgtatccggtattttactattacaaacaaaaatccaatgaacattcttgaagacatacacaaaaataatggttacaatagaggttactggaattgaaattttggttcaacctatattaaaatgtaaggcttttgatatagctaatagatttttgaaatgatcagtcttaacgtttgtaggggggcacactcctgcatggggaaaagattccctgtgaggcacagagcaccttgtatggttgggttcatcttgtcattaaagttcaggagttatgcagcccgggaagtggaggaatcaggactgcgtat

SEQ ID NO: 38678 - DNA, 437 bp, Homo Sapiens
tttttaaaaaatagtggcacggcactttttattttctttaatcagaaaaataagccctgcgcttctgggatggaggccccaggtgagcaccggagataggggcccgggtgggtggggagcgagggggcccggagcacaagcagatgctgcaccagaggctggtcaggacccgggaggcctgacgggaggtggggtcctcatgagcaagtgcgcggtgctggaggtcagcagctgcctggcctgggagccagagacacccatccccttcctgacacctgaggcggcccagctggcaaagaccaggcctgcaggaccagagcctcctgtcacgtggcgcaggggtccaggtggtcaacgctgctctctggaagaccactggttagagcctgcccagctcccctgaggtctggagacagtcaaagcccccccaaacaccc

SEQ ID NO: 38679 - DNA, 516 bp, Homo Sapiens
tttactgctcatgctccctttctcaagaaactgttatgaatgtactccaccaaggcaagaaaggaagaagacatggaatttaaaaaacagaggatctactatgaaagagaaaggtgaagggaattccaggctgatggtaaatgcaaattccaggatgagagttgggcagcaggcctagagtgcactccgtcctgggaggagccagatgatagagggctctaggagagaaggctccaagggaaaatgaaacaagtaagtgacctgacgtgtgtctgaaccagcccagaggagatccatagttctgataaggagtctggggtggaaataataggtacatggaacactatgcaaacaaaatactaattattaatcctgggaaataaaagtaactgcagtttactatgtgactcagctataaataatataaatactgtatattaacctgataaaaatgatgatttacctaaattgggaggatggggaagagaagtatttgtccggggacaggggagctgc

SEQ ID NO: 38680 - DNA, 584 bp, Homo Sapiens
ggtaattattctttaaaatatattacaatgtcactggaatcttattattttactaagttactttatgaacattcaaatatgcagctggacaaaaataaaactaagttctactaacctgtataaccagtttgtctagtcaattaaatcaaacaattgccttggctttgttttcacagaactgaccctgactgaataaactgaactgacaagttgctttgtgtttcaaagtgcagaacagttcaagtgtgtgtgtgggcaaagggtggcagggaataactaagaacatttatgaatttcagttaacttctgtctagaatgagctgtttaaaacataccaaatctaatttcaattgcacaaaacataacagcagcagtctcaattattttagttgcacaaaatatacagcagcagtctcaattattttagttcaattttttcatgaaagtagttacatatattaggttttaatatatacatatatttttttgagacaggatctcactctgttgcctaggctagagtgccgagccacagctccctgcagcctcgacctgggtaaccgaatgagactccatgtcaaaaa

SEQ ID NO: 38681 - DNA, 465 bp, Homo Sapiens
ttaaaatttaatttttatttcaataggcttttgggaacaggtggtgttggattatatgaataagttctttattggtggtatctgatattttggtgcacccatcacccgagcagtatacactgtaaaccaatgtgtagtcttttattcctcacccccaccccccgcctttcccctgagtccccaaagtccactgtatcattcttatgcctttgtgtcctcatagcgccgtcccacttatgagtgagaacataagctgtttggtgtttccattcctgagttacttcacttagaataatagtctccaattccatccaggttgcagtgagtgccattaatttcattccttgttaaggctgagtagtattccatggtatatataccacatttgctttatccacttgttgattgatgggcatttgggctggttccatatttttgcaattgcaaattgtgctgctatgaaca

SEQ ID NO: 38682 - DNA, 471 bp, Homo Sapiens
gattaaatatggtagtttttactgaacgattaaatagggtagtttttctttgttttaatgctttttggtgtttaactgataaactagaatatctgagatctgatatctccaggttaatgatacaggtcactgtattaattccaaaagaacacactgaaccgttgggtctaaagcacccattctgcactgggtcaaccaggcaagtgtgaccttacccatcattcacagcctggcagatcacatgtccctgagcattgaactgtagagcaaatcttgttaattatcacaatggtatgaatttcttagtaataaaaatttttaaaaactttaggacaattgttctgcaactcagacttctagataagtgatctgtatttttggtcattctataatttagcaaatgtcaagtccttggtcaggagtacacagtctcattatgccacctgtcttattaaaaataaggtttactta

SEQ ID NO: 38683 - DNA, 467 bp, Homo Sapiens
tttgtggcctccttcctctcaatttatgaagagaagcagtaagatgttcctctcgggtcctctgagggacctggggagctcaggctgggaatctccaaggcagtaggtcgcttgggcgttattgttttgtttcgaggccaaggaggcttcgggaagtgctcggtttcggggactttgatccggagccccacatccccaccacttgcaactcagatgggaccggagcggtgttaaatggggagacgatgtcctagtacgagctctggtgaccccaggactctgcgctgctgcgttggggcttgccgatcggtggagaccggggagcatctctgggcgtggagacccgggcgcagtaccccgggctcagaggggtcgggggttcccgggcgtgctgagggcgctgctgccgggtggtgatagctgcaggtccgtcatcgttctctgttttgttcggagggccctgagct

SEQ ID NO: 38684 - DNA, 501 bp, Homo Sapiens
ttctgtgctggtttccttttcttcctccacgccagagcccggagctgatggtctacagctgccggccatgcccctgcctccatggagacctgggattgtgtcagatgtcctgctccagcctttaagagcaggagtggctttgtcaccaagggtatgcacggcttttccatcccctttcatcctgggtgacacaggctgcagataataatcacagcctgggattcgggggagcctgactagtcgccgcctctctcccccgactcggatgatctgcttctgagcctgtcttctgttgtgaaacttactcccgaatgccttcacctgatgccgagcaaaacgtcacagtctctaccatgttgctatgcggtacgtgtaagtagacagcacagagcacaacaataggtcacttctgcccaactgttaaccaggcagctggtcacccagctcagttacctgcataaaagcctcggggttccccgtgggcacattggaaattctcct

SEQ ID NO: 38685 - DNA, 618 bp, Homo Sapiens
agagcaggaatgaaagtttattaaaaagttttagagcaggaatgaaaggaagtaaagtacacttggaagaggccaagcgggcgacttgagagatcacccactggacagtctgacctttgacttacggttttatacgctggcatgcttccggagtcttgtgttccttctcccctgactcttcccttggtgtaggctgtccacacttgcgcagtggcctgccagcacctgggaggggagcatgcgcagtgtgtggcctgccagcacctgggaggggagcatgcgcagtgtgtggcctgccagcgcctgggaggggagcatgcgcagtgtgtttgtacgcatgcaggagttgtacacatgctcacgtgaggcgttcttcccttatcagtcgaatgtccctagaaggtcatataccagttaaactctggcattctgcctgttagtgctcatgcttgagtacactcgcccaactgctaagatcttaccgggaagctgcttatcacccgtttcaggtgttttctatctactgggagcctgtctttccctagcaccggctgcgaccaattattattttagagcgacagactaacagccgcctgaccatcacctgatggtcacctg

SEQ ID NO: 38686 - DNA, 467 bp, Homo Sapiens
ctgaatagagagtgccgcctcatcaaacctaaaacaaaacacagaaatgtaaaaaaagcaggtctaaatgatctatagcagaggtcccctgtgaaatgtacttgacatcatagattgtagagacaccaggaggacaggtattattagcagctgccccaggacccaggtttccacatgctctgctcatctggcttacctttcacatgtctgactccccactttcaggctgcacgctgacagaaaaagcaaaagaactcaaggatgggttaggtcaaacggggagttgtaagcttagtaaggactgtccaatagcgagtgtcacgacttcttcgtgatacgtacttgagacgatcttcgattagatcacccaggtttctttcctccgactggaaaaacttcaggcccccaaggacttggtgtttcctgcaatctccatcttcacaagtcgtcttttcattggccctcta

SEQ ID NO: 38687 - DNA, 390 bp, Homo Sapiens
gaggctgtgaataccatggtaacacacagtttgataatagtcattcaccagtctgcaaactactgataattgtgctgatcccaaagtgctgggattacaggcgtgacgactgcacctggccaagctcctgcatttgtaagtgatgtatcatatatataggctgtttttagcttttggggttaatgtaggataaccagggacacaatctacaaaagcaaagtctagaattctttttgctctgttacacattgttgcctgtttttagcattattttccttaattacattcttttgctacgtattataggtgtttacatttcctaaagatctcattgtgatagagcaaggattattagttggtaggtgagataatagtaaatatagcatataa

SEQ ID NO: 38688 - DNA, 499 bp, Homo Sapiens
tcagttaagataaatgagctctttagggtattattctgattctgggtaggactaaatcaagttcctttctgtatgtttttacaattacccaaagcattctcagcatttcaatctattaaattattacagtgcaggtggtagtggaaatgggagctagtcttcatgttgacctaagaaagcccagccttttgatggtgacagttaattactagatctgtttttcctgacctgaacaccatacacctgttgagttcactaagtactttggggtttccaaaatgattgaggaggtgctaattaaagaatcaacatttaacgttttcaatgatccaccacctatttgatattaaccacatccttccacgggattgagttataactaatccagccttcaactggggcagtaagaagtgctgaaccagcaatacaaaaagctagagttctaatcttggtttggttgctaacttgctaggtgaccctcagtttctaccctagtaaa

SEQ ID NO: 38689 - DNA, 588 bp, Homo Sapiens
tgaatgttgatactctttatcatccatattcgttttgttgtcccagtatccttggtagcttgttttagatccccccctctagagtacaggatcattgaatttagttgttctcagttgtctttaatgtggaacagttccttagcctttatgtgttccatgacctctatgttttttggagtacagggcaatttttcttgtaaattgttactcattttgcatttgaattgtttattcatgcttaacgcccttctcaagtatactctccatctgctcttcattgatgttacttttgagcgcctggtcaaggtgtcctggttttgccctatgtgtggtacttactactagcaatctctgggaagcaatgtgcaaataccctgttcctttatcaggagctcccttggcgattctttccagactaaaacccaaaccagtctttaactatgatggttacgaaatagtgattttccaaatctaatgctttgtccatttacagcatttggtgtaagagagtgttctatctctggcatttattatctacctaaacactatggcctcataatttttccctccaaatcaaaatttgcatgc

SEQ ID NO: 38690 - DNA, 595 bp, Homo Sapiens
gagatggaattcacacgtatttttatttcttccaagcaggtacagagactcaaatgtaaccctttgagctctcatgcttgaggatgtgctgctacctggcctttgagctctgtgctggcataaagcccaaggcctgggcagggcagatgatcaaagtagggagaattttaacaccagtcatgggacacagtggggagcacaaacagtagggtttaccaggcaatgctgttgatgttgatagtcctagcaaggctggcagttccaggaggaggaccagcacctccaggacgtatgacttccccccctacccatgggtgatgtgatccttcacataaccattctgctccaaggtctgccttgttctcaagtgctatacgctgattcgcacccatcacaatcacacacgtctcacacagactccagaccctgcagcgcccaactgagtactcactcacgcaaggtgaggctccttggcggtgcatctttattattcccagccacaagttttagccacaacctctcttcccatttaagtgtgcgtcacccgcagaagacaacaggtgccggagttcaatcctatggattaattctaccc

SEQ ID NO: 38691 - DNA, 393 bp, Homo Sapiens
caagacccaaatgggattttattgttaaaaaggaagggtgagaaaaaaccactgccaagtaacaaaaccagattccctccctcacccacatccccaattgtaatacgtgaagtgcctgtcggcgcctccccaaccatccaggatgcccgtgccccacacgtgggccaggagcccgtcctcactgtcagctgctttcccccgttaccaaggccgaggctggcctcagggctgtgcaggttttggcaacagcattctgtccagggctgggaagcacgggagcccagccgtcctggccatgtcccctggcctcacctcttttccccagtggcactgaaagcatgggagggttgggcagagaccccagttcctgggtctcaggagccctggcctgct

SEQ ID NO: 38692 - DNA, 485 bp, Homo Sapiens
cacaactgaaagtggaagtgttctgaccaggaggggagaagctgccaaagctaccctggctccgtgtcaaagcctttcacctcagcccctaaggcctgacacaaaagccagcttgcctcaacacagttgaccctgccctcctgtggcctatcatctttcaactaagatgaaaacacacaaactaaaatgacttgaggtgccccctcagatcagaagcctcacagaggcacgaggtgacgctgttccctgctggattcggaggacaggaaagtctggctagagggtacctcagccctcagacccacacaaacaccttctaacccgcctctctccagtcgccagagctgcctgacttggtctctgaagaagttctggcaaagcatagacaatgagcaagtcaggaacgacggggctgtgagtcgttcaattggcatggtttctttccctctgatacaggttacacctctaaactttacttaaaaatc

SEQ ID NO: 38693 - DNA, 471 bp, Homo Sapiens
cggccgacgcggctagtcggttctctgtggtggacgcaggtcggcggcgtcgcatcgcagccgcgtgtctgtgcacgaacggtcggtcactaggagtcctcaaggcttctctggttgagccgcacatcccgcaccccctgtcgaaacggtggagtcgctcgcccgcgggtcctcagcgagtcagtggcgcagtcgggattcgaaccgggcccaaggcgtcccgtggcaccgggcgttctccaggcgtgcagcgcgatggcggtgtactgagcgctgtcccccggcaccgtctcgcggcccctgaccgcattctcggggtgtctccttgtggtgtgacaccgcacgcgttttgtaggcgcggacctcgggcccagagaacggggagaggaactgttcccgggtttgcacgtagctcagcgccagtgcccgatcccgccggctttcaagctcccggcgcggggcactgtccgc

SEQ ID NO: 38694 - DNA, 478 bp, Homo Sapiens
ttgccttataaacaacagaaatttatttctcccagtccggaagctggaagtccgagatcaaggtgctggcagatctggtgtctagtaagggcctgcttcctggtttgcagatggtcaccttcttgttgtatccccaagtgatggagagtagagagcaagatcaaacgcttgcatctcttcttataagggcactaatcccgttcatgaagtctccatgctcatgacctgattactccccaaagtaaagtgcatgcacattcagggttaggattgcaacctacgaatattggggggacacattcagggcactgtgctccccattggccagaccctcaaagaagccagagtgcaaggaggtccatgcaggacagcctcccagggcccagttctagagtgggagagggtgccggagaggatccagagaagcgcaaatgagaagttcctccaccaagcatttggtgatttctagacagtttcc

SEQ ID NO: 38695 - DNA, 498 bp, Homo Sapiens
accatccagtcaagtttattaaaaaaatacagacacacaaacttaagaaactggaaggaacaaaatgttcatgatagcttttttgtgagatggtaggattccagataaatgcttttcattttctcccttgtgcatctttgtgttctccatattttccataatcaattatgtttacgatcaggagagagtgctgagagaagaacagagctggcgtgaatgccctgggggataagggctgatggcaggagctcatccttgcagcactggtgacagtggctgttgggcaggacctgaagctatgtgcacagtcgtccccgttgcagggtgggagaccaaaaccccaggaggacatccaggccactcagtgagggatggatctgaaccttgtcatcgtcctcgcaggtcatgacattggagaaggggatctcgggctttgaaaatttccgggagtgcatgagctgcaccacagggtagcggacagtcttgaacttcatcctc

SEQ ID NO: 38696 - DNA, 501 bp, Homo Sapiens
taaggtataaattagattatattagttgtcattctcttcattgaacataagtatgtaagcctataattgaaaaggatttcattacaacagtacaacagtcttgcacattttaattacagaaaaatatttgtgtgcctttagcatttctagtattcctaggaccattcatacggaaaataaagtagtagggataaaatagaatttgccaagagaagaaactgaaatttatacatccaaggtatattttttcatgagtcagagtatatttttgctcttaattttgtttttcaatttcaacttttattttagatacaggaggtacatgtgcagatttgttacatggaaatattgtgtgatgcttaggttggagtatggatctcatcacccagatagtgcgcatagtaactgatcagtagttttttgaacccatcccaacttcccttaacctctagtagccccaaggtgtggaactgatcccccatgtggtgcccatgggggctc

SEQ ID NO: 38697 - DNA, 492 bp, Homo Sapiens
agtatgtaactcttttagacatttaagaaaacactggttcacaacagtgggccttagttgcactgagggcctgttatgtgtcaagtactgtgcctggcaccttctacttacaatttcatttattcatcataagatctcagtgaggcagaaattaccatccttgtgagtggaggaaactaagtctcagagagtttaataactttcccagggacatatggatggaaagaaaacaggacgcccagttcataaacttcatttcccgggtacctttcaagcagcggaaaaatcagtgagagacagttatgtgctcctggacataaaggcctaaaggaaccctgtgggagtgacacaagacaaagaactcatatggtgagtccccatcccagttttacctgtgagcagggcagtgttcacgaaattaccagaccaatggcaacatttacatcgtgagagttggcacaggcgagcacagagttgacaagtttggggtta

SEQ ID NO: 38698 - DNA, 541 bp, Homo Sapiens
aaaataaaggagaattttattaggcgcccgggggcaaatttctcatgtttagtttcacgcagcaggagtcctcacaaagacgctgatacaatttaaatgccaacaattggtttttcactaacatccacatagtcattactggcctttactagtaatggtaagagacagcccaaacctacttcgggcggactgtcccttcgtcccctctccaggtgaagttcacctgccactaccgaaggcacgtggaaaaaggaggtaaagaaacgcttttaaaattaagacgcttacagttgctggacttagtccaagtgctgttcaagcctagaaacgaaagtgggaaacaacagaggtttaggcttgtaatgatgtcagccattttaggtacattatttatactgggaaggaagtgccaaactcggttgttgttgttgtgcctgtcgctgccggtcccagatcgaacaagccagtcctggtgcacgcacgctccccggactgccaacgacgggattcgcacattagcaatgttcctctcaggctccaa

SEQ ID NO: 38699 - DNA, 484 bp, Homo Sapiens
cccttgacagatcatctggaatccgaaaggcagtctgcacagaacttgctgatagtaacactacagcatctccagcttgtatcacatagcatgctatattttcctacttggctcttaggtccactaatcaacaggaatgctgcccataaatgtgaatgacagctcccaccctcatgaccgaacccattacaaagcaggaaaagaggccaaacctcaattcaaagtaattatcttgaagtgatgccttttactgatgacctatctgaacagtgagaaattcacctgcatagtatgtgatgcatagagatcccattagaaagcaccacatatgtaaagggatgactaagggcacctcttctatccatacgattttaggaacaatacagcaggagactcacagcctaagattatcattttagataaggctgcacagaagtctttacaaggaatcaaggggctagtgactggtgattacagaactgag

SEQ ID NO: 38700 - DNA, 540 bp, Homo Sapiens
cattatactggcatttaatgctacaaatgaatggtagacatgtattatgacaacaatctattggggacgtataagctccaatgaagaaaggattcttaaaaatatcacaattcagctgagacctgaaggaaaagtgggtattagccaggcaacgtatgtataatgaccctgagaaatgggggaaaaggccagctgtggctcgtcaagataaggaagggagaagtgagtggtaaggcagaagtacatagtacatgaagggtcatttaggcaattttaaggactttgacctttatcccaagggcagtggaacataatcaaaaggtttaaaggagtgaaaagacatgattaaattatgagtataaaaagctcgctctcgttgctgtgtaaaaaatgacttggagatgggataaaagtgaatcggggagccataggggaagatatgctagatgtccagttgagagatgactctagatgtctagtatccaggcttccatggctgcttccagtccttaccctcctatatatcctctacttgattct

SEQ ID NO: 38701 - DNA, 522 bp, Homo Sapiens
atttttaaaaacaatttatttacaaaatatttaataggaagaaaaaagaaatacaaggcattacatgtttttatgtgttttgtcatttgatctagcaagttattacagatattatccccagtcacagaagaagaaactgaggttcaataatgttaagtaattttaccttaaagtaagggcgggaacagaaattcttaacagagttgtgtggctctaacacccatgtacccttcaccacaacagatggcatgtttattatgtctatttgaaacataaattatgagcctgaaagtccaaatgttacctagagttaagaactattccttttctctagccaactcctgtaaggtacagagtcagagatatgacggtccctacagcaatgtggacgggaggtcagggctggctttccaatccagaagacgtgaaatgctgctcactgaggtacctactcatctaccatgggggtttcctgaatggctcatgtggattcaccggggttggaagacaagagcgcaatca

SEQ ID NO: 38702 - DNA, 529 bp, Homo Sapiens
tttagaagcactggcaatatcattatggagagtgaatgaagaaaggcaagcttttaagtgaccctgcactaactcgactctcagttatttctttcactgtaggcaaatacagatgacaacgaaatcattggaaatcaaactacctcaatgtcactagagccaaaaactgatatatgaatccttagcacgcagactaaacagtcttgaatgaaacacgtaaaagccgttagttcaccaagacacacggtgcagctgtcaggactgctttcaccagacccctcttgctctggaaaaacaaacttggctgctttgttctccgctcctgaatttctaatgtgagcgagggaagaatggcacatgaggaagacagagatgaatttaattggagcccatcatggggcgagccaactctcatataccccagacattagcaaacttgtcagggctttctttgtgtcttttcttatccttctaagaacattttgatatggacatagactgtgaaaccctgggagaagaaggttgtttc

SEQ ID NO: 38703 - DNA, 545 bp, Homo Sapiens
gtagagacagggtctcgcatatgtcacccacgcatggtctcaaactcacgggctcaagcaatcctcccatctttggcctcccaaagtactgagactacaaacatgagccatcttgcccagcccctagaacgtgttatcaaataaacaccgatgcaaccctcactcagccgagaagtaaaacattgccagccaatccctaaatgcttctgcttgccgcttcccaatcctaaccaatgccttctcctgacaattatgatggtcatgtctttgcatttctctaatgtttcccatcacgatcaaactagttttgttttgcctgtgtccaaactttgcataaattgagcagcatgtgtctgggtggaactggcttcttccactcaacattaatgataaggaggattgaccatttgggggcccataggtattgcccctggatttttcaatgctccagaggttcttacttcaacataccttaaaatttttgttaatctggaatgagagcggacctcgtgccgaaatctgggctcgagggcaaattccccaag

SEQ ID NO: 38704 - DNA, 514 bp, Homo Sapiens
ttttttgagaaaaggatttctttgagaaagccactatcgagcttacagagaaagttgtgctggaggcctggcctttcatctttgatgtctagttgacccccactattttccatgacagcagctgaaggtcaactcttaggagctcaagtagctgctgttacctgggaaggtaattgatgcgttgaattcccagcgttgcttcacccggttgtctttctcctcacagccttgagggcgtcgttaacaaggtgtgtgtccttggttctgtcagctggtttcctccggccctcaccccaaatgcatcttcctgttactaattctgcgtcgcatcttttcaccgtagtaaatcccagccactagtatgatggtaggctaagtcctgtgagtccctcaagtgcagtcaccaagcctagtgtgtgatggggatgcctcatggcttctgtgtggcaggagtccggggaagggactgctgaaactctgctcaaggtctcacagggtgaactcagagtgtcag

SEQ ID NO: 38705 - DNA, 486 bp, Homo Sapiens
ttgcattcaacagtatttattttgcacgtactgtgtactctgtgtccaccccgttctagtcaggggacgcagcagggacacagtccaccctcatgggactggacatctggaaggtgaggatgggtgacaaacacgtgaaccaggggcttaacctgcctgttggacagtctggctatttcagccgatgtgttcagctccagaaaatagaaactcagcccaaacagtcagggatcttactgggaagcccagaggcgggattcaggagaggtctgatcaagggtccggctccacatcttggtcctcctcttgggttccctcatggtgacaagacggctgccaggagcggctggagagccctggttctcgtcagcaagaaagagtgcgaaccacccgtctgcctaccggtaagatcaatgaagctctttctcagaacgcagtccttggccagggggctgagatgcccactcctgaaatgcgcctcgtgcc

SEQ ID NO: 38706 - DNA, 593 bp, Homo Sapiens
tatccaacaatgcttatttatacaatttaaatatgaaatcagccctcctcacagacaccccgtaagaacaccaagattgagaagctaaatccaggcctcatacatagtaagagcgagtgcttctgcctgccctactcctaacggcttctactagaaggctctggccacctggcaatggcgtttcagagccagggctttgggcaaggcatacctggagttggcttcaccagctgtccgctgtgcagacctgggctgaccccatcatctctgccctttccactgcttcagtcctccttactagaaaatggggcttgaaatgtcttcctcatgggattcaattagactatacacatgcatgtcaacatacacatatatggtagttagcacactgcccacaacatagtcagtgcctgcggaaggttagcccgtcccagctctggtggtagcaagagtcataactctctgaaataccttctcagcaatagttaaacactccgcgtgtgaggagcagacgggtgtgcttcggtcactacgcctggccttcgaatctctgcccctcccgggagcccaagctcagcagcatggaaggctct

SEQ ID NO: 38707 - DNA, 469 bp, Homo Sapiens
tatttgaaaacattattattaataatcttgtatactgtacatgtgcacttaaatgtaatagcaccaacattcattatattatgaaggggatactttataagaattataaattatttttacatgattaaataattttggcagagtaagtccgcagcatgtaaataaccagtcagccttagtatctacatctggaccaggaagcctttgtgttacagacacagattccctgtgaagttctccagggtgtaaagaaggccccatggaggtgccgacgggatgtgagggctgcctttcagctcaggcgagcctgcaagcaacagggcagtttttgaagggtcacaggcacaggaagggagcagtgggcaaccattgattacatcaaaccaggatggtttcttctttttaaagaaacttttgttgagtgtttacccacccccatccacacaaatatgctctctaggaaatgtga

SEQ ID NO: 38708 - DNA, 372 bp, Homo Sapiens
ttttcgcttgggaagccgccgcagaagcgattcccttggccacctccctgcctgagaagtcaaccgtccttgcctctgacccaggggctctgtcttctgttggcctccggggatctgtggccggttcaccccctagctggcgaacgtaggcgtttgaaccagagcaattccatcttgattgggagctgggtaaaatgaggctgaaatccactgggcagcatttccagacggtgggagctcagaccctgcccgtttgtgcacaggaagcacccaccgggctcctgaagtccacgcgagctcccttccctgagctccaggccaagcttggagttccctccgccccttagacctcaggccgactcggcttccaga

SEQ ID NO: 38709 - DNA, 492 bp, Homo Sapiens
gctttcttattattattttattgcagcaaattccagatgtgtctccaacgggaaaatatacaaccctcttgcctttgatgattattcttatgatttcaggcattaaagaggttatatacatcataaatgacatggcagacaaaatagttaaggaacacaaaactgttatgacaagattcatgggacacgtttaagtggaaagaggtgaatgtgggtgacactgtgaaggcctcgaatggggagctccttcctgcagacacagtcccgatgtgttcatatagcaacatctaatccggatagagagacaaatgtaagacacggcaggctttgcgagaaacagctgaaatgcaaacagaaaaccagctgttaggcctatctggaaaaatagaccgtgaagcacctgatcgtcattttcatggctgagcttccgcctaagtgggtaaaggcctgttccataagggcctgactgggcctgttaagagatacacagct

SEQ ID NO: 38710 - DNA, 486 bp, Homo Sapiens
ttggccttaaatggttctttatgtcataataatattttacaattatttagtaaaaaaagaaagcaaatggagagcggtctcttgggtacaggtgtgtatggccctttactggttctcttacttccaggcacaggaagctagggggcccctcatagctgctctccctggaaggacaccctccctggagtctcctcagttccccaattctgaggggggggtcccaccagctatctaatgcaggattccatcaaaaaagtcatcaggcgtaactccccgttatcccactagccccggcctatatgtcccactgccctagtaagtccaaacggtaccaccaggagtggggccccctagtccccaaaaccaaaactgtgtccacggtaagaggcagctgatgacagtggggggcactcagagtgcaggtgccacccccgtggtgaaccctccaagtgtactgctcccgctgcctctctggcccaagatgtc

SEQ ID NO: 38711 - DNA, 488 bp, Homo Sapiens
tgcaattcagtaaataatttaattcaacgcccattttccaggtatctgtaacagaaagcatcatactagacaaggtaaggcagagagaattccttaagtgctgcccttcagagtttacagtaaccaggagagagaggtatacaagcaagaggatgaaatacacgcaccaggagtaaagtgccttggaaacaagtggaaggtaaatccattctaactggaggagaggggaggacgaagaagaggaaattataaaaggctccttcgaggtatctgatctgagcctggtgggacaagcagaacttcaacaggcacaaaagaaatggataaggacattcccagcccccaggctggggacagcacaaggaaaggcacagaggctggcaggcaggaagccaatgtggggacacagtctgtgcagaggaatagaggaggcattacaagggcctgatgttgtcagcattaatttccccccttatttaaggagaaag

SEQ ID NO: 38712 - DNA, 492 bp, Homo Sapiens
tttttcactgtatgacatatttattcaatataaaatcctgaaggccactatctttatgtacaatatactcgcttctaaaaaattatcccttcaaccaaaatgtcccaaaagtgtaccgctttatactaatgcaggcatgcatatgaagaatagggaagctgaatatgttcatggttctcataacacggtttatgtaagactcaggaaaaagccattttcagtcccgtatccagcagtaactgatcattcgatgtggcggtgggatctgcctgcagtgctatgacaagttccgtatggatcagtgcatacgggtggcttgggggtctccgacagtcacagaagggggcttagtccaggaaaccctgcactgcaggaaaccctgtgttctcatcatctccgcaggtccacgggggcaggcactgaccaactgcaaaaggagatacggcctgaaattgtgaaagctgaccataccaagatttcggctcgtttttc

SEQ ID NO: 38713 - DNA, 483 bp, Homo Sapiens
tatttctttattctacttagtggggcaacagaaacttgcctgggggaaatgtttgatgaaatagcagatcgccaaagattgacataaccggccttgtcttgctgcttatcccgtactctctctttggctcatgctaggcatgtttttctccttgtacttatcgtggcttatgaccctgagtcgggcaagaccaccctagagtaacctgtgcatctagcagcagcagaattattgactggccttactgtactgttgcagcaggtcattgacatctagtactttcaagtttcatgcatccatcttacatcttgtggtacatattgacaacacctccagaatacctgttcctgtgagtggcatatacaatagccctttgcctaaaggtcaaaggcatttcaagggtaagattaggcgatagcacttgtcatgaatcgtagcataagtgttccattaccgtggagaactaattctgagtgccagtcc

SEQ ID NO: 38714 - DNA, 464 bp, Homo Sapiens
aaaattctttggattttttattggattcacataaagcaaagaacttactcacttggaccgagaatatattgtaatgttccataagtcataacttaaggaccgagaatatattgcaatgttccataagtcataatttaatgtgcagtaagaacccatgaagttgtctgaccaaaagtaacactcttctgttgggaaagattttacatccttttattctggatgaatcctgaattctagatgttgggtttaatgcttcacacaatggcacatttacaagaggtacaaaacacttattgagctttcagggccactgtaaggggcttgcagaatagcctctttgcaacccagagaattaatctgaatcctctatcctcaggcacagcctacctccaacttcaattttacaggagtagtttccccagagtccacatcccctccatttgcaggattaaggaagtgggaaa

SEQ ID NO: 38715 - DNA, 470 bp, Homo Sapiens
gtttctgcactctacattgttttaatgaaaataaaatgttattttaagaaaaaaggttttcttctgattttctgcacaaccagacgtttgtttgtttgctttaaaatgtttcaacaaaatcctggtttgtttcgaaatatgttggattagcatttaacacctcatcggtcactaaagcccagtcagttcaccagccccaacacagcctcgtgctaaaagaacatcagagcaaacagagctgggcctttaaaagtggcaaacaaatgccacacaccgcctaaagaaggggggtttggggttgggaggtttaatgcgaacttgggtccatatgaatttgaatggaatacagattgcgattacccagcagcaggtttcctaaagctaggtctctaatgtatttgcgcgttcatgggctttgtttcatgcgatgtggcgccattgatgcctaatgtttcgttcgctaagtgtga

SEQ ID NO: 38716 - DNA, 464 bp, Homo Sapiens
tggggaaccaaaactatactgttttgtttaatgtacttttcagtggattcgcaggtatcttttaaaaaaagaaaagagtaaaagttaattattcaagtgctactaaggttagcaaagaaaccatttggcattaattatggtgtgattagggaaatctctaagcaagatggcctgtcaaaatccattttcctgttgagggaagtgacctgggtttaaacacagcctgagaagaggcccccaaacactgcttttctctctttctgcttagtcataggaggaagcaaaaattcaacaacaacaacaaaatgaacgtgagccaacgttacccttgggtgtttgctctcccttgatgactctttgggaggagtgagattatgcacagatcaagatttaaaagtcactgctttagagtgccttatgaaccaacaagctctgttcaggacagggttcactgcctagttaga

SEQ ID NO: 38717 - DNA, 484 bp, Homo Sapiens
tttaaattagtcaaacattttattatagagtatatatttatatcaaaagcacaaaaacgtttattctgaaaaccaggaagattgtgatgttacagaagaagattcaataattccagtccatttctagggtactaagtgtctgatcacctcagcgaaaacaagatacaaatgaggccaaggtcacaggtctggccaccctgagtcccttcgcactatttggtttctcaagttgagacacgtattcccagtcccagttagccaccttccaagtgtttgctactagccttaatgggtacttagccaaagactacacccaaatataaccaaagcttatgttaagtcataagattaatccttcaataataaggatagcataattggctttgttacctaattctacataaacaaaatcatcaaatatcctggcataactgaaatgacttacagaggaagtagtaaagcttggaagttatctatttgtact

SEQ ID NO: 38718 - DNA, 595 bp, Homo Sapiens
tcgaattaagaaaattccgttagccttttctccatctcctctaattctggtagcatctttggacccctaacacttggcatctgctacttcagacaaacaaaccctatgtaaatgacaaagaaggggcctcccaaccttctccctgtgttactatttcagaagcactactcggggcacagtggtacaaatttcttatggccactagcatcttttttcattttcaaagtaatcatcaaacatctgggtcaattatacttaaattacagaagcacggaattttaggcaacaggcccctcattttacctcagagattaagtgacttgctcaacatcacacagcctagtaaatggaagtcttgcaaccaaacttgagccccattcctcagtgagtaatcctgagtgtgtgtacgacaagataaatacaaataatcgtgttgtgttctttaccgaagagaaaatgaggatcagcactctaaaatatcatttagctctatagggttccaggctattctggtcctgttttaagtgaataggaatttgtacattacataaacaaagccaaaattttcaaataaggaattaagacaaatgcagca

SEQ ID NO: 38719 - DNA, 457 bp, Homo Sapiens
gggggtaataactggaatttgataccagaagaagtccaaggtcaagttacagaggggaaagtggagaagacctcactggggccacctgctcaccaggactgacctgggctcttgttccccatgaccgtgatcataaatgatgatctcattttctttctctccgctctttcactttataccaagaggctgtcccaaaaccttgccattccacccctctgggcatacacatctgctggccctgggtgactgcagcaacctctggccaggggccctgcttcctcactctcttcctacatcttcagtagtgtttcccagaatctcacagggagcttctttaaagtacagatcctgattgggtaggtttgtggtggggccctagtatctcattttgaataagtgccctacctgactgcaatgactggccatgtagggaaaccctaatctgcaggctactgta

SEQ ID NO: 38720 - DNA, 362 bp, Homo Sapiens
ttttagttaataattgccttgtattttattttgttagttttcaatgcttctatgataattttcctcacattcccaaatagctctcaagtcaaaaaatgtaatataatgaaatctatcaaataaacaatcacctctctcaaattactgtctgtcattttgctccagcatgcattggatttctgcagagctgacatcctctgactttgagttgttgctatcctggaaagctgttgctcctctctgctgtattagatctctcgtttcttgggatgcacagcatctcctttcttggtttttatctgttatagtggaattcatcatccagtagtttcccgaaagaatgcattgatggttaatttgga

SEQ ID NO: 38721 - DNA, 481 bp, Homo Sapiens
gcactaaccgtcggtcgggtggattgaattcgccccctgcttgacctttccagacgcccgacagaaggctctctacgctccctctctcccttccttcactttctctccttcccgtgcactgggctgtccctcatcccggacccatcctcctccagccaagcccccgaggagcttcaccacctcgggaactgtgcgtccggccctcaactcactagaggaagccccctgaagagaatgggggtcggggagcactgcgacacaaccgtcgccggcatccctggcctctttcgcgccatccctctggcagaaaccactccttgaaggtgtaagggaggcgagtttcctttgtttagtcagttcgctcaagtctcttcccccacacaggcccagcgccggcagctcaaggatgcactcaccatgttggaaaggctaaccggtttccgagacggcgacacacaaccactcaggtcggtcttcgtgc

SEQ ID NO: 38722 - DNA, 367 bp, Homo Sapiens
tgttactctgctgttacataaggcataacaactgcaaaaggcgtttctgggactacagtcaatgattagcgaacactcaatagtggtccgactctctagatagcaatcactaggccaactgggcaccctctcacatgtacacaaatctgcatggataagtactaaagttttaaacttggacctgtgtacctcaatgtatctcccctttctagggtagcatgagatgacatgcacctgaatgtggcacaagcaacgcttgtgttctggcagcaacatgcgactgctatcacagagtgcagtgcattcctgaactaccaaggcaggaggcgtaagtgaatggttatcgaggacaggatgttggcaactt

SEQ ID NO: 38723 - DNA, 517 bp, Homo Sapiens
ttttttcaaaatacatgcaagttttatgttaaacagtttaagtattatttgtattcagagtcacttatttgggggagagcatcttcatatcagtttttcaggcatggcacctccaaaggtcatcatctgggcctgcatctctcccagaacagccaggtcttctgtgggtccatcagattatgaaacttcccttcttgcccgaatcccaaatctgactcccacggttcctaggtcccctccctttcactgccctggaagagtcctgcagagacctcaaggcagtgggccagcattgcttttaagttcatgcatggtacaaaccaccttaaatgcattccgggcatggcaggagacccatcagacttcctagagctgcctgtggtcaagattagaagaggaggcatcggcttggctgtgtcctacccttgagccaaagggggtgctgtctccactaacccacctggctctggtcccaaaccggggctcgaagccgcctcttggcacacctcaaagtggt

SEQ ID NO: 38724 - DNA, 367 bp, Homo Sapiens
aacgatattatagattgccgacaggatgcccatgacccaccagacagaatagaccatggtcccccgtgcattagagagcaatacagggaaacgttgacactaaccaatgaaaagcagacattgctacacaatccatggccacacggttcacaggggccaggttgttccaatagacccagtgcactagcttgctatccaagatctttacggagagcccttacttcaagaaggcaagcattaggcatcaatgggatttgagacatagcacaagattaagatgaactgggtgtctgtagggacaatgaacatcaggaagggccagttgaaactgtcacaatggccaagtctccacaaatgcagaaatgag

SEQ ID NO: 38725 - DNA, 484 bp, Homo Sapiens
accatgcctccgagacaagttcaaaccgtttcctcataagtcacatgacagtattaagaaagctaacattgattggtgcctgctaagtaccatcctacagtgttaagcacttaagaattttcccatttagtttattcttcacaacaatcctgttaggtagacagaattatcctagttttacagataaggaagctaaggctctgagaggttaaatatcttgcccaaatcacacaggtggtaagaggcagaagcagaatctgagcccgtttgtctgaatccaacacctgtgctctgtaagccactctgtttcactgccttctacttcacagaaatagtaaggatcccaagttgtaagggtcccgagtctggcatagagcgaggactcaatcagcgggagcattattatcatcacagtattgccattatctgcagcccaaggcctcatctctctccacgcccttggctaggatggtgttgccactgg

SEQ ID NO: 38726 - DNA, 411 bp, Homo Sapiens
attggcgggaacgacacaccaccgttcggcctcgggcacctgagggacaacccggagcgctccaggagcaccgcaagggcccaggcggagatctgctcgcgcaaacccccccgagagggcagcacgacgggccggcgggacggcacccccaccgccgcggaggggggccgcccgcaagtcgacaaccactggaggcgacacgcagggctgtctgccgcgtcagaggaccccgccggcccgccccgcgagcgcagaaggcgcgggcgggacgaggagttcgggccggggtccgcaccccacgccttcccacacgcaccgccggcggggggcaggaaggagagacgaggggacccccgcgggcggagcggagaaggacggtcccgttcgccacgaacgtccgcccctcgcccg

SEQ ID NO: 38727 - DNA, 460 bp, Homo Sapiens
atcatatacataaatcttttttatttgcattagaaaggcatcagttatttcaatgctacaatgtgtaattaagtaaatgtgttaatcatttggcttacccttacaatactgtattattccaagaatgaaagttctgattttaactaagccacaattcaatgttgagtacaagaaagtctacctctacctaagctgcctctatccctgacatggtcacaacctagagatcaagcagccagtttgtcagaggcattggaaccagagcaattccatcttgaagaggcagcaggtaaaatcaggcagagacctgttggctgcattcttagtagtcacaagatgtttagggttacaggaacagattaataacgttcactaaacaaacccaggacttaacagacccaggaaacattttgatgtcgctgtatctgttagtccaaactgcaccattttccctcgtgcc

SEQ ID NO: 38728 - DNA, 518 bp, Homo Sapiens
ctcaaaaacaatgtttattttaacacataaaatgtaccatctagcaccaatgcctgtaaataccagaattccatccggttactactctttggaacaagtatgattaaagtccttgacagattattgtatatgagcgaatggcttcataacataaaacagagagacacagaacagaaattcatttggtatatacatatagaactacatttgtagttattcaaaaacctttcactgcttcatgtaaacaataccagtatttttaagccagattttcctggaacatatacataaagtgcatgagccacgtaagtgcataagcctgaaactggtctttctattctcactccatgctcaaatgaaaaatctgtaaagatatcttttgttcctccaatcttctgatttgtcttcttagcaactcattacagtacaatttactggataaatcacctagatatgtatggtggaagaaaagaaaactttggccaaatagggtaccaggcaaatttccggtcttttaa

SEQ ID NO: 38729 - DNA, 527 bp, Homo Sapiens
gcctcatcagctggtgtgagaatgctctgcagaagcataaaaataaacacaggactcgatcggaagcctctccccgttagctctgccatggatgtgtggtctgggcaccggcctaacagcctggtgtcggatgtgatctgtgatggctgggacactcctggaggctgtccacacctccacaaacaccctcaaagttctttgagcacagaggctttacgttctccttcacagaacgtgttctatactggattttctgatggttcctgataagtgaggtagaaatacacaagacatttctggcacgtgagtgaactgaacagagtggttaggaacagggctctgggatgagcctggcctggccactccaagctatgtagccatgggcaaatcacactgtcactctgaccctcagtctcttcatctgcacatggagaaccctactccctacctccacgggtgtggttaattattaaattattttcatcctccaatgtaaagcaccttgcaaaattgcaaagagggaaagg

SEQ ID NO: 38730 - DNA, 488 bp, Homo Sapiens
catttggatgattcccttagagttccagctgcccatcagtctctggcttttatttgtagatttatctaaagtctactaggcagagcagcctttgaataaatgattgttgggtaaatgaggagcaaattagaaaactgtgtccaagttgacacttctattcttaaactaataaacttaatggtttatttaactgatggctgccagcttcactgagggcttagaaaggtggttaagaagcattcacatttacttttgttcccaaggttaattgttgggagcaattggggtttattatttttaaacacccttttgagatgttaacaacccacaataggcggctgattaacaactttttacaacaaagaaaaatcattctaacaaaaaactgtttagaatagacttagatactacctcatcttaaatattagaggtatcattttcccaggacaaaagcttcccttaaaaagcatctcaattctaagacttca

SEQ ID NO: 38731 - DNA, 377 bp, Homo Sapiens
aaaaatgagaattttttattcttgccttatttcgtagcaaacataaaaccatcctgattttaaaagccaacactgttctttctcctttttccttggatcacaagttcatacagagtcaagcaagtgccccaaagaaaaaccccaaaattgaaaacaagtgtattcccttcagaaaaatcaaagctagaatgtttagctattgaagtgttttcccccagactgagatcaagtgacttcactgcagtggctcaagagtggatgactccctccttccaaataaagcacttattgctaattagcaggccagagcgttagactggatctctcataattggagacttcaaagtgttcagaacttcaagcctggcctatgaagt

SEQ ID NO: 38732 - DNA, 374 bp, Homo Sapiens
gtgggtacatagtaggtgtatatatgagatttttgatacaggcatgcaatgtgtaataatcaaatcatggaagatggggtatccatcccctcaaacatttatcctttgtgtgagaaatgttatttcttgaacaattatttctgaggctaggaggacgatcccaaagctaggcccccctgctccctaggagggcaaaggagatgagctgctttaagatgcagaaaatcctgaagacctagaacctgctccttcctttcccacagctttccacactggagactgtgcagagacctagagaggctggggctgccttggggtctttgactatcacatggggaaagctcagaacctgcacagcccactctgcagctaaa

SEQ ID NO: 38733 - DNA, 403 bp, Homo Sapiens
ctacacattgaaacatttaatttttaaattgtagtctggaatacaattactatgctgtttagttattaatatacccagagatcaaaactaatgatatgattacaactgtttcatcaaaaaactaataaagtaatttttacccaatttaatcttacttgttttcttagcattacgctttaacaaagcaacatctctcctaagtcctctggccacagaggtagcttttagaggcccttggttttatcagagtcagcctcctttgcttcagacctgatctctcacctcaaccactaatattccttttatttcttagtataaattgtcgaggaaataatctagtgaggtaaagtttttatttaaattttagtatttaaaggttttacaggttgttgtaaacaagtcg

SEQ ID NO: 38734 - DNA, 454 bp, Homo Sapiens
ttagagtggttcatagattttaatgactcacagaaggatgtttgtcttctcacattagatgttcagatgtcccttgttcccttgctcccttgttcccttctctactcctactccccctatccgctccacagtcctggcaagagacaggtcaaggcggtactgctgcagccaaaatgcctgcaggggccacatggcttgcacggcgcctgttgcacaggtttcccaggtagcagtccctgtggcctggataagtcacggtctcccaccgactctgtctccacttgattgcaatgatgggcctgccacgccggcttggaatgtttggtgaataaaggcacctgggcctgaaagaaaggattgaaactggggttttgacttcctggcttaaggacttgcttcctggggcaaagcaaatgttgattccaggaggcccaaaggaattttaagccccctc

SEQ ID NO: 38735 - DNA, 519 bp, Homo Sapiens
taaaaaacaaaagaaccgtgcacctacttttccttgacatcgttaatactttagtccaagcaccattgtttctggtctggttactatgacagccattcagaacatgcagccatgcacgtgttattcctttccctatcaatcccctttcttttttgcagagagaaaattctctcaattacaaacctgatgtgtcactctctttagaacctgccaactaactccccattgccttaggatggctgaaaaatccttcactcacctctttctttcccacatccatctccgaccacctcattctccagacagaagccctagtcaattacaatgctcgccttttcaggctccacttggacatcacttctgggaagctttctgtgacctatccaaggtgcacctcccacagatcttctaacgatgtttgccacagcactttttatacatctacactgcaacgggttatttctttgtcaaactttctcactaggctgtgagttcttatagtgagggagtttcctcgtg

SEQ ID NO: 38736 - DNA, 415 bp, Homo Sapiens
tgctgggattacaggtgtgagacaccctgttacccactgtgcacttgacctgaactagctcccacactctcacctgctgggaaggaggatcaggccttccgttgaggtgcagccttctgtgtgtgggtaaaatacacccaacgctaggatagacctaagccagcgccctcatcaccttccctgccatctaactgaagcggtccatcagctaacctgtgggtcctcgggtgctgtgtgctatagcgcggtgggagagaggggaagagaaactctgggttgcatgctgctgggagctcttcccttttctctaccaaggacactcattttattctttttcccgaccaattccgaaggtcactactggcatagtacttgcagcacggctaaccgccaatctcaggagttggggccgggg

SEQ ID NO: 38737 - DNA, 514 bp, Homo Sapiens
ttagggcttatgatgattttataggaggtacagtgagcagaaaaactctccctctgtgagctgggcacgcggccctgatcctagcattgctgctgcttaaccatgtggtcacggacgactgacttcattctcctggctttagttcacagttctgttcaatgaggaggtggcaagaccttcctgtcccaacccttatttcctctttgtctctaaagtggactcccattaaggaagagagctgatggaaacctccttaggaagtgggaatttgagttgcaatatttcattgatttttgttgttgttgtttcaaattaagagtccattcactttcagctttccacaagagaaattaatatggccatgcttgcctatccaaactccagaaggaagcagctgctttcccatttctcctagccatatgccttcagaattaaacacagacaaaactgggattttagttagtctttaatataacgcaactttttaatgggaaacaagatgtaagtgcaaacc

SEQ ID NO: 38738 - DNA, 365 bp, Homo Sapiens
cccctccagtctgagatttctgtgtggctgatggagagtgtgatttgggcgtaggtcttatttgcaaacctgctcatgttctaagctttcttcaggtagtaccacctgtcatcgcttctgcatatgatttaaatggatttttgtttttataaaagtatcataaatttagagataaaatggaggggacccagctttctttacaatgtggatctacctcagttaaacagttgggtgctattactaagtctgtcaaattaaattggaaaaagtaaccaaacagtgagatacaactccacatgaaacttgaaattgtaatttccgtttatttaatgatatttttatttatttgtgccttttatgttgaa

SEQ ID NO: 38739 - DNA, 368 bp, Homo Sapiens
gagacggatttcactcttgttgcctaggctggaacaagattctatctctaaataaataaataaataccaattcgctgagggaagtttagatgctcaaagggcatgccaacattctgaaattgttaaaagaacatccaaagcacattcgattcctttattccttattcagaagctgaagactacactgaatttgggttagaacagcaagtttactgatcttccaaagaaatataaccttatagaaaaataatcaacaaaatagtgccaacatatggagattcctggagactgaagtttcagagtgtcagcctacacataggtagcactggtaagctctcccacttcactttttcccctgccaaaggtag

SEQ ID NO: 38740 - DNA, 374 bp, Homo Sapiens
taaatattcgtggggttttatttagggcttacatacaggggagggagtccataggtggcgggctggatagaattgtcttacatacagaaatggtcctgtggtgttgggctggacaacatatccgcatggcccggtggtggcaggctgggcaggaaaaccacaactgcctgcaaacatcatgcagtttatacagcattttcacttaacccctttccctaatgagcgacacctggcaactgtcatttaacccaaaacttaaggcctcaatcctctctacagcctgggtttcatgggatgggccagggctcagatgtctattatagataagaaacgaatctccgattggccactcccggattttctagctcgaaaca

SEQ ID NO: 38741 - DNA, 546 bp, Homo Sapiens
acttcctgagggcttctagtcattttagtcagatgtctcactttctccacttttattcctgagttttctcctgggatcctttttacggcagccttagggcctaatcctgggttggcagagaactagcactcactctcccctaatgggatccaggagagtcaagaggtggccaagtgtggaaatgtgttctctcctctctgtttcagcgggtctcttactcgaagtttcataaaaggattttaaggagaatagatttttttaaatctgtgctccagaatatcagatccctaactttgctaaactgctggttttaattaagtcctcaggcagcttctgagtacactgaaaacataattaccctgtttgaaaacagggtaaccaatattttgagcagccgactcaagcataagcacatatccaaggctggcttagcatttgggggaaagcctccacaggaaatacagaaatacaagaaaaaggaactccgaggcacaggtaaaactcctgaaattcgaacttataccctaaggagacaatgctttctgg

SEQ ID NO: 38742 - DNA, 515 bp, Homo Sapiens
cttattcaaaacaatattatttaatttaatattttcacctatgagaggtaatgaatgcagaaatatagtctccattatagcagacaggaaaaaatacattatcctactattttctagaaaaatgattgtggcattagcaaatcaaatggaaaaagtgaataagcagactgagattacctgaaaatagttagttgctagtaagattcagtacaatgtatgtttattaaataatcgctactagaacaaacatctgcgacaactatgaagttaggaaatgctgtattagcttgaacagtttatctgttggtcacattaataagtgactcagaaatattacaagtatggaaaggcatgatagtgaacaatgccacatgagtccattaagccaaaatagataagggccccaaattttggaacaggcccctttttccatgggtagataaatttgccctaaagggtaattcccaagaacgggggtttacttggaagggcttggaatttcccttaaaaaataa

SEQ ID NO: 38743 - DNA, 526 bp, Homo Sapiens
tacgtcgcccgggagcggcaccgccgtcgcgctcttatctgcgcgcgcccgggttcagtttcccggagagccgagggacggaggccagccccgcgcccacagcggcctggggccgagggagggcgggtcctggcgcggggtcaccgcctgggaccgtcgcccgggccgtgaggactggacgcccgcagatccgggcgggtggggccctctgacgtcccccgaggtgtggcacgggggcgggcgggtcccgctgcggcgtggagaggcgggcgcaggaccgagcgtcctgagcgcacccctcgcagcgctgtgcagcctggacggcgagctgtgggggcgatactaggcgctcaagaagcatgacggaggcggaaaggcagcagttcaggaactggagtttcctcgtggagaaacgcgtttgccgcccggtgtgggccttggaatggcgccaagtaggcgaagacccccgggagttgggcaagagggcaaagaagatcttgcttatgttggcgaaggagagacaccc

SEQ ID NO: 38744 - DNA, 429 bp, Homo Sapiens
tatgggttagagatttttatttctcagtatgaagccaaaagaagtctagtgattggtcagccaaattgttgacccagatacactaattccttcgacgattttctccatatctcagtaaattaaatagaatacagaaaaaagcatttcaaaacaattgacagccatcagtattactataatgtaatgaaacagtgaactatagtaatgacagtaatacttgataagcatctagggacttctccctcaaattgctcaaagcacacagagcaaacccttgttaaattgacagtggttaatacaaacacagcttaattcaaagcaggtgcttctcccaagcccacaagaaccccactttttcctttaacagcttaggaaaaattggcttatctacagtgtggagattcaacatgtgtttttaatctaatgaga

SEQ ID NO: 38745 - DNA, 465 bp, Homo Sapiens
aatgacagttaatggcaaaagggaaatttttagctataaggatctggaaaggcctgtgggaaataatgtgagcgaagaataggacttatctctgttttcacttataattttcaaaagtcatgaagtactaggcaaagtttccaaaatgcttctacttaatttaacctgattctccccgccacaccagcaaaatgctttttatgttggtacagtaagtttgcaaggtaatgatgaatacctgaattgcagaaattaggcctaaactctgatgacccttaatgtaaaccacattttaacgtgttgagggtcattatttgtatggcacaggtatatcgggaagaggatggatatactacccctgggagccatttcagtctctcccttacagatgcctcctatcacatgacaggcattttcaaagccctgtttttcccttgtctcaaatgatcatggtttatatttcac

SEQ ID NO: 38746 - DNA, 383 bp, Homo Sapiens
atgtgcttacttttaaacaataattttattctactggaatcagtgacagagaacagacatcttctcatttgggtatcatcgattctaacacaatatggcagagaagattatgactacgctaaaagtgtcttatttttcttccctccatttctttccggttttaacgggttatgaaattattgagttttttatgaagcacattaaggactggtatcagtagcaatatgttggtaatgatgacaattttcttagaaaggatggctgtaaatcacattttgttccaggtactgaaacactaacactgaaaacaagattgtaagcctccctgcagtatctcatctttgcaagtcacttctaatttttatgttgaacacagaagcaac

SEQ ID NO: 38747 - DNA, 460 bp, Homo Sapiens
tcaactattgttagtgttattctattttatgtggcccaagacaattcttcttccaatgtggcccagggaaaacaaaagatttgacacccctggcatcaactctgtgaagcaggaattttgcctggtaagaaaacggcccagcagggcctgcagtcccgacatcacaggttcacaagccaggcccagggcagggctggagagagggacgccagggccgcacacttctcaggggggaccctgcaaatgattcaggcttgagggtcacccagtctctgtcacagccactcaactctgcctacgcaacagccataaaagtgtcaaggaacaatcttaatttcaaaagtaagcagagctgagaagaaagtgacccagctgcactgagggatccccctgaggactggagtggcctgcgcagaccccagggcagaaaacacttgcactgcacattaaactgcataat

SEQ ID NO: 38748 - DNA, 431 bp, Homo Sapiens
gtttctgtgcttggtttattttacttaacataatgacctccaattccatccatgttgctgccaatgacaggatttcattcattcttatggctgaataatacattttctttagcctttcatctattgatgggcacttaggttgattccatgttttggctatcgtgaatactgctgcaataaacatgggagtgcaggtatctttttgatacattgatttctttccttttggagatatatatatacccagtagtggaactgctggagcatagttctgtttttagttttttgaggaacctctgtagtcttccacagtggctgtaccaatttacattcccaacagtgtaccaggcagggctctcctttttccacatcctcactagcattcattctttcttcttgataaaagtaatgaattggggtgagatgttatc

SEQ ID NO: 38749 - DNA, 406 bp, Homo Sapiens
ttagagtagttttagcaaaattgaatggaaggtacggagattcccatgtacccctgtctcctccatcatcaacattctgcaccagagcagtgcatttattacaactgatgaacctatttgatgcatcattgtcactcagagtccatagtttacagtagggttcactcttggtgttgtacattctgtggatttggacgaatgtatagtgacgcatatccaccattattgtatcatacagaacagtttcacagccctaaaagtggggagattggcctcagttcgcctacctaagagactaaatgacttacccatatatggttgcctccatatgaagagcagtgagaaccgccggccgctggtgtgtctcaaatgcctgtgaacagtgaaatcctcacttggatggtgg

SEQ ID NO: 38750 - DNA, 465 bp, Homo Sapiens
tttttttcttttaaaaagttttaatatatgcacaattgagtacaatatcattctaggaacttataaaactcctatcaaaataccatggttcagagacagtagcaaataaaataatacataatgataaaacaggaaatatttatatattgctttcttcctcatttataatcgtcttttctttttaatgaattttgattgagactgctacgtgacaagttgtctgggcttccctaatcttctctagtcatttcttttggagttagaatgacattaattccagatgaaaataaatattatctctcttcgcactgtgcctagcacgtagtaagtataagaataagcttccaatttaaatgaagaacctgacacatggggcaaaactaatgatgatcataatcatttaccatgtcctaagagattactatatagacatcatgaactggctatcataatacaggtcattgc

SEQ ID NO: 38751 - DNA, 372 bp, Homo Sapiens
tttttcagattttaggcgcttcacattcctgtcctattttatttacagtcaaaaacaatgttgttcgatgggcaggaaaaccaattcagcctttgcacaatgatcccctagagatcagaatccaggggagtattcagattttactacagaacatgtggtcaggtgtagacactggaagaataacagagtggattgatttccacggtgctgagtccaatgctagaggggaagtggggtctgggattgggatgagggatttggaaggatggggtgggtagagtagaaactttaacagagctcatgctttttttccctgcagacttctgaatgaacagtgaatctattactgagaaaaaccaggggtggcctgtg

SEQ ID NO: 38752 - DNA, 377 bp, Homo Sapiens
tctttcaatttactgaagaaaccagatcatttgtagaatttaccatttattgaattttgcctattggatacttagggtagtttatgttctatcctttatcttacactagtagtcaaaactatgcttccttttaaatgggaatgtgacttgagcttaactttgtttagatttctcttctcttacactgaaaaatcttggttcttgataacaccaacatagttgcctatttgtgctttatatactatgaaacataaagtaaatttataaaatatatactatgcattagtattaataatctaaaacgtttccacatatttaaatattttacaacattattactactaacaatatgatgactaaaaacagttttaagattt

SEQ ID NO: 38753 - DNA, 381 bp, Homo Sapiens
tacccacttgggcacagtcgaactgtccttgaggtctcttaacactagtcgtatggttctcaattgatttggacgggattagcttgggcagatgacgatgggataagagtctctacccccacctgttcaaacttcacacatatcccgtcctggctgaacaaaacacagtatggaatcgaatacaccagagctctgtggggataaagcagaacagcactcatcgcactgctggaagccggagggtactaggcccctcgtgtagtagtgcatacaactcatagcatacatcctccttgcacatgtatattgggctcagagactaccctgagtctcaatgtgaagacggacagttagcatttaccagcatgtatctgtctactt

SEQ ID NO: 38754 - DNA, 469 bp, Homo Sapiens
tttttgcatcagagaaagagtttaatgattacaggcttctgagtgaggagacaggagcaaaccttcaaattcatcattccagagagttctgggctacagtttttaaggggattgtggagggtgagaggctggaaaattggagaaattgatcagttggggtagggagatgaaatcatcaggatgtggaaactgcattttctggtgactcaccttctcatgggatcctgcagaacagctgacatgagtagttttactggcatgcaggacctctcgcttagtggacagacgactggagccggagacttccatccgagaagacctttgagagtgtcagcctactgctgtcccctggtgccaccaaccaaagttccaagactgctggctgcagatggcatgcgcttggggacagacgccctgagactgtgtccacggcccgcctttggaatcctgggccctgaaacttcctctg

SEQ ID NO: 38755 - DNA, 447 bp, Homo Sapiens
caaagtaagtaaactacagaaacggagcgtagagcgtagaagaagacatgctggaaaagacagagaaatataagaaaaatatgtgtcattgttccacgatatttagccttgtcctaatggctgcgcagacgaagagattagagtttttattttaaaaactgtgaatttaagcatcaatgatgctgtttctatgatcattccctgtgattgaaaccaaatggtgaaacagcctcacgaaaatgtctgaggttcaaatacagtcgccattctgtgtttgtgtagacaatgctgccctctcgtggctaacttctgaatagaattattttgtgtttaaaatcagaacatttttacgttctctattttcccgaagtattctgtagaatgttgcatccatttgcatcgcatatgtgataataagtacataacttacatagcacaacacctttg

SEQ ID NO: 38756 - DNA, 395 bp, Homo Sapiens
aacgttttaactgaaaacattttatgccagtatttcaattgctaatatactggtaatagtgggtacaaacagggtaggattttttaaaaggcagttctataaataatgagcaagtaaataactgaaagacaaagaataaagcatcttaccaaactagcagccccagaagacaacctctaggccagccaacaccagtttacttttcttccagcgttagtcctcagccagaggcatgtgaggctaccagataataagcatcagcagaggtgcttatggattttgattcttagttttcattctacagattaccactctaaaactttctccatttctcctccaaaaatggttccagcagttaaaaaataatccttagcttctggaaagacattttcccc

SEQ ID NO: 38757 - DNA, 395 bp, Homo Sapiens
agcttatacaatgcatcctgttttataattgttttccaacaatgtttacataatgtgagggtcactctttaacatgaggggctctgtcactagaattgcagtgtgttagcccctcattttctccagtgtttttgtaaatctttccattgacaatcttttaataatttccaaaacaatcgggggtaatgttcgaattctaagttcttgtcataaatgaatcaatccagttggcaggagatggatgtactctttttgctggtgttccgtgctaagaaaagcacacacatttttcttgagagtatggctagccgaaaagcatctgagaattgatggaatcttattcatgttgtctcaggctgtccaggttggtaacaggtaactgctataaagggtgg

SEQ ID NO: 38758 - DNA, 393 bp, Homo Sapiens
ccttctatcttgttagagacatacacctaacacctagaagagagcctggcacagaagatatactccaaacttgtcaccctaggaatggctgagtaaattattgagaaatgaataaataaccgaagctcattcaggcctcaaaaggggtacatgtgcacgattttataacatcaaaccgatgtccccaacatcagcctgttgctactctgctttattgatcaaatgatggtcgcttaagccatgaccgcctcattctggaaactaggcccttcagagaacccctccctaggttgtttgtgagtttcctaaggggtcctccatgtggcacatgccagtctcctgcctcattcctcatgtggcatcttctccattctccctctccatcccttggtg

SEQ ID NO: 38759 - DNA, 422 bp, Homo Sapiens
gagttttaacactttatttcatgttgcctttgtttcataaaatgagaagaaaaaggagaacgcaactgcaaactgtggtcagagcaggagcctggggcaggtgggacgaaaggggtcgctgctggctctggaggctgacactagtcagctgtctgtccctgagtccagggtacatggtgagggagcaagccactgtgggccagctgcagagggacacgcagagggacacgcagagggacccgcagacggcgtcaggacagaacagaggtggggctggggcgctggccggggcctcactcacccataaactcaaacaccaggtaaatgtccctgtcgttctctgcccggatcacgtcaaggaggctgatgatgttgggatggtccccaaactcctggggagagagtcggaggcggctggaagg

SEQ ID NO: 38760 - DNA, 464 bp, Homo Sapiens
ttaaaacctttgtttattcacttaataaatttaccataaaatctttgtcttaaaatgacttatttcgtgatcacatactattccatcccatgaatcaatcagccaatctccccttttgttggaaatttaggttgtttccaattctaaccctgttataaagaatgctttctgcacatacttagtcatttccttgggggacatgtacaaactggaattgctgagccagagctgctagcttggaaacacttactgagcactatgggagtcactgttctaaaacacctgacagacatgaactcatcctgtcaacagcacaaagagagaggtactgttctcattcccttaccacaggacaattttcaaaggtttccaaaacatgagccaacatattctcactaaagactctcacggcccactccagcacctcactggtgtcacgtgcacacagatctaccccaccatgt

SEQ ID NO: 38761 - DNA, 389 bp, Homo Sapiens
gccaaacatgacaaatttatttgaaagtgggcattgcaatgtagaatatggtgtcatagtaaactataggtgtattcaaggaggtaaaggaagataaggggtttaaaaggaaaaacgaggaggattacgtaagttgttttgaaacaattatccttggctacaaagatcagtaacaaaggggatggccagtccaaggttggacaggcagttgctgcgcaaatgtccttgaagcatttttttgtgtagttttgtggccttgtgcaaggttgtggtttaggcagtcttttgtgctaattctttatatcaggcaattattagtgagaactttcccatcacggctttccctgactccattctctgacagctttcacaatctagagacagaatcc

SEQ ID NO: 38762 - DNA, 459 bp, Homo Sapiens
tttttagatggataagcagcagaatttattgggtgaaaaggaaaaacaactctcagcaaagcaagagggaatcttgaacaccaggcaaccacacaggaactgaagatgccaggctcctcccttctgcgcaaagtgtaaatgttccagtggctccaccccacccttccagtgtgcaggtgggtccctagtccattgcaggcatacacatacaatgccctgggtaggttccctcatctgcctcctgcatctatcattttgcacctaaagaagtacatctaactgccgttagaataaagataaggatgaagaccaatcttaactgcttcctgctgacagagggtactgttttcagaaaacagcagtctgatctccctcaggggcctatgaaagggttcctggcaaaaaaggttattgtttgaggctccagtctggttgcgtgatggtttggagtttgatggc

SEQ ID NO: 38763 - DNA, 384 bp, Homo Sapiens
gctgccagagaggctgaccggccctcatggctcttgacggtatgtgcaagagtttgcctggcgtggaggggggtgttgctggccaggaactttcttgccatcgtctttcttggtgtctgtctcccctgggttctctggaccctgtcaagcctgtatgctgagggtatgctgctaccaggtggcaaggtgtctcaggcactccttcagggtgagcagtcagctcctgctgctgccagggcagaggtgcagagagcggggagcagctaggtggtgccgtcaacccacagcaaaccccccgccctccagccctgcccctgacacacccccgatggcctggcggacgatcccaccagcccagcaagagggctcctctcctcacctgcc

SEQ ID NO: 38764 - DNA, 482 bp, Homo Sapiens
ggagagggtaagtaatttactcaaggtcacagagcataaccacttattactaagtgattcttgttagggtcaaaccttggagcagaactttgaaccctgtaagtctgactcctgagcaggtgttcttgtccatcctgtttgtaactgcattgtgggactcccttcccctacccccacctcaggaaggggagtggcattgtgcctctccactcaccgactctggtggaaggccatttgtccctgaaagggggatggaggctggctgcaggctgcctgcagagccagaccccaagcactgaggacacatcagtgtccagtggtccagtgatcagggagcattgagaagaaaaacaggcgagggtggtcataggggcccctcctggattgagtaccaggcctcaccccacccttggtttcccagactccacataaacccccaggaagggtccgattcctcctgtgtggctaagactgagttctcg

SEQ ID NO: 38765 - DNA, 407 bp, Homo Sapiens
ttgtactccaataataatttttaattaaacgagaggcataccataagaattaaaaaaagcctactaaacttctggttttagggaattacaagctttacacttctgcaaagatgtgttttagtaaatgcaagacgaagcactgaccaactatcatcacacatcagaatccttccaacaaaaaacccaggactgaatttaaggaaaacaaaataaacgacacacggggaaaaaataatgtcttgccacggtaccgcagcggctggatagcctgcttgtgaaatgctaatgccacttcggagcagttagtcaccagctattgtgtagggcaggagaaagccgagccggccgcgcgtgcagagcgagcaagcgaacgagcgagcgcgctctccctcttcgcgccgctcccg

SEQ ID NO: 38766 - DNA, 589 bp, Homo Sapiens
gaacattttattcctcaggacgctaaacgctcaatttcctgggggaagggtcaggagatcgggttctgtttcccgggaaaaagggaaccttggaaaccggataaaagccccctcgggagggttcccggggatccgccggacgcaggcaaaggagcaagttcccccagcccaaaaatggcatgcccgggcccaaggttaaaggacttttttgttcccaaaaagcgccccgtgacgctttccttttgggttttggggaaagttatgtacctgggagcccttcgagcctgtgccaaccttgcaatcatatggggtggttaagggtacattaaagggtaaaacaggcgtgtccacgaagaaacgaaaggggtctaaaaaggattcctcgggggacacgaaaaaagggttaaaatcctcaaagccttcaaactctgatgggccgatccttttatggcatcctaacagctcggggtcatatgaaggggcccgctgttaaatggtgtgtacactgtttccagaccgtaatcgctcgtaatatttggctgaatggaggacaccctgtttttcccaaaaatcccagttattgtgggaa

SEQ ID NO: 38767 - DNA, 447 bp, Homo Sapiens
gctgcaaatgctattattttattcctcgttagggctgagtagtatgcattggtatatatatgccacattttctttttccactcattagctgaggggcattaggctgcttccatatttttgcaattgcaaattgtgctgctataaacatgtgtgtgcaagtgtcttacacatataatttctttttcttcatgtagatacgcagtagtagaattgcttaatcaaatggtagctttacttttatttaatgaatctccatactgtttttcatagtggttgtactagtttacatacccaccagcagtgaaaaagtattcttttttcaccacagccacgccaacatgtattattttttgatgttttaatcatggccggttttgcaggaatatattggtttggttcacaaaggcgggacaactcaaagcgggcggcttccaggtaaatttaaat

SEQ ID NO: 38768 - DNA, 437 bp, Homo Sapiens
tttaatgtattaatacatgtatttaaaaatcagacaaaaagaacgtacaaaacttttcccatacatttacttgtgtatagttggtctgtttattaaagcaacaaggcataataaaaacaaaacaagtttggggtcagaaaaaatacagtttataccctggtactgcaacctcctagctgtgcaaacttagacaaatcagactccataaatcttaattttcacctttgtaaaagagaaataacggtacttacttgaaggattgtgaggaccaaatgaaaaactgaatacaaagcaccataacaagcagagtgcattattaggcacaatatacacagtaactatgtactgtaattattttcatttgttttgaaaggatgacgaaatacactttataacaagtgtacttaactttattcctaatccaacaccaagagatg

SEQ ID NO: 38769 - DNA, 432 bp, Homo Sapiens
caattttaaaaatagatttattcaagaatgacatttctctcaagaaaaatgttaaattgtagacatatagctgccttcattgctatactgtgcaaacatcgaggatgacttttggtgtatctctgttgccgtgtttattgaatctataaaaacaacaagcatctctcctctcccctaagctcaccaggcttttctttgaagtcacctctctcccccaccaatctttgactactaaattcagagatggtcctttgctgtttgaagctctgaattactacttatagacagtatttcttctcagtcaattcctacccacaaaccatccatcttaagcggcatcagtacctcctcctcaatcacttttcacacatgttctaccctagaagtcagctacgtatagaaggtaataatacatgaataggaactggtttc

SEQ ID NO: 38770 - DNA, 376 bp, Homo Sapiens
ttaactccatttgtcttggaattttaacattaagtttgttcgctattctgtctctctttctccctcctctgtcaccctccctccctttcttcttctctctctcctcattttccttgctgcctgacatttctttctcaaaagctaggagagccaagccctccagcgcatctcacccgaccctgtgccagggtccatttcaggatgggggcgagggaatgaggacagagggtcggggtgccctaggaaggtcctggggatgagggctcaggctgctgggaagagtcgcccacttgcctagcaaggcagagggaatggccgggctcatctttgaatggcaaaagtgcagcgtttcccacttgctcacactctatattta

SEQ ID NO: 38771 - DNA, 415 bp, Homo Sapiens
ctttgaagggaggagaacagagaaagacaccgtcaagccggttccagcagcccagggcttcagagcaccgggcccgtgggtctcccttggaccacagcctctcacctggattttctaagatgcactcaactctgcccatcccatactccccccagtccatgtgaaaataatagatagttgtaagacagctctctgggtgggtctgctttagtttttatttccccactaagcctggcttttaaaataccttctcaacccctaccccattatggagcccaagagtctgcacttttcccattagcaggtgagtcagaagtggagacttcaatctcccatgcctactgcgtttccacatgttgtggggacctcctaccccaaggccccacctccaggaggcacgcaggctgcacagggg

SEQ ID NO: 38772 - DNA, 517 bp, Homo Sapiens
aactattcaagtctttggaatccagatgaataattcagttgtttttattctctttgatgatagacagagtttgcttaatactttgcctcgttttcccattcagtaatttggaaatgtaaggacctgctggttgattcagtaattaattgtgtgattaaacactgaaaataatccataatttttgaagtaaaatggcatttctgttttgtacttatgatctgcaatagctcttatgaatgtgttatctttatttcaagtagtttttaactcctcctcaaccagaaactattaactttcattttaatcttggtgttatatactcatcctttcctctctcttctcctttttttggtgccatttggccacatgaacatatatactccccttgcttactttttcactacattttacctaaggtttcatgaagactgattggaatctgatcagatgtattttgttttcagattcttgccagctctcattactgcagttctgaccaatcatcttgcctgggttc

SEQ ID NO: 38773 - DNA, 436 bp, Homo Sapiens
tgaatatgttaatttttattcattgctaggtgaatgtaaagcaaagttttatttgcatttttaccaaatctggagacattccagatggtctgacttaaaacgttgccatggaatagaaatgatgtttagtctggtgattggcagtagcaccgcaaagagataagcaggtatccttcccagcagttgtggatattgattggctaagaagctgctttgcacatggcaagtctacatagtgtgcttcagggtgaacagcagcagggagttataaatgcagagatggataattattttcttgagccatgatgggttggttcactagttcataagtttgaataatcaatgtttgatactccacactctgatggctgaagagtcaaaatttgaattttccaatttatcattaaggagaaatgtcaggagaaagtcaagtggt

SEQ ID NO: 38774 - DNA, 404 bp, Homo Sapiens
ggggatggtgttaaaataacctgtattttattagacttttgatatcaaaatgttatcgtctttttttggacatcacttaccactacgctttattgtaaggcaggcactgttaaaactttatatttttttctgcgtaggtaggtaagatcacttgctgttttttatagaaaaggagcatgaatcagttatttttgtaaagtctaactccatgatattataatacgactgtctggataactgggataccaatgacaggcaaattaatttaagtatttagtctccaaaaatcaggtccagcctggagcaaggtataaaccaagtaaaatactaacattagttagtgggtgtaagggatgggatagggatggttggtggggcagtgactattaagggtgttcttaatg

SEQ ID NO: 38775 - DNA, 404 bp, Homo Sapiens
ataatgataatttttatacttttattacttagaaaataatttatatttttccatcatttaaacaaagagtaggcctgagtctcatgccttttgcacagcttttaccttcaaagaaagttatctgggtaagataggcaggaaatatggggaaactgcaaattaacagtctacatacatctaatatgaacagtctgtaagatattccttttcttttgttttactgggattgcaacggaaagatttgttctggtattcaaccaaaatagacagaatcgggaattctatttttaggaagtaaatactttcttgaacataatatgagaaaatttcttcattcatcagatgaagactaatatagatatatccctgtacagagctactgtcttcatcttttattgagagcc

SEQ ID NO: 38776 - DNA, 461 bp, Homo Sapiens
ttacgatttaggtagattattttatattatacaaacttacagcttatttcattttgggcaaatgaccacaccaaataatattacataagcaaacttggatttttttagatagctactatagaacaaatgaaaaattcaggcattatgttttatagcttttagcttttttgttgcatagtcagcaacaaataactattagtgctgccaatgcccacttatcagtgttgtctgtcaccaatttctaatggttccacagcttaatatggtctggtgagtaaaatgaaaccacaatttaggtaactatacacaatctaatttaaaaaacaatggggcaaaattattgttgtaaaacaatttttttcttaatgttgactaatctcaagaaacaagtaatttagaaaagtactttaggaatatgcagatgttaaatttgttcattatgttgacatgccaactttgtt

SEQ ID NO: 38777 - DNA, 521 bp, Homo Sapiens
gactttaaaaattatatttttaattatagaatattgttagaataatacaaacactaggataactgtgaccaataccataaggaaaactgttctacatattgatttgttcattaattctccacaaccatagaaaacaggcacaaagtgttcacgggatgtgcagaggcagccagggacttgggagcagaaggcatgcaaatagcattagtgaagggagtctgatgcatgagttctatacaaagttcaacacagcaaacgggcaacaattggcagaaagaggagacagctggtgtggcccttgtcctttaagtttcccagctagattgttcatgtatggagatagctgggtgcttagaagccttgttttaagcccttcacctccaagaagccaaaagcagcagcaggaactggttggggtggggcaagaacagtagggaaggaaaagggggtgaaatacagttaggtcatggaaatgcggtcatctatggccactcccaagctgatacccatagtggctcaca

SEQ ID NO: 38778 - DNA, 419 bp, Homo Sapiens
aatgttaacattgagagtcattacggctaaagctttgccttcatcacatagctaaaaagaaggttgagctggaacttaggatactttaaagcatttcctgtttaggtattaggctgatagagaatcatgtgtaactggggtcagcattcctataattttttgagccaaagacagaatacacactttaccctgacaggtttcttccagaatttaggacagctgatgaaatgaaaagacacacacccaagccaagagtgcaaaaggatgtagtagcatgattccaccaaccaaatgcctcataccctcagacgtcccaaatccagtggtgagcaggtaaatttttaacaacaatctttctttgtgaggaaaaaagttcctgatttccataatgtaaatactttcactgactggtttgaagc

SEQ ID NO: 38779 - DNA, 353 bp, Homo Sapiens
ttaccattggatgatttttaattagatgtaaaggctggcatattagccataaatttcatttcaggagcataaagggagcaacagcaagcattatgaaaaggcagctttgggtctgaggggtggagaatgatggcctagagttgccccatggaaagcggtggggagcatgggctctgcagtccagtccaggccactacttgcagccatgtgactccacaggcactgcttaacctcgctgagcctcacttccttcttggcaaatgtgagccacgctacaaactgcacagggttcctgggaagactgaagggcggagtgtgcatagcatttggcagagtgccaggtgccagaaagg

SEQ ID NO: 38780 - DNA, 383 bp, Homo Sapiens
ccagcatatattgttgcacgagcctgttgcagtcctgatgggatcctctggcagaggtgtgtgtcgtgagctaagtgaccactgcagtgaagggcacgcagacgaggctgtcgtcagtaggctcctatccagatgatacgtgtgatggacgcgcctcagcctcactccaaggcagcttgggttgccaggggaattcacgggttctggcattagtagtcccagtgctaagcaattagccttgaggatgtggctgattacggtactgactagttagccgtatgagtctgtgcctgccattcctctcagacacatctgagttcaaatcctgtatgtgtagcctcgtgccgtatctgcgttccgtcagatcccatgcgagctcatct

SEQ ID NO: 38781 - DNA, 459 bp, Homo Sapiens
gtgcggtaaaacagtttattttcctttgggtatatacccagtaatggattgctgggtcgaatggcagttctaagttcttggaaaaatctccaaactgctttccacagtggctcgactaatctagattcccactaacagtgtataagtgttcccttttatctgcagcctcaccggcatctctacttcatagagaacgtgaaaaagaatagtggctagaaatgttcccacagatgtaggcctttgtactatcaacctccatgccttttgaaaaagtagaacatctgcaacataatgtaacctttcattgatgagtcagggtcaataatgtgaagctaaattattgtataaagctgaggatgctgatgaaaatgcagattataactgaattaggatgcatgatattggataagctgtctgatttactcagactattttcatatttgtaaaataaagataata

SEQ ID NO: 38782 - DNA, 465 bp, Homo Sapiens
agacacagtataactctgtcacccaggctgcagtatgaattcatttaacttacgagtaacattttcactttgaaatttcaccgccaggtttttaaaaacttccggccagactttgttccctgctctagtccaatgacaaactaaccaaaattttaaatgagtaacaattctatttcaaccacattcatttaataaaggttttttgttttgttttgcacacctagtatgtactggggatgcaatgcaaagcaaaaataaataaataaataacaggtctgggcttgacctcctgggactcacagccagcccagtgaggaagacgggcattaaacatgtaaagacaaacataacgtgtaattaaatattatgataactgctatgaagctttgccaagcaggaataacaagcggcctagtttacattcaggacagtccagaagggcctctttgaggacttgacatttag

SEQ ID NO: 38783 - DNA, 411 bp, Homo Sapiens
catgaagtaaacgtttttattttataatccatagtatacaacaagcccaaaacttaaaaacagaacttttaaagcttacatcccactaatattcaattatatttaaatttagaataccactaaaactctctctctttcatacctgaattcatggatcatactttgttctaaaccatgagatactaacagtgctcatagactatacaaaactgttaacttagataattctttgaaattccagtcatgaattcttaaaagaatgcatggcttgcaaacttaacttaaaaaaagatcctcctagttttaaggactgagagatttattagtcgactaagcttgtctactcagtagaaaagagaaaacataggggaaagagttggagcaatgctggattcaaggagcagaaaatgc

SEQ ID NO: 38784 - DNA, 427 bp, Homo Sapiens
gaaattgacactttatttttaagccctattacaaaaaatttccccccccattcccagggatacccaactattatagattattagctaacaaaacaaaaaccagtgaaaggtgtaaaaaagttcaagttcagtaagaagccaagttttctagagacaattcctgggttcaatttccaatggctttgttagattcattggatagggaaaactttagattcgaagggtccactgtccaaaaggtttgggcaaaatcttaaaatggtcgggcaatggagaatttcccccggggaacaatttttttggggacacatggggtccaggcccttggattcaagtaaagaggagctcactttaacttggaaactggaaaagggcttgatggtttgcaagaatttaaaacctggcaaggagaaaaaggctgttgatg

SEQ ID NO: 38785 - DNA, 422 bp, Homo Sapiens
tgcttggaacagccacagcgactctccaaatcatgacactcaaaatgccacttctaaaaagaacatcagggttggtgcctctgcttcttctgaattgacctcccttctctgccctcttctgactcgtcctcccttctcttttggatgtaattctttccagcctccacactcctttgacagaagatgaaaaatttgtatctctgaatcctatatctgcttgtctatgatctaaatactttttgagtcaacaaggtgaacatattcctcatatttcgttatggaatgtttaaaacgtctaaaatacacactgccactgagaaagtaaattcatgcacctacaaagagaaaggaaaggacagccatccaccatttgactactgagtttccacctgcacccttcgacacttattagaactttcatg

SEQ ID NO: 38786 - DNA, 374 bp, Homo Sapiens
ttaagatggtagtcttgctatgttgctcaggctagccttcaactcctggcctcatgccacctgagcctcccaagtagctgggactaaaggtgttcatcaccaagtaagccactgcacccagcatgcttcttttaagtgtttgacagaattcaccaatggagacacctgggcctaggcttctctttgtaggaagatttttaattactaattcattttaactgttataaggtctcattttctatttcctctagagtcagttttgatcatctgtatctaggaatttgtccatttcatctaagttgtctaatttggtgagataaagttgatcatggcaaatcccttataatcctttcaatttctgtgggtaataatgt

SEQ ID NO: 38787 - DNA, 377 bp, Homo Sapiens
ggtttactctatcttcattgtcagatcctatagccatcacatactacaatctccctactctagttgactgaacctcattctctaaatttcttagggaaaactcctgggaacaatattttctgagttctttaattgctaatagctgcttgctatgccctttatacttgaaagccagttctgcttaatacgaagtccttggatcatatgtgctttccttgatatctgaaacatggtagtccatgttctcctggcataaagcattactatcagtgtaagaacataattttattctcctaatgatataaaggtcatgtttttgttttttgcctaaatacctaaaaaatgttttctttttctttaacatccgtattttgatg

SEQ ID NO: 38788 - DNA, 381 bp, Homo Sapiens
taaattatcagtcaaaattttattagtaataagtggtgggactggtttacacatagtgtgtgacaatggtaacaaaagtggcagcaaggaactcagcactcactcaacacgtctaataaataaagcttagtgattcattaaatattgacactgtgaaggatcaaaaattctaacacttccagagatcttaaattgatatctttcagataagccaaatattctagataagtaagaaactgcatgccaataccatattctaaaggaattaccttggaaaattaatggtttcactgtgtgcaaaattgcatgattccaaaatatgatatgttctccaataataatagaaaatattagcctaccattttgccatcattttggctg

SEQ ID NO: 38789 - DNA, 397 bp, Homo Sapiens
gggaaaaaacgggccccatttcaaaaatttttaggggaattaattctaggccgaggggcataaaactgggttttcccccaaaaatttcagagcattacccgtgttaaacccccggtccgttgccggtgaaaatggtttggtttaaacccccgggaattccaccctttttaaagcctaatttggggacagccctaggtgcaaaagcgccctgggagggaatttttttacaaagggggacgtcaaccgggggtacaacccgattttgaacgtaaaagattccacagtcccccggttccagaaaaatagggggggtgattgaagagttaaaaattagccccccctaaagggtgtaccccgaggttcgtaacaatggtggcccattgattttatagataag

SEQ ID NO: 38790 - DNA, 452 bp, Homo Sapiens
tttcctcacaagtttgacttaaactgtatgacttctttacccagaagcgagccgacttcagttctcattttgaagtcactgagtggtaccgattctagtgaggaatttcttactacaacattgaacactcagtaagggatttgctattttgttaaccactcaagtttcagatggtgatttgagggcagaatacaggcagaaacgactgtaagctgtcaggccatccttggccctctggggagcactggagtgtggcctctgctcatcctgttagggtttcaagtacctgtattatgtggaaaggtcacaaggccagagacccagcacctagatgtgcaaatggggagaagaagcagggaagaaacgctggcttgcttttggctagggcaaataatctggcacattgaccaatccctgcctgtcttctggaagaaggtgcatttcaaaagcac

SEQ ID NO: 38791 - DNA, 390 bp, Homo Sapiens
atagttgttaacatttttattgcatatttacaatgtgtggaacattataaggatttacagtagaagccaaatttcccagcccttaaaattttaataggaaaaatcgaataaaccatacatatttttgaaaatgagcattagaaacacacagatgattataattctatagactaatacaggtgaatgctgtatgtaatagaacagctgggagaggtaaaagagtggataagagagtcatcagagtgtgaaaaaactacagctgggtggtattgaataaagagacaatattgaaaatatttttaaacgctaaaatgtcccgtaaaagcatagctatcccctatgcaaaactgtgaggtagaatttttcccaccccgttttctgctcttctgg

SEQ ID NO: 38792 - DNA, 519 bp, Homo Sapiens
ttccaaattaataattttattgaacaaatcgctaatgtcaatttgtttatttattctactttgtttttgagacagggtcttaccccgctgccaaggctgaagcgcaatgatcttggcacactgcagcctcagcctgtgaggctcaggtgatcctcctccctcagccttctgagtagctaggactataggcgcatgcaccacacccagctaatttttttatagagacagggtttctttacattgcccaggctggttttggacttcagagctcaagtgatttgcctgccgcacgtcccaaggtgctgggattacaggcataacccactgcactcgccctaatgtcaatttatatagaacattagctataaattagtcattacttaattatatttgaagttttaccaccttcaaaaattgtatttattagtaataagaagttgtctagttatttgtaagaatttagtcacgtactctgtcatcatctccctagacagtgaccaaactacatgcaaataattt

SEQ ID NO: 38793 - DNA, 407 bp, Homo Sapiens
tggtccggatttcctaactttctaaaaatatactttactacttctataatgataaatggttatttaaaacaacagtgaataaatgcgcacctaaatggactttcccatttgtggagtgcagtttgggtgtaggaacagacagcaaaaaataagtttttacctaagaaacagttggtaaagattattctagggttttaaacaattgccttatttcagaggcaatatgaaattatattttaaaataaaaagtttacacagttcatagtttgtgcatttatctgtggtcattgtgcatgggtgtgagctagtcttcttagaatatgggaagaagcaaacacttaaggagaatttgaaaataaaaagttatatcatgatcatttctcaaaggcagtgacctaattttgatc

SEQ ID NO: 38794 - DNA, 571 bp, Homo Sapiens
tttttaaagtataattgacacaaggtctcactttgttgcccagcctggtcttgaactcttgggctcaagcaatcctcccacctcagcctcccaaagtgctagtattagaagcgtgggccactgctccctgctccctgccctatcaactttatcttgaacaaaatagtaaaacaaaataaagaaaagcagtgacatcctaccgatagataacaactcttacctaactttgtcattgtttaatttactcaataacaattttggtttctcaataatgtgcaagttaatctacaagtcagatatttcatggtgaatacagcatcacctggaaaacaaaacatttatggctatgccttcaaataatatacaatctcctccagggatggctttgttataattttagcacgcaacacagagttaaggagtcaattatgggagctccacctacagtacgtgcggcttggggtcctgcactattccggaattaaagatgcagttgccattctatgacgtgggttccttgggccttttgggtcggagtattttggtgagccggccggcaaaaaataaaaca

SEQ ID NO: 38795 - DNA, 355 bp, Homo Sapiens
gcagaggaacaaccacaggccagggagagagaggagacagaggacgcaacgcgggtcactaggctgactgcccgagatccattgtcatcagggagactcgtgcagactggtagatgggcaaatcgatgagtccagacactgggtacatgcccccaattagggcgcacgcagctgtcagcaagtggttgaacgacctgtgcatctccgtcagagtgaccatcgtgcgcgagactcatacaggacgaagactccgggaaggccttagtcgcccaaaaggccacaggcaaccttctcaagcctactcacagatggctgctttgtgcccagtaccgctgcgtacagattcaggtgcaca

SEQ ID NO: 38796 - DNA, 437 bp, Homo Sapiens
gatcctgaccttattaattggtaacccaaaaaatcttatttctgacgggattcagacttagaattagaagcccgcaatgaggaaattcggcggctctgcccaattttgtccgggggctgtcccttaccccccttaaattcctgggccaaaattttagcaaatgttggagcccccccttaagtttccttggaaccgcggtttttcagggcaaatacccgccttttttcctgaaggaaacgtggggaaaacaaaccccggaatcttgggggcttttggcccaaggtttcttaaacttccttattaaaagggctttcttaaaaaaatacggggcggaaaatcccttctttaaagagattcaaaaaatttgcggattccccaagcccttttggggccccacgcgggaggacactttctatcaggcaggcccaggaaaatcc

SEQ ID NO: 38797 - DNA, 380 bp, Homo Sapiens
tctattgtcagcacccgtataactactccacttttggccacttatatttttcatttcatcaaccaaaggccagagaatctagggaaagtgaaagaaaatagctgaagtttgagaaaagctgctaaaaccctgattcctgcctttagttaataaccactgctttggacattaggagcccttccaactttttgcacttaagaagttaccccatccacttaccagacaatatgagaagtgtcttttaaatccagaggctaaccagcaacaacagagctgagcaagatggactgtgctgctctagtctaaaaggtaataggcacacttaggtagctttgtaggaatcaagtccttggaattctgactgatgtgctctcaactgc

SEQ ID NO: 38798 - DNA, 462 bp, Homo Sapiens
agatacccatatccagctttctcctctacctgtacaagcttagctcctctgctatcatggtgaaacttctggaaaggctggctaggcctcctgtcaacttcctcacctcccattcaccccttagcccatcactctatccaaagttctcttgttaaggtcaccagtgtcctccatggtgctaaatccaatggacggttggcactctttatcttgtgtgctatcccagaagctttcaacactggtggccactccttgaaagcagggatgaaaatcaagtttaacaactgatgtggcatgggcactaaccactatcacagtgcatgcaccgacaagtcagaatggtcactgggcatccgtggccagtctcactgtgcctgcgcatacaggctgaatgcaagtcttgcttgaagcccttgcttccctttgcttccacaacacaacaatctcctgtttttaatcctg

SEQ ID NO: 38799 - DNA, 417 bp, Homo Sapiens
ctcttttaatggccgaaagtgtatttctcgaatgatgaaactaaaacccggagggtcctcatctgtgcaggcaggtgagcatacctagacacccggccctcaagcagtcacttactccactctccattttcaacccagcttcattcggaacaaggaggggacaaaagggtgggaggagaggctgctctgtggaatgaccgtacaagttactgagagatgaaacaaaagcattcattttctattaaatgtgaaagatctctcaatctctaattggtcctgcactctaaggcaacttagcagggactcaagtacaatttccatggagagaagtggtcaaatagctgaggtcaaaccctccagactccaactgcagccaagtgcttttatttcccttgtaattttctttaagaataaatg

SEQ ID NO: 38800 - DNA, 414 bp, Homo Sapiens
ggaacctggggacctgccagccaagatactcagtgggaggaaaaccgagagtgatatgctggctagtaagcaaaagaagaaagtgtttcagtgtttctaggagcaggaagtgatcaacagccttagatcctccttttaggccaagtaagatgaggactaagaattgaccactggatttagcaatgcagaggtccttgtggcccttgatgtcggcagatgagggcagtgtggtccagagatgaggcttggggctgagatgcagccccgctgcctggtccagctcctccctcatccaggcagggctcccccgcccagcagccactcccctccctgcctgctcatggccccctgctctccctttcctccccatacccccagacctgtgcttgcccggggagagtcaggactctcctg

SEQ ID NO: 38801 - DNA, 452 bp, Homo Sapiens
tccagaacttcttttgtcgtccgtcgggaaaacaccatcgcagtgttatcggactctgaccatgcatttgccacctctgcattaactacactctcgctttgctgcctcccctcgggcatcttctgggcaccgggggcttagtgtgcaaaaccagaaccctccgtcacaccttctcccaccccaaattctcaccaaccaatatttcctggcttgaaaaatggcaccacccgccaccctggggcttcagccacagagtggaaagccatcgtccctgacttctcactctctctcccacagacatgcaacccatcagtaagtctggtggctctagccctagtgtaccctcatctcttcacatccacgcccgcactctgctatgagctggcttcctgtctcaaggaaccacagcaatggacttgtcaccatcatcctcgtctccatccattcatccc

SEQ ID NO: 38802 - DNA, 396 bp, Homo Sapiens
cgtacccggtcccatcacagacccatgatgtactgtggcattctaagcttagcctggcacctaagtgcccttctgctcctcaggtaaaggtgggatggatctcattcacaagcctggcaacagccaccaacccctgagtcaagccagctgactatctcccagccaggaacacagtgtgccagtctcttctaaggacagcatccccagcaggccccattctccctcattctaccgcctaccccttcaggctctgttgctcatgccggtgcccgtgctcagggtcacaagatcctggctgagatagggagggagcctctgcttctgcctaccagtgagagttgaggcgagtagaaggatgaggaagttgtcttttgcttctcctcattccaggtgggc

SEQ ID NO: 38803 - DNA, 465 bp, Homo Sapiens
ggagagatatctccgtggagagactttcttggtcaccccaggagggcttgttagaagaagagggccgggcagctcagctctttccctcttcgtgtgcggcagcaggaggccactcctgggtctgggcctcctggagttggcaagagctgctgactgagaacctgacccaggcccatgaaggcagtgtccaaggtgagccagcacagtggacgtccacatacctgtatgctaaggtgaagccagcgcagtgagaagctggtgcagaacattttggggcagctctaaatagaaaaggattttgtctcccgggcaacgtggacatgagacataagcctacacgcctccatgtaggctcccagactgcctgaaagctccggctaagttctccagagcgctcaggtgatagctcttcttctcagacgagtactctgaggccactgtcatgccagacatgtaagtggccca

SEQ ID NO: 38804 - DNA, 372 bp, Homo Sapiens
cataaaaacgactcctgtgcctgtgacaagagatctgactggtgtctggacaattgtaaggaagtaactctatgtaactgtgttgctgtactaacgcacggccaggtagagggcgcagcttccaaacccacagttctccgtccaccatctcccaccagatgctacctacagtttttatatagtattaaagtaatattgtaattttatgttgaggagacagtcttgctctgttttgcccagagcttgaagggcagtgtctacgattcttgactcacttgcaagctaattgcctccttggggttcaagcggattctcccaactacaagcctccaagccagctggtgattaccaacattaaaccaccatgcctgg

SEQ ID NO: 38805 - DNA, 439 bp, Homo Sapiens
agcatctcctggtgagtcgggactcagctgaggacacatccccaccctgcctcccatctggccctttggacaactggccctttgtgacagggctgactcaagtgttaggcagggtctcaggcctttgattgctcacccctgctccccaggccctgccctcacttttaccaaaggttctccctcggcgggagggcatctgtgttggaggtgatttgtctgggttcttccttttggttccagaaggaactgtcagtcatcagcatctgcgttgttagcagtcagtaccacccccgccccacaatgacagtcaaggctgacttgttgactgaagcctttttcccagaccccttatttcgaatccccaagcttcagtccctcttgggggtggagacaagaggacatgtgggaagccacggaagcaggttctttatgtcctctc

SEQ ID NO: 38806 - DNA, 390 bp, Homo Sapiens
tgtattccattaagagaggtgaacacctcgtgaggcgctcttttgccagaccgacgatccgcaacgcataggtggccatgtcagcacacaacttacaccagctcaaagctggatcgacagcagcgcccgagagattttggtgattataaccaccctgcaggggttcttctgagtacgtcttcaggtttcttgtgtagattttgtatagaagggattttagtggctccagggccttagggccctagtgtgcagcgaggagtgtccacagagaccctgcccagtcaggccctactttaggctggagcctgtgggcttatcttcaaggattttacaaacacttctgacaggaggccttgcagggagatgatgctgagttgggactgcgcacag

SEQ ID NO: 38807 - DNA, 409 bp, Homo Sapiens
agatgtggagagagctttaagaagcatggcacaaatataaggaaagaggcaaacaccgtcattctacatctgtttattttgttattaacaagaaggcaaggcgattttcattaaagttgtgctggggttggggttgagggtgtagagagcaaaagtgtgagttgtacaccatgactggaatcgcttggacatactcttcagcagacatcgtgtgactgtggaagaaatgagtttcatgaagatgactgatagaaggaagccactgaaccagtcctctatctcctcttccaaggctaaagtttggagccacttgcagaaggctctcctcaaacccctgtgttctttgcctacccctgctgttgccacatcatcttggagagctggctgcttccctcctcggggatcctct

SEQ ID NO: 38808 - DNA, 374 bp, Homo Sapiens
agagtgacagctatttgctgacttagaccaagtgaaagccaacgctaccaaaaaaacattttccatgtggaaaccttccttttaatatttcttaagctagagctctactcatcaaaaagagaaagagagaaaaaagattactgcttaaaatctcagcaaagggaacccagtacttaactagaccagctcccagagtgaccagatgcaaatgtctttcacaaatagccacagggcagcacggcctcctctaggaacaccggccccaactgcccacccgcgggggcttccaggcctccaggtgccaagacatcccaccaggggccaaccacattggacctctggggtagggcttccctacagtcagcctccaacac

SEQ ID NO: 38809 - DNA, 361 bp, Homo Sapiens
ctccgcccctctctgggtttcagtattactcagggccgcccactgagtaatacctagtgcccccaaggggcactgagagaagtaaaaagaagcaggaagaaggaagaggagaaaacaagggaggaagcgggagtggccacgtggcacctgcaatctcatcagagctgcccttggccccacccgtcctgtctaggagaattggctcacactccctggagtctgggcactgaccatcagcaatgatgccagccaccgggcctccacagctagggcgggagcagggccctggtgcccaatgatgcttttagttggcagatggtgggaggttctgagggtccagagaggggcggagcaggggtac

SEQ ID NO: 38810 - DNA, 449 bp, Homo Sapiens
ctgctccgcccctctctggtctccctctgtctcttttcctcctagtctgccttttgctggctctctctggcttcccccacccatccctctccctctgtgccagttgtcagccctgccccaccttctctctcagctcatgagcttccacagtttcagctcgccccttgatgcactgatgactcccaaatctgtatctctagccttgacctctctccttaggcccagaccagaatttccagctgccagcaacttgctgttaattggatgaccaccaagcccctcaaactcaatgtgtctcaaaccatactcattatctgttctcataaacctgctccccaccccctatgcccagtaagcagcgtgtttcctagcttacttaacggcactaccgtcccctagcctggaatttccgccttgcatcttaactcttctctccctgccgccatatc

SEQ ID NO: 38811 - DNA, 363 bp, Homo Sapiens
ctgctccgcccctctctggctgtggccctagacaacacgcctgcaatcccaagcattactaaggcactctgcagctccctttgccaaggcatttcctatagaatcctgccacccaaaaggtaccaaatatgagtttctattagctttcaacttctttaaacatatgctaatttgttcctctcccccgaaaaagagatttgcacgggtaaatagatagcaattatttcatttgtgcaggaaatacaagaattgagactactttctaaaactatccacaaacatggttattgtgctagcaaacttccagcgtaatttagagagaaagaatgagagaaaataaatgagcagttgcctggtactcac

SEQ ID NO: 38812 - DNA, 408 bp, Homo Sapiens
ctgctccgcccctctctgcagcaaacgttccaatgtaagccttaacaattgcttcgctctattcaaagaaatgtattagaaacataaaatatgatctcgcccaagaacacttggacctgaggatggccccaaactcccttggctcctctacaaaatcagggcacttttcagggaggacagcgtcccacgatggccacttatttatgtggtctgtcctttgcaacagtctccgcaacagccttccattgaattctgtctcattggacacctttctggggactggggacagggtaggcctgggcccgcaggttctcagcttgcagctgacagggcacggacaatgtgccaggcaggagcggaggcccttgccaactgattcctctcctgagaagacacttctaagagcat

SEQ ID NO: 38813 - DNA, 418 bp, Homo Sapiens
gaggacgactgtcgaggatccccctccgcccctctctgcgtagagtatgccatgaacatgacttcctgttgtaccaaaaaatgcaccaatcggaatgtttggtcagggacagcgatgtggagggcgggctcaccacccttgggtgagtcagcaggtgaggtgctccatcaagcccgggcttcagaggccccaaacctgcacaccagctccaagggtggctggcggctgacctcgcctccaactggaagtgagcaaggatgaactctgaccccccctggtagatgtgcaaggttgactacggcatttaaagaaaatatgaatgctaggttactaaactctaataagggagtttgtataccatacccatgatgcctcacaggactgaggaattcctcttgagaagggcacggtggatggg

SEQ ID NO: 38814 - DNA, 374 bp, Homo Sapiens
ctgcgcccctctctgtatcgatttacgcagaggacattcaactgtaaacggtaaccaggttttagtcgctggccagggaaggggctcttaactctaaatgccccttctccccaaacactagaaggcatggagtttttaggactaggtgtgggacaggagaggaatgttagcatgtgcaaagtgagactctaaatgtgcacacacaattcataaacatacgtcttcatacatcacatgtacacaaaatggtggagactttcttttaggagaaggaattttagcattataacgacatgataatgatctgaagccaaccaggggttgcctatcctgttccagagaggggcggagcagcagagaggggcggagcaggg

SEQ ID NO: 38815 - DNA, 428 bp, Homo Sapiens
tggggaggcctcaggaaacttacaatcatggcagaaggggaagcaaacacgtacttcttcacatggcagcaggaaagagaagtgcagagcaaaaggtgggaagccccttataaaaccgtcagatcttgtaagaactcactcactattatgagaacagcagcatgagggtaacctctctcatgattcattacctcccaccggctctctcccatgacatatggggattatgggaactacaattcaagataagatttggatgggaatacagccaaaccatatcaaagagtatattatgatccatgctgatatgaaggaaaattattctgccttggtatgagatggattgtgaaagagaaggacaagatttgctgatttattcaaaacatatttactgcatgcttacaatatactggccctcttctaatcaa

SEQ ID NO: 38816 - DNA, 460 bp, Homo Sapiens
cagagcctgccagctagtgatgtttcatcttagcttatctgtatactcaaaggatttattgcatcattgagttccattatgggaggaaaaataaaagcagacactcttgggtatgtatgtatatgtgtttgccttttttaaaacaatgaagttgatttattaccttctgagtttaaaatcttatctgagccttttctgcccctaagattctgtgattctataatcagaaatagcttggggaatggataattattttgtaaaggaatctagaaaacttgtctttgaatatgataacagtgaaggtaatattttcattcccagataccccagttttattatctttttttgctagatatattttggtttcttataaactattatcaattttggtaacctggaaaattttattggattctccaaataactggattataaagtatctatggaattatcagagttg

SEQ ID NO: 38817 - DNA, 510 bp, Homo Sapiens
ctgctccgcccctctctgggactcttctcaataagcactcattgaattcctagaatatgtgaagcacaagctcacattttttggcatggtggaaagtgcaaactagggtcttctcccagccattgtttcttccacccccctctccccattgaacctaggccctttacacactttaaaatgccacctttccagtactcaggttttacttatgtgtattgttttgccttttataacaaaagccaaaataattttgttataaaaggcaaaagaatattttggcctgttttaccccaaaattcaaatctagatagtactgcttctgaaaggcaaatattaaaaacacaatctgaaatacaagtgccaaaataacatatacacctgactcttaaaaaatcatgacgacccagcagccttaactgctgctgttgcaaggacagtaatctccttttttggatatgatgtcatgtttcagccctttctaaaactgaggacagatatccaaatgaagag

SEQ ID NO: 38818 - DNA, 463 bp, Homo Sapiens
ctgctccgcccctctctgcagtgccctggcattaagtccggccctctggtcactcctctgagctcccaggtgctgaaggctatgtgtccccatctaggaccgtgctaaacgcctatcggctttgccaggccttcttgattaatttgctgctggtgaaacgctacttttctttgtcttcaggtcaccctgactttgcatatttcttctcctaaactagagtataagttccaagggagttgatgcagtcttcacagctttctgttcccttgacaaagcaagtggacgtggtcctgcgtgctggagcgagcggctcagtgaataacaggccctgtgtgagcaggccatacttgctcacgctggaaacccagctccttcccaccagccctgccccatcctgctttgccaaaggagccaacagccccttaatcacctgaccacagggatcccagagaggtgcggagca

SEQ ID NO: 38819 - DNA, 502 bp, Homo Sapiens
ctgctccgcccctctctgcctccctagcagctggggccaccggtgtgcgccaccatgcctggctaattgggtaaattctttttgcagaggtggaggtctcgctatgttgcccaggctagtctcaagcgcctgggctcaagccatcttcttgcctcagcctctgaaagcgtggagattacaggcctgagctactgtgcccagcctccctgttacttctcggatgaaatcctgccctgttggtgacactttccaggctatggatggcagtgcctgtctacccctccagtccttcttcctatcatacctgccacacggctgctcacaaagtccccacccctgccccgctgccaggcctctatctagcctcctcctcattcaagcccagctggagggtcaggctccctcctacaggacggcttccttgggctgcaagacagcgctgcccaccacactgaactgactcacaatggctctctgccaccccagagcaaacccagagagg

SEQ ID NO: 38820 - DNA, 485 bp, Homo Sapiens
ctgctccgcccctctctgagccaggtactgttctaaatccccgagagatggcagggaccaaaacacagtggtgctttcatgaagcttagattctagtaggaagaaacaaactataaatagacaaatcacacagctagtgaatgtaagtaaataggtgactggctgtgttgccatatacttctcatttaatccgcttgccattttggtttagcaaagaaacaagaaacttgaaatagtgtgggagtacatatttgccaaggggaaaagcagaacttttaaaagctccttcagaatgttcttttctctttcttaaaatggaaatcactgttcttttagctgcaaaagtaatacatcttgaaaaaagtacagaaatgtaaacaacagaaatctacaaaatagaaaatatctcataatttcatatccactgttaaaaagtctaatcattatggacttccccctgcatatacatgtgtttataatataaa

SEQ ID NO: 38821 - DNA, 496 bp, Homo Sapiens
ctgctccgcccctctctgtctgtgtgaacagtctgcagcaaacaacctcatcggaggctctgtaggaacgtgcatcaggtccatgtggcctgtcaggtggggctgtggttggaaccttcggtgggaggtccctcagccagaggcccaagtgagaaacccacatcacgggcacagctgcccggggcctgctcactgctgctactgggaaactggacccgaggatggtggtgagcagaggcggggggaggcccaggaagccgataagctagcaggacgtgccgtggttgcactgcccacttctgctctgttgagggccttggttttgcaaaagctatgccgtttctctggtgagtccatggctctgcagcagggacagcaggaggggagtagcttagacgctcataggagcagaaccctgttgtggctgcacccacggaggcccaggctgtgtgcaccttgtgagactctttaacacctgcccatcagagttggagca

SEQ ID NO: 38822 - DNA, 413 bp, Homo Sapiens
ctgctccgcccctctctgggccttacattttggctgtaagaagaggggagaggcagactgtaagcaatagagcgcaataagtaggttgcctggaagtaatgttagatcacgttacggaaaacaggaaagagcagagcaacaagtgctggggtgcgtggtgcagggaaggcagctggctgctgctggtgtggtcagagtgggccctcatggagaagactgcattcgagcagaaacttgaagggggtgaggggtgagcctagagatatctggggcatgagcagtccaggcagaggggacagccggtgtcaagcccgggacaggagtgtgcctggtgtgccagtttcaggcaagaggccagtgtgcagaggcaaggtgagaacgcacgggagagcagtggcagagaggggcggagc

SEQ ID NO: 38823 - DNA, 441 bp, Homo Sapiens
ctgctccgcccctctctgtgtggcttcctgttggtggcagggtgaggcccccaggacagcaggcagcctcagcctcaccctttcccagtactgagacccagaatctcactgcggactccttgagacaatcccagggaaggctttgattggcttagcttgaggcatcactgctcatccctggaccattcagaacctcggtggtgctccctgattgaccacctggtttagtgccgcttctgtgctggaggtaggagccatgtgaggaagtcctggaattgggcaagcacggtcttgggaggccaggctgggacctccttccctagggagtcctggggattctgaacagagtgatgaatcctctgtgaggggcagggagccacagatggagagggatgatgggggtggatctggctgtgcccagagaggggcggagcaggtgtc

SEQ ID NO: 38824 - DNA, 425 bp, Homo Sapiens
ctgctccgcccctctctgtcccttcaggtcactcagcctcctgcacatctcagatgaatctatgaagtgagcttcaacctggcttctaaagtataacaatgctgccgagagagcagtgctgacaacatctaaactatcagacaatcccaaaatgtcctctgggaatttttttggcagctaagacctttcaaggaaactcggaattctgataacacataaatacatcaacatactagaaagcgaaggaatatggtagtggtatgatgtagaatcttgcttctttcctctttttctttcttcccaatctggaaccaggtgaaatacaaagtacataaaggaatatttaaggatgaaaaatggggcaataaacaaacagataaaggctaacaatattattgggtttttcttagcagtgtttcaatggg

SEQ ID NO: 38825 - DNA, 402 bp, Homo Sapiens
ctgctccgcccctctctgtcctatgagccattgtctcccacaaggtctcttattggtcatccctgaccacagcatcacatactcttctccccacctcagctgaagggtcttcgactcccttcccttcttctcatctctgataagcaggaggactaacaccactgggtccctgggtccccagcactgtttcaagaagtttacataaaatatcccaattaattttccacaactgctctaaggaagttagagggagatgctgtcaccagcatgcccattttacagattaggaagttgagactagagagattaagtaccttgcctactgttacagcaagcaagtgatggatctaggaatggacacagaatgaacaggaaggaaaggagactcagtgtctctcccct

SEQ ID NO: 38826 - DNA, 490 bp, Homo Sapiens
ctgctccgcccctctctgggaaggtagtacagctagctacggacttacgttacagccagcccggatctattgaaagaaggaaggagccttaatgaagaccccccagctggggcccacctgagcatcagaaccaaggcttctgacctctgagatccagctctggaaggctcttcagcccccttaggaaggagctgatctaggccattgagggtcgggggcaagggttggttaccttcctgggcatacagcggcttttaggggttaagagaacaggcaggtttttcaggtccacagtggtgcgtcaggttccttctgcccaggggagggctccctggagttgaggcccagagggggaggaggaggaggctggcagctggggaaggagtctaggggcttatgggagctccgcaacaggatcttggatgggatgtggggagagcagcctgaggaactctgaactgtcctcaggcccttgacgcctgcctctgcg

SEQ ID NO: 38827 - DNA, 366 bp, Homo Sapiens
actagtacaggatccccctgctccgcccctctctgtttgtgtttatatgtgtgtgcgcatatgtagatgggagcatctgcctctgggccaggccctgtgcatcggggagtcggaccaggctcctggccgccttccccatctggctagcttctggcagccgtgcagggttgggactgaccttctgagaagctgggcgcgcacctacccagtggcctgcatgagaggttcagctgcaggccctctcctcaaaaggactttccgtttctgccctccaagcttcctaaaatgtctgggctcttgcatctttgggttaaggctctgctgcccttgtagtggctctggaactcagaatctctggggctcagc

SEQ ID NO: 38828 - DNA, 375 bp, Homo Sapiens
caggatccccactgctgcgtgtgtgatggatgaatggtctcaaaacttccgatctagttaaggtcttatgactgacacaggtgaaacactgaaggcagtgccaggtttgtgccattcacagtgactctggtgtgtggccattcaacatcgcaggagtttagagaagacttcatagaaggtgagttaggggctgagccatcacgattgggtaggttgggattaacagatgaaaccagtactaatgagtagaggaggggtgaagagactctaattgagaaggatatatacatgggcaaataacatatattcaagtgtgatgggaggtatggacctctctatacgttattgatagcctggaatgagtggtgtgggtga

SEQ ID NO: 38829 - DNA, 501 bp, Homo Sapiens
ctgctccgcccctctctgagcctccatttcctggcctgctctatgagcacgtggacctggcccctcgttatccttgtcacgatactttcagtagttcctccctcggccagcccagccacatggcttttgactgtttttcccactacggcatctggggcgcagtaggtgctcagctaaatcttgttggagaagcccaggagtgcaccactgagtggctgtcccgggctttcccactcccggcctcttgcttgtgtagccccctttgccaagaatgtggcccccattcatctctacttgtggaaatccttgtcctcgaagcccttcgcaaatgctgcctcccctaggaagcctttcccagtttctcccagccagaggagatgctggtccttggaacacttgctctgaggctctctggtggtccctgttacagtgcactgccgtgtccatagtaacagatgaatggcaaacagggactgtgcacttgctaggagccaggcacag

SEQ ID NO: 38830 - DNA, 431 bp, Homo Sapiens
ctgctccgcccctctctgctcctcagtttttcatatatgtacaatgagactgatgttagaaacaacagtaatgataataagacccatttccagtggttgggaatgagaatgaaataaggtccagggtgtaaagcagtttatccttcctgggcttggcaggagtacgttgccctttgggagtgcagaagaagaaccagttcccgttcactggccagcctcaggcatctgtcatgtgtggggccctggaatacagagacgaatgagacaggctgatgcctctaggacgatcatataaaatcccaagctcaagctcaggacccaggccttacctggctttgtggcactggcatcgtcgcctgctgttctggaaacacaccagggatgcttgttcatggtggtgaccaccaagcagagaggggcggagcaggggt

SEQ ID NO: 38831 - DNA, 571 bp, Homo Sapiens
ctagcggatccccctgctccgcccctctctgcaagctgcccttttaaggacgatgtgattatggttgggccaaggggacatgagcaaagggacttgtatggctggcaggtggagcacgaaaggacggggtgcatctccccctcctcaggccaggctggaacagatggagactgcacaccagccacagctgagcaccaaataaaaatcagcaggtctctgggaacgctgcaccccaacaccagcccaggactcccgaggtgggcttttagataggagagagaattatctcctctttaagccactgtcactttatgttcctcaaaataagacctcttaacacctcccaaatctgcaccgaactaggctgcatggctggcaagctgagtccaagcacatcagttccaaatatgttagtgccagttgatcggtctgttctcatacaggctggcaaaaacaagatttaagcagcaatttaagaaacagtttttttgaaagaggactctagaatattctgtgaacactgaatcatatgattttagagctcacatgagtcttaagatcatgttatcta

SEQ ID NO: 38832 - DNA, 446 bp, Homo Sapiens
ctgcagtgcggggaggactggaggacagggatggggtggctgtgcggagggacagaggtgggaagagactgagggtcagagtaggcttgggtccctgaggttctgctctcttaggccccaatggtggcttccaaagtgggggttcgtatcaccctggccgaaagcgatccaaaacccagactccccagcaacgctctgtgtccagtcaggtgaggggcgggagacatgggagagtggggatgctgggcagaggctggttcccagctgtggtgtgcacgggtgaagtctcccaggccaaggggaaccagactcaacctcagctgagacttcacctcccatcacggcgggaggaagagcacagcagcccggtaaaggccccctctgtgaagagaacccccatgccggacaagactgccaccccagagaggggcggagcaggggtaccg

SEQ ID NO: 38833 - DNA, 456 bp, Homo Sapiens
atgagccactgtgcctggccgtggaccgttctttcttgaagaattatggaggcttattttagttcccctaacttggaaatctcctgaggaagaaaggtgactacaggcatttgtcaaaaatttgtaaaggcaagtttattagcctctgccatcgggggcaaagaataatagctaaggcaaacaatagacacaccaaaaagcctgggaggaaaagctggaaagtaagatattttggagaataaaggcttttaaaacttccacatattcttgggaatccaaaaggccacatgtacatgcagggtgagcaaatagagaagacttgagaaagccttaaactctcacctctggctaaccatgaggcttgctcaaataggaagtgaaaactaaggtgaatttgttgcttagctgaatgttgaaggtgtgccccaacacttacacagagaggggcggagcagg

SEQ ID NO: 38834 - DNA, 464 bp, Homo Sapiens
ctgctccgcccctctctgggtatcagcaacatcctttcaggcaggctccaaacagcttcctttgactcccaagctctgttttcagtcccaccttgaaatagggataaacagacctggtttctggattctgggaaagggctcttggtggcctagcttagatagttgtccatccctggaccaggaccttggccattttggatgtctacccatacccaatctgagatggagtgggacagggcttgtagaagatgttagctttccctcaaaccataatgtcagagtgagtgaaggagcatttctagaaaagagaggaagagatatttggtaggaaaataaagccccagaggtgagtgggtgagtggaaggagggatgcatgcctcctcaggaccaggtgctgaggtggcagaggggagatggagagaggggagaaggaaagtctcagccttcctggaactcacagtct

SEQ ID NO: 38835 - DNA, 384 bp, Homo Sapiens
ctgctccgcccctctctgtcactgaatatcttcaacctggttctttaaggactgacatattcttgagttcctaccatgtacttgagttcctacatgtacaacgtgaagcagctatatgaaaagtggagtgactgccatcagttgaagcagaaagaagtctttataaacatgggatttgaactgatctttaaaaagtgtgttccggcctcttaaaatcatcctcctggggagttctcccacttagaagtttcttcagggttggtaacacatggaatgtaatgatttcatgtaaatttaggaaagaaaatttccactttgttttcagtctctttagagtccagcactttccgagctttagggataacgtctttggctagggtaact

SEQ ID NO: 38836 - DNA, 461 bp, Homo Sapiens
ctgctccgcccctctctggttctgatcacacagcaatgggcaatgagaaagaaagaagcatgaaaatgagcgacattttcaagttaaatatgtgtttgctttaatgtctagcaggaggatatctgttgccaatcacactatgaaaggtcagttgctgaataaacacacataacatcgaccaggaggcggagaaaacacctcctttcttcctgtcttccaagggcatgtgtctggcgaccacccattcatttcagcaaacaaaaggtggaaataaccatctacattttacagaagaggaaactagagattagtgaaaacgctgtttaccttcaagtaatgaagatcatcagttagtgaataaaaggggaccatgtacaggcttggcattctgtcacttcctgggcgctggtgacagacagtcaacaaacatgcatgtgctcaattcacctgctcattggcta

SEQ ID NO: 38837 - DNA, 440 bp, Homo Sapiens
ctgctccgcccctctctggggtgactgtgtacatttcagggagatttctatgttacacagcctagtgggtctccacactgatggaaaactaagaaacatatcactaattcttagactacacaattaacaactcttgttgcttaattgagagacatggacaccgagattcctgatccagccccagctgcagcctctttcatttgtggctgtcaattacaggactaccaagaataatccaccaatctcctggcataccaggaaaattcctggtctagattcagacaagtggtttatagttccagctctactttgagttaatcctgtttaaatttcagttctcatattctatgattcatttgtggaacatatactgagtcattttgaaaagttttaggccaaggctaactttcttacatgcaacaaaaagttgctggaaaata

SEQ ID NO: 38838 - DNA, 359 bp, Homo Sapiens
ctgctccgcccctctctggtggggggtggggatgggtgactgtgcctcgaagtcacttgagggagttcagcggggtagagctgacatcagcgatcctgggaaacagcctccaactccatcctgaatggaaaggagctggcaggaatcagaggaggaggcccctcctcacccccgcattggagttccaggctccccctgcagagaacacgctatgagctgtcaccagaggagtggctccttggagggatggtggcctgctgcagccagggccctggggaagtccctcgcacaggctgtgactttgccttgtggagcaggggcctccattgatctttacagccctgttccagagttggaga

SEQ ID NO: 38839 - DNA, 409 bp, Homo Sapiens
ctgctccgcccctctctgaacgctgccagacaaatacctcttggcaaggaggaagacacaggcccctcccaagccccctctaaatctggttctcaggagatgggagccctagggagatgtcccactgcattgactttagatgagcaataactcagtcagtctggaatcagcatcaccaagggttacatgatagtcttgaaggagtgttgctcagaatttcaggcgactggtctggaggagagaagggggcaagtgcttaccttgaacccgtgcaggtggacagatgtgtggtggaggcatttgagggttacctcagaccacatgctgacccacgcagggccaaagtcgctcattgtgtggaggcattttgcggtggaaacacacctggatgcagagaggggcggagcag

SEQ ID NO: 38840 - DNA, 360 bp, Homo Sapiens
tcagaaccccctgctccgccctctctgagtctcacttttctatttgaaagaggagggtactgttgatggcagtgagcatttattccgggctgagttttacactacccatactgtctctaactctcccaacactcccacaaggcaggtgctattatccccattttacttttgagaaaattaaggcctaaagaagtgagaaagcttgtccaaaccgctatagctcttgggcaaaggcattagtgaccaatgtgtatttgactccaaagcccaggatgttagccacagtgcagggctactatccttttatacaatctgtcaggcttcttccatccgtggcatgtattcatctaattttattaa

SEQ ID NO: 38841 - DNA, 442 bp, Homo Sapiens
ctgctccgcccctctctgtcagccttctgacaaccaccacatagttgcaggggtgatgcacacagctaaggctctcctaagctctttgtccactgccctttggaagctttttaattgatggcttgcctcttctgcctcggaaagtcaagccaaaggaccaacttcttttcacaccgttggattccattctaaaagctaattaagcctagaggcccaattagaaaagaattccttgggaagttggtaacaattccaagaatgtgtgagcaccagggaaagctatgccagcagttgaaacaccgagagcaacagcagacttttttatatgaaagtaacatgcaaataactgaagggtctcaggtcttgaaattagtgaagtcttttgtagcattgaaggcttgagatgtatatccaggtgtgctttgtaaatgagaactccagg

SEQ ID NO: 38842 - DNA, 360 bp, Homo Sapiens
ctgctccgcccctctctgatccaaacaacccctcatatctgtgtatgtcagagggctgtccacacagcatctcatttgatcctatcttgtggggtaggaaggaaaaccgtatcagcacagtctggggtatgaggaccagaggtgaaacaactggcccagggtcctaggatggaaggagagcctccttgctgagcactttcccaccatacaccattgtccaaagatggcctcctaagtctgggaagggtagtaccaaggaggtatatcagttggaagtgatgccactaacacactaacacttactgaaaacactgatgtgggccagagactggggatatagaggtggacaaaacctcctcc

SEQ ID NO: 38843 - DNA, 374 bp, Homo Sapiens
ctgctccgcctctctctggtaggtgaagaaagaacaagatagaaggtgagctgtttggcttagtaattttctacacctactagagcgggactgggaaaaatatatttgtaaatgcagttcttgctgtcactgtctctctggggttttacaatccatattcctgccagcatctaacgtcttttcaaattcttaatgtctataacaggacatgatgacattcatcgttttgacttgttgcagcaaaagatggttagcaggattggaatgttgctttcattctagacttttccttgagaactgctagccccgtattgttagccagatctcatggatgatctgacttgggtttcatctgtccaggttggcagtggaat

SEQ ID NO: 38844 - DNA, 393 bp, Homo Sapiens
tgcctagggtggctgccctctgccagggccaatgtgacagcctcttttaggtacccacactcggtgggtcccaagctcttgtcagcatccaagaagaatgaggtcacccggacacttgaaggatggtgaaggtggagaattttattaagcaatggaaatggctctccatggagaggggagctggagaggggatgggtcaggtggggaatcttcctctggtccaggtgtctggctggctcttccctgaagtcaggacgtctttccgaagttaaaccgtctctccttggaagtccagccatccctctgaagtcaagtcacctgtttccagtgaagctacttctctctcactaccaagtctggggtctttataggcaccagagaggggcggagcag

SEQ ID NO: 38845 - DNA, 414 bp, Homo Sapiens
aagtttcagtaaatcatcaacacagggactggagcgctggagagtgcaccgcagttctcagccacacccacgaggggcagggggctcagaagccacacacagtgacctggagctgcagccaggcactgggtacggggtttactaggctacaatctctactcctgaactggaaaatgttcacaataaataggtcaggaaaaaaaggaatgatttcactggttaatgtgtactcataggcactgcccacacaacggtgtgttttccactttcagtacagtcccacctttcttttcctctgctattttcttcagccagccacagggttaagagcattagctctggctttgaatcccagctgacctcaggaaaatttcttatctgtgactcagttctcccatctgagtgagctccctg

SEQ ID NO: 38846 - DNA, 476 bp, Homo Sapiens
cagggttttatagcctcttgctgagtatttctcatctcttgctaagtatttctactgtggtgcaaaagcaatcttattatgtgttgctgtatttttatagtcaattgaaatgactattaaaatataacattgctcatcaggctcagagcagcactgctggagaggcctgcccttgcagatgaggcagctgagtcctggaaagagaggccttcttgggaatcacagccgatgcaggggcctgaggcctgggctgctatgtaggaccctccacaacctcagaacagtcctgggctctgctgtcacatcttgaaatgtttttttctattttctttattgtggcaagatatatataacctaaaatttcccatttgaaccatttttaggtgtacagttcagtggcgttaaacacactgacgttgttgggcaaccatcaccaccatccattgccagaactcttttcttcttcctgaagacag

SEQ ID NO: 38847 - DNA, 397 bp, Homo Sapiens
tctccgaacacagtcccacccatcccccgctgcctggcaaggtccagcaacacaacgattacgctgtctcactctactggccttgtccaattcaaagcctttgatgccatcacagagttccgaggaacagtccaatccccaaggcaggaagacccaggaacggccatgacaacgaattaacaacatggtaaagccaggggcaggaggcacgaaccgaccatgtcacccaaggccacgctgagcacgtctgtgatgccctgtaactacttactgactgacacacaccaccgtctttctgcaagatccgacctcgtcacacctgacaaaactcccagtacacctgacatttgctcaatcgggctggcgcaggtgtaggcaccaaatgtcttgatttgta

SEQ ID NO: 38848 - DNA, 352 bp, Homo Sapiens
caggctccttgggtgctgaccgccaggtagggtttggtgcaggagaaggcgggcagctcgcaggaggggacggtcaccaggcttcagaagcccactgagcagtgcccagagtcttagctgtgcttgctggacattttcccttgccccagcttctcttccttgtgtgtgtggtgtagtagagcctgtctgagctgtggagtcagacacacatagccaggtgctgcttcacctgtaagcctcttcgtttcatctgtaaaatgggggcattccaccccttctcagaggcaggtggcaagggccgggtgggaatgtaaacaggtgccaaggagcatgcctttcctccccttttctg

SEQ ID NO: 38849 - DNA, 412 bp, Homo Sapiens
tctatagaggattcgcactgagctgagcgcactgctggcgactaaccatgcgccacttcatgttgggcagatcttatggcactaagaattgtcacagagccccccaaagccctaatggcactcacattcttcccagtttcttcaggtcctccaggtactccatctctccctgggacaccctggtgtggggaaaattagcatgagattctcatctgcagagaagaatgtctagctctgaaatgctgcacaagacattgcagggaaaggggtcgattcacagaggaagagcctgtctgcaggacagttgcacactttgcaggatgcaccggacttcagtacactcccacctctacaagcctttggcttaacaagcaccttccgtaaatatctaagaggcacagattctgctgag

SEQ ID NO: 38850 - DNA, 446 bp, Homo Sapiens
gtggctgactgtgtgtcatcatgattagatcatacactcgagcattttagagctgtaagtccctatggaaatcaccctgtgtatccccctcctctgccaggtgagacccatgaaggacagagaggccctaaggcagccccaaggtcacacaacataaaaatctaacagcaagaatggaaaagaaactgccttctaccacattgggttgccatgaaacctaacagctgggggcgcctgggaagagagaaaaagtcacgaagtttcttcctgacactcccactgacaatcgtgattctgacaccagaaatgccttttcttcatagcatttcccttacatggagaaatacacctcttgtcttgcttcattcacgttaaatatcttaggaagacgaggagacggagcccgtactcttgaccacccacctctgaatcacctcctctggatc

SEQ ID NO: 38851 - DNA, 380 bp, Homo Sapiens
tcctgggattacaggcatggaccaccacacccagcatattagtgtttcttagtgggcatttccaaatcaggacactgaggcccagaacctttgtgaaattgaaagtccacatgactttttacttaattgaaagtccacatgactttgaattaagtaagtagatgatatatccagattgtctaactcaaaagccagtgatgtttccatgacaacacactgttagaaggaactgtaccctgcccatcatcctccctactctgctcatctcagaaacccagatatagggctggtgacagggcaagaaggtgaggcagacaggagagcatggagaaagcagagcggccacttgccttgatgctctcattgattcgattcactat

SEQ ID NO: 38852 - DNA, 371 bp, Homo Sapiens
agggagctcactagggttcttaggaaatgatgcaccagggccaccgcacagccctcatgtctcctctcttcagtgtcctctctgcctccatcacctagtgaggagggaacaggtgcaggaacaggtcgccagagtgtccagcaggtgacctcccacccccctaccctcgccgcccccacatcggttatggtctcatcagtgccaccactgtcccctcccacctgacacttgggcatcccctcagaatctccctctctcctcatgccatctcccctcctcatgccatctccccgtgcccaggcttgctgtgccccgtgactctccgtccttggcacgtccctgtctgtgcactcccctagccctgctccgat

SEQ ID NO: 38853 - DNA, 364 bp, Homo Sapiens
gaatgacacgtgacgggtggataggcagtgccaatgagacccgccgtggtcactactcagaggagcccggggcatctggtgcgaccagtgtggcttccactcgggtgggctgaggctacagcggggcctgggcagggctgagtgtcccccgttgaacacagggcccccgcggcagcggctggacctgcgcaagccccattgtctcaacatgtccaaaaacccagggctcccagaagggaaagaccacagagtggaaagcagaatggctcaggacctgcccagagcctcgccaacaccggacaacagcagagaaaagcctcaggacctgcccagagcctcgccaatgctggacaacagcagagaa

SEQ ID NO: 38854 - DNA, 385 bp, Homo Sapiens
agcccagggacggcactcacggatctaaagagaattctctaaagtactgtgtttccttggaatcatttgctttcagtctgcagtagcttccctcccacccacaggaatactgccatgggtgaaggcttcactctggtgcagagttcacaagaggttccagctgacctctacccaagcagcttatactgtgtcctccctggacttccctgttggccagtcaggcccaaacacggatgtctgctgatgggaatgtacaagcacagcaaacaccagtatgatttcatcatctaggcctccaggtcttggtgaggccactgccctggtgcccagaggaagtcctaagtacagcggatgtggacatggtatggccagaccaggcaagagc

SEQ ID NO: 38855 - DNA, 368 bp, Homo Sapiens
tgcctcacaggtgtgagagttaattaatgtttgtggggcagctttgagatccacagatgcaaggtgctctataaacgcaaaatgcaattcctcattagcactgtcagacggttcccaggggaaacagctcaccctgcaccacgaggctgctaccctcagccagatgagtctgagacacgtctgagaaagggctacgtatttaggcagagtgcttttggagggaggattcaaggataggtcactagcttccagaagagatgggtgtttttagaacatgtctcattctcagttggcatcgtgtccctgaggcagagggagagtgtccttcagtgcacacagctggagggaccatagatcagagggaacag

SEQ ID NO: 38856 - DNA, 385 bp, Homo Sapiens
actcgcaggagctcactgtgctgagacaaagtggaagctgccagtactcttaaagacaggcctcagcactggcattgggtcacttctgatgtactcttttgggcaaagcaatcacaggccagcgcaggtccaaggagagaggaaatagactcaacctcttggtaggagtcgtagcaaagattttgtggccagtgattcagttgcagttatctgctgctacctagcaaactaccctcaaaacacagaatcttaaaactacaatttattaacatctttcacaagtttgtgcattgcctagactcagctcagtgtttctcacttgaggttcctcattctgctcagttagttggaggcttgggttagagtcctctgaaggctctagcgg

SEQ ID NO: 38857 - DNA, 464 bp, Homo Sapiens
gggtgagagtggcctccagggcttctgccacagattccagagcctggattcaggattcacgaacccacccagtcacccccggtctgtgccctggtgggctcccatgcactcagtcctcagtttccccatccggcagcaggtgggtctgtggcgacttgcaagtgagcccagtgtgagccgcatccccacacactgcccggcccccacccctcgggctccatggcagctctttccaggcgcctgctcttccagtctccagagaagaaaggcctggggagcgggcggagagtgtctatgctaggatcagggtcagagagggaggagctggccgtcaggtggaccaggaagcctcagtcccatgccccggccctccagcccgatgcccacccagtcctgccctccagcccgatgcccacccagtcctgccctccagccccatgttcaccccagcctgcccttcagcc

SEQ ID NO: 38858 - DNA, 374 bp, Homo Sapiens
cctgaacaggctgagttcctgagggcagcacatccttgctcattccccaggccctggtacctaggacggcactgggcacgggcttggaatacataggtggatagatgaggcagtggctgggtgaaccagtcttcactcagggacacaccatttcatggggccccttggggtgtcacccacctgctgctgctgtacttaaagggccacaaggccatgtgaggccacctcattcctgagcagtacggtctggggcctggatttgatgggctccactttctcaccactcccacccgcaacccatctgctctcagtactgcaggagccatgatggtttcaggcattcctgctgatctgcccgaaccattagcgaaggc

SEQ ID NO: 38859 - DNA, 360 bp, Homo Sapiens
ctgcctgagccctgacctaatttcaagatctatttgctggaatcttggaggggaagaaaatctaaagttgtcagattacttggatgtttgacttcatgttgtgggagtgaatgccttctgggaaatgggaagcttgggggtatgggaaagatgggacagggagtagaaaggctcaggaaaagaattctggggctaactcatcctctctctccacagcttcagcccccggagctgcccccttgaccatctcttctcctctccacgtgccatcctcactccctgggccagcctcttctccaatgccaattcccaactcctctccccttgctagtcctgtgtcctctacagtctcagttccat

SEQ ID NO: 38860 - DNA, 366 bp, Homo Sapiens
tgtaaacaaacctcagagaggtattgtcaaaggctaagtctctcctgcattggtagagacagactggattttgttgttgttgctaataattttgattcaagttttaacagctctcaggcctgtaaggtctgcagtgagaaaggaagtgagcaggaacgtcagaatggagggatgtgtgaagtgactgttatttattatccaaagcaagatactttgagaatgaaagaggcactatgaagaattacacaaggacaatagacattaaaacagtccagggaaaccaggacatagggtcgccttaagagtacaagggtctgggaaggaagggatggggaaagtgggttctcagactgaaaagaggtccag

SEQ ID NO: 38861 - DNA, 355 bp, Homo Sapiens
ccctgagggctttaggctgagattgcaagagctctcagtgtttgcctttcagaatgagacctactgagccctcttcaaggacctgaagcttcctgctgaggtggagcaccagcccgcaaagagttacaaaaacctcaagaactccctgcatttcttttgaaatcaaatatttgtgaagttggggagagtttctctggaaagttctggatgtagttgagagctcagagaccctaaggctggaagttggagctttgactgccatctttgggttgggctgaacagcccaacagggccagggaggtgcctcgggagagttgactgctcctcatcccccttcccctcctaacacacacac

SEQ ID NO: 38862 - DNA, 362 bp, Homo Sapiens
caagaaaacacatcctaatcaccaacaaacataagcttctgcagtcacactctgatgtgataaattagaattctgctctacagaagccaacacagtatggatgagttgagagttatttttaatgttaacctagaatggtaaagcatcagaatgtttgagcctaagctgtacagaggcaatacaaaattctattactgtagaattctaattttcctttagacacaattcttttacattttaactatatcttcctgtactttatcccaagagcaatgcagagttattaaaatgctttgagtggaagactgaagtgatagagatggtctttatgtaaaaggtatctggaagcgatgctcagacta

SEQ ID NO: 38863 - DNA, 460 bp, Homo Sapiens
aggtctagaggaggatagaatcttttatttcatatccttatgtggtgcttggaaaatgttcttaaccttgaccatgtattatgtttataattaaaaacccaaagaaccagctcatgtttggaaaaggaatcttccactgaaacatttggatacccgacgttctccctggacacttggcccggcaatagttggggtctcctgggaagctgagtgctggcttctagcctctccagttccctcagactctgtcttcagctcgggcccctccgttctgtctccctcgactccaagtcaggaataccgtgggcttcctgccctcaccccacacctcaagaccatcccactgcttgcctgcttgccccctgccatctcgcactcagccctgggtgcctgtgaagcctggccccactgtctgccgggggttcctgcaacacccccctacttcatttctctgggcccc

SEQ ID NO: 38864 - DNA, 480 bp, Homo Sapiens
gggtcagggggtgggggatagcgaggcgtgtttcgtcagcccaagagcatcgttaagtggccatcaggaaatcacagggctggaggggctctcaaatgaagcatcaccggctttattcttttagcaaatgtgtatcctgcaccaggcgctattctaaggaccggaggttggtagctgtgccagtctgggcctgtttgcccttggggtccgttccttgtccttgctctgatctgctgggtgtggtcgggagccaatctctgtaggttcttgtgtcccaggctcccgtgtcactggattcaacccgtgggaggagctgctaggaggttggaaggcaagaggaatggagaagccagtgtttctacctccctcagtctccagaggccactctgatggcacctgcaactcctccgtggctcgagctcccactggacggaccctatggcctgtcctctgtcggcgcttccagcccctgggcctcag

SEQ ID NO: 38865 - DNA, 363 bp, Homo Sapiens
gcggtatttatagcagccgtcggccactgaaggaggaagagacggcgtctgggagggcatttcagaggactgagcaacaccagaggcgtgaagcttggtgcacggcagccgggggctttcttagtcccggaggaattggggatggggacgtgaagagaaaggtgggagccagactgtcaatgctcccggacgccaggcagaggacttcatcccaggcttcagtgctcctggacgccaggcagaggacttcatcctttccacgtgcagagtgatggaccacagatgtggatgaatgtgacgggcctggaacaaggcacatagagagtcttacactttctggcacgtcctcatggtctctgcttg

SEQ ID NO: 38866 - DNA, 359 bp, Homo Sapiens
caaggacagcccccctgcggccccctcgtccttcctaaggcaattttgcaggcggcttcctccaatcaagcatgcagccgccctgtgtgttcattcattttgcgtcagtggccatttcctccctcagcagtcaggctgcatctccatgaggggtgctccttctaggggagtaggcacaggaagcaacagctggggatcggggtcctgccttcctgcatctcccacgatgaggacggaggccgccgccccgggcctgttttgagcgccagcagcagcgaggcacccctcaaggaagcagcgccctgcagctcctttatctttttgcaaaagcgaatccgactctccctcaacgagccagc

SEQ ID NO: 38867 - DNA, 368 bp, Homo Sapiens
ggtgaaggagaatgaaatatctgctcagggaatgcagggccccaaccaccgcttaccccacgtggctggcagagcccagggactactaccctctggagagggagatggaacagcactgaaaactgcggaccagtggaagctggccagctacacgtgaggtgtcctggtcttcctgccccagcatgggggcagggcaggcagcattgggccctcccagtgaggtcacaggggctaagcagcctgctggacaccatgccaagtgggaccgggcagcccccagcggccagcaccctgcatgcccctgcaggtcccgccagcctcagtgccctctgctacagatggcagttccagatttcaactgctcatca

SEQ ID NO: 38868 - DNA, 413 bp, Homo Sapiens
tgggcagacagagataaagtaaaatataaggtaaatatagtgaattatcagaggccaggaggaaatgtggaatgtgccttacaagttaaaaggaaactttcaagcaaaaaaggacatgagtaccaagaaactagaaacaaattctaagcaatgatatgtggactaattcgatgatctacatggaggtttactgcctttgaaagaagcagtgatgactcgaagcctatgtggcctcattagtgaaaataatttcagaggaactttatctttgacaggatttacagctggatagattaggaaaaataattcaatggcataggatatttggccttttacagggcatttcatgacatacttgtgaaagatggagaaatataggccatgcaatgatatgaatgggtgaacatagagct

SEQ ID NO: 38869 - DNA, 509 bp, Homo Sapiens
tgagggcgagtctagagaataccccgcggcccacagacagtgggcggacagagcatcagaaactgactctgtcacagctgtgcaggccaaaagtcagaaatcaaggcatgagcatgactggctatttctggaggctctgaggggccctggatccatgcctgtctcctagaaccttgtggttcccagcaatccttaccgttcctgagcttggaaggctacattgctataatctctgcctgtgtctacacgtgatgacattctcccaggatgtctccatgtcaacagtctctctcagctaggtcttataaagatgcctctctttgaatttagggcccaacctaaatcaggatgggcccatctccagatccctaatggattatatctgccaaggacctttttctacataaggtcccattcacaagttccagggagtaggttgtgaacagatctttctggaggacacaattcaacccaccacagcgagtgtttgcatttccatattctgcact

SEQ ID NO: 38870 - DNA, 393 bp, Homo Sapiens
tgttcactgaagagctttctaggtgattcacgggtaatacttggagctacagacaaatacagcggtttctcaaatcacctaaagggatctttcaaaataaggatgtgttactctccaaagactcctgtcctggatgttgccaaaacacaggatgctcagactctgacgcctggagctacagagcacccttggccctcggtgctggagaagacccagcaccaagacgtgcccaagcttccagcttcgcgctcagctgtgatgtcgccacggggacaggacacagcccatggtggcggcactgccaagagctgctgcttcagcccagtaaacacagagttgcttcacagccctctcctggtctctgtgcctgcaacgcagcttgtggacagggac

SEQ ID NO: 38871 - DNA, 395 bp, Homo Sapiens
gagcaggctgccgggatagccaagcgggcagccagtgccaggccaaacaggcaattatcacccacagaaaccccactgcccagcaattgctcaaggccatgaaactctgggcctgctgattcctgaggcagagggcaggtgaatcaggagcttgtgttgacagagagaccccaagtccttgagtaagagtcccacacaagcgcctggacttgaattcactgtgcccccaaggcgaggagagcactccggtttagacaacaaccaagccgacctcagcatcctcctctggacttgatttgtgctttcctcatttgatggttagagccctgccatagccacctccagtctagaccgctagacagaagatctgttttggctgccttctttcaggctat

SEQ ID NO: 38872 - DNA, 357 bp, Homo Sapiens
gaaaggactgcaggggaattggcctagcagtggctgcccacgcagggcaggtgtctggacaagatactctgttgtgctgggaatgcacagtgtgtggggtggcagtatgtctggagagggctccccacggcttctgacaggccactggcccactcaggtgtggccaggatcctctcgagtggaggctgtggccactactgattactctgacactttgagccttggaccagaagagtccccagcatcgctcacctctggtcggataaagtgaggggagaggtgttagagtgtagcaggtactgagaaccagtgatagtaatccattgtgccatgcttaccattccccccgaccctagc

SEQ ID NO: 38873 - DNA, 394 bp, Homo Sapiens
tgggaaggcacaggagttgggctgacgctgccaggagtgacaaaggcacagacgaggggatgaagatggggtcactagggggctgccaggagcagccagtggacaaacagcagactatgagagacagatggtgatggggctaggtggctggtgtagtgagtgcacgaaagacagtgggatggatggggatgggacacggagaagataaatgacattgtaatttccacctgagcgtcgagcagcctcttcttgggttctggcagcggctcagccatggcggggtggtcccggcgcagctcctcctccaccagcatcagcctgccaatgatgctcttgatctgggaatccttctctgcctgctgctgccttagccccttctcactctgctccagtc

SEQ ID NO: 38874 - DNA, 373 bp, Homo Sapiens
aatactggagaggttcataacacaggctatttggactagggaaaaatactaggtacagtgaaagtcaggatgtcacactgaaaacaggatctcctgctctcttccctaacatggctcccataacacaagcaatcaggccttcacacttcagccaggagactggaagtcttccctaggtataccccaagagaagtgggaatgacactgaaatggtttccccaactaaatagcctactgagaacaactatagtgacgttcatattccgtaagcccctctaccacccagagcttccaatatactttttagtcttccactctgaaatatgactagacagccaagggttaccagacaacaaaggggtaaggctggggg

SEQ ID NO: 38875 - DNA, 372 bp, Homo Sapiens
gggcgactgagaggggcaccgacttatgactcacagtgtagacatagggtcacccagtgtatgacgccacgacgccacagacatacctggtgtagatactcaattttttcatggttcaacagtacaccagcttgtgattgggtctaggaattcagaaagccccagcaggagctatacccactggttgggaataacttcccttttgggggacgggtcctttgttccaattagaaccatattttcttggaaagccatatcgaagccatccccattctaatcatcatgactgccttgtagagggggtgttgagaagccgtcggaagtaggttacccgctggaggtaggtggatcctaatcttaggcctttgagag

SEQ ID NO: 38876 - DNA, 353 bp, Homo Sapiens
tcctgcagataaatctctgccactctaaatacccaagctgcccctaatcccgctcaaagcagccctgagaaacatcgccaattatctactccataccaccccaaaagaatttcaccgtcccaacactttaccactatttcgttttatttctcttattaatataagaagacaatagcaactaataaaaacttaaaagaactcaaagaaattttaaaatacttgtgatattgtgacttattataagaaatataaatctggtctttatccccatttcctggcttacagctccgaaagcccttgcattctctgaagttataagtgtctttttgtatgctaataagatgactgatggc

SEQ ID NO: 38877 - DNA, 373 bp, Homo Sapiens
gggtggacaataccggcaggtatgaacaaggtcactgcaggcgaagaggaagagacaaagtggcaaacacgtttttaaacaatatatgcctatcatctgcccttattcccctcaaaccaaagagaacagcgagacttcaggtctgccactttaggggctctagtataattgtcatgtcccagtaaaattcaacagtggtcaccataagtttgaaagtccaccattctttgtaaaatccaaccagcaattccaacacatcagggtctctggtcttgaattcactatcaggctcaaacacaagttctgtgtactaagaagctaaggcccacacccatcttagaccatcaggaaaaactcatccgaggctacccac

SEQ ID NO: 38878 - DNA, 369 bp, Homo Sapiens
atcagttatctttgctaataactatctttccataatgtattgaatacaacgctattgtatgttaatacgtagttttgcggttatttgcttacatgtctgtttctgctactgaattgtaaatcccttgaatatagggaaaatatatttgtatccctaccatctgaaaatagtacctgcatagtattagatggttgctaattgcttgtttaatgaataaataaaaggcatggaattaggcaggttgacaattattgattgattttatccttataacctagtgatgtgtagatggcattatttctgttttatagacaaggaaactgaaatgaagtgaagtaaattattccaaagtatttgactgctaagtaa

SEQ ID NO: 38879 - DNA, 399 bp, Homo Sapiens
caatactgtagaccttgaggttgactatcttggagtctggggtctttggtaggttccacagctggacaaggctccctcctccattccccccatgtctcgtcccctttcttgtggggagagttgtgatcaactgcttgggtgacttgcttgtgggagccccgggcttccagataagaggctggtccagctctctctgatcccagggatctgagataagcggaatctccttgctgccccaggccccgactcaaggaagggaaccactgaccccccttccttctaggggcaaagtcatccatggtgagggctctttgaagatcatctctccaacccctgccacatctcagatgaagaaactgaggcccagaaaagcacagtacctggctcaggatcatgttg

SEQ ID NO: 38880 - DNA, 391 bp, Homo Sapiens
ctgctatactctcaaggggtaaacctgtgcgttatcctgccttagagactgactaaaactgtatctaagaaagattaagctgcacgtattctcacagttaatttgctctaagtctgactgcatagatgttactccttctgcaacacgggtaaaatccactttcattgtttcaattatccaccatgtaagtgcctatgattccccaatcgcatttctaattttagtattcatcctgagccccaaatctatccacagcattcaacagttctcatctcccttataagtcctacgaactcatccaaaaaacgaacacataatcccatatcaaaacttgttccttctcctttaatccctttcattttttttcactgattagtgaatgcatattgtc

SEQ ID NO: 38881 - DNA, 357 bp, Homo Sapiens
ataaacccgcgtgggatacacgtacacaaactgcagcaccttctggaaggcagaaggaacgcatcacgatcttggcctgagtagggaaaggaatgcttcacggagcagacgacatttggtttgggtctggcttttcattctcttatcagaaaggtgatataaattcctaacgatacagtcacttagtggtttgctagttgtactctgctgctgactggctctgtatgggcatggccatgtttggtagttgttcaggattcctatctcccaagaaatgtggcaatgctaagtaactttcatttatgaccttgtgcagtaccttgagcaattaggggctaaataaacacaacatctgaa

SEQ ID NO: 38882 - DNA, 391 bp, Homo Sapiens
tattggttacccttcttgataaacacaggttgtgtaactgtccagtgcgttcatcttgcccgctgtctagacagagctgatttatcaatacaggcaaattgcaatagaaaacaaatgtaattcacgcagaaccagccgtgcaggagagcggagttttattattactcacatcagtctcccagaagactcggggatcagagattttaaggattatttggtggcgtagtgcgctgtgaatcaggagtgctgattggtttgctctggaatgaaatcatagggagtccaagcttgttctctcagtctgattcagttcctgggtagggggccacagaactggttggcaggtccaggtggggccatccagttgttagaaatgcaaatacctgaaaag

SEQ ID NO: 38883 - DNA, 355 bp, Homo Sapiens
ctggactttcccttgacccagtgcaccagcctctcccatctggagagcttttgtgctagctccgtgcccctctctgtgatgttctctttcagagcgctcacaagagtgactccttgctggccttcaggtttcagctcacagaacattttgtcatatctgtctctgtgatagaggtagctcgaggtgccctgctctgcgtcctccgtctgtgcatttccttcacatcccacagcacaatccatgatatggcctcgttgatctactgcctgctgtgttactgcctgccttccccactctccaaggcccagctccatcctggtcaacattctaccctcagaatctatcaaaggtcttt

SEQ ID NO: 38884 - DNA, 415 bp, Homo Sapiens
gtaggtattgtatgtgaaaatcctactcgtatcatttacactaactatagtaatattctattgtatgaatatagatagttactactgtcctactgacattcaattgtttccactgtggactaataacaggttgaacatcctaatccccaaaccaaaaatgcttcaaaatctagaacgtttttgagtgtataatatgcataaccctcaaggaaatgttctttggaggattttagatttgtggattagggatgttaaagtggtaagtataatgcaaatattccaaaatctgaagataattgaaatctgaaacagttctggtcccaagcattttggataaaggatactcaactggtacaaacaatgctgcaaaatagtgttaaacatatctccttgtgcatacacacaagtttctttc

SEQ ID NO: 38885 - DNA, 411 bp, Homo Sapiens
cgtgagtcagatatatcttacgcagataaagccactaaacttctcctttctttctttgtgctagtcaccgctgcatttctcataaaggttatggaaggaaaaaaaggaaccatgacttgacttcctttgtatgtttctaagtttctgagtatgataagccagtctggctaataattcccatggtgaattgaattccagtcattttcaggaagctggctatttgcaaagttcattttatactaggacgtgattgccaattcctgaatgggaggctacaaggttgtggaaaaaaagattgagctagatttagcagtcctgaaaatcatgaaactttcttcatgtgaatgaggtctggttacttacagtttaaatgtaatttttctgttttttaataagagagctgttatagac

SEQ ID NO: 38886 - DNA, 393 bp, Homo Sapiens
tccaaactggttgccatgcacaggtgctacaacaacaagtgatgttggaccctcagcccaggctgaggcctaggggccagtggagagtcccctcaggcagctcagatggctgaggaaaggctgaactgaaagggtggatgtagggtgcaaggaaaggggcagaatttgggaatcaaatccagcctccacctggaaaggatgagaatcacatttgtcgaacatctactatattccaagcgtcatcttgggtatgttaattatcttagcaatcctgtgagggaggagttactggccctgttgtacagaacaaaaagctgaggcttggaagtagcttacttagcttactcagcttactcagcagacagcaagcggggggcctcgtctctgactgta

SEQ ID NO: 38887 - DNA, 385 bp, Homo Sapiens
taaccccatactgagtcccacacttcccgggcttacccatcagtaacaagtacttgaagagtatggccatcccaaataccggcatcctctgctgatttttgaagggcttctgctaattcttggtctgcaatctcctctggccgtacatcctctcttccagccccatatgccaaccgggcacactctggtagctctccctcaggaagaaaggtggtctgttagcctgtggtgccgatcacgagtacatttttcttcaggtcgatggaacactggtgccgtttaagcatgtccagtcccagaagcatgtccatgggctgttcctcaagtatagagaaggaacatggcaaaaaatctccttcaatctgaacctgagctaaaaagcaca

SEQ ID NO: 38888 - DNA, 384 bp, Homo Sapiens
ttacggggatgggtagcttttcctgctgttgacaggcttttacctccgtcctagggtgcagacccttgaagtcattgagagagtcaggtcacgtgaatagcatgcagatcgtagactccccacaaaccaaggggtgctcctgacccagcttcatctggagctattgccctcacaaggacagaagcaattaaatagtttgttctgctacagagtaaaatggtctactgagaactagtatgtacttttatatgtttttatggttaatgttttcagtgacccatgttataaagtaaaccataactacttctgtaagcatgtaatagtagtaaagcaaaactgtatattcctagatatttatatcacttcactcaaaccctcggagta

SEQ ID NO: 38889 - DNA, 437 bp, Homo Sapiens
ccagcttcacttatgctaggctgtcagctccttgactgatcctctccatttctataccacaaagggttgcagtctttaaggaagactcctggacttctaatttttaaaccatcttacttcagatctcatggctttaaatgctatctgtacactaatgactctcaaatgtaaagtctgatgttaagtcagacattctccacttggatatttaagacattttaaacttagtatatccgaaatcattctcctcatgtctgttattcacaacaaataaacagctgctcctttcctcagtcattaaatggcaatttggcagtttaggccagaaaccttgaagtcatttgcacagctagggttctctggaaagcagagtgacataaagattagcaagctatacttttattaaagagtgctcttagcataaacaactccagtaa

SEQ ID NO: 38890 - DNA, 396 bp, Homo Sapiens
agtaaacagggcagggttcatgtccttagacaacgtatgatctatcacctccgatgggaaccaacatggaaactcttagatgaaggtcagtctggctggaccctaccttacttctaggctagcaaagaatcttatatctctggcccccatggattagactctagacatgggagtggggaggagagagcttccaggcccacttctccaaggcaagcaggctggctagctctgtccagatgctagaggctcagaagggcagtcgatgactgggccctcccagtagggcagtgatcagagcactgcttctgcctggtcttagctgtcaccttgggcttgaagctattcttgggacatgttggtatgaacttgtcatagctgcagtcaggggtaagggtg

SEQ ID NO: 38891 - DNA, 417 bp, Homo Sapiens
tactgtatcatatgttacttcctaaatagatcagaacccgcctttagacttactattcagttctaaggcatgtgctacatgctaaggtaaagctgagaacaaggcagccccagtacttgccaccatgaaatctacagatatacctcatctgcctatttctgataaactttcttttacgaataaagatgcaaatatttgcttccaaacagttttctcaaatatccacaacatccctggccaagatatatgactgtaaatgaacaaaaagagaaagcatgtaccaatttctaagtgatgaaagtattattactacaatctcacatttatgtagcctaatcttcaagtttaaaatatcttactagttctgactgaaccagaaaagaaatctataaatcccaggaccttatcgtacattgg

SEQ ID NO: 38892 - DNA, 428 bp, Homo Sapiens
gtacccttacggtacacataggtgaaaacattgaaaacacggagaagacattccaagggaaacaactaacctaagttaaaatgtagaggtagctctgcagatagatactgcctaagtgcacggattcctaaacactctgcttagattcagaactaaacatatttctttaacaatatttactgtgtgaggctgagacttgattctagcctgttttgtgttttctacgacactaccaactttctttgtgggttggttgcttggcagcaggggtgggaatagttgggaatggacaagaaaacaagccggcagcgtagaaccacctcagagttcacaattggtaatctacttcctgtgttcttagcaaagtcttgcagtccagggcagtgacctggggcatttggacttaaaatctgctgtttacataatca

SEQ ID NO: 38893 - DNA, 428 bp, Homo Sapiens
actgtcagctttggaatcaaatgaagtccccttcctaatggtctttgtcaagataaagaaatgaaagaaaggggccaagggttcgagagagttgagaccaaaccagaggctgatcctcccccttagctaatgcaatgggctaagcgagagcttcactgagctacatgtttagtggctgctggttaattacctgagtcttaaaataagagggaacgcccatgttggaaggcccagtcaaattacaatatgggactgagccgctgggagctagtttccagtggagcacagggtctccaatgatggtgctgagaggccttaatacgccaccaggcatgctgctaagtgatattttaattaaaccttaagtgacatatctcctgtctgtgactctgatggctttttaattcaggtcccattgcagcacgact

SEQ ID NO: 38894 - DNA, 438 bp, Homo Sapiens
tttccttatgagaatgtcagacaaccttagtatgttaacataacctcagagattctacaaaggtctcccagaagaaacgatgcctaaataagacttagtgtggtcatatagaaggagagaaagggtattaatagtaaagagaaggagaaggagtggagccaatgcccagttcagttttgaactgcctccttgatacttccaagaggagattctgccgtcaggtagttagagaaacaagtcttaatctcaggagagacagctagactgtaaacacagatttgggaataatcactagataagcagaaatgagggactgtttacatgtcaacattggaaggaaagccttgaaatttagtctgataaactaaagaaactccctaaacaatatgccagagagaaaaatacagaggaaaatttaaaacaaaatataaggctgca

SEQ ID NO: 38895 - DNA, 424 bp, Homo Sapiens
ccacttactgcatgtgtcttacctgaagctttgacattctttagaatgttactggcagaacatattgtttgcggtttcacattctgtttccagtgtcgccatataattgctccctagctctgtagaaaacatatttttgttttggacgtgcacgcatgcacttgtctcaaaccaaacaactaacgcaggagtggagatagagcatgatctcttggacttcggtgtctagtgcagtagtagttagaggtcagagttcagaataaatgacttttgtgtcctgtctgggaatagaatttgacaacgtagtgagtaatttaggaagtggcaaagttgtgtttctgtctctaagtccagtattcactttcatagccaagaagctgtctgtatagtttagttcacaggaaggaaataaaaggatcagggc

SEQ ID NO: 38896 - DNA, 447 bp, Homo Sapiens
ttacgcttctggagatctccacagacggtcaaatctgcatatcaaagctgaatccttcatctttctctcccacttgagccccaattggcaacaacacgcctgcactccaggctgagggtcaggcttaactgtcccctctcctcatctcgctacatcctctgcaagctttctaaattttatttcacacacatttctcaaatccagcccccagaatctaactccattgccctgtgtccctctgccctaccctccgagccccccaataacatctgagaacccatgttcctctccactgtcacccactcaatccttgcagcagggacctgcactggttcctaccccgccacaggaagcttcctgcttcctgttcaggctccaccctctccagagaaaggcccctcctccccttcacccagctaataactctgactttgttcacggactccc

SEQ ID NO: 38897 - DNA, 435 bp, Homo Sapiens
cggccagctttaccattactgtagagaagctgggaagtctttggcttgcttctatagccctgtgcacgtctttcagcaggctttatatagggctgtacagttgtcctataagcctatagatggcacttatatgtaacagttagctatagccaaggaggctaggtatatacttaatccttgtttactatcagctctctgttgcctcaggcattgggctgattggtagactgcgcagagatctgagatccctgcttagccctggtgggatgggagccatgaatggtggggccagactgggcaattccacctgctggtcccctgatggcagacacaagcaccagtgccaggggaaagtccagtgggtggccagcaggcctccagaggtttgcctgggcatggagctaggaaacctctttggctccaaatactctctgc

SEQ ID NO: 38898 - DNA, 402 bp, Homo Sapiens
gccacatagaccgggctgttcttcctcacacccaccgtaacctcagaaccttagtactcgctgttgactcgagcgcaccttctctccttttttagtccttgcttacctcctctgtttaggcctctatcaaatgtcacctcctcagagaaccttccctgaccaccctaaggtgggatttcccatcctgatactcttatctgcttctcttattttattatcaggctttcttgtacatgacattattataatatgaatttattttgcatttggttattgtctgtctgccactgcaatgtaaactacttgaagcccagcttgatttgttatatttactgtagtgtcctccatgcctggaatggtacctggtacatggtgggcacttaatactgttgaatgcacgta

SEQ ID NO: 38899 - DNA, 422 bp, Homo Sapiens
taccattacggctacacttcccagctcaagtacaccattctactctatcttcatgagtttgttttaatattcagctcccccaaatcaatgtgaatgtacaaagtttatctttctgtggctggcttattttacttaaaataatatcctacagcaccattccatgttgtcactaatgacagaatctcattctttgttatggctgaaaagtactccatcatatataggcacattttctttatccattcatctgttgatggacactgaggttgcttccacatcttggatattgtgaatagtaatgcaataaacataggagtgcagttatctcttcgatatattgattttcttttttggtgtatatatctagcaatgagatagctggatcatatgatagctctaattttagttttttgaggaacctc

SEQ ID NO: 38900 - DNA, 451 bp, Homo Sapiens
cctacttactgttcactcactatgccccctccttagacatggctctgacttacccctgacctgtaacctctctatgtcatcccttaccccgctattagggctgtggtatgctacttcctgacttctcaccccactgaaccaccctatctgcctccctgctgaatatcactgcagacctttacctttgacctatgacccctctcaacccatactgggttaataccatctgacctcgacctcttggcctctccccaagccacactgccctgagagtaccccttgaattccccactgagtcacctcggcacacactgggaaaaacccctccagacttcctaagcagctgtgtggtcctgacccctcaccctgtggccctgtcctctgcagggtctcccagctctgacagctgcccaggcctgagcaatggggaggaggtagggcttgagaagcc

SEQ ID NO: 38901 - DNA, 451 bp, Homo Sapiens
aatacgagctgtatatagaactttgtccatgaagcattttccttgaccatggagtgtttacagaaatacaattccatttttaaaatcatgtatttaaaatgaaaatacagattaacagcttctcttgataaactggtagatctgatagctttgaggccacattcccaaacagcaatggtggctggagccaaatggccagcatgaaacaggcattctcctcctctccacagtccccaagagtgtcttcctcaccttgagcttatgccggttaccctctatcgtcccacttgacctcttttttgcttacagtagaaaaatatttcctcttatcccaagggctgcttttactcattgccattgtttgccagggccctgcaggcacttaagtttgtgagtccgctgcagaatgatggagtcaagagaggagctgtaaaacacagaacctctggct

SEQ ID NO: 38902 - DNA, 470 bp, Homo Sapiens
tgcagcgtctaccccttctgcgttcactagtaacaccgtactccgcgtcgtgtcacagtcgtagagtgctttctaccgcggttactacattgtttacatgactgagatatcacttcccaaatttcagaatgaggaatctgaggtccaagagacatctgagctagtgagcagcagaggtaggatctgaaccctggaagccactgaccatccacatgggtgccttaatagaacccttctataataacagacgcagtgagcaaatccacagaagtctctcaaatgaaaaagctagacgatggaccgatagcaggcgcatcaggtaatcaggtccatgagggcaatatcctattaggcggtggccaattgctaaactgattcgcctcgtgcaaatgaggaccggtgaccgtctgagactccctagtgctctgcggactgggagcaattccaagacacgagcctctggtgaaggc

SEQ ID NO: 38903 - DNA, 452 bp, Homo Sapiens
acgatacaaaagaatgcacattttgcaaaacacatctgtacttgcaactgaaaacatgtttccaagaaccggctcagaagaactagctgagacacaaaatgagcctgaaactttcttaattatggcatgatgtgctagaggcagaaaaaaaccccatacaacataaataatgagtatggcaaatgtttcattttcaaatgatacagtcttcttattgctaattccttgcataaggatgtttcctgaactctgctaccaaggtaaggagacagtggtatagagaagatatgaggatcgcacctaatttcccttttttggcattctaatgctcccattcacatgtggcagggcatccgttccactggatttagcctagtttggatcaaagcttcctctacttcatttaacagatttgctcagatggaaggtctcagaggagaaacaatgttagt

SEQ ID NO: 38904 - DNA, 466 bp, Homo Sapiens
gtccttacggtcgagcattctagaggaaggtcatagaccgagttaaactcaccatttgccttgcactgcacatccttgagcccaatcacccaactcctgagatcttatcaggaaactgctaatcaccagattctacctattaggagactgacctttccctggatttggctgtgaccaattactattttagagagacagtttaacaacctcctgaacatcacctgatggtcctctgacattccttgggaggtgagagggccgtctcccatcctgctcatctctgcccaactatctactgtaacagttaggtgcctacatttcctaagtactggttactcagtttctcccagattcccatgaaattgagagccagattgatgtggcttccattccttgaaaccaaaagaattctcaccattcattttcacatgtctacagcaaggcagaaatattccattctaggaca

SEQ ID NO: 38905 - DNA, 359 bp, Homo Sapiens
tccttactgagaagcttgcagagtgtcctttcccttctttggttttcctcctacctctctgtcacctcttcctctgcctcctttgctggcccttcttcctcagccagaattctaaattctaaacactaggagtgccttactgttctcttctctattcctctctccctggtgatctcaaccaggcccatgagtttaaatactgtctcccatgctatccaatagggtggctgttagccactcataactattcaaattaaaattaaataaaatttatcctgaatcaaggaccagaggaaaaaaatgttaaatagaatttaaaacttagttttctgggtgcactaaccacttgtcaagtactc

SEQ ID NO: 38906 - DNA, 426 bp, Homo Sapiens
aagacatggctgaactgtactgcataatccagtaaagtctgtcctgggatgggggaaggaaagctggctcgctgcgccctgcgactatttaccttaccccgcccaccttgtcagtgtgacttcttccacgttcatcctgtccccgctttcctcctccagtggaaacctgtaagtgcttcagtgctcacctctgaggcccacactgagaatcctcagggtggaggacggaccttctccactccccaacccttgtggttcctgcagacctgtccagctgtgtatggggtggaactgtctgagtcacatctgagcagcaagtttgtctaggcgtgaccagcagccaactcagtccatctccatcctgccacttgccagggacaatctgcagaggtatctttacctggggacaaatccctgttccttggc

SEQ ID NO: 38907 - DNA, 395 bp, Homo Sapiens
accttactgcagcttacccttactgtagcatctctctgcctgagatgtatggcaatgctattttgctagtctgttcttcattctctattacgtgcagagttgaggactgggttgctttcttccttcaaatctctacctaggccttaggaccaagttgttcagggtacgagagaataagctgaccccacagggctgtcaggtgccacaaaagtcttctaacagtccttctcctccctggagtgagctcacccttgttcaccacacaggccttttacacagcacaattacaacattgagctcgacacagagacaggcactgccctgcacttaacctcctgcttattcaaatcctcactctcgttcctatcaaatgagaatgaacattggggctttcc

SEQ ID NO: 38908 - DNA, 397 bp, Homo Sapiens
tactgcacacccggagattttaatatcttcactgggccgtcctgtaagagaatagttgatagtggctttgtgggtcatttcctctttgtaatggattattctctagacacaatgttggttattttcacttaagtacaacctgacagttgcttcagtgaggctggcctgctgtctttctgtttcttgcctgaactcgggttgtcctgcattttgtcccgtgagcttggcacttcactgtccggaggagcgtagggccgctgcacacctggagattttggtggggcactgcttaaatcatgcagatgagaaccagtttctggagaccttggcactagacgcccagcagagaagtgcctttttttgagacttggaagacacaataattttaaattgccta

SEQ ID NO: 38909 - DNA, 369 bp, Homo Sapiens
cactgtcgatcaatgccttcctgtcgagctcccctgttctgaggatctgtgatagcatcgaatgttgccccagccccataaatgggcttgtccgcgctaggccgttggcgagctgttttcagtagtcgtgctcatctctctgctcctgtttcaaccagtcgcattgcatccccatttccgatcctcaacatttatatcctgttgaatcactgctccttgagtattcctattgctgaagacatcaccatgtacctactggcatctatagcagttctcttcctcagtggaatcaagagttttgtaatcgtaaaaaaccggatgagagtcatgggttctgcctctaagagaagctgtaataaaggtgcttgg

SEQ ID NO: 38910 - DNA, 350 bp, Homo Sapiens
tccagcttaccttactgcagcttacccctgcaaggacatcatcttgtcctttttatggaagccctgaaatttgtcccttgagtttcgtgtatattggggaatgtctcagattcccaaatcacaccaattgtaattgctgtattttgagggtggacccctattcaatttctacagggccttcatacagttgttttaatatttttttccatatttttagttgttactacagaatctgaccaagcttttgggccattaccactcttatgagttttaaagttgtttctcagcttaggctttccataccctgtgattattgtgaatttggccttacatccaaacatggagctgtc

SEQ ID NO: 38911 - DNA, 435 bp, Homo Sapiens
agcttaccttactgaaagaaggcactaatgaaatgcattccagagtgtaggatgtgacaaactgtgtcaaatactgttggtcaggtaaggtgagggctgagaataattaaccagtggacttagccacatggaggtagtaagggattttaatgagcagctttggtggaatgaaaacctaataggttgtggatttaaaagagactgtaggagaggaagtacacaatggaaatggaaaagaaagacatttcttttgaatgatgttgtggagaggacaagagcaatggggactctcgcaaaagcatgccccttctaagttggttattctaattcatatttctcttgtgtaaaccacttctacttcattcccttcttggatcatctgccaagtccctggtaggtattttgaattttcatctgtacgcataaagggtctct

SEQ ID NO: 38912 - DNA, 427 bp, Homo Sapiens
gttccttcgtactcatgtcacattactgcacttcctgtctccacttcgcactatttatccctcacaccattgcaacgtcaataaaactgccactccctccactcgctctaaacctgatttttccccttgactctttaattttggttagaggcatagtcatccattctgtctcacaggtgagaaacctgtgagtctccttgggctcctacatctgcatctaattggtcttcaagtaccaccttctcctctctatctcccctgccctgtttagttcatctccaactttctcctggacatatgcaatactctgttattatctggtctttctgcttccaatcctacacatcctctctttcctcaaacccctcctacactggtgacaagattatgtattatgatactcatatcttacaccacacatatgtcc

SEQ ID NO: 38913 - DNA, 407 bp, Homo Sapiens
cccagcttacccttactgaagtgtccaccgttagcagaatcatgggttgtggtagacttggttaggggataataacaaattgtctggacagttttgtttagtactcagttcagttttgaatttgtgttgtgataaatgaagtgatcccaaagtttggtacatatcactagacttttctatacctttaaagaatacctttctataccttaaagccatacctagatatggctcagtgtgcgctgtcttattaattcatcagcaacaaattatgttttgcaactgttttctagctcctttcacagtcactttgtccattttgtttaaaaaatatgattcagattatgctgtaccattttcagtcttgtttttaataaatattaagtttttatgaatatttaattgcccat

SEQ ID NO: 38914 - DNA, 476 bp, Homo Sapiens
gtaccttactgccctttggacaccaattccatttgaaggaacaccaatcactgatggatcccattccaaaatgtctcttcattcacatcatttaattctgttgaatgaatatgttcctccctcaccttttataaacagaaaattaatataagtcccagttacttgcttcttagactctgtgagactcatgtaccaaaacaatgtgacattcttttcgagactttgacttgtacggtcagtatgaatttagtgcctttccaggcagcaaaatgtttcttctttgctgatttcataggacaaatatcctagcatactcacaccaacagtgtcccaacctcacagactggcacattagaatcatattaatctgcttgtttgcatgttacaactgatactgcaaaagcctattcaagtcggactgaactaggctaagcagaggacccttgtggaacctggagcatttctcagggacaggt

SEQ ID NO: 38915 - DNA, 368 bp, Homo Sapiens
acagttaccttactggccactgtcacgtatgccacactggggattagttttaacataagtttaggagggtacaaattttcaaaccatagcactctacccctggcctcccgaaactcatatccttctcgcatacaaatatattcatttcaaccccatagccctaaagtcttaacttgttctagcaccaactcaaaagtccgtctacttttttgtgaaatcaaaacaaggcatctacttccaagacacacggtgggagagacatagggtacacattcccattccaaaatggagaaataggctagaagaaaggagtaacaggccccaagcaagtccaaaacccaagagcagacattaagtaataagactcc

SEQ ID NO: 38916 - DNA, 377 bp, Homo Sapiens
atgatttgtatcgaagcgaagttgtttatcagcttgagttttggggcagagacagtggggttttctaaatatacaattatgtcgtctgcaaacagagacaatttgaccttctctcttcttatttgaatacccttgacttcctctcttcctatttgaatactctttctttctcttgcctgattgctctggccagaacttccagtactgtgttgaataggggtggtgagagagagcatccttgtccttgtgccggttttcaaagggaatgctttctgcttttactcattcggtatgatactgtctatggatttgtcataaatagctcttaatattttgagatatgttccatcaatacctagtttattcagagtttttag

SEQ ID NO: 38917 - DNA, 363 bp, Homo Sapiens
ttactgatacactacacttttcccaagattatttcctccattccatggctttacatattattaatacgttgataatgcccaagtttgatctctagaccaaacagctttcttcagcctaaaaaccatctattagacaactccacctgcgtttctcatcagtacctcaaatctaacaagaccaaacggaactcttggttttcacagcatcatcatgagtagtaattatatttgtttacttattatatatctccctcaataagtgataagctttgtcaaggagcaacgatatgcttttgtaagtctgctgtgcttaccaaagtatactcagcaactaaataggacttggcaagagtaagcactcaa

SEQ ID NO: 38918 - DNA, 477 bp, Homo Sapiens
ctaaacccttactgtgaaaagagtcaatgtcttgaggatatttattctgtccctggacagggagacaatcaggatgcacatggggagacagggagtcacgctttgtctttttgccctggacttcaaaggccagtgaaactacatctggatttgctattggtttcaagttataggcaaggtcagtgaatcacctgacagtgaatattctctcgctaactcaagatctagggtaatgtgattacgtgcagtccccatagagaggcctaattttcaagaattagcatctcacttttgttaaacacaatcctaaaatacgtcatttcctttatagtttctggagcttatacagtaccttgcctcctcattccatgttttcttctatcttcctaatgtttaaagttttaattcccttgtagtacatttgggtatacggactgaagtatagaccaagatcattttattcctgtcctgaaacag

SEQ ID NO: 38919 - DNA, 386 bp, Homo Sapiens
ggcccagcttacccttactgggtatcaattctgtaaaagaattcctgtcaggatacagtagtccactttttgaatttagggactacaacctaaaattgaaactgagaaatgtcctaagtccaacatggtttagctagctgtgggcaatttcagagtagacttgggaacaaagtgctgtcccatcccacagccatgtcctctccccattactatctgcctcccatcagctattgtcatcttgggctgccacgtcctcctgctgaatcaacagaaatggcccacttaacaccaatgtcaccactgggaattccagccatgggcaagtatcctgccaaatatctgccatgctcccagggtgttcaccacctacgtcaactcaacaggta

SEQ ID NO: 38920 - DNA, 378 bp, Homo Sapiens
ttcagttctctatcagttgtttcaaagaaagaatgaaagctttagttaccaagagaatttactgaaattataccgtatgattcaggagaatgctttggtccctgacccctcctcctcttcctcaaatctttcaaagaacaaagtacaccaagagcagcattcagcctttgtgcttttgtgttcccttctcactggaattgtcaacctggtcctccacaccctgcacatctccatcacccgtctccgtgtaaaccaacattttcaatgctgtattcattttcaggctataaaatcgaggagaacaggaattgtgcctttgtttctcactgaaaccccagaatgcagtatagtgtccggcacacagtgaccattcagtaa

SEQ ID NO: 38921 - DNA, 403 bp, Homo Sapiens
actggaaggcttcttcctatcttatctgtctgtactctatcattctttaaaaacaaaacagaaatatgtacagcttttgcaatgtcaattataccacaataaagtgttttaaaacaaacagcaacaaccaaaaaacctcagatatcggttccaaaaactttgttcttaagctggaaatgattgcttccattttgaaattttataggacattgtatctctcttatagaaaaaaatacatcctttatattctgtctctgtttttagacatttgctttaagatagatggaagagcatgctctttttcatttagaccttttgtgaatacctcagcagaaaacagtttagtatgcaccataccacaggtgcagcataagctgctactcaacaggcagacctcaccagg

SEQ ID NO: 38922 - DNA, 417 bp, Homo Sapiens
cccttactgggacacacaactaatgtttgtcagatactgtgtaaactattagctcaaggtaattcacaatttcaatgttagatttcactacattccttttgataatgtcctatctttgtgaagctgagttttccgaacttgctgtataatttggaatctggataaataatttctctattttatctgatgctttttctattttttaaaagtgtttttcatctttcactgtattttccatttatttgcagatagaaacagactaaatgtgagtttgaggaagccctgaagccagtttcaagtatatggtgacatctctctggtggtcaggtggacctgatttttttctatatagcatttcacagtgagtatttttcttcctgtgtcttagccacaatttttaaaatgttttcttttttt

SEQ ID NO: 38923 - DNA, 372 bp, Homo Sapiens
gcccagcctacccttactgacagccctctgtgtaccattgtttaggatgtatgaatttgttacctattatcttccactaagattttctactaagcagactttcattatttcaaaataaacatatcttaaaatttatcttccaaattccttagacgttactaagcaaattctcttttgagtagtttttaaagcattagttatacaatgatagagtaatagtccatttggagttttataataacatagctacaaaaatgttgagtaataggtacgaattagataaatttagatctatgtgctcattcaaaatgtaaagtagtaatgatactggaaaatgctcctgatacagtaaggggtaagtgcagtaagggg

SEQ ID NO: 38924 - DNA, 377 bp, Homo Sapiens
ctacatagtcgttgataggtatgtgggtgtgtggttgagaaaactcaagcctgagcattctcttctggaaccagagacaagctcagaatctgctgggaataagcatggagatgaggaaaataagtctaaggagaaacaaagaggcttggaatggaccaggggcatgtgggaatacaaatggtacgtgcttttgttcagagttgctcagcagctctaggaggatttggtctggcatcgggtggggggtacattcagtcggaaagggagaacagcaaggacattaaggctatatggagatgcagatgaagtggtccaagggactaggctggatacaaaggtagaaaagctaaaaagagaagtcagagagcctgggatat

SEQ ID NO: 38925 - DNA, 397 bp, Homo Sapiens
ccttccttactgcccaggctcctgtattgatagcccgctattagaagctagtgtatattctttgcatacttttacttcataaactatatgaagcattgttctgttttttaacttaattggtataaaattatattttggaaattcagtatattctgtgaaaattatttagaaaatgtgcctctgagataaagcctattcaggatgtatcttaaaggagatagctgtgctttaacattatcagtctttttggctgcttatgttaatataagttggagaaaaacagtctgctttttgtgataatatgttcttggagatggagtgaaagattgtttaaaaacattgtcttttttttcccctgaagtaccagtatttattttaggattatgttactgatcaa

SEQ ID NO: 38926 - DNA, 400 bp, Homo Sapiens
gaagaatgtcaagatatctattttggaaaattactctggtaggagtaaagatgaaacaatgatagaattgcacagaaaactagaaaaaagtatggtcttctgatattctatcacatcacatactaaaggcctcataaaactcagatattttatctaaaaatgttattttcatcataggaatgatcaaagcatgagactacagttgtattaaaatgtgcttgtatcacaagcacgtgtgctaaaaaggaggggaaaacatcattactgatattttcaatgtatgttttacttttcatcaacatgaacctcaacttgatatgatgcaaattgaaggaaatcacccataattccatatgaaaaaggcctgtgatattttatgggaaaataaacagagaaaatg

SEQ ID NO: 38927 - DNA, 466 bp, Homo Sapiens
agcttacccttactgtcaccttcactgtgcattcccttctcttacagatgccattaattttattaccacaattgttaacataagaccatctggtatagcccaaacaagacaccactttcatttttatattctatgtattaattgctatgtattaattgtcgctcccagtactttaagctataacaattgtgctaattaacatgttttctttgatcaagtgagagcgaagactcagtttcatatcaatatttattctgattcttagaaattacaaaaggatttattctaattttatgtagatttggaaaatttttgtttagcatattattcaggaaccaagataatcctttggctatatagaaataacatgagcaacaccatcagttggatttgtaggatatattgtatgagcatatcatacatttgccatagaaacagtcctagacacaatagcatacttcccatc

SEQ ID NO: 38928 - DNA, 406 bp, Homo Sapiens
tgatgtctggaacatggacaattagctagttctggtcagctgcagagttatctaagttcttggatgaattaattctttgtggcgcaggtctaggccttagctattaataagacctcgtcagtccaaatttttccaaaggtgtgagctaccccaaaggcgtacttggaattagtataaatagtcccttcttggttttgcaagtgctttaaggcttgatttaatgcaaacaattcacatgtttgggcagaccaattatttggcagtcttctggactctgcttcttcaagtgcctccccatctacgactgagtacctattatgcctttttccttcaattacttgggaagagccatctataagtcctgccccgttttgtaaagggtctctcttaaatcaggcctaacttg

SEQ ID NO: 38929 - DNA, 372 bp, Homo Sapiens
ttatcctttcttccaggctaaaacttcttcagttccatacctgacaccatatggtcttgaatctcatgctcctcgtcctcctagtgactctactctaggctggacctgctaacccactgagcccagaacaagaaccagtgcttccggcctgctcagacccacaccgaacctgagcgggctctcccagctcccttcggtagacactgcccacaagagaccagccctgctgccctcacctggtcgcacgttgttggttttggtcacctagataccactggaacaccccatggctctcccctctccctaagatgtccgatgtgctgagctcaggctcccatccaatctcacctctgcagcgcggcacttctccgg

SEQ ID NO: 38930 - DNA, 364 bp, Homo Sapiens
aggctgttgtgtatgtgagacactcttccctccgagcgcgcatttctgtgtggctgcccctcctctacctctccggaacctatggggcttgagagggattttataatccaacactgcactcccctagggtgagcctttcttatctagaaggcttctttagaagatgcttctgagaattgccacatctgggccactctgggcaatttgcctgtcttctctttccatctttgcagcccttgtgcctgttcaatcaacagttcccacttggggttggggaaggttctccttcatctggacatttccagagtcatccaccatagggtttctcctggctttgcaatggtctgcctgccctgaggctctg

SEQ ID NO: 38931 - DNA, 381 bp, Homo Sapiens
gctccacgacgttacaactctccttgaggatctcacccctttaatttctattcttactcctctcatcatttagaaacggatatttccaatttcttgggagaaaggaagggattaatcaggtgtgaaaacctcactcaacctcacctccagcaataaatattatgatcaccaccataacagctacccttaagcatttcagtgctactcacatattcagctgtcacgtaatggccttgacaatcctcacggagcccatttgaggtaggtgttattatttgcagtttatgaatacataaaccgaggctcatagcatttagaaagttgccagaagtcatactccaagtaggagtgcctccaaggcttgagctggacggtcggggg

SEQ ID NO: 38932 - DNA, 445 bp, Homo Sapiens
acttgtgaatctgtatgtgtgggtatgaatttggccgtggaggatgagcctgtttaaagaaaatcaaataacgcttgcccagctggaaaaatccatgacttctgtgctaataattttttccacggatcaccccatttaatcctacggcagcagagtaaggcaggcaacgtccctatggaggaaacaagctcagagatgctgcctgatttattcaagctcacagtcattagggggcaaagtcggactgaaattcttacacacttgcaccttgctacagttttaacttttgggaaaatgctttggggtgcagagccgcaggttccattggaccagcgccccccaatcagtgctgtgcctctgagcagcttggcgtggggcacagcccccaggcgagtggccctggggtttctgcatcatctgacagaagtgccgcagcggctccagg

SEQ ID NO: 38933 - DNA, 440 bp, Homo Sapiens
ctaggcatgtcctgcacatggtgcgggtgagtgccatcagacaccttggagcgccagtgaggacaggtgccgggcgcctcccggggccatcccatcgcccagcgtgccgagctgtctaaactgcggatttccaagaggctgctgaaatgaaccacttatttgcttctgaaaatgaaccccatcctgagtgggcaggcctcggctagggtggtgtcatgcccctacggtgtctcggttccatggtaatgccagagggaagcagaaatcagagccagtgtgtttcccagccactattggttttgcatcggccacagacatccagattctggcccgtgtgacccacccagatacgagaactagaaggtggccccgtccagggctaagacagcagacacagagggagctgcggagtcccctttcaggagagctctcccaggcct

SEQ ID NO: 38934 - DNA, 398 bp, Homo Sapiens
cacgtccatgtgattgcaaatgatacgatctcatctatttttatggctgaatagtactccatcttgcctatgtgctacattctctttatccattcatctgctgatagacacttaggttgcttccaaatcttggttattgggaatagtgctgggataaacatgggagtgcagatatctctttgatatccagatttcctttcttttggatatatacctagcagtggtattgctagatcatatggtagctctatttttagtttattgaagaacttcctaactattctctacagtagctttactaacttatattcccaccaacagtgtatgaaggtttcctttcctccacatccttgtcatcatttgttattgtctgtctttttgataaaagtcatttgaac

SEQ ID NO: 38935 - DNA, 444 bp, Homo Sapiens
gttcctcgacgtcaagtagggatagcagctacttatctcgtaggcgattatgtagagtaaacaccccggctcactccaacttctccttcaggtctcaggcgtcacatctcagaggtaattcaggccccctgggccaggctgggctccctgctaggtcacccaccctagaatgtatcacactgtaaagggcgggtcaccatcatgtccccgggaccaggcacagcgtcagacagtgacaatgctcagaaaactgctgagtgagcgagaagctgcctcctccatcctcgccagtctccgcctctctggagaggtgttctgcagtgtctggtcaccctgcaaccaccatgcaaggaaccagggctgggctgtcgctgagcaagaacgcctgctctggacctaacctgcagctggttatttagggactcatgtaattccacggttggc

SEQ ID NO: 38936 - DNA, 442 bp, Homo Sapiens
cgagtacgacgtcgatttcaccctccttcacttggaattgctcccatctttgaaggaggctggagggagttaccttcatgctgggctgaggttctggggtggcttgttatgaatgtcttcactcgtcactcccatattacggccaatggccaggtggctcagctccccatgactctcctctgcaccgcagccaggtgtgcctgccaggacaggctgggcggacgggaccttcgcgtctgtgcacactgagggctgtgcttctcgttagccatgaaaggaagctagttcctgtcaggcacattcggagcttcaggtacatgggccacattgacccttgtgttgcctggtacagtgttccagagcctcccagttggaagggcatggactccagcaggggagcagtgaccagcaggtccctggagccttgtgtcctttagtcaga

SEQ ID NO: 38937 - DNA, 432 bp, Homo Sapiens
cggctggatcacgacgtctaaggagcggccctgtgggctgttttggcctcggtcgccagtttgggaccagttgggccttcgtgatcatcttgtgctgaacctttatcttgcctccctggaaacccatcatggggaggggaggtcaaggaccccgggcccaggcttcctggacatgcctcacggatggctgacctagggagccccaggcacagaagtgagctaatctggaatgaggccggggaattcgattaggcccaggtcacaggaaacagtgaatgcaggatgctgaccaggcacccctatgtgggtgtcaggggggtgagggaacaggcaagagggagggctgagaaagaggtgaaccctgggtctgggggaagtggtcagctggctggaacgttgtgtgcagacaagccctctgcagcagttgtggcc

SEQ ID NO: 38938 - DNA, 365 bp, Homo Sapiens
cctcccaaagtgctgcgattacagtcgtgagcctccgtaccggccacacacttcttttgatgataggaatacatgggtgaacaaaacccatgcagtccctgttctcatggagcttagggtcgctgggggaggactgacattcaattagtaagtagcacaataaagactgaggagggatggtataggtttgcttatgcatagctaagtgtgttattcttcagtggttttccttcatctttgggataaaatctaagcttcatagcacgtacatatggctattctggaactgacgggagccccttgatatacttacagatcctctccacgctcccgccccatgtctgcgcttcattggaatgccttgg

SEQ ID NO: 38939 - DNA, 416 bp, Homo Sapiens
tggatccgacgtcgtcacagtaagctagtacccgtgctcctaaagctccctgggattaatattgcactgatcacattggcttcagtgatgtttttccttccacttcctgctctagtgtagaactcacagggcggggacaaggttttcatatacccagcacggggaacagcagcccttggttaacatgtactgaatgaatcacaggaagtggtggctggagctcattcacactagcatgtaaatgactaatatacatcctttcctgaaaacaacccttgatggaggagaggaaggggaaatcccagagccccgggcaagtgaagccagggaagcagccccacctggagagggacaggtccagggagttgggaggcccagcttcaaccctggttatgaaggtgggctcggttctgcac

SEQ ID NO: 38940 - DNA, 366 bp, Homo Sapiens
tgtgaggcttgagtgcttcccagtcacagcctcatgttctgtgtcttcaagtttcacgaagccacgtgacatgcccataaacgatggaaaccaggccctttcaacagtgtcttggcccatccaggtcctggctgtacgaaactgttaactcatcaaggtacagctccagtgccattccctaaccagagctttccctgacttctcagcctgaattatgtttctttacctctgctgccgtcatacttgataaagggggcagaatacgctatcccaaaatatgctccttaggcataggattattttgagttaaagacacttgaaaaccatcacatgcgagaagagggtccgagcttcctttttcatcct

SEQ ID NO: 38941 - DNA, 430 bp, Homo Sapiens
tgctcacaaacaggaagtgcacttgggtcttctgcagtatcattaactccttctggttaattggaccaaggaggagtggatccaggaggaatgcctctggtctacctgctccaggatataactagcaggacaggcacagcccccaaaaggagagatgaagactcttcccctttgaatttctcaagctgcagtgtagaatcactaccacactagggaaaccaggagagcagtacccagatcaaaatttggagctccattcctggtcactttagtttaaggtccaaactcagtacagatttccagaaaccgaatggctaggttcatacaatcacagaagcttaaaactggacacaagcttatctaatttaatcccatactgtaaaagaaacactgaggccagagggaaataatctgtcctaagtcacataac

SEQ ID NO: 38942 - DNA, 403 bp, Homo Sapiens
ttgtgataactgtatgatgcacaagctggtacataacatatgatgtgtgggccactatgattatcattagctccctatcattcctaaagtagctattcattctccacaattactttaggagaagctattctttttcatgtatttatatatcaccttcataacttatttgttgaaaaagcagataattattggcatgcctacctatgtgccagctgactacacttagtactgaggattgaaaaataaactgaaaagacattttctgtctttaagaagataaacactgaggagagagagatgagagcaaactgctgcactaaaatgcaataagtttattggtagaaaatgtacaaagtattgtagaggaatgagggactgctttgtagaatgagattatataaag

SEQ ID NO: 38943 - DNA, 377 bp, Homo Sapiens
attccccttgtcattagcctcctgcactcaaaactacatctccgctcaggacctttgtacatgcagtttccttcctttggacgctcttgcctcacatacgcttgtgcttgattcctcatttcactgaggtctctcatcaaacgccccctctgtacacaggccttatggtcagggactctgttttgagtctgctgtgtccctagagactagagcagagccctctctataataggaatgcaaaaccttgttgaatcataggattcctttattaatcaattacttcatgaaattggtctttcttctgagtcaagatcttcccgtcacccaggttggaggacagtggcacaatcataactcaatacagtcttgatttctga

SEQ ID NO: 38944 - DNA, 416 bp, Homo Sapiens
ccaaagtccttgagtggatgagctctgcaataatcacatgccaccagggcaggccaccaggatatggtgttcctcgtctgctttttcccttccttccatttgctgtgctcggtgactccctccagatctgactgcatttttccccagagggccctctcagctttttctgatcgagactttctggccatgcctagacttgggagactgtgggacttgataacagaccctgattcttctttatgagtgaaaagcaggccatagacacagacaggaccacacaggtctaaggaatgactgtgagctcttcttaggtttccagagtaggaatgtcaacctggacattcctacgttaatgtaaccctgcattaaacagaacataaacaccaaagcaagtttgttctccacagaggaccaaa

SEQ ID NO: 38945 - DNA, 394 bp, Homo Sapiens
ttgcttaagcccaggtctggggctctgctcctgccagctcctgggtggttcatgctcctgtgagggcactgaccaggcaagcaggaggcctttgtggtggctgagtagaggcatgtggggtcactcatgcgccctcggggtccaggccccgctagtcctcctccaagtcccattttggctggtggacacccaggtgtgtggcctagaggctattaggctgcagcttggggaagcaaacaagggagggtgatggttcctggccccacaccatcattctggtgtcagccctgagagggtgcctgtcacagcaggttccaggactgctgcctcctgaggatggagaaactgtggcaccctgggggccactaagggaggccagctgattgcagccacg

SEQ ID NO: 38946 - DNA, 387 bp, Homo Sapiens
cactgagcaataactatgcatttgcctgtatttgtatcctccaagaggcagctctaggcttccacttccccatgtataacggagagagagttggccaggagactctgctgctgttttctgggcttcttaagtgtccagtccctgcgctgcacaggtgggattctcagaaacacagagagtagcctgatcttcaacccttggtcctgaccacccatatctttgggcagccccaccctcttgctggccaaaccagacgctcttatcttcccggaaagcctaagagttaggactacccttgattcctttcacccagaaaatgacaccgggataaggactctcttaggcctgtcctgggcgtcccattccctggatttacaccaggccccg

SEQ ID NO: 38947 - DNA, 365 bp, Homo Sapiens
tgctgcatccaaccagacctgtcactggctgggtcccccttcatccctctgctgcctcatcgagctgtggtctccctcctccgaatgaggatgtgagggtctcagctgcccactctgctttgctgtccctttcccagtgcctctggaaagagaaccagaaagacatggttggagcatctcagggaggtggaaacccaccaagagagacgggaagcgtcagtggccagtctctccctcgctgcaaacgccagcagcccccacgggctgtctggtctgcgagggccaaggtaggcctgagggtcggtcggggatctggaagtgccgctcaccatatccacccactgccactccctctagccagagcc

SEQ ID NO: 38948 - DNA, 429 bp, Homo Sapiens
ccggcggtgagaggacgcagaatgagatcagattgacttctcagttgctgactctcaactgcttagaaaggggcagaaacgataaaaacagacacccctgtaccccacactaaagagctgtgttaatattgacggtatttgcagtgtcccttgcccacggccccatccgccacccgtgactggggcacttccctcctgccctctggccgtcagcctcttgcagcaagcatttccatgaacaccaagtcggagattcgtccacgctggtgcctgcaggcctcatgggtttgtttcgggtgctctagaatattccatcgattgtgtaaaacacagtggcaaactctgcgtgagccctggacacctgtgtgggtcgggctgcgcccagcaggaagagccacttgctgtccgggtgttgctgctggcaacaca

SEQ ID NO: 38949 - DNA, 436 bp, Homo Sapiens
atggagtggtggcgcctggtccagacattggtggacagtgcttcagagctcactagccagaagctcctcagcggcagcccccaagaagggaggtctatgggtctggagagggttcaggaagcttccacggtaacaagcagcctgagggaccgtgtggtgttcccggccagacatcgagaagtgcccaaaaggttagagctccggctctggtgccggaagacgtggattctgctgcaccacctgctactgtgtgactccaggaaggaaccttgagcccctccgagcctcggcgtcctcgtgtgtaaaacagggatggtttccgtgacctcggcggggtgccggaggctcagagcggaccgtgagactgagaggctctgaacacgccacaggctttgcacatgtgagtacgtccacacgccagccatgttctcacctt

SEQ ID NO: 38950 - DNA, 438 bp, Homo Sapiens
gggagtggtgaaactaagagtgtgaaaatgttgacactccgtgagccgggtgacaagctgcttggtggttcactagacacggagttataaattggccgcttttcaacatcgacagataaaaatcaatagccttcccatagtgccatcattaatcaattagagtctgtaatgggaaaagcagatgccactcccccacagtttctgggaataaacaaagtgtataaggcctaaaagaagaaagctatagaacttgactgaagcccacatctgtggaaaggcatactatgttcttggagtgggaacatcaacactatagagatggcagttcctctccagttaatctggaagtgcaagtatcgatgagtaaatccaattaaattccaacaagagcctggtctaaaatgtaacaggctgattttacagtatcgctggactccc

SEQ ID NO: 38951 - DNA, 357 bp, Homo Sapiens
acgggagaggtcaaggcatacacgcggtagcctgtgcaggaacagacctggctcatacttagccatccaagagtatcgctcggtggccacaacaggacaagcctcccatctgtctcagctacccctaccctatccctggggaagggccatggaatagccacaatcagaaccctattgtgggccaccgagcacagccctacagagtcaggtttaaaagaggcagcgcagtgtgggggaaggaggcgaggggctaggtgggcagagaggtgatatctgggatctgtggtggagggagtgtgtcagtcactcggggatgtatatctcacgcctgctgctggcagagctccgagctggaac

SEQ ID NO: 38952 - DNA, 359 bp, Homo Sapiens
tcggtcattgatcacttactacagctgctcagaagcaccactaggaaactcagatgtgggcgccccagccagaagcagagaggggtacaggcaagctacagatgaagccccttctagatgccccagtgcagtcaagtcgatctccttaccaggtctaccaggaacaccacatatgcaatatagaaacctgtatcatagagaaggagtacaggaatagcctatccatccaaaggaaacgatgacctactcccgtagaccagtcgaggataataggggagaactaaccagtctagctaccactaaaaccatcacatccctaccagtagatagcttctagaataggtaccctgagggggtaa

SEQ ID NO: 38953 - DNA, 442 bp, Homo Sapiens
gggcgggacacattcaacccaggacattggggcccactgcagatgcccctgttggtcctgcccgtctccccaggcccctcaggactctgtatcaacagatctggcccctgctgtgcacagccctccctccctgagttctccctcagaaaggagaccccccctctgcctccactccccctgcagctgttttctggggcctcctcaccactcactctggccaccgctgacccgggcccttacctccagccctgcgcctgtgccctgaactgcctcttgtcataggcaccagcttccctcccaggaccaccctcctccctgagggttggcagactctcctgtggactggacccgcccaacacagtggctctgcagccccgagcccagatgtacagcaggggccaaagcccttcctcctccctggcaaaggatcccttgcttgttc

SEQ ID NO: 38954 - DNA, 471 bp, Homo Sapiens
tccccgttggcgggaccttccagtcaagctgggggctgcagacagggccttctccagggctcccctgtttacccacggagggatgggcttcctggatcctgtcccagcattacccagtaaaaagaatcaagccacctaggatgtaggtcacccaggggtcaaagtggttctgggctgggtcacctcctgtataaggctttgcatagtgggaggcctgggggctgagaggccactagcaaggaaagacaagcatacaaaagccaggctccctctgaccgcttagagggagaacaatgaagccagggacggctctgctgggtgctgggttctgagacacagagctcttcttcaggcagggtctgctgattcagcagggctgggcaaggatcctatgactcggagatgtcacccatgcgggcgtaggcgctcagagggagggtgaggtggacaaggaggccccagccacgtgtc

SEQ ID NO: 38955 - DNA, 435 bp, Homo Sapiens
tagggaccggcggggacatgttacagtaggttagaagatcacagtgctatggaggaaaagaacacaggaagagtaaaagagaaatgggcacagagtgaggataagtttaaattgtacttagggtggttagggaaggtctcactgaaaatgtgacatttgagccaagacttgaaggaggggagggactcagccatgcagtttttccaggagaagagcattcctgcagaacaaacagcaagtacaaataccctgaggcagccgtgggccaggtcacgccacagtgaggctggagcactatgagaaggggagcagtcaggtgagaggtaagacaaaccagagagaggccagatcgtgtagacttggccttttcctctgggtctgatgggagcctctggaggattttgagagaggaaggacaagtccgtctttagtttg

SEQ ID NO: 38956 - DNA, 381 bp, Homo Sapiens
cgttgatacccagcttggcagagctcgtccttggggtcgattttcctcaggaaagctttgggaggcctcgtgggagaagcaagaggtcactaagttcatagggtgattccccgaggagcgggacagccctggccacctccccgtgtgggcccacctggatggctgcacgggcacaggcacggggcccgggcggctctggtacatgcggatgatgttgccaatttccctgctgggttgtggccgcttgggcttggagtctgagctgcgcaccacagtccccctgccttgggctggcccttggccattggccttggccgctgtctccttggctggctcagcctcagcctcttttggagctttggccccaccttgcttcaatgg

SEQ ID NO: 38957 - DNA, 427 bp, Homo Sapiens
gcggcgggggactttccctgctgtctgctgcatcatgtgtctccctgggtcctcacttggtgtttgctttggccacttcctgttgaaagctttcctgttgtgtctggtgatctttggccatctgttcgctcctgcgtgtgaggcaccacaaggatgagaggctctgtgcgaggcagggccagagggcgtgggctgtgctgtgtcagtgggcagggcctgtgcccttctctttaggatggttcagtcctgtctcctgcggatggttgtgaagatctcaggaaggccagggtctccctgccctgtgggaatattccctttcccctgtggtctagctgacacctgccctgcctctgctctgaggtgacctggatgggactggtctctatacccacttccccagcctggaggggacggggagcagagtggg

SEQ ID NO: 38958 - DNA, 442 bp, Homo Sapiens
actcagcactagggtatggaacaaattgatatgctcattcagtggcatagtatacagcaattacaatgaatgaactattttcctgtcaatatggatgcattagtctgttctccagagaaacagaaccgataagatatatagatgagagacagagctttactatacggaattggcttctatggttctggaggctgagaagtcccaagatctgcaggtgataagctgaggacccagaagagccaatggtatagttccaggccaattccaaaggcctgaaaaccaagagagctgacggtatgagttccagtctgagtccacgtcacaaggcagaagactgattttccacctcaaagacagagattctctcttaatcagccttcctgttctgtacaggccttcaatgggttgaatgaggcccagaaatatcctgatagatacaccc

SEQ ID NO: 38959 - DNA, 393 bp, Homo Sapiens
acagcactaggaatatcacactcaggctctggagaggctgcacagaagggatggggctccggcattacagagctcctctctacattccaggctttgacccatcacagtctctaatgaggaagctggggcccacagaaggtcagccacctgcctgagttgacacaagaaaaacttggtctctctggcaaagatccagctcccttgggaagcctgcttgttcaccccacagctaacaaatcgggaggcctcaaggaggtgggcagggtcagtgcgggtctcattcctgccagccaggaacttaccccagaggagcagacctccagccacatccacacacccctgacccctctgcccaagtctcctctgaaggtgctgaatcatcagtggtgccac

SEQ ID NO: 38960 - DNA, 446 bp, Homo Sapiens
acagtgtgctctctaccataatctcttccatatgtagtagtatattgcctactgccaggaacatattcctaataccgtgaagaaaaagtattttgtatcactttgttctaccaaggcgtattttatgtggttcactaatgacagcctcatattttgagacttttctcccagtgagtatgccttttctcccctaaatagactttttaaagagcagttttaggttcacagcaaaagtgatcagaaagtatagagttgccatatatcccctggcctccaacctcccccactatcaacatcctgtgccagagtgacgtatttgttatagttgatgaaactgcattgacacataatcatccaaactacatagtttacattagggttcactcttggtgttgtatattctttggtttttgacaaatgtatgtatccaccattatagtagtaat

SEQ ID NO: 38961 - DNA, 459 bp, Homo Sapiens
ggactccacacagcactaggaaatatttctccaaaggcagtcacctaaagaggtcacctgaggctcatttccatattcaaacatgctggtgaaatctgtggaaattatcattcctggaaatttttgctcaatctgtgccagatgctgagctgtagattccatatattttgttatctcgattttgatccaggctagaatatctaatttgtcctcgttggcattgaaattacataggtaccaatttttctgaccttataaccatcctacaatggcttagaatcccagggtaaaggcaaatgaggagacttaataaccactatgtttttaatcatttggtgcttactagctgttaagtactacctaatcatgttacctgtattagcttatttaatcaccacaatgactttatgtggtagatgatataatttttctcattttatgaaaaatgaaattgtagcc

SEQ ID NO: 38962 - DNA, 389 bp, Homo Sapiens
agtcgacctcacacagcactaggggcacaaagagaagcaggagccacatgaggggcctgatgtcactcaaacacagggtgccactcttgggtttaaagcaggcgaatgagattgatgatagggattgtgtggaagatagagaggtggaggaaagatcataagttatcatgggagtcccagagcaagatgagggattgaaccaggacagcggtagaagggatgacagaagacaaaagagggacaaacagttaaaggaacaatttgtgggacttggtggctcccttggatgtgggcagtgaagggcaggggcctgttgggtttccagcttgggtgactggtatggctatcaactgtgacagaaaacagtggacatggcatttgtctatttg

SEQ ID NO: 38963 - DNA, 404 bp, Homo Sapiens
gtctttctcggagcacaggctgcattagcaataccctccagggcacgcctgtccccaggccacagccgaaaccaatccgaatggagaggacactggcatttgtgagtttcagagttcttggggactaacgtgtatttactggattctagaacacgtgatgctcccgacactcacctaccaagttagtcacctctccctccacaaggactcccactcctgaggcttcccgttactgtgacacaggagccggtacggagaacacgtccggcttgaacacttatctatgacaatggctgtgccctttgtgttggttcagttaatgacagggtcctggctctcatgtcccactgggggccgctgctctcaggcaggtaccacactgttggaaggtgaaggcagaggaa

SEQ ID NO: 38964 - DNA, 407 bp, Homo Sapiens
ttctgtcactcacttcccgtgttcccagtgttcttcctcggagctgtccgctgctgggaagaggagtcctcctgggcctgtgctggtgtccctgcagccttcctgtccccagatgtgctggcccagagacaggagccatgtgcctggcactgcacctgcccctcacttcccatctgggaaaaccagccctctctgctggcctttcactcagcagagtctccacctggctactgtgagcacatccctggagcaccccacataggacaggaggggccacaggcctgcggcagccacacaatcataaaggctgaagcttgctgagctgtgctgacaaaagctggggtgtggatcctctttactggctgtgcctgctgccgttcctcttcaacaatctccttcgtatcacg

SEQ ID NO: 38965 - DNA, 456 bp, Homo Sapiens
gagtccagatccatccgtatgctggtgctgcactctgcactgtgtgtttctaataatgcattacccagacctacatgcgtgacacacattgtttaatttgtcaaataagtaactaaattctttcttaaggcctgtgaacccaggtgcccctcttctccgttccctctctcattggccttatccggcctgtcagcaggtcttctaacgcatcccacagagagttcctgaggccaggaaaggggtgcagagggtaacgcagggcatgcctgcagccctggggtctcctccccgccacatcaccttcctcagccttgctgcccgggccaagccagccctggacctttcccaggccagcccaccagtgtaggtcccatctgctcctgttgctcaaaacaagggcacaattgttacctattcattttgcttgctgggatggacaaaggtgttctgccctga

SEQ ID NO: 38966 - DNA, 425 bp, Homo Sapiens
aggaaacaggattatctctctaacgggtactatacactgagtcatactcactttcactgtcatgaccaattcaatttaccttcgtgcaaatcgggaaaggcttctcttcgtcaatgaagattttaattatgatattactgcacatcatgaaagccctgctcaaagaagaggtcaaatgttacagctttaccttcataaagagaagcccacactctcagcttttcactacacccccaccacatgccagggcacgtgtgctgtaagcacgtacatttaattggcccatgcctaggaaaggtgactgtgtcaggtttcaaagtgggtgagagacagggattaggaacctaagagtggcagagaagaagtgacaagagaagccacctttggggacatccaggaggcagatgcaatggtgcagcagacac

SEQ ID NO: 38967 - DNA, 432 bp, Homo Sapiens
cagactccagaggaggcaagaccgaggcaaggttgtttggggaacaggaagtcagtggagggaagtttgtgggttgcagatctgggggcaggcgccccgctgtggtggccgctgctcacatcttcactgtggaaggataccagcccctctcggactgaactggcttttctattaactggagtccaaagattgagaattaacttcttttgttctgtttgccttttggctgtgggctccctttctctatgtctgtggagacccgggcctagttctaaggaaaaagggaggaagagggagtcacgaggagctgccgccctcgcactctgtctcgcgtcctgagggagggcagcatggaattcgtgtggttttgtgtgcgaggaggatcttgtatttattgctctgccacttctgggcagcattaagaatagcgtc

SEQ ID NO: 38968 - DNA, 488 bp, Homo Sapiens
ctcctacagcactaggctcacacagaactaggcaccttccccatcaccgtgctgttcagctatcatcgccccttgcctagattattgcagtagcctccgaggggtctccctgctttacctttgtccctgacagtctgttgtcatggcaaagtatcctcgtaaaacacaaatcaaatcattgtcagtcctctgcccagaactgttagtttgtcatctggtttaaagttcctaccctgtcatggcctcgtcaatgagattgagaggaactatgagtgtgttggtggagaagggagaggagggggctcagagctaagaaacccagagattcttctattcttctttgacaagcgccctgacagacccagcttttctgggaattcagcccagtgtccgcagcacccagcacagggcctggcgcacagcagagaggtattcaggatggctgactgactctagcaatgagcggatgaaaccacagcagtctgatg

SEQ ID NO: 38969 - DNA, 461 bp, Homo Sapiens
cacagcactaggggaacgggtgtcacagcctggagggtgcagaggagagctataatcatcaaaagagggaagaagcagagtgtggagatgagaaagatgcacaaggaaagccaagtgccacccacaacaaccacatccaacctccgcatgtggttcttgtctggtctgcacgggccagcatgacagtgtgcccatcaaccacatggcagaagcactcggcgggtagaggacctggctgcgttcttggtcaagccccttcctgtagtgagccctgatcccacgctatcacactgtcgcatgtctaaggctctgtgctcttactgggtaaggacaatttcgccccatctcttcctaactccatatccagcacagggcctggcttatcacagaggctcacagaggtctggatgaatggacggctgcctacagccccattcctcacagacatggggtgacgagga

SEQ ID NO: 38970 - DNA, 430 bp, Homo Sapiens
gacaaagacagccaagagggcggctcggtttcccagccagcagcaccccagcagacacataggtttggctgggaactggctgtgggcagacacaatcccactggagaaaaatgtgaatctggacatttgtttagctgagtggcggtgatggcaaaggaaggctccagtcctgcagccgtggcatggcgccagctctcaggaacttactgagccaccctggtctgctggatctagggagccctgagtcgagccccacctgtcaccatactctaggtttgaccaggactagaagatgacagacagcaggctactcggctgggctatatggcttgctcactggcttgctcacttcaggtagtgattttcaaattccgtcatttaatgtgtgtccaaataaactcctatgcaaacctcaatatataatacagat

SEQ ID NO: 38971 - DNA, 444 bp, Homo Sapiens
gactaggggagcagtcagcaggtcatatgactttctccagcaatacttttgaggtcagagaaattggatcagttggctatcccaaggtgggggattggcttgggaggcacaggaaagtcaaaatagcaaaggttttcaagattcatgtgacagcttggaaggaaggattgaccatgggttgattccatggaggtagagaagcaagagagacctgatgattacaatgatggctaagtgtagtatgcccattaggattgaattgaattaggggaaattgtgtgaagtgtttggaaggaagcaatattgtgtgattagctccaaagctggccactggtagaagttgtttcaatggaagaacaaggatggaattgagtgggccagagagccctagattaatgggttaggatgcagaggatggggtagagaagggggaaggtgatttat

SEQ ID NO: 38972 - DNA, 350 bp, Homo Sapiens
cagcactaggtaaaaattttagccccttcctttaattataatattattactggatactgccatatgtggatggaaaaatatacctccaaatcaagaggcagaattccctctgagcgggtttagagtagaggaatagaaacacttgggttttacaacaatgagaggaggcagaggcaagcagggggtttggatcagaaagaactgtgtctgagcaagtttttccttggagaaaatgaaaacattgttctaagaatatttcaagaaggaaaatgtgtgttattcaacatggaactgattcagcctgtgttgaacaaacaaacttccatggctgatgatccggacactgggtg

SEQ ID NO: 38973 - DNA, 388 bp, Homo Sapiens
acacagcactaggactggaacaggagagtggagacagactgcaagccagaccagacaaggagggtgaccttcaaaggcgccaaatactgcccacaggtggacggagaggaagatttctcagcagacactggatgtggtgatggcaccatagcagagtgaagggcttgtcaggcacagtctatggtgtgggcttcaaagctggcgtttcagggaggaaggaagaagaggagtctagaagcatcaacggctacacaaagaggactcttaacccattccacaccctactgcacaagggcagggagaaaggaaggagcccccgtctgggggctgcaggagcaggcagtgcttaggggacagccaggtctcaagaataaagagatggatgagg

SEQ ID NO: 38974 - DNA, 472 bp, Homo Sapiens
ccacagcatctaggcgggacacaaagggacacgtgtacatttacatcctcctagcaggcagttcatacatagtcacgcctaatcatacacagccacgggcactcacacaacacagacacacagtacagtaacacttggacacttaaattctccctgtagtcacatgtaggacaaaatcaaacatatgcttatacagacacacatactaacaccttgtaattgcacataatcacagccaagtacacaaccacaaatatgaagctgcaaaaactctacatcagacatgaccacggtcacacacaaccatcaatccgcagagacacaccaacacagacacacgatcacacatcatcaattacagccccacacacccaaccccaattaacagccatacactgtcaaccactcatctggtctcagcccagtgtcctgcgagacgcaggggttgagggctacttccaggctctgtaaa

SEQ ID NO: 38975 - DNA, 417 bp, Homo Sapiens
cattccaggaagcgtagccctggggccatttgctattaaccctgtcgggagtgtttagtaggaaaaacaaacaattgaactgaagaatttgggtctatgcgatttagttgcctctgagaaatagcttgctctatttcctcaattcccctttttgctgcaggagttaaatacctgggagagtctggggctgtattgccctttaggatggaaaacaggttttgcagcttatcagtagtcatgcccaaggtgggacgaagccaattaatattgcccaataatttttgataatcatttaaggtgtataagttgctagtatttaatttaaccttttgaagtcttattgaccaggaaattagcatgtatccaagatatttccaaggagaggacatttgcacatttttaggtgctatgtttaaa

SEQ ID NO: 38976 - DNA, 366 bp, Homo Sapiens
ctccacacagccaactaggtcccttagtgctgtgtatgtactgctgtagcattccactgcacctgctgcatacagcttacattggagatgtgtatgtcaaacgcatttttctttattgcaaagagagtctattatagaaggaaagaagtggaggcctgctgtgtggatcccttcttcttcctagctttcagtttccttgtctgcaaagtggaaggtcagaccagatgatgctctggtactccacagtgctcacctttatcactgcagggctttctgcactgaaagtggaagcagaaggctaatgggtcacattgtgtaaaggtctctggtgctcaaagtttctaggctaagaagtgaaaatttgga

SEQ ID NO: 38977 - DNA, 379 bp, Homo Sapiens
ctccacacagcaacaggtcagaaataggagacacttcctagacaacactgcccattctctgcaggcacgattctctcagtgagaccgcctcccctcccccaggtcagagtgcagccgtgcggccactcagccatgccacaggtgggcacgtggcccagggatctgctagtgaaggggagagaaggaagggtgtgcggacacaggccgctactgcgatgacgacggctcttcaggtttccgcagctgaggggcgcagtgcctgacacggctcaatacatgtctttttcttcataggcagaatattttcgcaagctctggaaaactccacctcgagagaatgcaggcttccttcaccacgttcagaagtcggacccggaac

SEQ ID NO: 38978 - DNA, 385 bp, Homo Sapiens
gaagaaaagtaaatgggtcagtcttgacatttacaaagcagcatgcccccatccaaagcacagctgaagtatcactctaacctacatctaggaacataggatttttactgaacaactaaagaacacatgtggataagataaataacattggtatctataagctggccaaaacttggctagaattccagattacagaaaaagggccttggattcagtcttagagattctctttggaagtttttcaaatgcttgacttatcaagagctgagaaacttgccaagcatctcccaggtactccatattctagccacacgccatttagcgtccagagagaaaacaggcccaggttagccagtatgcattttcttacctctactgtacattc

SEQ ID NO: 38979 - DNA, 364 bp, Homo Sapiens
ctacagcctctctagccctaggacccctcaggtagcctcaagtcacagactcttactcaaccccagaactttgatccctcatgctgctcagcctggaggccatcactgggcatttctaccattcccaccagaagcctgggggtccaaagctaacaaaggccatattgtgagggctggactctggtccttccaaggtgggcatcccttaggccacaaagatagcccaccccacatcacagcctagtaatggagatgactatatattgtcactcaagttagacatttctaacacaagcctaggccctgaggatcccctgtgcccacaaggataccccaaccagcataggagtctcccttacaatcg

SEQ ID NO: 38980 - DNA, 395 bp, Homo Sapiens
aacacactccacagaaaatttcgtgagagatttggaaagctgaattgaagtagcagccagtacactgtgtaaggacagagcagggtctgtacgctgtgaaggacagagcagggtaccaggcatagtggcagtacctgtactttctctctgatctggctcaccttgtcggtgaaggtcatcacacagcccccagcacccctagctcctactgaatttcctccttcagctcctctgagtcctgggccatgtgtgcagtcagctctgtagcagagggctccggcttctccagatcacctgagtcactgagcttgggaccagtgaaaggaagttgtgggtttcagtttgtcctcatgagttccagttgtccttgtagatcccagtcctagttgccgtgt

SEQ ID NO: 38981 - DNA, 366 bp, Homo Sapiens
ctccacacagcactaggctacggatcctgtgtccaccgtttactgagagggccgtgggtgagtgacgtggagtgtggcataacctccccatgtcgccctctcctagtgcagaaattggagacagtgggggatccctcacagggttgctgggatgactgaatgaggtaatagacttcacagatcccacatagggtctggtacgcagtggtccctcaacagtggacagaccttattaggatctggtcatattctgagaacaaagcttgacaagttctggaatcaaatgtcattgtcaaatgtgcctgctctatgcaattctacttggctactgtactctctgcaacaatttgtctgaaagagaggcag

SEQ ID NO: 38982 - DNA, 378 bp, Homo Sapiens
tattccacccaacggggtcactctgactcacagttcacgcctggctggcggaggcctcaggaaccttaccatcacagccgcaggggaagcaaacacatccttcttcacatggtggcgggagagagaagaatcagtgcccatagaagcaaggaagacccttataaaaccagcagatctcatgagaactgactcactatcactagaacagcatgcaggaactgctgatacagttaagtccacctggtccctcccatgacgtgagaattatgggaactacaattcaagatgagatttgggtggggacacagccaaaccatctcagctgtatagtagtaataataaatgaataatataacatgaactctaatttaattcttg

SEQ ID NO: 38983 - DNA, 371 bp, Homo Sapiens
aggattgcagaggaagggttgatgccccttgaccccccagcccggccccgctaccttcattcccttgccatgcccaccctgtccctctgcactctccctttgaagtgcttgcctgtttagggggctgcccacttcagcgtggcccctctcagcctcttatgtcctctgtgtcccagcctggtaaccttgggaacggagcgagcgggaatatctgtctgaggctgtgagacccttgctaaagacccttggggtccttgagggagcgcctggtggcctctgctgcctggaggcagaggatggcccagtgtccaggcacacctgcaggtgaagctccccggagccacctttccagaggctggatgccaactctc

SEQ ID NO: 38984 - DNA, 478 bp, Homo Sapiens
agccgtgacagtatcagtacgctctgaaatgctctaaccataaaagtggggtgggggagttagggactcggtgagtctgagcaggagactgtggactcttccagatgggagctggcagccagtgcagctgtgcagggagcgctggccccaggggagaaggtggtgggccctgagatgtggaaggccgagcttggccacaagaggaccagagaggtatggcttaaggctggagttagggtggctctctgggcatctgccacggcaaaagcagcttggagcagaaccttgaagtcctgggcaagtgcaaaaaccacaccccagtgggagagaaaatacttttgtattttgggggagatgagatttctagagtaactccgggcctggtcaagcgggactttgaaggcccgatgaaggtcaaggcctgatgggggctcaggaacaggccaggaacagcaggttgggaagctggacctatgcg

SEQ ID NO: 38985 - DNA, 421 bp, Homo Sapiens
ggcagcacagtgcacgggtatcacagcccatgctgtggcacaaagccaacctgggagccctcaggactggggccaactcacctcatcccattctcatcaccagttgtcaggtcccggggtccgggtccagcccatgctgaagtccagagggagttggtggatgagcagaaagaacactcggggctgaaggcaggtgagtgtggttttattcagcagcagcttttattaacagctttctcacactagctctctcacactgtttgccctgtcgcagctgcttgagccagtggctcccacaaacagctgtgcatctggctcttccttgccttcagggtcagcggcttaactctttttctctctgggcatgagcaagccaagctgtgtgctggctccctcctgtccatctgcaagacggacagct

SEQ ID NO: 38986 - DNA, 427 bp, Homo Sapiens
cttacacaggtaaacagatgatgatgtgtccttggaccgctggcggagatgccctactctgcaatggagtagtttctaataaattagcttctttcactgtgctctgaaactcgccttgaatttcttcctgtgtgagatccaagaaccctctcttagagtctggatcaagacccctttttcctgtaactggatggaaacccacataatacaatttatttccatatatggtgtaaagttatcttctttccccttcctggccctcctccacccccaccagtaatttcctaacaatacttaggtgaaactataataacattatttgctagctcttcctggacagtgaagcaaagcttccttgataacttatctgtcttgataatttttgttaagcaggaaaattatgaaaactttaaaaaaatttatttta

SEQ ID NO: 38987 - DNA, 448 bp, Homo Sapiens
catgatacctcacactgctgaggcccgtgttactgttcattcagccaggtggcatgtacctcacagactgttgtgcagtgtccgttattgcagattttaatcatttgcatgctcatcaatttctaagataaatagggtctagagtcataagaatccattgttttcaaggaacttgcagaattacatcatttcctattagtagagagcactacccattttgaaaatctgatatgaaagttgttttttactcttgtaaaaaagactttcttagtcaaactaacttttcatattttcaagcattctgattcatactcttgctagtggaagaagagagcaagctgccctgctcttttcctttgaggactgaaatagttaaagagaaatcaatgaacaaagtcactcccaaccattttcctgtaaagctggttattatttctcaaggaaccta

SEQ ID NO: 38988 - DNA, 365 bp, Homo Sapiens
agaactgtgaactgactgagatgccagacggctagaagtaagactaagatttgacagtgctggcagtcagaatggggtgaaggaatgggactataagatgggaatctaagtcctctcacactcaatgctcttctcattcaccacagctgtttccatgtgccccataaacactatagcagattgccaaaaatggctacatttcttcccctccctgtatccatgctccttgaaatgggaccctgtagctcctctgtcatatatttcttgaatccaggctaaccatatagcttgctttaacaatcagaatgtactggaaacaatgttgtgtgaattctgagtctcagtgtcaagatgcttctgctctc

SEQ ID NO: 38989 - DNA, 404 bp, Homo Sapiens
gagatactttatagactactcatgggtcaagttgttacaatatagttgagaatagtaattatctactcccagtacctgggagtccctgattgtccctgatctcaagacaattttattacactgacgcttcctctgcattaaatatcagggattcagattaagtttctgtcctcccagagtgcagaacctaggggtaaggaggtaaatgataaaccaagaatgctaaccagaatgttatatttcttaggagagagctattacctctcccctggatagaaggagagagtcaagccacatttcagaagaagtgtggcagatttggagggctgatacatccctctttaaggaaatatttgtgacttcaaggaagatggttagctgatagcctttagctattagattgt

SEQ ID NO: 38990 - DNA, 494 bp, Homo Sapiens
aggtgcgagcgtggggcctgtgcactatgaggtcagagtactcctacatgccctggggcccctgagagcttcatcctcccctgctcactgccacgggctctgctcccgctcagctgcccatccggcttcctgctcacagccttgcatcttgtgtccttctctcgcaggccaacactgcacctttatctttacctatcctattcctctctcacgttaatgtcaactaggacccctagctgctatctcatactcatccccactaaaccaatacctcctgggaaaatctcctgtctccagggtagtctgtgcaccatagtgcaatgatttttcttcttgggtctgctcttgtgactcctggaacccttcgcggacccaacagctgcaaacaaaatacctcaacttataatcacagagtgctaaataacagtcatgggaaatgtctagtttagggatggtgtgtgtcctggtatctttgcgtaaatattcggaaggac

SEQ ID NO: 38991 - DNA, 409 bp, Homo Sapiens
tgagactctgcaaaattatcatgccgtcctatgggctcccggcttttattgcttctcccctcgctcattatgaaatgattagttgtctccgatgcccttttgaattgctgctaacgttgtactgcggttctgttaccctggttctgaataggagagtcttggttcggggttaagttaatgtagtcattactggcccatttggggacccattcatcatgctaatttcatgtccaacacttgggggaatagagtacaaatactcaacgtgaagcaaatgcacagtgaatccaaaagacgcacatgaaatgtccagaactcagtcacagaagacaggcatggggagctctggggccattactttccataactgtgggagcaatgcagacatcagagagggcctccaatgggg

SEQ ID NO: 38992 - DNA, 458 bp, Homo Sapiens
ctaggttggtggaaagtgagtgcttgctgtctggaggtgagctttaagactcgtctgccctgcttatgagatgaggaagggtggcctcttcctcctgcatttctgttctttgcttccttctctgtctgctcactctgtggaatgcccaccccagcacgggtggggtggaacctgtcagatcagtctcttgtttctggggtcttgaggcattataagatctagttgttagaagtgtgggattaattcatcttttcacattcttctaagttcctgcttttagctgccacacccactttggctaagtgggggtctagcccatgtaattagcgcctccatgccaagtggcagaattgcttcaatggtgacagattgtccccattcaagagttcacttttggcaactcatcattgatcccagaaggtgacatggatgaaactgggtaagaattccgacaggct

SEQ ID NO: 38993 - DNA, 389 bp, Homo Sapiens
aggttctggcatatattttgaagataatgtggacaggattagctaatgtattcgatatggcttgagagcagaaaaggaataaaagacgattgcaaatggatctgagtaactaaaagatgaggtaaccctttgactggagcactggatggttattttgtagcaagaagtgtaaagacagagaagtgaggtacaaatgctggggaaagggaagatatagaaatgtgtggacttttccaagtactgcaggttgaagaaagtggacgaggtatgaaatggttgtctaggagagaacaagatggggggatagagcatgacagctgggtagcactaaggttgcaaatctagaatgtaaccaatcacaggatggcgacaggtggagaataggcaga

SEQ ID NO: 38994 - DNA, 422 bp, Homo Sapiens
tagagtgagacccagggagcgtgcagtcacgtccaaagcagtcaggtctaaataaatgtaaagtactaacatcatcattatcactagttctaggctgcacttatgtctcgaatttttgtagtagccagtgtacagacaaaatcactaaaattggttgctaatttctgatttacaagctgagcagaattccctacttagagtaactcctcaaaacatacttgttgagcaaaatgggacgtcgcaaattttgcctaggaagtttggaaactttcagcattttcccaaattccacacctgtttttaccagtctaaggttaatcccagtctaacctcatcaagttcatctaaactgggtcctccctgggcaaaaaggaagaaagaggacataggaagtgaataaagaattgatacctcagctgggc

SEQ ID NO: 38995 - DNA, 352 bp, Homo Sapiens
atcacaagccaagcatggaggctagttaagacgacggctcagaggtgcctgagaagagcttagtcaggagaatcgtgggcccagctgcactgtctactccatgattgcaccatgccttccatgatggcaccatcttctccatgagctgcaccatcatctccatgactgcactatgccttccatgatggcattatcttctccatgagctaccccgtcatctccatgactgccccatgctttccatgatggcaccatcctctctgtgagctgcaccatctcctccatgagctgcactgtctctttcatgaactgtcttggtgagatcctagacaaggcatgatcatcactcagt

SEQ ID NO: 38996 - DNA, 410 bp, Homo Sapiens
tagtcgtcggggaggaggacggagctgcaggaggtggtgtggccctgggatgtgggacagagatgttatcctgggagaacagcgtggcaggctatgctgggagcagggtacacgctgccccactgggctgcatgacttcccctcccgcgcccctcagattcctgggtggccttagaacttgggccaaggctacggacgggcagggaggccaggccccccccacagctgcaggcccaggacctttgcccacggtcctattcttcggtgttatcgcttactaaatgcaccccttcttgtccttggctggcaggttgagtgttatgttctccatggcccctggctcgttccacctgcaccaccgccgctcccgtcaggccttttccccatccccactagtggcacaggggatg

SEQ ID NO: 38997 - DNA, 510 bp, Homo Sapiens
ccggatgctgagcggcgggctgggcaggctgagggtacacagtgctgcaaacaggagagatctcctccaatcacccttcaataccttcctctgcacacagtgggccaggctcaatggggcagccaggacagaaactttcaggaggtgtgggcacagggtctttgccaagttgggacacatgagacagcagctcagagggagcccaacagcactgtgggcatgtaatctggtaagttcagtctaacttagcctgaatttcagtcttattcttctgacttgggtttggcagatcatcatcacccttcctcaagaactttagtcttcaaaacagccttaaaatcctcactccaccttgcgtctagaactgaagtccctgccccacaagtcccagcctggagccgaaaaggaaggcagaaacctagacaaagtcgtcaagatcccgagagaagtgggtaggtacttactctgtttctctctgcagggccgtcaggatcagggacttgaggctgg

SEQ ID NO: 38998 - DNA, 492 bp, Homo Sapiens
atctacaggatgctgagtgggtgttgtgggggcgcagtcaggctggtgggaaaaattttagttttagaaaatatacacaaacccttctggagggctgggagtttttacgatacagtacttggctgaaggcagcctgtccccttagttaagtaaattagattagaaaaggaatgtggggagttatctcactagcttgtttacccatgtggtcctaagactaaccttcgatttaccgggttcttaattgctttctactggggaggtttgcaatatcaattaccctctagtggtgttgactcaaggctttgtcaattaatctgtactgaataaatgcgagtctcactggctcgtcgaggctgctgtctgcaactgtttacagcactgttcttggagtctgtaagtggcccagatgcttagccagactggcaaagcagaatatctgtgtcagtgtactttattcatccgtcattgggtcagggtctgtgggacaga

SEQ ID NO: 38999 - DNA, 396 bp, Homo Sapiens
ctcagactcctgagtagctgggaccacaggcatgtgctgccgtgcccagctaatttattttactttttgtagaaacagggtcttcctgtgttgggtaggcctcagccttctggggttggcttacctcagtctcctaaagtgttgggattataggcatgagccactgtgctcagcccccttttgttttcattacaagtttgcttttataacttagataaaggtgggaagacagttttcacaattaaggcagaacaagagataaagaaacatatagggagagttgtctttgtgggaagaaagtgctttctgtgaaagcacttttagcaggactgctgttttcaggccagagtagaagggccagaagcagtttttattcagatttcctcatcgtttcca

SEQ ID NO: 39000 - DNA, 387 bp, Homo Sapiens
ccgcccgtgctcacttgcatctaactagcatcccaaagtcctcatatcaaagtagggtcgatttcatcttcccactagagggatgagccaatgagtcacgggggagggggctgtggaagacggcaggggtgagtaatgcggtggccccaaggtggtgctgaaatatccttcctcaacaaagaagataagcagcaaatgttttgagggtggccacaggggtcattactggtgggaattcaggaaagtcagcaaggggagctggcgagggtgtttccgtcccttctcaagagtccgtgtggctgtgtgaacagtgggacatcagggatttctccccaggcctacttttcaggattccctctacctaccttccccccatttaagcgtgca

SEQ ID NO: 39001 - DNA, 358 bp, Homo Sapiens
gcgagctcggcaccccgcccggtgttgcgccctctaaatttgaactaacagctgtgtagtgaggtaaatcagtattccataaacaggtattaatttaagtgctctgagtttattataccaaaagtatttattctacaacactggattaaagaacaaactactactggagctataattatactaaaacattgaaaataaatcacgaagatgactcaagcttgaaaaatacctaaataatagttgttataaatagcttttcactgcagactacacctccaactacttgtttgctttctttttgcttgaatttttttaaatacaacataaaaattccatgaagaatgcatagtctgtgcac

SEQ ID NO: 39002 - DNA, 724 bp, Homo Sapiens
tctagctcggaccccccggtgttgcgctccgagaccatgcctctgcctaagaagggacccagatctgctctgggtttgccaaagccagggcccctctgctttgctccccctccgcattcccgggcagccaggatggacggctgggtttcagagcactcatgcagcagtggctcagggccacctgtccccagggaactggaagaagcgttcagggccctgaaccaaacggctgctgaaggggtccctgtggggagagcccccagccctgcacagaggcaaggacacaggttcggggcgggcactgcccgctatgtgttcccgaggcccctgggaggccctcaccctccctgcctccttccccttcccacagagggaagtccgaggccatcatcgcccgccgtgaacccaaagaagaggcggaggatgtaagcagctatctctgtacagaatcggtacatccactcttcactcttcacatgcggggcgtccaccattcacttttcacaggcggggcggccaccgttcaccattcacacacagggtgaccaccattcaccattcacaggcagagcggccaccattcaccattcacaggcagagcggccaccattcaccattcacaggcggggcggccaccattcaccattcacaggcggggcggccaccattcaccattcacagggagggcggccgccattcaccattcacacacagagcgcaacac

SEQ ID NO: 39003 - DNA, 473 bp, Homo Sapiens
taatagttgaggtttctactccacatcactatagatggcagatgtctgctctatatacagtcttggctcatcgtaaggatataaaaatagaactcagttaccaagctttaaaagagacctagatgtaatggattaatttaacttactgctgtgtctatcaaccctgtcggtgtgttagattcagatgggacacataaactgagaaccttaaaaaaggacacccaagtcagagagaagcacagttaaaggatgttctcaagagacctcactaggcagggactgcagactaatacctgttaggttagataatatctgtatcctctaggggcaaagtcatttaagggctatgctgggctccttgtcagaaacctgtttcctcagagtccaaatataaaagttcctgcatctcctggttaattcacatgtatatattttggaggagaaaccctaattttattgtctgtcatattatt

SEQ ID NO: 39004 - DNA, 362 bp, Homo Sapiens
caagaaataactgaatcatagggaaataagacacacacctcccttcaagaaattctaatctaactatagagaagactagaatcttaggcttaaaaatcaatagccatctccccaatcaccccagaccctaaccttggacaaataaaaataaagcagggaagacactttaggatttctcttactttctggtaaagcatgtattctgggtcccagacttcgaaagtacacatgtctcatggcctcttcagctgaaacccttttcttagattcatactgtgaaaaagcaaagaactgcttcattagctttttctctaattactgcaaaaagtaggagatgggcaaatgagcatttagagctactt

SEQ ID NO: 39005 - DNA, 574 bp, Homo Sapiens
gaggtgcagagtatcttaccctcaagtgagataacatgtgcctgtgctgtcatttccacaataggcatgcagctgctttctgagatggtttacttcattacacaatttctttctaatattagaccataggtttttctttattgtggtaaaacattatatagcattaaatttaccatattagccatttttaagtatatagttcaatagcattaagtacattcacatcattgtgcaacacagttctagaactttttgtcttgcaaaactgaaactctataccaactaaacattaatttttgcctctccaaccccctagcccttggcaaccacatttctactttctgtttctatggttttgacgcttaagatacttcatatggttagactcctacaatatttatccttctgcaactgggttatttcacttggcataacttgaagttcacccatgatgaggcatgggatagaatttccttatttttaaaggctgagtaatattccattgtgaatatactccacattttctttactcattaatctgttgatgaacatttgggtggcttccacctcttgg

SEQ ID NO: 39006 - DNA, 545 bp, Homo Sapiens
gctggttccgtttgttttgggcttctcatgttgaagctctattttagcagggctggatgttcctaactgagcgagcgtgtaaaggcaaacacactaggctctcccttgtgtgggagagctctgctggcttctgaagatagtgaaattatgctcttgtgaataagccttaacgatttatgtacaggatttcatgttacatttaaaatgttgtggcacgtttcagatgtaatgtgatgtctatttgtatgtgggctttagtagtttgatatctagagaattttctaaaaattttgggaattgatgctgaaaatacaactataaatgggagtcggataaccacataaacactggtagtatatatttggacaatgccagagatcatttgtgtaactttggacattttatgtagcttttgatttctttgtagacatgtgacattagatgattgttttaaagaaaaagcagaagtggtggaaagcctcccatcaatggagatagatcatcgtagtctaggccacagatggtgttagccttgttaccaaatt

SEQ ID NO: 39007 - DNA, 461 bp, Homo Sapiens
tatgtctcgatcttagtccaaaatctttccaaagagcccataagttttaactcaaatattaaattagaatatatctatgaatacccaatattgtcaacaggcagtatatattaaattctccttggtcctactttactgtttacttggaattaataggatgcatctcccaaattgcaacatggagggtaggttggcatgcagagtacgttactaaatctccattgcccagaccccaataaatccctgtaatatggctctagtggactgaggaagaagtatctcctgctccctctcgactaggcagactgaagcagtcagtagtactttgactagaagcaataattccttaattgcctgttgccctgctgccaagattctctctctgttctttgctacagctattaatgccaatcaacttaaggccatactgtgttaatgaaaatctagagtctctggatgga

SEQ ID NO: 39008 - DNA, 498 bp, Homo Sapiens
ggtgactctagcaggatcttcttggctttgggacggcggacaagggtagtgccgtgcaagaaatcttctcctgctaaactgcagaaaggccttctgtggctgtccacagatggctgcgacgcttgcgagtagtgtgacttgctctgaccaacagaatgtgatgcaagggatggtgtgggcgtgaggaaggctggcacttctcactgtgcctctgggaacctgggccacgacactcagaggccagctccctgcaaaaagaccgggcggccccagctgttcctgccatcctggctgagggttggacaggcaagtgtaggacgagcttgaatttcctgccactggcgaccacagccatggaactaaccccaggtatgacctacagaagaaccacccaactgaacccaacccaaataacagaatcgcaagcaaatacacagttgtttgaagcttctgtctgggggtggtttgttatacaatagctgactgaaaccagatctc

SEQ ID NO: 39009 - DNA, 388 bp, Homo Sapiens
ctctgtgctttgggacggcgctgtgtttgggagggtcttatggatgtgcccagagtgaaggcgctgggttgtcatcatgagagctcacaacaggtacccttggagcctttaaattgccagcagttaacggggtaaatgtcaggcttgattaacacgcgcggggactgcgagaagtaacacagcgggattcccaacagactcatcagcgccggtttgggttcggaagtttcagaacaggggagtactccaggattgttgcaacaacagattccagaagcaagtccagcatcccggtcttatcttgggaatacagcttcaaggcgctgttcacgatggcacgtgcttgcgcctcttttattccagacgcccccgccgtcccaaagcacag

SEQ ID NO: 39010 - DNA, 416 bp, Homo Sapiens
ttagaggacccccttgctttgggacggcgggctacaccgcttgcatcatgacggcggctgctgtgagatagtccaactgcatcttagtttccatttcgaaaatgagactggccactaaatgactcttatggactcatcagcactacctttttctgaactaagaatgtctaagacaagtgctactagcagtttgagagaatcccacatctggagaggaaggaaataagaacaacacgcagaaagacggaaagcaaatagatcaatgacagtactcctttgcaaaaggtgccaagaatctaaataaaatagtccccgggataaacatggcgcccaccgcggcaggacataatcaccagaaaataaagattccccggctcattccattttataaatcacgccggcgtccccaagcacag

SEQ ID NO: 39011 - DNA, 364 bp, Homo Sapiens
tccatacagcaacctgacccagcaccctgctgcgataccagactggggctacgtagaggataagcagagagatgaagatctacctcaggaacgaggcaggatatacgagacaaactctacgccgatacacatacgctctcaactatctcctatggaccccacaagccccagttataacagccacggactacagcccagccctaacataaatcagagcaagagccggatagagtacaaggctatttaatatgcttgaactgccgggcaagacaacatctgtgtagcctaacctgcagctggaaatgtacaggggcgcagaaccatagtgtaccaaggtagacaaagaatagccctgaaccacact

SEQ ID NO: 39012 - DNA, 440 bp, Homo Sapiens
atgcattgtggatggactatgtgggttctaggaagtgtgaagaggacaccagaaagcatctaacttgaaagaaacaccaaacaaccagctagacagaatgatttagccaatttgatgtcaaccagatgccatcagccaccccagaactgacacaacgggcatgtgaaggagcaactgtggtggcagggatggggacaaacacatggaccgtcactcacaagggctgatgtagctaccaccactgctgaatgttcagcctgccagcaatgcatcagtgctgatcctcggaaatggcagtagctctcaaagtaaataagtagccgcttggtaataagttgactacaatgggtcccttccatcctagaaatggcagaaatttatttcgactagaatggacacatggttcacctccttctgcctgcaggccctcagcccaacgc

SEQ ID NO: 39013 - DNA, 370 bp, Homo Sapiens
gaatttcctttaaattctcacaacaactctacgaggtggattctataattactctctcttcaacgtaacagaaaacttacatcaacagaggtaagtgagctgcccaagtgcatgcagcctgacactcagaatgtgaactcgagtcagtctgattcctgagctcctgcctctacagcatcgatcactatacccaggcaggaagtgagatcacactacagctcctatgtcaccccgtatcactcagtaatacatctgagaatcacggtgatatggagcctcctgcccacagcaggagtggatatgtcaggtagccagccagactgcctatgcagcagcagcagctagataccagaaggtccctagatgtcag

SEQ ID NO: 39014 - DNA, 401 bp, Homo Sapiens
cgccgggtgatgatgtgatgagctaataggattagcagtttatcatttgataaaataaatcttttagaacatgtttgcagtttctccaaaacagactcatctttcatcaggtctttggagacagtggtgtcaaagtacatccccccctctttctccctgtctccagggctgagtggatttatatagtaaatatctttggtccggagaagtctgaagttaacctggccattgagtgttaccattctgtagagaataacaatgcctaaacatgacacatttgtgcacaacttaatcagtagcctgaacttttcattcagccttggacaatacatcttggaattcacaataatgcagatcctcagaaccaagtcagtgtcatccgtataggaggctgttactgt

SEQ ID NO: 39015 - DNA, 423 bp, Homo Sapiens
tgcatgtgtgtgtgagtgtgcgtatgtgtgatatctgtatatgcctaagtgcatgtactgagtcaggactgagaaccattgctcaaggccatgcatgtacctagatggcctcaagttcctcaaacacaacccccactagccccgaaagcctaaaatccctgacatctcacttttgtactgcacggttagaaggttcttcctgtatcctgcaaagattggtccaggtggaccttggacccactggcccttgttctaaccacgcaaaacacaccttgtccctcattcaaaatgtttgaaaagatcaaatgaactgtaccaaagtcagaggaaagctttttgtttattgtcagagtgcttttaggaatcccgcgtttactgcctgagccacagaaatgtaatactgaagggggagagagatgagga

SEQ ID NO: 39016 - DNA, 507 bp, Homo Sapiens
attctggacttgagtatggagcaaagggtaccttacccactggccctgtttatagccctctttagagtgcatagagagatgttggtaggccatgtctctgctagaggggcctgtgagtttgggctgagttactcgccatggacagtggtggggtcctggaacccaccagctgagatggtttgggcggttctagtctgcacctccccagagaggtcatggcagagaggccaggcacagaggaaacccgctgagcctgcttccttagttctggcagatgggtcagcccccacaggactcaggattcaatttagcccggggttctggctccatctcccacagtgccggtgccagtgtgctcctaagtactgtttgtgcaaacctggctctgactgagacaaggagccttaggagtagtagggacaggagacacagcaaactagggctcagagcccacctggaaccccttcttcctccctctacattcatgacccaggggataccgagctc

SEQ ID NO: 39017 - DNA, 383 bp, Homo Sapiens
tgactccttggattctagacccgtgctgcactgtatggtaatctactagctgcatgtggctatttaaattacaatgaaataaaacagaatatttagctcttcagttgtactagctacgtttcttcctcagcactttctgtgtagagagtaactgaggcccagagaagcgaagtaagtcgcctaaggtcccacagcaagtctgtggccaccagagggcagaatcccagttttctgagaaattcaccaggctcctttcatctgggatttaaaaaatcctcaagcgttctggtttagtaacaagaaaactgtaaaccagatctcagagctgtgaggagttaaggaggaggaaaggggagaaccgccttcagagaaggacatgactg

SEQ ID NO: 39018 - DNA, 377 bp, Homo Sapiens
ggtataccaccctgaacttctcgtctggctctttcctctatgcctaccttcttcctttctcaaagaggagtgtttgcacctttctctcccctcgactttctctcactggtgacacccttataccggtggcctcagctaccatctgtgtgtaccccacctacttgggggcactcctccacagcggatccaccttcccgtgggcagtgccatctgaaggattccaaatcagggtctcttcaggagcaactttcttcctcattaacccagtgttcttagcagacatctccctttggtgccctataaaacttcagactccaagtcgagtgtcccactgtgaatacagactcttcctccacccctgaactgctgtctttact

SEQ ID NO: 39019 - DNA, 549 bp, Homo Sapiens
ccacccttggccagagtgttcgagcatgcatgccggcattccatagagtgctgtgcagcccattgaattgcatatttatttgccatgcagaatataattctgcatgccattcattagttctcacaacatgctggaccctctgactgactttccttttccatgaccccagaggacaacctggttctagagctaggcctggatgggccccttgggtagagcaggcttatgatcctgcgctttgattcatcatgcatagtggaggtctaccatgctcccagcacccagataagctcagtttctaaggacaggtgatgaatacgacagtccctatcctcccgacccacagttgaatgtgttggcatctttccaaggactcaccttgggcagtgggcccatttttctgctaggcttttagctgttcttgctaagtgctctttctcacagcccatcttgctcaggccctggtgatgtctccaccttcccccacctgtttctagctcctgcccaggctgctggggtgtgaggggacctggggaatggtgtgactgg

SEQ ID NO: 39020 - DNA, 363 bp, Homo Sapiens
ctcagaggatcctgagcgagtgcaatggctgtcgcattagatgatcgctgggtgttggctgtgcattagatgatcgctgggtgtttggctgttgcattagatgatcacttgtctgttgggctgtggcattaaatgatcactgggtgttgggctgttgcattaaatgatcactgggtgttgggctgtcgcattaaatgatcactggtctgttcggctgtcgcatcaaatgatcactcgtctgtccggctcttgcatcagataatcagctgggtgctgggctcctgcatcagatgatcacttggactcgcaggccctgtggctcaagatgatcactgggctcgagagcctgagccctgaagataa

SEQ ID NO: 39021 - DNA, 417 bp, Homo Sapiens
tcgagcgagtgcatggctaaagaggtaaaatgaggctacactgtgaagaacccaggaaaatactggggtctgtttgttttagaaaattcacaatttggggcggagtgcaatggctccccaaaacacttacccaccagctgcacgtgagaagccaaaggtagtttatgtgaaagggctttggaaataatcacgcaccaagtgaaggcagaggacacaccttgtcagcttagttctcagcagcaaatcatctcttttccaggataaccctccctgattcttattgaaatctctttgctgaccacactaagctcttctctctcaggggcagtgggagccgtggagagtggaatagaccagctgtctgtgacctgcgagggagtccaatgtcggaatcactccccagccattgcactccgg

SEQ ID NO: 39022 - DNA, 427 bp, Homo Sapiens
tcatgtctccaggcagctggccttcccttcttttttctcaatagggctttcttcaccttttcatctagaaatcttttttgcatcttttaaatttcaattgtgtgtcaactacttggtgaagtctcctttaatatcctccccatcctcaccagcacacacacactatgtggaattaattattcccttccatatattacttatatgtcttgttaatgcatctattcttatatgtatcacaccgaatcataattactataagcttcttgagggccaagactgtgccttattcatcttcacatttccactatctggcccatcataggttttccataaatttgttgagtctatagaccagtgtttgtatataactctatcaagcccctcttttctcctaggctccagatgtgttttttcacttgcttactgg

SEQ ID NO: 39023 - DNA, 478 bp, Homo Sapiens
tcagtagtcaccatcatcgttactttttgacttgttctcatgtgttctttttgaaattcaaaatatccagctggcttgaagatagttgtcacgttttatagtcagctatcatagactgagctatgtcatatgtaatagtacagtgtgttgaaagagtaattattcagaagcattttcaggtaaccagtgacattgattttcagaactagtacggaggcttgagaggctcaggtgtaaaaggtaatttagtacttagagggggttgagtagtaacagaaagtagttgtcagaccacaggtataaacataggtgagggcacagaatcattgatttgccttgattttcacatattcaagaagaaagtaactttgtgaataaataatgcgttcataaaggtataaaaactcaggaggttcaagtgtcccatccatcttaaccctcaggctcccacgactccatctgttgaggcaccagggtg

SEQ ID NO: 39024 - DNA, 446 bp, Homo Sapiens
agtgcaatggctcacaggcagggtgattctctctaagcggaacacctgcatttgaatccgcctgcctggtagtagcaccctggggagttgtctaacccctatgagcccaacctttcacatttgggaaaagtggaaccagcagttcgatgcctggctgggtgtctgtaggaaacatgaggccccggaagtgcaagggcctcacacggcacaggatcctcacatggctgccagcctctcctccactcctggagtctgcagagccctcccctcccacacacttcctctgggaaaagctgcccaggctgctgtagggaacaggaaccctggagaaggcagaaagtctggtggcacacgccaaccctcagcttggctgggcaccttttggcagacagtttcaccccactgtttccctgcctccaactaggcagccggcaggtcagtcagtt

SEQ ID NO: 39025 - DNA, 389 bp, Homo Sapiens
cggtagatcaaaacccatccttgcaatgaataaatccgggctcttagcaacacggggaaagaagggcttgcatcactgctgtgaccaggtaattctgtgcacataccaaggtaagaaacatcacaagggggtgacaaagtatttccttgatgggccaaaattctggaggttgagtgtgagtgtgcatgcgtgagtatggtgtgagtgggtcctctctgcaaattctgtaatcatttcatatggcttagaggtaagagagggcaaaacaaaaggaaaggagtgaaagagacctccagaaggtgagggggaaatagttagaatcctccctgggaaaagaagggtgaaaacctcaagcacgtgaggttgttagttggtaggtaggtttgtta

SEQ ID NO: 39026 - DNA, 353 bp, Homo Sapiens
cgcgacgtgatcttctgctctgcgcaccgacatatgcatcatggattcagccgggtcagacaagtctctctttatcccaagtactgctgaacccttccccttcaactcccaaggaagacttaacagaggtgaaagtctaaaaccatgtgagatggtgctccttagaagcagctgatttggatcagggatggattcatgattcttgaatcagaccaatcagattcttgagaatttggcacaaggaaattcaaagaagttaggctgtgatccatgaattggaaggttccttagactcagattgggatagccttttggggatcatgtgtacccaagggcagagtatttacaaagaa

SEQ ID NO: 39027 - DNA, 367 bp, Homo Sapiens
taggttgagaccatggctcaggctatgtctctctgtccaaagatgcatgagatgaggctcatgtccagcctcaccacccaaggctcgtctggacgttcctggcactctcccctcgtgccagcttggcctcccgctaaagcagaggaaccccagctccccagctctcccctccctgcaatccctgaaaccaaacagacccatgctctcttctctggttaagggccatgggaacccaggtggcaggtaacagggtgatagccagagagcacagatcaaaggtctggaatctccccaggtccacagagcaagctttcctgccttcggaacatgcgtttgtgtatcaattgtgtgccaggctcaggctaga

SEQ ID NO: 39028 - DNA, 441 bp, Homo Sapiens
gtgctgagcgtcgaccttctgctctcaaagcgatgtaccaaccagacagagacccattgagggcacctaaggaaccctgagaggaaatggtgttctttcagatcagtggcgatttcctgagcattcacgtgttctaggccgggtgctagtcactgatgagagatacaggcctcatccctgtgagcctggattccaaggctttcaggaacctttgaccaggaagtaacaggaagttctgaggggccctggggctttagactcattttgaaatgtcctttgtggcaccagaagtggttgtgtagaggaagtgtctctaggctgcggtgtgcatgggtgcgtgtgcaatgccggcaaattcacagaggtctcctctatagatgcaagggtgctgcattgaggccagcaaggttgatggctgtggggtcgccgctgctggtttcg

SEQ ID NO: 39029 - DNA, 363 bp, Homo Sapiens
tctagaggatcggacgtcgacttctgctctttctggaggctggatgagtcatgtgtagacaaaaacagatgggagttgggaggtcagccctgagcagcgacagactgaggatgttgtggttggggatacagtgagtatattgttcatgaactaggtaaggaactaactcctcacctcttgtgctcctggaggaaggttgacattggtcaggagagcagcatggagagagacagctcaatggggttcttggagcccctttaagcacaaggtttgggctatcctcattgatttggctttccccaagtccccctggagttattccagcctgtagaaggggccaagtctagagcagaaggtcgacgc

SEQ ID NO: 39030 - DNA, 368 bp, Homo Sapiens
tttgagagcccctctcctgtaatcgaaccctgattcccctgctcaccctgtgttcaccatggtatgcacggcgcactatccatcgcaaagttgatcgtggcacgcacgttcgaatgggtcgtcgccgcctcggtgcggggtgtgcgatcggcccgaggttcatctatcagtcaccaaagccgccggcgcccgccccccggccggggtccgtctagagtctgaccgggctggtcttttgactctgatattgcacgcatcccccccgcgaaggtcgtccgcgcccgtcggcgtgttattagctctagaattaccactgttatcccagttggacaggagagcgggctgtcgataggagaggggctctcaca

SEQ ID NO: 39031 - DNA, 443 bp, Homo Sapiens
caggatcccttttgagagcccctctccttggaatacctgaatgaagacgtatgttgagttgtcttcattctggtttcaaatctcacctacagtgctctctcaccatcctgttcctcgctctaggaccatttcatttctggtcacagttcttgcattccgctattcctgggctatcatctatcttggcttcagggcaggaggactggatttctccttctctaatcctcctacgaggactgaacgatctggtaccctatagaaggctaggaaatgctgagatcgctaaaggaagccaggctaatgggccttgaccccctttttcctggggctcctgacatggttatcgccggagaatggcggggttttgaataggcttgcgaatgtagatttatgtctggtcgtttacacgaacgattagttacgttccattctgtttcttttac

SEQ ID NO: 39032 - DNA, 421 bp, Homo Sapiens
tttgagagcccatctcctgtatcccttttctggccaagtccagtcaatttcaccttgtaagtactgtctctgttccaatctgtttccacccttcactgcctcctcacaggccttcctgctgtcagacttgtccctttgaaatccatccttcacagagctgcccgtggagttgactcaaaacaaaactcaaaccattttcctcctctccttaaaatctttcaggtccacagatcttctattcccctttccaaagggtccacagaagccttagaactccagcaaatacaatctctcaatcactgacctgaaacatcaagtccaagtgccttaccaggcatagtggtctttcatgagccagtccctgaattccagccttctgacagtccccctcacacttatgcagtatattatcaacagacct

SEQ ID NO: 39033 - DNA, 420 bp, Homo Sapiens
cgtccatattcataaaaattgtgcccctagagggcgagggccacgggaagggggatcaggaaaacaagaatcagtctctaagctggtcctggaacatcatgacagatgtatctgagcccaagcaggagaggagccacaggcccaggctggcagagttgtgactactagaatctcgagtcactggggctcagggagccctaacttggtggcaggtgacaaatgtggcacaaaggagaaaggagtcttctccttccacatagaacacacttggcttcagtgctttggggggattcgtggaccacagagaagcttccgcatatttataggcactggggaccagcaggaagtggtggtgagacactttgaaaccctccactgcagacttcacccagggggcaaggcaggagaggggctctcaaa

SEQ ID NO: 39034 - DNA, 433 bp, Homo Sapiens
tagagccctctcctcccttgactgactaccacactctcataggtttctttctggctctctccttctgtatttattactagaagcatttcccttttcttcatctggaggatatcagtacaaaagtcctatttgcatacaaaataggaggtgcacattagacacttacaaaactatttaaaatgttgagttagaccatacgccaaaactcagaccttctgaatcacaaagaaaacatcttgggaaattgactagttacagagaaacagttgtcacatcatgtgacaaagtgatgtctccacacagacaggaaacatctgggttccactctgggccagacagatttctgcagtgttctcagaatgaggtattggcaactaagaagacaaagaaagaaactttcagaaacgtggtaaaactgtcaaaaccacatgac

SEQ ID NO: 39035 - DNA, 391 bp, Homo Sapiens
cccagtttttgtatagatagtaggaagttaaacctaagaaaatcatcaatattagaggtgcttctgaattgatttatctgcagtttaactacttagcatttatggaaggcagtttacaaaaagccatagaggtttatgataagctggtcaagtaattagttgaatagattttataattctttgcacttctcatctgataataactaccgtataggtagtagacttgacagtagttcagtattttctgttaacagagttgtgtttataacaattacagtcaactactgtggttcttcagttgcacagagtagcttttggcaaaagtgaaaaaacctacaaccaacctacatctttttacctaggagaggggccaaggagaggggctctcaaa

SEQ ID NO: 39036 - DNA, 369 bp, Homo Sapiens
atgagccactgtgcccagcctgaattttcattgaaactaatcttcaagcttgatggaacctttatctactgttgacataccacctgtatttctaatgaagacatctatctcgtcttttcagaagtctccatttgtgtatatgattcaatatattggcctttcctttaaaaatatcagagaacaacaggttaaaactaagcacagctctagtttgtggggcattaacaagagaacagatttcaaattaccaagttttctcttccttttgttccactctgttgtcaggttatcatgcagcttggaattgaccaagtggctcagtttaggatcgttgatagtactgtgataagactttctcttttagcaatc

SEQ ID NO: 39037 - DNA, 481 bp, Homo Sapiens
ttcggctttgatagccctctcctcagcatcctcttgccgcagcttcctgagtcctgggattacaggcgtgagccacagtgcccagcgatgaacatatctttgtatatctcattgcagttttactttccctccctcccttccttccttttttccatacacccagcagctcatttgagagctgtggttggctcacatctcctggacaagtcctaaggatggcttgaaacataacttagggtcatatttgaagaactcttttgtcagaccagattagtttaccttcaagctccctctgctgctctcctatgctctatcccctgctcactccacccccaatatctgactcctgctgatctggtcctgggacatggttgctggctaggccagaaatgcttagggaattgagaagagactactccatggcccttctctgcctgtctgagggtgagacagggtttgaatctgtggaggcatactgtcg

SEQ ID NO: 39038 - DNA, 479 bp, Homo Sapiens
tcctttgatgagccctctccttgtttttgctgctggaagctattcaagaatagttccgaaaaataagtaagatagtaaaattgacttattagtaatgactgtggggcccctttggttaaaaattgattattttcccgggcttttggccttttcttaggaaattagagatctatatatgggtaaaagaagaaaaacatgttttaggagcatcatttgtatctaatatctgttctcttgatacctgttaaactttaatcatatagaaagatttgaatagaaaagcaaatatggagtcaagccatatacggtagaggtatagaaacttagaaatttataactaaacgttatttctaccacttcagcaaactgaagactattcactgattcatttaaaatatgtggtggccattattatgtggaaacataagatacagttatcaaaatacttcatttgcatctggtatgaaaatgttcgtttc

SEQ ID NO: 39039 - DNA, 488 bp, Homo Sapiens
gagccctctccttgctgcaggtgcaccggccctgccagcagtcccagccctgttcctccatggtgaatgcacgcggttcgcatattctgctcaaattcctttcctatccatgtttgctggggaagttccagttctctccagacgccacctctgtgagaagcagcctctgacaagcttgccctctgctgcaacacccagggctctcagggcttgcagcacctcatccaaacttccgcttgacgccccactcctgggctgaaataacgtgcagacacgtctagtccccctactgtgtgcattcctgcaggagaggccagtgcgcactgcaactcatgggttttgaatgaatacatgaagggaggggaggttcctccagcattatctgaaagtgggtggcaacaaaacacaggacatcctgagcccacactgacttaaagcaagtccttgctttgctgtagacagtgcaaataaagagactagtctgttgt

SEQ ID NO: 39040 - DNA, 487 bp, Homo Sapiens
tatcggacctttgatagccctctcctatcgaatcaaatttcctttacagaactgaaatttccatcaggctcatgctccaagtcagagtacaaaggacatgccaagggggcagccaggactcacctgcggggtgacctcactttgcacagacctggtgtccagggcccaggctcgcctcgtcacttgagtctgggtgtcattgaggcagtaagcagggttagctcctgggacaggtgagggtgcctccccctgcccccgccagtccagccccacagcggaggaagaactgcagattttcatctgtgcagatgaactcaggcccagtggtggaattggtgagggggaaggtggagaaggacaaagcctaactcagcaaagcgcctactgtgtgcctggcatggtactccgcgcttagtacactctgggctactccaggagctgctggcaccagagatgagttgcgggactgtaggattctgggaacttt

SEQ ID NO: 39041 - DNA, 488 bp, Homo Sapiens
tacttgatagccctctcctcaggctagattcttttcctgggagtcccttctctgcaagctcttctagctcttttcccaggagcctcctcagacctcctacgttaatctgtttatgcaaacataacacagaaggcctggccctgccctcatgcctggcacaggttaggttctgacaaagcacctgccatgtaagctccctcatcctgtcctgagtgtgagattctagcatagggtagaaagataccaagaaagcacaaaagcttaatgtttgtggctctgttttatgaatatgttgaaatattcccaatttcaaaattgctgagtcaaaacgtcatgaatcccaggatctagtgggaattataatgcaaactggtccacaagggaaactgtatcaacggccagaatgaagcaaattagaatcacttcaataatcaaaagttaatgtaattctactgggtggctttataaagcttaaaaagtttgtttga

SEQ ID NO: 39042 - DNA, 462 bp, Homo Sapiens
tacctttgtagagcctctcctagggcaggccagaatagcctaagcaaagatatgcaggtgttctaagctctgctgatgctaaagaagccagatttctcatttcctaaatggtaactacaatatcataataaccctagcatacacagtagacttcagaccttttctgttgagcagcaaaacactcccccgtcaaaggaaaaattatgtgaaaccccaataccttaaaggtataagtgcataccaccttttaaagtttaagttaatattataaacttcttataaagtcaacacactggttaaaacttgaaacataatgagttaaaatttcatttaacacatttgagaaaacatggtttaccttttacagttttaaaaatactgaaaagaagatatatttctaaaaataaattcaaaccaaaggtagtcaatttctaaagcacctctgaggatgaagtttgagaa

SEQ ID NO: 39043 - DNA, 506 bp, Homo Sapiens
gacctttgatgagccctctcctccagagccagcttcagaagagtttccaaaacttttgtcaggtctccagctccagcctagtgaggggcccgccatttcaggcctggaccccaccagggagaggcctatcatagaaggcggcacaggtggccgagagttgaggacatgatgggggcaaaggtggctggggccttggcttcgtccatccccatctggcattttcagaagttcttctttatatctcactgctatctttccttgctgcagctgcagcccaggattagtttgaggacttctggtcatttgcaggagagtttaagccaaaccaaactctggcctgatctccccacattgccccccactcacagggaccccatactcaagagacaatttgggttcttgaccctggcaccaaattgcattcgttcccactctcagccctcaaataagcttcctgtgtgtcaggcactgtccctgttccttccagtcagatcgtccagccgagc

SEQ ID NO: 39044 - DNA, 390 bp, Homo Sapiens
ttctagcaggatcccccagtcacagtacacttcagaatcctcggtagggaaatgagtagaatacttcagtgcagattcctcgctctacaggattgcctaggaggacactgtcctcagtctttggggctagaaggttgaagagaagtaaactttgactgaattatccttctcatagagtttaacaggcacagtggaaattcctaggccgatttcactctcatataacactgttggcaggagaatgggtagcatgggagagtatcagcgataccagaatctgaccagaaggacaatgtacaagaaaaggtagggactttctgaaggcatttttggtggccgttggtggggattaggtatacagcacagattagactgtacaaaaagactaaa

SEQ ID NO: 39045 - DNA, 404 bp, Homo Sapiens
actctgtagatagggagtttacagccagaccagattctagtaactagaaggagctgattgcacttataaaatagataacatttggaaaggactattttgaatgcttgggataggttaattgctgcttttattcctctctatgggcctctggcgttgtcttctgtggactgggcaggctgtggtggtagggaaggggggagcttagagatgaagagtatgtgggactcctgaagtaacggcaaagggaaatgcattgagatgtcacgatgagggagaaggctttgacatgggtccccagcgggggctgtagaatcaacgaacctctccaaaccggtccccaaacactggcacctggatgagaaaaggagcagagctgagcactttttctctgccctctttctgcc

SEQ ID NO: 39046 - DNA, 428 bp, Homo Sapiens
ctgcatcgcgcttgtcctgcctcgctgcttgtcctgcctctgctgcttagtctgcctctgcggtctttttctccttcttcctcttctcttctttcgctgcttgtcctgcctctgctgcttgtcctgcctctgtaaaaatgaggcccattattattcatgccgtggagtgaatcaacgtaatccatccacttcccatccagccagctgctagccaagacccgctggctgttaggtaacaggaactttatctgggactgaggaaaagtgggtaattttggctgcaggacccaaccggggcttcggcggaaagttgtgcaaaggatacagatagcagaggcctggaaagggtatgtggaacgaagtggcagataaagcagatagattacgtgttaccttagagaaaaagtgtcaaaacaacattatagcaa

SEQ ID NO: 39047 - DNA, 369 bp, Homo Sapiens
cactggcaatggctatgagggcacatattagcaaagcagtcacattagacaggtaccagctgcgtttctggaatgaccaatgggcagtttcataaaaactcaggtgtcaggctttaatgcactaggctccagatcctctagcccttggtttgagcttaaactcttggaaaacatgtaagaagcacaatggttcattactggggtaggagtccagccaagacacctatcttaacagtactgctctaaaacctcatgagatcaccaatgatcataaccaagcccttcaggcctatgacaaccatccacccgattatccaggcccaggaactctgaaggattccaaggtaaagaaagggactgatacattct

SEQ ID NO: 39048 - DNA, 430 bp, Homo Sapiens
atttaccgccagccaacatgtccggctaatcgtgttaagtaatcacccagtaggagacaggatttcatcatgttgaccaggctggtaatttggcattcttttgagtacaagtgagagaaactcacttgagctggcttaagtgaaaaaattctttgtcaggagagttttgtgaatttctgtttagtggcaagttgtagaaaccacttgaaactgcttaaaggcaaaagagggagccacttgtcccagtaactgagacatcccagagccgactgcccccaagcattacttggtcccaagtttcaaacgggtcttcagggtttgatctctctcctcatctccagtctgcttcattcattttggctctatgtggtggcagaagggcttctggcatctctggacctttatgcctcccaggtccaaacccagccag

SEQ ID NO: 39049 - DNA, 434 bp, Homo Sapiens
tcacttctacgacggctgaataaagtatgggatgtactaacatttatgtaactgtgccagtgttccactgaaaggagtctaaacactttggaggttcacaagtggaaagctatatttcagagttaactaaaggccaacagcatctatcagctcctattagcttttcagtcctccacagggtaatttcaaatacatctggtggaggctgtacataggatttcaccaagtatgaaagtatcagtgccatatttcagctctgagcataatggaaagcagatgctgtatgtagtagcccaagtttggagcacaaaaaatactattgcgattgagaggaagaaatcaggaccaattcataatgggcctcatggcaatactggcctttggaaatctgcactaatcagaagacctggattatttctggaggtaagcagtga

SEQ ID NO: 39050 - DNA, 402 bp, Homo Sapiens
tatctgcagctggcttgctgtgtctccgtcacacagaggtttctcttttctattgcattgtcaggctgcgctcgtcctgagctttttagctctgcttcccatttatgctttggcttcgatcctgtgcatctctttgtgagtcccttcgtgtgactggttttacggtcagccaggttacttcttgaacaatcttgctggtttagaaatttcttctgctagagtaccctatttcatctctctcacgtactatatatctcgtagggcaggggcaaaatgctaccagtctctttgtaaagcatagcaagagccaactttattccagttcccaacaaattcctcatctccatctgagaccacctcagcctggacttcatttaccattatcactatcagcattttggt

SEQ ID NO: 39051 - DNA, 437 bp, Homo Sapiens
ccggttagtcttctcagcactctgtgtgaagacttatccaacagagtgtagagaacatccagagaccgtgttgtagtcaagccatcttcaccgcaagtgcatcaggtggggcttttgtcctgccctgggtcccttccaccattgccctatttctctgcctggaaccagagaaccctgggaatgctcaggtgtgcctcagctttggtgctccatgctggaggccctgtattgagggctggtttcaggcagttagaggaaagtcagtccagtctgtggtcattcctggcctataggacctcacacatgataagatttagaataagcaaaatcttcagcattgctagagcaaatgggctcatcccagaatgagctgagaagcctctatgtcagcctcacttcctgggatgaaagaaaagggaaacatgtatccaggtggc

SEQ ID NO: 39052 - DNA, 359 bp, Homo Sapiens
ttctcagcccctggaaccaccaatctacttctgtctcgtaggaatggctatctggacatttcagagtagacagatttttgtaatacgcagtctttcatgactgaatcccatgacttagcagtgatgtttaaaagggttattcatgttgtagcatgtaccagcacttcattctttttttactgcccaggaatattccattgtgtggctgtcacttgtctacccattcaggtgatggacatttaacttgctccttgttggcttttagcaattgcaaataagaaacagctgaaaaacaatggcattcaaactagactgtggtcattttcaaaagaataaaaatctttagggagaaacaaaat

SEQ ID NO: 39053 - DNA, 372 bp, Homo Sapiens
ggtatgttactcagctcctagacatgttctctctctttatgacctagatcaagagtgatctctttaagtcttttcttcagtaatccctcagcactttgtacttagatgtacttagaaagaaccatatacacggtacgtcatgattgatatgcaagccttcaccactctacctgtcctaaaagtcagggacacaccttcttcatttcatcagtccctacttctatccagcattggcatccagtaagtattagtggaatggacagacaacccgaatttgtgctgatggcagtttaccctgttttaactgtcatccttctgctactagacatggatgagacctgagacgacatccctgctcagaggaccttcctt

SEQ ID NO: 39054 - DNA, 361 bp, Homo Sapiens
acctgaattagacttttgggcctcctggccttgggaagttggctgacatggtctgacttcatggccatcaaagcactgtcttgaggaaattgctctgaccagtcacagctgagtgacagagcttaagttggagccagcttccctgtgcaacggtgagtgagcctacaagaaagacatttcctacaggagaggcctggcctcctctggacatggaagctgccctcctatggtgagtgtgagaaggggcacccagtgtgcttcctcttggggtgcagcggtgtggccggcccaggtatgtggaagagctgctccttgttctttcacttagagaagtctttgtcggttctattagccaggggtg

SEQ ID NO: 39055 - DNA, 416 bp, Homo Sapiens
tatgttaagaactagcattagtctgtagtgaatctcgagaaaatagtctaagtcttgtagagttcccctcagtctgaatactggtgactgtatcccagtgttattggatacactggtggaagaatacttaataagtgtgtatatttccatcaggagatacctaatatctggatgtctctcctttttctttttgttgagtagccattgatggacattccctaggtctgctaacttcatgacagtcttcggtaaatgggactattagctagtggctcttgcgaatatattacagtattctaggatatacaacatttagacacaggttacacactttcttttcatattgtctgcaacctatttccatcggtattctagtttattttactgcaactgcatcttaatgcgtcttcctgcac

SEQ ID NO: 39056 - DNA, 384 bp, Homo Sapiens
tgatctagaggatcccaaagcgcactcttccctccttctctccatctctgccagtttatttcaatatttcgtttttaattgacttttacagcctgtatttaaacctctctttcttaattcaccaaaactggagtttctcttaaatcctatctctgtaaaataacagattagagtccctgtatttctcttcatttcttttcccctttctacttcccaacctttctccattaattattacttttactttgtcaaggtgatatcatgttctgtactatctattttttacacgtttttaaaattggatgaataacatttacaatatgaaaattacataattgttctctgcagaaacaagtggtaagtataaatgcagagagaaagcca

SEQ ID NO: 39057 - DNA, 403 bp, Homo Sapiens
cgactagaggatcccaatgtcagctaatgccactatatgtatgctcttaaacatgaactactttattatcattgatctaagatgaacatagcaaacacacaagagaatatataatgaaaattgggataagtgctatggagaaagtggggtggtcattacccttaaattgctgggagagctgaggatcgcgaggagggtcggggaatgctccgaagaaggatctttggagcctctgagatgtgaagattggaggaatgtagtcagttgaaggctgaagggaagaatcttccaggtggggggaacagcattaatgaaggctctaggcctggaagatcttggcatacaagaagcttgggaaaggtcatgtagctagagtatggggagtgagagaagggtaagtggc

SEQ ID NO: 39058 - DNA, 408 bp, Homo Sapiens
ggtgactagaggatccaaagctcgactcttccctacagaacgctgctagggatctaggctgtgtcgtagcattccctgctcttaacagtgtggaggatttctaaggcgctacagtgctaaactagattttcgtatcctaatttatatgaagggaccataaagcattagttgaaataaataggtttttcattaagcaaataactgatagtaatatacgagattttcagaatgatatctgatgtgaattagccacataaaatttttggtggcttggccttggaagtcagattttttttctctaatatggaaaaagaacattcatgggaattaaaaggtcactgtagttgaattctcagttgtatagattgtcccacttgttaaccactcagcagacattagctgagtgct

SEQ ID NO: 39059 - DNA, 435 bp, Homo Sapiens
ctgatctagaggatcccaaagctcgcactcttccccagggagctctacacctgggctggggtaagtaaaaggatgttttcgtgaccctgaaaccaaggagaagaaagacctgggagtacagggcaggtgacaaagccaacaagactggaggaagcaggggcctcgggcaggtcactgggaaggaccaggactgctccctccctggggttggaacagacataggcgcgctcagtccgaggccagacaggcgagacatggagaggatatcggtaccacccgcctacctctctgaaagactgtcttaagggagtatccaaccaggactttacaaagcagcttttttgtggatgtgacactgggtggagaaaaagattcgatggaagtgtgtgctctgaacatcttagcttggatagcagggaagtctggaggagcgtc

SEQ ID NO: 39060 - DNA, 357 bp, Homo Sapiens
tctagaggatcccaaagctcgcactcttccccattttagtttttgcttgtgtttgggttttatgtaacccgaagaagaaaattcttgatggaatcacagaaaacttgagagttaattatagttcagtgtagtgaatggcttggatctgaaagctgtgaaactgaatcgttttcattccgaaaatttctcatgtcaggtttttcaaaccaaaaagaatgattagtaaactattctatttacctttcatatcccatagctctcctgtaatttgtaagactcaaatgatacacactggaccttgggctgggaattaatttttgtatatttgccaaagtacacagtagcctcagtttccct

SEQ ID NO: 39061 - DNA, 607 bp, Homo Sapiens
tgctctagcggatcctgatcagagcatacccctagtccaaattaaggctagatttttaaatgaagaatggtacacagcaaagtgttctgaagtagaacagaattagaactcagttttggttatgcagattaaagagatgccatgggatgtttcacagagtctccatttttatgaggactgaatgaataaggaaaaacaaatattgaaaagaaactaacacaaagtgcttctatagctcaggggcttgggaaattcaccttctttcctctgcccaaaatttcttttactccaatcctgtagcctaatagtgacatccatttactgtggtttccatgaatcacagaacaaaagatcaaattgttttgacacagcacaagaagccaacagtaatatttatgctagcacgaaatttttaacagttgaaagtggctttctatacaactagttaacaatcttgcccctgattctcagactgttactttgtggttactgctaccaaataccaattacacacaggttcaagcagggggattttatgtcgagaatggaaggtccaacctttggtgacacatagcagtacaccttcttcggtttcttcaccttctca

SEQ ID NO: 39062 - DNA, 352 bp, Homo Sapiens
gatcctgatcagagcatacccctctagcttctttttaaagattatttgggtacctaataaaggataatttatatcttattacagactgatattttgctttttcatgtgtcatcatactgtcagtatattaaaagaaattacagcctaaaacttaacatataccatacatatatattaaggtgtcaaatagctattctcactccatcttacaaatattgtaagagccataaaaattaattgaggaattataagcctacaggtccatcagccttgaggtgattactgatgatttgggcttacacacatgtcagcaagatagggagtgtggataggggagggctggtagctaaca

SEQ ID NO: 39063 - DNA, 448 bp, Homo Sapiens
ggatcttaatagagcatacccctaccatctctgtatgatgcgttccctgtccgcacctgtttctgtgtcgttttcgggcgtaactggcatctgtggagcgttccatttcctgtggaactccggagcgcggtggacagactgtgccgctgcaggaagctacaaagaggcggtcctgccgtttgcggagttttccctcttgcccccgggggctatgccctgcacagacagtgactgtggttctgagttgctccccatgtgagtgggccatgacctgcagggccaagggtgctgacccctgagagcttcccagggagaccttgaaacattggtgctgaggccaccacagcccagctcgggtgtctccttgggcagtggccacaagtgccttctgccggacctgtgtcttgtctcatggcattctttcacaccaggctctgatccgggtacc

SEQ ID NO: 39064 - DNA, 440 bp, Homo Sapiens
cacagggtaggattacatgggtaaagattacattagtaaagtccagaaaagccagcttttattccagaaaaggtgaacatgtaacatggaagtcttgactcaattaagatggccgtgtggtcccaatacaataccaaagcaaattcgaagaaaatctccaaggatttaaaccaacctgtgcaatgcgagtgtgttcagatacctggagccagcctttggaacctgctggatcaaaaccaacgtgtgctctgtggggcccctgaaacacgaatcctctgtggggttgattgagaaaggattcacaggcttcaagtcccagcaagatttatttgctagaattcaagcaaatctttacgaaagggagttctcatggatgaggccactgttgggggctgggccaggactagatggagccatggattccagcctggcagcttcga

SEQ ID NO: 39065 - DNA, 376 bp, Homo Sapiens
taaactgttgatacagagaatgggtcagggaagcccatcccactcccctgaaaatatctgggagactcttggtgtagggacagctataacaccacttttactacagagatggtccaagattagagagttgagagttgggtgagattctacagtagaataatagcacatcatggacagttatagacaaaaagaactagcatcttttatgtgttcgaaccatataattatgaaagcaagatccggcaaaccacatacacatacacatatgactggtgcttttttctaaaagattccagtgggtgtggtagaaaagccttcagctctggggcaaaatgaggcctgaattaaattcaggctttaccccacttcataggca

SEQ ID NO: 39066 - DNA, 598 bp, Homo Sapiens
ctagagcatacccctagggaatggtggtgaggaatcatcagcaggggggtggaactgaagcatttaatcagggcagtgctgagcagagaggagggctgaggaatggcctgtggggcattagaaagtactaggtgttgtgaagtaaagggaaaatactggtagctcccatttagcttagagtgtcacccataagggaaatccttgtttgacccactgtgttagtttcccagagctgccataacaaatcaccacaaactgggtggcttaaaacaaacagaagtttattcttgcacagttctgcaggatagaagtttgaaatcaaggtgtcaccaaggctgtgctctctgaagaatctaggggagaatctctcccatgctggtttaggataaggaatatcttatcttggttcccagtttctggcacaaagcttcaaacatctttggaatatcttcagtgataggagtgtctttattatgctaatatggtgactcataatggggcgatagaaagcttgaggatgagggctggtcaccagaaaggacaaccatgtgacaaatgggttagaactttgagtcaccccaacttctggggaggggtc

SEQ ID NO: 39067 - DNA, 512 bp, Homo Sapiens
ttcgatcagagcatacccctgatggaaacagaaagatgtggataaaaggccacgttttaagacaacaagtccacaaagagcaaagaggacagaaagaagaagcaaaattcatatgccctttctctccttgctcaggcgatttaacagccaccctgggtgaagggcaccattagctcctgctatggatgaggaagctgagacttagaaagtttaagcaagctgccatcagatacagctgatgggtgtacatttatattctgggcacggtcttcattctggcaccattgtcaatccagtggagcatctggtgtgttcagaggtttatagccggttcagtcccgacagttgccccctctaagctggaaatcactggtcctactagtctggataggagaactgcagctttgtttgacctgggggagatggtctgacttcaagttcctggacctgcagggaactgcaggacatagcgggcagaagagcccaggcagtggtttccgtttaggaagagg

SEQ ID NO: 39068 - DNA, 412 bp, Homo Sapiens
tcttagtacttacagaggcacaattttcacagtgcaggaccttagtgatctcccaattcagttttctccctcccacaatgagaaaattgaggcctagaaaggacagtgacttgctaggaattacaaagagaataagaagcctggctgggaggagggctgtgcactgcaaagtcaggtaatccttgctgtgtggaacaaccaactgccttggcttggggccagatcatattctaaacacccaggggacgatgccatgaaaggtacccggtgataactgttggaagggccagttgtgacagggttgctcactcatacctttaaattgggaaactttaattttcctaccaggaggggaacgtccaagagggtataggctactagatccgggtacccgaagcctccgaattccgta

SEQ ID NO: 39069 - DNA, 452 bp, Homo Sapiens
gatctatagagctacctgctgttgtgattgtgcgtgacgggtgtgatctgctgtggacggcattagatttgccgtgacaggctgtggataggatgtggatttgccatggacaggcatgtggataggcatgtggatgttgccgtggacaggcatgtggataggcctgttgatgttgccgtggacagggatgtggattctgccatggacaggagtgtggatcatgctgtcgtggacagggatgtggatgatgctgccgtgagtaggggtgtagatactgccatggactggggtgtggatactgccatggacacgggtgttggataatgctgcacaggctacgggttgtggatgatgttcccatggaccggggtgtggatactgctgtggacaggggtgtggctgatgctgccgcggacagggggtggatgctgctgtagataggggtatggctc

SEQ ID NO: 39070 - DNA, 428 bp, Homo Sapiens
tatggcatgaccatcagaagcactaaaatgaggctatggatattccctagcaaatgtctggggaacagaggccaaagccgaaagctcaagaattaatggaattgactacacctcaacgaaggttaatagattagtgaggactgatgagtacaaaccagactcacacatccatcctcatcctcactccccacccccaggctacaatattacatatatgtcccctactcctgagggatggaaaagaggatgggtaggataagttcaaactgctttaatggctaacaaaattcacctttattcctttaaatatttagttgacatgtaaaaattgtacatatttattggctacagagtcgatatccagataccagtatcaagtgtgtaatgatcaaatcagagtaattagcacatcaatcacctcaaatagt

SEQ ID NO: 39071 - DNA, 449 bp, Homo Sapiens
aacgacagaagcaaataaacgctcaataaggcaggcacaggacaagagaggaggggaaaaatgaagggtttagaagcctaggatggatgcactgactcaaaactggtaaaatattaaccttgagaggtcacctagccaagagagactggaagactggatgctgaaggttcaaacagttaagagttcacaggaacttcctccgttgccacccacgaatgtcttctgtacccatcatttgtggcgtcacatctctcccagggaaaagtttccttcctcctgttgaaagtgatccctgcagcctccacctgtgttccagatcttcccactttgagctgcgtgtcccctacctttctggaccttcactcttccacacctctttattcagttatgaacttgctcaatcctaccttaaatcatacaaacacttcctggcagatagtaggctggct

SEQ ID NO: 39072 - DNA, 420 bp, Homo Sapiens
ccgtaagaagacgactgaagggcgattaggaactgttaagaaagaacacaaagcaaatgccttaatttcgttctttcagaacgtatatattttccaaagttgtcagttcctttatgtttctaaaaacttaccaggtaggcatattcttaatactttgataataaaattaaacactgaaatcaaagctgtagattgaacatgctcacattaagtgaaattaaggagagaggaatacatttcattattaatgtatcagtgaattctggagtttagccatgaatatcagctataatcaataacagtttgagtatttaggcagtttgtaattcatgaaatttaaatcagaagggtctttaaacatctttttgtctaatctcattttgcattcaatttaattctattttttctcagcctactata

SEQ ID NO: 39073 - DNA, 468 bp, Homo Sapiens
tgcagcaaaacggcagcttttttcagagagaatcaggtgtatgcataagaccgtatgaagggcgtgacctttaaagaaaaggggcccattcatacgtgagacatttacaaattcgtatatattgtaaacctttgccttgatttgaagatagccaaatggtgtctatggccacaaacacattctttgccaaatataaacaacttcaaaataaaaagcgatgctgattttactgttttctcctttagaccacatcagtctcatttaagaatacgttaaaagcagacgttggatttcactttttggcactgtaactggacgtgctatcataaagtcatatctaggcaatgaatggaatgtctttccttattttcagtcacagcacgcctggaaattggaaacaaaagcagaatgtccctgaggtcccccttctatttattcctcctgatggatcccccttctgtagtcttt

SEQ ID NO: 39074 - DNA, 464 bp, Homo Sapiens
atataagacgacagaagggactaagctaagatcttcttcctcgtgctggctgacctgccacttgtaagcagagccagctctttgctgtgggtgtgcttgagtggccctgtcctccgtggcctctgtcctagtgcctgttccttgcgggagtttggcacctactctgggttctcacagtatttctcaagaggaatgggtgaaaaggcccttaactcatctagtccctccactggctgaatgcttgaatctccactgctacattcttgccaagtagtcaccgcttactggatccatcttgggggttgccattatggcttagaccgctgcatcagcccctctgcgctctgtctgctgccttcctccccatctcccctgagagcctcctggggaactgtcctgacactcagccagccggaggagccacagcaggtcttcccaaggaggctccacgatgctgctcccct

SEQ ID NO: 39075 - DNA, 473 bp, Homo Sapiens
acgagtcttagaagacgacagaagggcacttagcataatactaagcacatggagagggctcagtcaaagttagctctcctgactgccttgggcatggagaggagagttctgcctagcatttctgagatatgcatacaaatcgatggagataatgtacattgacaattttaatgagcaaagaaataaaaggtacatgttaacgggaaaagtaaaaaaggatttcaagtctatttgcacatcttcaattttccagtgaccagggagggcaagaaggccaagcccctttgcttgtacttcactccccatgacacgggacaggtggcagctctgcaagtggaagtggcagaccagaccaaaaaattcatgtcaaaaccaggatttctgtagatcagggatttccggtttttctgcctgaacttaccaaatagtaaacgtttatctccttttctttctttctcccttcttcgtcttct

SEQ ID NO: 39076 - DNA, 456 bp, Homo Sapiens
cgtgtagacgacagaagggataagggagaagagagatataagaggaaaaagaaacaaggcctgtgaataaatgaacatacattaaaaatatttaatttcagagcctggagtcctttgaaatagaaggttgcagatgaggatcatagaaggcttgtgtcaaaaacattgcctacctaataatgtatcccagggtcagccctgaaactgtcctaaaacaatcactggaataatccaagcaacactgcattttcagagaagcactcccctaaatgtgatacagtgtagaggcttaggagcctaatcaaaagaacaaagatctataggttctgagggctgaatggaacaggtgcttggcaattctaatatgtacttgcaagagagaaaaggtaactggacaaatgaatcactactgattttattcagagcacactgcagtgtctcttaacaagatcatgt

SEQ ID NO: 39077 - DNA, 371 bp, Homo Sapiens
tgggttaggaggttcctgagtggaatccatgttgtctttatgaaagcattctgtgtgttaaagcagtggctgctctccatctagtctttgccttttccctctgttcttctcctagagatctacttaattcattctgtcactcccctcaggcttttactcaaacccgcccaactctgcctgtcctccttccttactactttattttcccctcagatcctaccactggtctaacttattgccatgtttatcgactcttggcatatatatttttcacattttagcatttctgaaatagatatatctaataatcagtgacatcttagattctgcaaaataaatatgtataatttatttcccttctgtcgtcttct

SEQ ID NO: 39078 - DNA, 454 bp, Homo Sapiens
tgttggcgtctctagaggttccccctgcttgtcctgctctgggctgcccatgtcctgtaatttgctgccggaggcctgagctgcccactctctgttgctgatcttcctgggactccaggccaagcacatcatattccctcttctgccttgggtgatcgagggtggagtctgacacatagaatctagagttccaatattgcatcaccatccagtcatctgagaagccaaaccacacatacttactgcacagtaaaaaggcacagagaggttgtatcaaatgtttacctctcataaaattcactaggatccccttacccctcactaaaggacaaataatttaacctggaacagttccccatcctttcttgctttgtcttttatgacagtgccatagcggtacccagagctctggtacaggctgccgtccctctcctccgtcaggggtaccgagctc

SEQ ID NO: 39079 - DNA, 408 bp, Homo Sapiens
tgtctgttggtcgtctctacaggaatcccctcttgttttccttttcatcttcagtcgcatagaaacatccaggccattaggagatagcgtctgccccaagggtacggatgtccttttgtcgaatgaagtgccaggcattgcccacatataacctgccttactccgcctacccccaggggtgagactcctcagggctggccttgctccccaggccctgggagggaccacagaggggctcagtagtgacgagccaggcttccccacccgatacactggggaactcctgagaatctggccttaggcagacccttcctcacaagcccttccttgtttctttcagccggaaatccctgtttgctccactgaacttggggcactcctctgggtcactggtggcccttgggccct

SEQ ID NO: 39080 - DNA, 389 bp, Homo Sapiens
tactgggaggggtagatgaggctgtgctagggcccaggctgcccatgccaagctgttagaaggcaggacatgtgtcctccatgcctcctctcctgcttatatagctacctttctcttactttcccatgccagctcctctgactttacttgggatcctccgagacagcccatttagggcatgtgaatccgtaaaggccacctgcgttcagatgtctaattccagctgtctggaaattagataaggactgaccagcgtttgaatccaagccccactgtcactagctgcgtggttggtctacagcaagtcacttctctctgggcctcaggggcaggagtcttgtattgcctgtgttacagtattatgtaattcaggcatcacaatgtacctg

SEQ ID NO: 39081 - DNA, 399 bp, Homo Sapiens
ctgcttgtctgcctctgggtgagtcttttgactgggaaagcctgagaagcagctgacatgggatcttggggaagggcagcatccatgactccctaatggggtcaaccacacgtctgcgtatcctcaccctccacagcagcatccctgcttgagctaaaaaagtgggcagactgtcaacttgggccttatttttatagctcctctatgataacaattaaacaacaaaattaacatttcaaaacagtcaagccaaggtaccaggaaagtcagtcctatcagaaaaaagtcaagatgcaaggtacaaagggctgagtgccccttccatttatcttgtcattttaattttgtaaggtcttagtctttgtactgtgtttggctctctatgctagaaacgatggc

SEQ ID NO: 39082 - DNA, 352 bp, Homo Sapiens
gaactttccaaagcaagctgcttctattaaatggggtacgaactatgcagaggcggcggcacacactattaaactgtccttcagcttaactgtgtggccttcatatgattttactctcgtaactttaacttactgattcaaactcttaagccatgtgcgacaaaaaaacaagttttaaatacacgtttaccatgccttgtatgtacacagcacactctatcaccttggaagctacaagctggtatcattaactgctgaaaggtaataaagggaacatcttagtggtcttatctctacttgggtatatttttggaaacaatacttgtgatgtttctattactgcctatggctc

SEQ ID NO: 39083 - DNA, 390 bp, Homo Sapiens
ttagatatacggacaccacttcaggtggcatttattcggtgaagtgtttggggtgtagggaaggggtggtggtgactggaagtgtagcttggggatcgcctttttaatatccctgtctagtcacaaaaataaggcatgttctaatcaactaagcacttgaccatgaacttctcgtaagcaaggtgagtggtagattttttttcctcaaggatgcaagcagctgatagaattgggaagaaagttattagttgcaaaaacatttaagctttgcagtacgattactagtgcaccaaaggaatcgtgactgttaagccctctagctgattaactggtgctgttattttattttacaatgttgtaattttttcacaacaagaaaattaatgtgta

SEQ ID NO: 39084 - DNA, 391 bp, Homo Sapiens
atctgcgtaggaccaatagactatgtctgtgatgtcaaatgtagttaccatatgtaattataaattgttaaaagccttttacttaactttctatgcagctggaattgtgtgtgtaaacctaacaggaagccgttatcattagaatgattcaaaacctgataatagtacacaaaagagaaagttaatttatgggaataatcattcgggcaatagaataaccagcatatattgctgtcttaaaggggagtagctgtcaacatgtgttactaatagttaaaggtttcctgaaaattttcagtatctccctgccaatcaataaagatagcatcacactcatcaccatagctttagttgtcagaaatggtgtatttattgactaaatgcagcactt

SEQ ID NO: 39085 - DNA, 373 bp, Homo Sapiens
gtctgacgcccctcatttgtcccagcgtcactgtggctgtatctagtgcctcagttctcaccaggacagcctgtacccaccagggacaaagaattgtggctgaagtctctctgctctggtcccagggaacccatggctttggcagtcccagctggccctcagcttgcctgagcagaaaaatgattttcaaatgaccacagattttctctacataaattcctgttcaatagggctcctctgaaatacttaggcattttctgagaaactgctttggcccacaggtaaaattgttctgaaacgcccaacatcacctttccttcatcagctgaaaatactctgacttctgcactgacacaggaaaacacccacttcc

SEQ ID NO: 39086 - DNA, 381 bp, Homo Sapiens
tgttatgtgacggttctgaagaaatgtctgatgtaattcttatctgcttcctcaataggtaaggtttctcttaactaccatctgtggcttctttaagtatctttttgttgtctttgattttctgcagattgaatatgacatgcctaagtgtagatttttggtatttatcttatgtcatgttctccaaactttctgcctctgtgatttggtgtctgtcataaatgttggaaagttttcagccattttttcttcgattactattttaatgatttttcagctttacaatggtgcaaaagcaatatgcattcagtagaaaccatacttctcttgctatgctgggcagcagcaagcctcagaaccagtcagcattaaccacgggga

SEQ ID NO: 39087 - DNA, 367 bp, Homo Sapiens
atcgatagtatcagatcctgcagtaagagggacgtgaggggaggaatgggcacacaattattcaaagttctaatatgatgattctttccagtcagaggctgagttatctacaaaggagaaatgcaagaggtgtaggtttcaattaattgtaactctcttccttgaccaaaggatgctcaggtggaaacagagagaaagagggaggaactagggaaaagaaggctgaggaagaggcagggagggttttgcaaagatgagcaaagccaggcagtgaatcaccgtgggacacagaactcctgaggctgacagccagacttctggacgcttacaatccagatcatccccaaccctgcccaggatcccaggt

SEQ ID NO: 39088 - DNA, 362 bp, Homo Sapiens
actctgtggacagatcttccacacttgccagcagtccacaccattccctattactgacatacacgctagtttcgctcaattaattctgcatagcttaggggttagctcttgatgggaatgaaatgatttagaggttcaacaaccagtctcataaaaaaataagccacacaaagaactaaaattaggaacaaaaatcaagcagtaaaaattgcacttttccccaatatttttggtattcattagagggctatcctaagtcctcttctcttctcatttcacacacattttacagacacatcccatctgctcccaaccaattatccatgggctggtgcattattctgtctctaacctggtggtcc

SEQ ID NO: 39089 - DNA, 458 bp, Homo Sapiens
tgtgtgagcgggagaggtgtggagaggcagaccaggatggggcaactgtggagtccaggtagctgatgatcccccgatcgtgaggttggaggagggttgggagtgattccaagtcagcaggtcgggtgatgagcagctgctccattaaatgtctacctgtggagcgaccccatgaggactgaggactgtgcttcctttaaagacaaaaacacgggaccccgggggtgggggcagagaacaggccaaagtgccacaaaagcacactcgccttgcaatccaactctttgaatgccatgtacatacttgcctcttgggtttcatgttaacattagtccacttcagagtcagcactaagcaaaccgcttctccagggcccatgcctggatgcttgaactaaattgcccccaaggagccatctgggtctgattcaagttcccaccccatcctgtggtttcagc

SEQ ID NO: 39090 - DNA, 354 bp, Homo Sapiens
tgcagcctactgcagtccagtatacttgggggtgagtcttttcagcgataaacacacctccagtagcagagcagcatgttgtacttccaggtggaagaagacctgcctgtgctgcgcaactgagggcaggatactcccagagagggactctgtagcctctctgcctgccattgaggcttgttgccttggcaactaaaacacagccatccatcctttccccaggcagggagctccagtcatccttgactttgccatgaccttttctcctcccctttaaaatctgtttagggttctgccatgcatctcccaggcagctttgaattttctctcccttggaaatctccaggccacctc

SEQ ID NO: 39091 - DNA, 373 bp, Homo Sapiens
ggcatataaacatttaataaatcagcacacactgtgatggtgatagatcctttgacacgcacgctctgtgtggacgacacgtgctcccagcatggtaggggaatgacctacggggctgacttcggaactgaagactccccatatatgcacactgaacacttgcgtgcagacgctcccgaataccgcaggtcttagccaggcaggggtgaatggagggaacagagcagctccttccagcctctgggcaagcagagtgcttcctttttccagccccaggcatcgccttccctagacacggttttctctctgtgtgttctctcattctttccagcaacagcacagacagagctcagactggctgtgtgtggggtgg

SEQ ID NO: 39092 - DNA, 364 bp, Homo Sapiens
aggtctgtgggcatattactcaatctaaattttttgctacatttcagagtaagttgcagacatacccagatccttaagcattcatatcattagctaagctttaatattttgtttgcagtttttttctctttcgaggtaaaatttatatacagtgtaatgcacaaatcttagatgtgctgtttatgtgttccagcaaatacacattactatacaaccaaaacccatattaaaatataaaatattaccaccactgcagaaagtttccacattcctcttctcagtaaatcctctgcttactaccccagagggtctattcttttgttttttattccccactataaattagttttgtctgcccacagaa

SEQ ID NO: 39093 - DNA, 362 bp, Homo Sapiens
ctggggcacgccttccaaagcgattgtgccgtgtgactccagtcacagggtggagttccagcagctgcgcgtcctcgctcatgctgatatgttgtattaatgtcccaggctgctgtaacaattgaccacaaacttggtggcttcacacaaatgtattgtcttgcagatctgtgggttagaagtccagcatgggctggaaccagtgtcagcagagccctcctttctggaggcttgaggtgaacccatgtccttgcatttcctagactcttgggcctgtccacattttttggcttgtggccttattctaccatcttcaaagccagcaaccttgcatatgcggctgtccctccatccttccgggg

SEQ ID NO: 39094 - DNA, 383 bp, Homo Sapiens
cgtatctggggcagcatctgagtcctttcagacattaacaatcgagggtttatgatgtcattgcaaaacattaaaaagggagcccacagttcttcaatgactattaaatgtttgaaacctctataaaataacagacatgttagaattactcccagaatttaaatacctcaagttctttaagctttcagaaatatacttgtctaatagatacattatggtgaaaagagtattttagaatgaccattttcatgcaaaccaaatcaaactccaactacatattctgctagatttttgatgagaaatttcctgtgaaatgaagttagtttctcattcaaaaaaccagtgcatttttcagtgaaagtgctgttcatctctttgaccaa

SEQ ID NO: 39095 - DNA, 381 bp, Homo Sapiens
ccggaatatctgtgggcacagacgttgaggactcctatagaagactgaaagagatgcctggagagattcccaggacgtgtggagtctggcgtggggtcttttgatcaatgtatttaaaatgtcagccagagttgagaaagctgttcaaaagccattagcttatatagtacatgtcctcaaaggactttttctttttcttatttttgggcccacacttcttttgctggaagtgtcatctgaacccatcctgttagctggtccctgagaagtgttttctaagctgctttctctctgcagatttgggctcacaatccagctccttgttaaatggtctgacagcctccctatcacagtgactccacaggggccaccttccctccc

SEQ ID NO: 39096 - DNA, 402 bp, Homo Sapiens
ctcagtgttccccctctgtgatccccttgatgcagtgcttttctgggacggaccccacaatagaatggcttacagtttcaggctgctttgctggtcggacctgaggtatggtacagaacaggtagtagcatgctggtattactgaacagtgctgggcctaggggctgctctggcccagatgactcagaaggcacccttaggaatcaggggattggcacacaatactgatcttctcacaggcctacaactcacagaagagctgggttagtttcattctagtcctatgctttggacctccactcatttggatatcacccctgttggaagaggaggatctggtgctagaaaatataaacccggggacccaggcaaggctgtgttgtgtggggaggaagaccaggt

SEQ ID NO: 39097 - DNA, 424 bp, Homo Sapiens
cagcatgcccagagaatctgtgccctccctaatctagtgcagtcccctgccttacacagtataggtggcagtcctgcgaggggaaaggactataaaagggcaattgatgtcacaggtctctctgtgagagcagaacagagtctggcatgacagttcgaagcctacggaagtatgtatgcaaaacatcaggacagagcagctcccagggggtcgatcttctcaaggttcagtctgttttctccagatcttgcttggtctgctgcctggcctcaggatgtttatcatagtgttctgtagtctgattccctcaaaccgagccggacgacatatttgggtatctatagtaccttctaagcttagtaggactgtctgtctctatcttgccctaaccagcttgtctttttcctcctttgtgcggctggat

SEQ ID NO: 39098 - DNA, 414 bp, Homo Sapiens
gatccccaaatcccgggcaccgcctttgagacccatcccaatgcccacatctcctcttggggtctcccccaggcagcaggtgaggtccccatgacttctctgtcttcaagtcatggctccacagtctagctgtttggtggatctgccccagccatgtgggccactgaccattgggtggggtcctggtcctttccagaagggcaagccatacccgtcacttgcctctcataggaaacaccatctctaatgaatgcaggcggggatcacccaccacctatgcagagcttcctgctctcattggcttttctcaccctcactgtcctcttgctgacatccggttgggaccatttgcgcaactgcagactggcagggccaggcgaacacagcatggcgcctgccaagaaggtggtgtga

SEQ ID NO: 39099 - DNA, 403 bp, Homo Sapiens
gggacacttcaaaacaacgctggtgctcattctgtgtaacttgaagacaaggactgtgccacgctgcactggctttggtatgtggggaagtaggatcccccaggcaggagggatacggctggtacaggctggagggagaggagagctggaagccaggcttcaaaggctgcaggcggaagcactgcttccccaggtgtggcccgggcagggcaggttgcaggtgtgccggagtcacagggcagctgaggaaggggaagggagacttccagcactcagctgacttaagggagttgtcaggtggcctttgctcacggttggcgcaactgagccaagctggcaaagctgctgcttcttcctgtcaaacttcccttcagagatctcttcctgttgctcagaaggagcc

SEQ ID NO: 39100 - DNA, 398 bp, Homo Sapiens
tatccccaacccggcacgcctttgcgtcctgaatggaatcatccacccgtccctcattctgcgtctggaaggaagctcatccacccatccctcatctgcgtctggaaggaagtcatccgcccatccctcatctgcgtcctgcaggatgtcacccgcccgttcctcatctgcgtccttcaggaagcatccacccgtccctcatctgcgtctggaaggaagtcatccacccgtccctcatctgcgtccggaaggaagtcatccacccgttcctcatctgcgtcctgcaggaagtcatccgcccggtcctcatctgcgtcctgaaggaagtcatccgcccgtccctcatctgcgtcctgcaggaagtcattcagccgtgcctcatctgcttccttcgggac

SEQ ID NO: 39101 - DNA, 387 bp, Homo Sapiens
ggacgtgattctcccaggtggagtgtagtgctggggcgaatattggctgagctggaaaaagaacacagaacatgacgtgacacccaggcacaggacacccagacaccagtgagggagcttcgcaccagcgcggtccctgcgtcaggcccagctactgggcaggagggcgctccgcctccccaacccaagtgcaaccgagggaccccactggggcgccgaccagaggattgccccctgtaggctctcacgtatacaaccctgaaatgggacagaccctgagtggaagaccccattttcctaccacatcagcctttgacccccagcactcagaagcgtctaaactgttgaccccactttaggaaccataagcctggtttgaaaagctgg

SEQ ID NO: 39102 - DNA, 440 bp, Homo Sapiens
ttgtgaactttggacatactgcttccacccctgatgactgctccaagtgcatcattcctgaggtacagtgtctggaaactaagatgaggaggactttggaaagaaattttgaagacagcagcagcacatgtcataaatgcgacaaactcatggcatggccctgtatcctatccatccatccacctatcatcgatcatctatctattttagaattaggatatttgagagttgccaaaagcatgctgagaaatgtcagtctgcaaggaagagccctttctccacattttcattgtttcactaaatgataaagagctaccacttggcaattctccacttttttgtaaacctgagctcaccagtagcctgtgcttcccctctactttgcagttgtctattgaaaagtttgtatcttttcatgggcttatgagttaattagaaaa

SEQ ID NO: 39103 - DNA, 555 bp, Homo Sapiens
agctatgggacctgggggctgtacaaagagataaagaattgaagaacctaagatctctaaaggaggtttaagtgtgtcttgggattggacctttagggaggcttttaaagagaactgctttttctagactgacattcttagatagcacagctcctgtgttgatcatctttgcacagccaggctgtagcctagtgtctaagatgtaggaggcagcctataaatggttgttgatgaaataagtgaaagaaagaaaacttttccctctggcaaggaaagactcagataaaattccccatgacttctaaaggtgctcctgggcattacttttcattgtttttcctggggatgctgtttcctcagaatgtcgttgtattatagtacattccttaagggatatggttttcattttcctgaatgttgctcctttctctcattttaccagcaacttgttactccctttcactttcagactcttttctctctttcccttctccttcagcaacttctctccccattgaagttagaagtaaaatgtaacaattaatcaaccatttt

SEQ ID NO: 39104 - DNA, 507 bp, Homo Sapiens
acctgaagtgctcctgctccatctttttctaaacaagttttctgttactgcctaaatctctcagtccagcttttcttagccacccccacttctcttgaatagggaggcagccgggaacaaaatggatcaggttttgtttggttttgacacgtttttgtatgcaccctgtaaatcaatactattttgattcctatctcctctttcgaggggcttaaaatctactaagggcctcaaggaccaggttccaacagggccttctccccctgcactaagacaccaccctgatcagtgtcagttcaatgtgagttctcaggtcattccttctggtttgacaaattgtctctgttagataagcatctgcctattgttttacccactggcttctagtaagatgattcgctggctcacagttgctgcgtggagggggagtttgtgaacagtggagcttgccatgggctttgatctgttttccaggggccagtgggacgacttcaggatttggtactt

SEQ ID NO: 39105 - DNA, 515 bp, Homo Sapiens
ccgagctagggagcctgcgaaggggaggtgagaatacagagaggatctcaggagcctgtctcctaccagggcttccaaggtggcattcagctccttggttattttaccatggttctcatctttgggcctctcccttgtaggtgtagaaacttgcattatcagcaagtcaagagtggccccatttctcagaagtaagaaatgcatcaccaaaccaaggggactggagtataatgagactggtgggagtatagtaagacatttgttgtcacaggtatagaacacttgctataaacagaactgcatgggagaaaaaataaaaccagaaggtcacaaggcaagtagggaatggaaacaaaataagctttatctaaagagaaggcaaagccattgtaattggagcccttggagctctcagcaacaacccctctctatctttacatcagggatgatccagttattgggcttggaacacttgaagaccactagctgaggtaccctctcttccctggatggtg

SEQ ID NO: 39106 - DNA, 377 bp, Homo Sapiens
aaggtgttcaccagcacactgctctgccaggtaattgtcttttagtagcggttatttgcttctggacaatactatattcctttctattacccctcaaattatagagtatgcttgtgtacagtatccaatttgatcctgacaatcttttgaggtaaatagatgttttacagatgtagaaactgaggcagagcagtgaagtatctttcctgtggtccaaggctagtatgtgattaagtctcaactttgacctaagtcttctggctcatatttcattttatttctgctgctaaaagccccatcttcaaacaacattattaatgttccttgccatgagcctgcaataccctgcataatctgacttctccctacatgtacag

SEQ ID NO: 39107 - DNA, 403 bp, Homo Sapiens
ttttttaaaaaaactaaattaatgattcccaaacttttctaccaaaacttatctttggcaatgctctaaatttgatagattctcttttagcatctgatagttctaaaagtatcttttcccttttatacataatatttatttcccttatgccccaaatcattgtttatttaacctcaaacatataaggtcctcatctactaatttaaagttcctctactacaaatcaacaatcatctatataaatattttattttactatcactttaccaccctgcattactgccccagttgcataatatttcaaactttaaaaacacctttttaactagggtactttaactttttaactagaacacttagtattccataaccatagtacccacatatatgtatgtgaatttcc

SEQ ID NO: 39108 - DNA, 516 bp, Homo Sapiens
agatatgggacctgcgctcagaataaagattacggaacggagtctcctgtgagactggagtctgcaactctgtcataatgcatctgtcctggtgggcaggaatagccaatcagtttaaaacaaacaaaggggcttgacgggttatagcctggtctgttgatacatggttgcagagtcgcctgcatctctggctgtagggagtgacatctgtgggctctttatgagtgtcatgcggagacattactgttgtgtgtgaatatgacctggcactgcgtgggagcgcagggggtgcacagttctggactacgacttggagtatgggaactttgcacttgtctctatctatataagctgggaggacaagtgggatggttgggtgtgtgtgtgtctgcattaggaacagaggtgtgaatcacagtgtgggtaaggagaaagtttggcagttgacacatctgtgggtcagaggaaggcctgtgtgctcatgtgtgtgtacgaagttcggttccagttgtccct

SEQ ID NO: 39109 - DNA, 371 bp, Homo Sapiens
aaacgccggttagagtgcaggttggctggggttgcatctatggtcatattttaacacgctgaccctgcacttgccactcttgtcctcccaccacagacagccccgagctcccgtgtgctgcacttgcgtggtgtctggatggtcggggtggggccgtgttgaggggcctcggatgcgtcgtgcagccttcactctgggaagtggcgcgcttcctctctcatcatctcagaggccgccatgggcattgatctaaaagcccgattttgatgtgttctggcagccggcagattaccattcagaatagttttcccgtgtgattaccaagaaccttgcctgtgactgactctgtcccgcctgtgacctgctgtcct

SEQ ID NO: 39110 - DNA, 454 bp, Homo Sapiens
agtaagaggggaggataccgtcgttggagtggaaacgagggcgagaaggtgaacgttagatcgtctgtaacaaaagataagctcggtgtctaggcgtattttaaaaagtctaccagatgactgagattgcaaggccctctagtgaaatgaaattcttcagagtgagagtaatgagtctatgaaatagggtggagagacaggacaaatgaactgtcttacttaaggcagttctgcaggacgaagagatgttcatggtaaaagcaggttaaaaaacagtggaaatgttaaccaattcttaaagatgtaggctagcatcatgtttagaatcccaggaagcctctaaaacaagggaagtctggaagtattacacaactcattaccatagtcctctgacaagcattcacaaggaagtttcgtggtaggggaagaagcctgagaggaaaacccctccata

SEQ ID NO: 39111 - DNA, 462 bp, Homo Sapiens
ggccgccctctagcacacgccatggagacattgctaagcaatcctagcattctttccaaataagcttgcagcactccggttctatagcagatgtggctaagtgattaaggtatagtttttctccctatatgataccctcttctctatgcatggcaggcatgactagtcaatcaggagcctctttcctagatgctgcctcgtgtgctccagataaattgatgaggcgtcttctgttccacttaccctttctcctatccttggcctgtgacaggcaacactaattgatcctagcaccgtttcctgccacgcccagaattctcaccacagtgcttcaggtatcttgtaccagtcgatggacatggctcccgagatgaatcatatttgctgtccatccctgctgtgggtaacacctccttcctttgtgcagaaccctcagctggggcccagtgtggggcgtgagat

SEQ ID NO: 39112 - DNA, 504 bp, Homo Sapiens
gtataacaggcagtgtgtacactcaggaaagagatatagagcggcatgtctattttatagcgtggatcctcccatctctgacacattagaatatcactcaatgtgtctattctcaccatcgtcccgagcacagtgctccagtaccagataactcgagggcaaacaaaaaacctaaaggttatgtacaatgagagaatcagactgtgaggctccagctctcttctgtatccctgctcactttacctcagtgcacaccatatcccttcttcctccattgtgaaatgtgcatacacgtgtttgtctgtgaatatataaatatctctatttacacatatatacatatattaaaatgtgcaatacaaagacataagcaaggagtttttcctaataactatttaatcagagactgattagagaaaaaacaagttcttcccctcaaattttccttctaacttgagaaccaattcctggaccaattcctgctcaaagaaaacatttaagaag

SEQ ID NO: 39113 - DNA, 435 bp, Homo Sapiens
tggtaacacacaaatatggggcagcatgcttataggactacaaaatagatcaaggaacttacagctatagaagagagaaatacctatgggctgctgacaagagcagtagatgtgcccacgagtacggatgtgtgttgtccttgggttagccactgtaggtttataacctggtaggaacttttcataggaagggccaaaaattcaagatgctcattagcaagtcgtcttctagggtgttgcctgaacctaggctgcagtagaagtggggctatggaggtaggcgatattgaaatcccaggttaatgctaatctccatctcagcatccaggcacactgcagaccagcttccttttgggccctgccggtccttagttcctctgtgctggctcttacatttctgatcacgctactggtgccaagctaaatccgccgcct

SEQ ID NO: 39114 - DNA, 479 bp, Homo Sapiens
gcagacctaggcccggccaggagagcacgggctgccaagtgctgcgcagatcccagcagtactccacagggctgtcagctcagcggcaactcctgggaggtcctatgcttaaagggaggtttagagtggtgggcctcctggctgccgagaagaaagctacagtaaacgtgtgtgtaaggctgcgcaggtctctatctgtggacagaggcattcaggcctcctgggggtataccctgagtgcaactgcccaggtcacagagcagttatgtatttcaggttctcaggcaccggctttacccaaaagcgaatgtgcccggttgcaccttccagtcacagggtggacgttcagcaagcagcgcgtactacgtcaagctgatattgttggtataatgtcccagggctgctgtaacaattgaccaccaaattggtggcttcaccacaaattttttgcttgccgatctgtgggttagaagtccagc

SEQ ID NO: 39115 - DNA, 418 bp, Homo Sapiens
cgatcaagtgaaactctttatcattaagttcaaggccctcttcagtcaggctcccacctcatgtccaactccagccccacacctacatctagtgtaccagaactccagtcccactaaaataagggacacactcacatacaaccccacattaccatgcctttttaaaacctttgcgcatgttatcccctcttctgaaaatgctcttctctcctcatcctgctccttttctgtctggtaaagttttaagatccagttttaatgttacttcttcaaagctctcccaaatgtaaccagacataattcaccactcctatatctgtgtccttttagcacatgactgtctttcttgcaaaaacttaagctcctcaagggaaagcaaatatgttatactcatctacacaaccgtagtcactaacac

SEQ ID NO: 39116 - DNA, 417 bp, Homo Sapiens
ccctccttcagatgaggcattgtgaataggattggatcacaggacacaggcataagcaggatcatcctatgtagcatttaacccagcccatcaaagtagtttgaacttaatggtacagttagagatataaaacagttaaatatgttaaattttttaagcgtgaattttgtatttcatgaaactcgctgatataagcccaaaaataaaattatgatatcttagaacttacatagtagttgttgagcaagcaacaggcgcttaattttttatcaagcatctaataaatactaattctgtgccaacctgtgacaggtatgaggaaaacagctgggaagaagtcagatgtcatcaccacccttgaagaacaattattctagtgaaggagacagtataatatgaagaaatgagggaagcaca

SEQ ID NO: 39117 - DNA, 362 bp, Homo Sapiens
cgggcctgcttcagaagaggcaacagtctaattctctcaccagctcactgcttggtgccccacattctgccttccttccacccagtttggtttctctctcatccatgccaacccctcactgtgtgcctagagcccacccccctttgcctgctcacatctctctttggcatttgtctttccctcgctactggataatttccaccaatgtacaaatatgccattttttttctgtagccttccaaaaactccccctccatttgagcccctctttcttcttaagcgactgccccacctttgcttgtatttacaacaaaattctatgaaagtattattgacactcatttccagtttctgtcttccca

SEQ ID NO: 39118 - DNA, 410 bp, Homo Sapiens
aagatgaagagaaagtttttgtgagttcctatgcatagtggagacctgttctagtgacggtccctggggctgagcctgtgggtcagtggaactgatgctgtgaggagggtcttgttatagcagatggcccaaaaaaggctgatggatcatgagcagctggaagaatggagagtttgggggacgtagttcctacctggcttgtccaacaatgtgtaagcccggaattcttacataagtccatggagaagggaaaggaatgctggtaatgacgagattgaattctccacctgccaggcatccagggactcagagcggatttaactgaagttacagaaataggaatgtgacatttcttacttccgggtgtgctggagcaaatgtattccctctcaggtttgtggggaaggagc

SEQ ID NO: 39119 - DNA, 453 bp, Homo Sapiens
gccctgtgcacacaagagcaaacttacatgctttccaactcctccagtggggttttgacaatcatcctcagagcttttagtcgcatggtgcctccatgtgcctcatcttttgcttgactccgttgaaaagaaaaaacaacagtgcctgcccttacatttctctaaaaggccagtgcaggagaggaatctacatgtttcatcgaaaggtctcactcctgcaaagaagagtttgagccttcattcaactttgtagaggttatgaaaaggctaccgagacattggcatgggtgccggattccagattccaacaagggaatgagtataggcttcaggtggaaggttattagaagaagtaaatttcaggccttgcctcctgccaagctcagagataggggcctggcaacttcatgatgcaatttgtgcaagagttgcttgctggactgaattctggtc

SEQ ID NO: 39120 - DNA, 461 bp, Homo Sapiens
actggcatagaagaggcagacaaccagaagcgtagtttcttcatctacctccagtcatgactcatgtgtcactctgaggcaggatgactgcaacagaaaagcagatcttgctgtgactatttctttctcctttctttggatagctaaagaattttggtagccaaaattcatgggttctgaaattcctagaattatacaagcagtgagagtagagcatctgaaaacagacgacattgctttgaaaaaggtagttttgtgctaggctgtcataacatgcaacctggtgtttgctggaacatcctcctcaaggaaagggattaagagaagtctctttgttggttcttctcagtttgcataaatcaacacctacacatctgacccataatgaggctctttttaactaaacagcatgttaagtgtgactttacagaaatgaaatcaacttcttaataaattcacca

SEQ ID NO: 39121 - DNA, 473 bp, Homo Sapiens
cctcatagaagaggcaggctatctgagttcccgttttccactcctcactctacgtggtctccatgcagtctctgactatggaccagccaccatttcctgagcatctcctcctgtggctctgggcaccttctcctgtggctgcactctttctgcttctgtgacttccagtgcccttcctccactcctactccttcagcattgaagttgctttatggcctggtgtgagaactgagttaccaggggccatctctccatgtccagtagctacctggatcatcaagaaggtgattactccccaaatcttcagttcccctttctcctgaggttacggtctagctatatcatattgtaccatgcccaaaataaagctgaaatcctttccatctattaatggaatcattctccagtttcccaaaataaaaaccttggtgtcttcttcatataaggtcatcaggaaaccttgatgcatttat

SEQ ID NO: 39122 - DNA, 444 bp, Homo Sapiens
cagcacttatctcatgccgatctacaaactctttgtgctaccttaagcagccttggaaacataaaagacaacaccttattttcagagattgcattaactttcaaagaaagctttatggctagactaactcattcatctggcatcatcaaggaattatgtatgctaacaatatgcaaactttataaataacttggaatgccaaaacttttgcctgcttttgatagacttcctatttttgatggtaataccaaaatgtacttcacactttcttgcttcctcggagaacactgaacagaatgtacctttcctcagacacgatacactgtcttcaccaatgagctttgcgctttcacatagtaatgtattcaggaacaagacaggtgtgcaggacccctcagccccctcactaattggccctgattgcatcagagaggccaattacac

SEQ ID NO: 39123 - DNA, 478 bp, Homo Sapiens
ttctgtagatttcgggcactgtggatcaggcttttaatatcatgcggaaaaacacataacaaacatgcaacatcttgtctagatttatgtgcacagttcagtgctttagcacgttcaccttgtgtcaccatcaccactgcccccccgcagaacttccgcttcttcccaaactgaaactccgtcccgcttaaattctctcctccttcccccttcccgtagaccctggcagccccattcaactttctgtctctaggtatttgtcagctcaaatgagtgactcacacaggatttgtccttttgtgaccagctcatttcactcagcacaaagtccacaagggtccctgtgttgtagcctgtatgactccgccgttcctttgcatggatataccacgtttggctcacacattcacctgttgaaggacacttgggttgtttcctgcggcagcttttcctgaccgaaagcttctcaaaaggacta

SEQ ID NO: 39124 - DNA, 479 bp, Homo Sapiens
acggcccccatctttaaaaaataataataatagtaatggcagagctggaggagtgggcaagccccccctggtttcctcctatctccactcccttggaagatctggaagtatctgatgccttccacagcacagtttgaaaaacgaaaatctggtccaatgccaccatttcaccaacaagggaatggcccagaaacatgcagttgtattttcagtggtatggccgcactgcagcctgaatttatattcccctacagcatcatgagaaagaataaccaagactgtagcatgtgggactatatggcagaacactacagagaagctttaaaagacctagagctttagttcatcctgtgtgaaccatttttcccctatagattgtagatgataatcttttgcatggcccatttccattttcatgtttgtttttcaactgtttctgatgtcacttaaagtatttcctgtgagattccagtactttc

SEQ ID NO: 39125 - DNA, 394 bp, Homo Sapiens
tgggccctgctagaagaggcacagtctctctgaaggctctgtgggagaattccttatatacttcttctagcttatggtggcgccaggcatcccttgacttgtggccacatcacttcagtctctgactccgtggtcacattgcctccttctcctctgtttcctctttttccaaataaagtgaacattcacagctcctgggaatttagaacctgggcatatctttggaaggccattattaaccgattacattctcttcactttttctcttgtggtgaaggaacttactcaaattaacccttttgctatgggtttcttatttgaagttccagtttcttcagcagagatttgttggacttcccggtttgtatataccggaggcttttctttccctgct

SEQ ID NO: 39126 - DNA, 450 bp, Homo Sapiens
tcatagaagaggcatgaagaaaactggcgctgctggaagaagccagttggtgagtgagcgattcctgacccgccgtgggaggaagtccaggagcagccccggagactccccatcagctgtttccccgaacctcagccccagcgcttctcctacatcctctcggagcaactcacttacagtccccaccccgccaggtttggatgtgtgcggtggcccgccatcccctctgcctggagcaccaccacagaagggggatgaggccgacgtctcttcacctcaccctggcgagcctaacgtccccaaagggctagctgacaggaagcagaatgaccagaggaaagtgtctcagggcaggctggctcctcgtcctcctccagttgagaagtccaaagagattgcaatagaacaaaaggaaaacttcgatcccctccagtaccccgagaccacacc

SEQ ID NO: 39127 - DNA, 363 bp, Homo Sapiens
gggagagcctgttcgttgttttcactgacacagtgcccgtctccaactcatgcgggcacacagctgagaggtagttggctccagccagcttgcacctccccagtgctggtcttatcctaggaccactgcaggaagacgatctctcaggtttggggtctttgaaggctcagtggagctcctagccagctgactaggctggggtccatcctgataacatgagagagagaagatgtctgtatctctggtgtgtctttacttttcaggccaccaaggaagggaaagccgtggtgagtcctgaactacaggctttctcaaaaggagaacggatgtctactactcactggctgacgctgggttcttaac

SEQ ID NO: 39128 - DNA, 423 bp, Homo Sapiens
aatgtgattaattctagtctatggaatatgagggggattgatgtgtttaacttccaattagagtctttgaaaggaatgagcctgacttctcttgaccctttcttgataactgggatatgaacccaggaagtatgatgattttcaactatgtgagtgagatcaacaactaggggatgatgggtacaagactgaagaaagttgggggtcccaatatcatcaggttgcttccagccatactacttctgagctgcctacttagactttctttgagagaaaaattctctatcttattcagctactgtatctttggatgtctttgttacaacaaactaatctttaccctagctaatacatattgtgcttaattaaccctattatctccaagataaagtccaaatttcacatcttggggtgagagaacgt

SEQ ID NO: 39129 - DNA, 428 bp, Homo Sapiens
actttaaaatataatgcacaatgagagatgattgttgatgctcattattaaatcatttattcatcccacacaatgatccagaattattcatcaagcttgctggaaggaagctgggttttacctccacggtggtttggggagagatgtgctctttaaaagggtattttataacaacacaattatcataattaaaagttaccctgatattctgatgagcttttgacatatttttgagtactggcatttcagcacaaggagataaatgagactgagacagtagtagggaataatattgccatggggggaagaaaacaaaggcaatattaaataccagctgccatcgtcacccccaattttatcccagcctttaagttaatgaattttacaaaatatcacttgaacttctggctctccaaaatgagttccaa

SEQ ID NO: 39130 - DNA, 434 bp, Homo Sapiens
cgctagaaacaatatagtaagaatatttaagctgggatggagtgggcagggtcctggcgcctgcctggcatttagccctggctccagcccagccaacccagcaaacagggccttgacttcctcttcctgggtgggaatgaaccccagatcaattcagtcagcctttcttgggactagtaaccatagtaacataaacaataacaaaaacaacaatagaagctaccatttattcttaaatatgccggcagttatactagtcactttacatgcatttcctcacctaatctttacaattgccttgcaaaatgcaggctgttattatttccattttgaaaatgaggagactgaggctcagagaggttaaataatctgctcttggccacacaacagctaagcagtggagtccggatctgaacccagccctctggctgaga

SEQ ID NO: 39131 - DNA, 434 bp, Homo Sapiens
agtggaggaaggagagaccagaccaggctgcagcgacagagtagagcaataacacagcatgccccagcacacagtgacatatctcctacaaggtccaacatgttctgcaacacctgagcatagctcaacactctacagaatgcctttacagggacctaggacactctgtctactcccagcactctctgctatcttctgacatggatctgggacctggaatattgccccgacagttgttaacattccctgacatggccaaaacacatatgacaaaccctaaatgacacaacatgctctgccatggacctgagatggtctgatatgacttctgtgtatcccagtgaagggtcctagataacatttaaatatgatgtcactaatgtcctaaacatggcccgggtataaccaagcctattcttcggcataattcaaat

SEQ ID NO: 39132 - DNA, 353 bp, Homo Sapiens
taaagaaaattcaagttttacagccttagcttacacactaatcttcagaacaccatagtcatttctttaatctgatggatgccctcgcatgatgcctgtcttctctgatcagaaatgacattcttaacatcaatagattcttagacttttctgacaggaaatatttttgaggatatgtaatcagttatggggtatgcttgtcaatacatttttcctgcaaaaataaatcagaaatcctatcaaaatagcattatgaaagaatccatttcccttaatactcctcatgaaatggtcatgcctgaagtttctgagaatttttatttagatgaaggttgtgtatttaatttatatac

SEQ ID NO: 39133 - DNA, 382 bp, Homo Sapiens
tgatgccaaatccagtggcccttcctcaggcttctgttctccgtgcgctctgttaaatttggctccttcagaccctctcttctttggatccagtgctagtccgctgtcttctcttacatctgactgcccacttgcctccttcattgacttttcagtatccctccttccctatggctgggttttattcaggctccctgcccttcccgacaggccaccaatagttcatcaatcacctagacagatacacgggtcccacagtacttccggctttagttcttcaattaccaggactgagaccacatcccagaagactcccagctagacttcttcaatcaccaccagagagaccgaatcccaggttattcagtagttcatcgccaaa

SEQ ID NO: 39134 - DNA, 451 bp, Homo Sapiens
aggctcatgtcttaatgttggcattatcagtgtggttgccagcacatgcacgtgcatacacatacacacacttaacactgtgaagcctttttggctgcttcaggaagcaataattattccctgctcttttatggaagccctttactcagatggcttgcataatagtatcacttgtcacactgtattttagctgattaaacaacctttttcctggctggaatgtgagtttattaggaaaagggattgtggatcatttttatttactcagaacctttacatgttcaacagacatttgtcaaacgagtaacaagagtttgtaagcaagagtttttagcttagtctagctattgattctgtgactgtgtactataataaacaaggcctctctggtgtttaccatatagctttaactcaagcttcacttcttgtggtaacctgaatgtattttgga

SEQ ID NO: 39135 - DNA, 452 bp, Homo Sapiens
ggcttgctcagaagaggcagcaggtcgaaggaagagctaaattcttatgaaaccctccactatacctcatggaaagttcccagagacttaaaaagcagcacgtgcaaaaattaggagtggtggtttcctatggctcaatggtaaggcagaagccaatgcttgaagatggaaatgtgactaaaagggctttgaagacaaggtataaatagccagtgtgctcaatcccacctcttcccttctcacctaccacttggcagataaagccagaactctggggcttctggtggtgtatggtcacctcctcctgtggttaaccgagacaagggtgtggctaagaagtccaaattattcatcgcattaaaagatggctgcctgtttaacccctgcatgtgatagcttcacatagaggaaaacatttctgtaacctccagatgcaatccttactctgctca

SEQ ID NO: 39136 - DNA, 428 bp, Homo Sapiens
agaagaggcatcatctgtgaggcagtaataccctctgcgagactgagcctctggggtccctgccttttcctgctttccttctttgtggggtgcccctcctcttatcccatgcactttgtaaagcgaagctctcacaatgtatgaaaacctaaggacacaggtgtccacggtccagctgcactggatggtgttgcttcatcgggcagcttgtctctgtttcaatgcccttttgactgtctcgcctctgctcaaataccttcctgtgggttccttaactcaaggaaggggccatgcttcctgcttcatctctgttccaggcacacagctcactgcttagctcattttatttctggttttcatactgatccatatatcctaggtttgtgctagctctccattccctcattctccacaagtcccaaattcat

SEQ ID NO: 39137 - DNA, 424 bp, Homo Sapiens
ggaccctgttcagaagaggcataaacccaggacacatacctggccccagatatgtacaaagactaaaaggaatgttgagagaacaaggtaagaaacaactaagagtcaaaagcaggctaactcattctcgtacagaaagcaagcccatgagctctgtctgcttcagtcagccaagtaaagtgacaatgtaatatacggaactgcacaacatgagaagtaggaaagaaattgggcatctgtggccactctttcattcaacctttcttaaccttcaagcactcacctgtgtggccatggagtggtgagtgtggccgtggtagtgtaggtgatgtgctagaggtcacaatcaagctcttgcggttacttgtccgacaactccacggcagtgggcggctggaacaaggagtgccaggactgctgtggg

SEQ ID NO: 39138 - DNA, 438 bp, Homo Sapiens
tgacctgcttagaagaggcagaaactcacatttcctgtgtactcaactatttggtttgaagaaaggcagcgtacacagtgtgcaggaggctagttttgccccaccccgctataccattccagaagcccactgggaactctcacagggccctgaacgcccctgctctgccttagctctgtcttagaagtccctacagctgcctgcaccactccccacgcctacctgcttaggctcctggtgcctgtccccttcctaccagtaggaggctctgctttttgccatggccctgagagctctgtgggagggcagaagctggggctttgagtccctgaggacccagctgacttacctgctggagctggctgcctggactctcagctgctttgtgcagagagaccctcctgccttgggcagcccagctttccctgccagccttcc

SEQ ID NO: 39139 - DNA, 385 bp, Homo Sapiens
ctggcctcatagaagaggcaatgactgggttctcctctccagcatgggcgtcaagcaagatgagcatccacgagccgaccccaacccctccacaatgttcatgcgtggatgtccacactcctggaaactcttccaggaaggggcggtccaccaatgatctagagatggagtggggttgtttttggatactcacaggtctccactacagcaagcaaagagcccccaacattttcctgcccctccccccagacgcaaaaatgcttccaagaacaactgagatactaaatcactagaccctacatacccagatagaccaagggagtgttgggttcccacactgctacatccaaagaatgcagaaaggttcccgacaaccagttgtacc

SEQ ID NO: 39140 - DNA, 476 bp, Homo Sapiens
tactatgcatctgtggtctgcttgtctctgccatttggttgggtagtcaaagggggtccccagaagactggagaacaggatacaaggagcaggtatattgatgctcctatgggcacagttctaataatggctgcttgttccgagagaattccacaatttccatctgctttccacagtcccttcagtgacacatgctcacatactttcccatcctgggccccgaaaagtgtgagttggcttgagctgggtattctgtaatttgcaatcaatagtaactgtgtcatgctaaatgatctcatacatcttgtaggggttcaaatcctgtctggggtggagttaagcttcccctgaaagcaccattggctttaagagaagggggagggtacccagtgagggacttgttggggctgagggcaccaaaactcacagtgatctagtaaacatctccatttgggtattggggatccttcaaaaac

SEQ ID NO: 39141 - DNA, 399 bp, Homo Sapiens
tatgtgtgcttgtgaaggccccacatggtgtttcatgacggtgccctgtggtggtggcagtgatggccagctgccaggtggcttgcacgtggcaggctaagagtgaccagcctgaggggcccaggctctcacctgggagactgagaagccgtgctggcactcaggagggacttccagctcctagtcgtgtgggttgcaggccgtcctgtcccagggctgggggacttccttcaggcccattgctgcctgtggaagctggcctggtgtcttgtgggtgtgctgcctggatcgtccctaggtagtggcgagggtcacacgctgtctgggccaggactcggtgacttccctaggtcggctggttctgctggcctttcctggggctggatccccaggcctgtg

SEQ ID NO: 39142 - DNA, 518 bp, Homo Sapiens
tggttcctaggaatgcgtgtagaccaatccaagcatatcgacatggttgctaaatactgagcctcgcaactgctcacatgatcttccaggagtatagctgacccctctgattgttcgagagtaatgttccctctctgacttactgattgctactgtcttgccgtctgcacccatactgctgggatatgcctgcactctgcagtttgttgactcctctgcaaccttggctttggtttctccccaggtcctgaccacctggccgtgggcccctccctgtagagccacactgcaggaaaacaaggctgcttcagcccagcgagacccatcttgcctgggtgccacctcccagcctggatcagcactcggagctcccacctgcctcccaggggagtgggcatccaccctgagcacctggttctaggaatttcccttcctttcatttctgaggcagtgccggacggcttgagcatctcatgctgtctcacgttccgcagctggtctggggccaagtgctgaag

SEQ ID NO: 39143 - DNA, 528 bp, Homo Sapiens
gggaggtatcactcccgcagtcggagcagtgggatggagttgggctcactggcctctggagggtccctagcaggccaccccacgcgcagttaagtcgggactggggagccccatcctgggtactctgtgcaggagatgggggtcccacccagcaagccacactcacgctggaaggcagagcctcttctcccataaagcctggcccagcctggagctgaagcccggggtcggcgaactgagagggcattggttctgtctgtagagcaggggtctgaatagcctggtgccctggaccaggtgacccggctctgtggcactgcacctgctcctatcactgaactctcccacaaggcggggacagacgaagaaactgaggcttgatgagtgaccccactgcagagccccaccgtgggtagggtgccccgacctgcactctggctgctgagctccacggcccagctgtgtgccctgagtggtatcctggggacgatgccacacaaagcctgcggagccgtaccgtgcctgaca

SEQ ID NO: 39144 - DNA, 368 bp, Homo Sapiens
ccatcacgtgggtggctcagcacctcgtagggcccgatgcgttgtgctgcagccgccaagctctcttgctcttcgccctggcggacctgcccattgatgtgtcgcaggaatgactccacggcttcaatcatggcattcagggcctcttgggctcgtgcctcggggctcctcttgagcacagcatggagcagcagtgggtacttggtgatgcgctggtggggcttgataagcaagtcacagagcatctgcctcccagagcgcttgtgcttctcacaccactgcacgaaggcatggaagagagggttagtttcttgctgttctcgggcgtaagccatggtctgcttcactcggaggcagtactggacata

SEQ ID NO: 39145 - DNA, 412 bp, Homo Sapiens
ctgttccctcatacagttgaacatactcctctgccttcaacttctgtagggcggcctgggcctgctgggtcttctccagccactgggcacggtctgtaggactgggacagtgcacaaggagggcgctggagagacactggaattcagtgaggtggatcagcaggaagctgttggggtctcgcaggggttggcacacgagcttctccagcatgagagggggtcggatgaccttggctttgtccgccttgcgctggggcttggtcacaaggagcacatcagagaagaggaacaggtacacgtccagcttcccttctcgtccctccttcactcgcacaggcccctccagcagcagctgtctggtgtgttcagatgcaacccccagcatgggggacgtcaggtccaggctggagaa

SEQ ID NO: 39146 - DNA, 369 bp, Homo Sapiens
aacacaggtagggaaacttcgaagagactcacccctacaacatctaggcaggtctgaggcatcatgcagatccttttagatccttagggatttcgtgatttattcctggggctctgcttgaggtttcttcaggctgctcacgtctgacctctcttaggaacatgggactatcccatggatcccacagataaggcaggcaagagaccactgccgacgcacctccaccaaggtgtccttcaaagtcgagccacagggacttgtggctagggaacggaggcatttattgggatgttaaccacagctcacagctcaggccccgtgccctaagactagcgcatgcgcattcgcgatggaggcgcccacgctagg

SEQ ID NO: 39147 - DNA, 404 bp, Homo Sapiens
gcttagcaaagccttcgtcttctcgtaaactaaatgaagtgtgaatacaattacagcagctagcagcctgcagtgggactgaagtccttgtgatctccatcaagctggctgtttatagaacagttagtgtccatttactgaacattagattttgagcacctgcttggtacaagccattttgctaggccatgtggaatggatgatgagcacacacagaccagctaaccctagtggatgttaaaatctcttaggaaatagaagtcaaagaagtacaaagccatctgtgttgtaagaaatgtgaacacagaacctgcctccgagagtaagagggaacttctggattgatcagagaaggttccatggagagcatgacatttgaactagagcccaaagtgtgggtaggt

SEQ ID NO: 39148 - DNA, 461 bp, Homo Sapiens
acctgaggggcaggatagggtaacatgggcttcgcgggcacacgtccttaatctctggatttttctagaatgtaactactttagtcagtgcttagaatctggtcaggcagtcaacaaatattcactgagcacctactgtacatagcagtgaatgcacagtccttgcccttgtggaatttacggtccaaggagattatcaggtagataatcctgggcaaactgggttctcatccatggattctttccaaattctctacatcttcagggctaggggagtgctggcaaatggtaggtgttcaattttttatgtacagaggattccctaagcataagtctgtgctttctaagaactgaggctatgcaatctccgtgtttttcaggtcaccatagtgaggactcaatgaatgcttgatcctagtggtgactggggagctcctaggagcctcctccatctggtgtta

SEQ ID NO: 39149 - DNA, 352 bp, Homo Sapiens
atgagacaccgttatagccgctgtgacagggaaatcgctggaggctttcacctcgaacgactgtttgatgattgctacagcatccgaccacgcgggtctgttgcttacgactgagacgcgggtcggcagagttgtgctgctaagctgagcctctttcaggctagaaaccaaaggaatttggaggcaaggaggcatttaggcagatcacatctggagaaaatgcacccttccttgagtgcagtctggaaaggcttctggaaaggataggatttccagatatgtttaggtgggcacctagcaggactcagcagatattgagtgaatgcagatgtgtgtgccctgggcctgccag

SEQ ID NO: 39150 - DNA, 361 bp, Homo Sapiens
taggtcatacgaggctgatctaacagtaaactttgatactgtaagatgcgagcatttgacatctatttgccagaagcacttcgtagtaaggtctttatggcttgaagagctgtaagggttaaattttggcttacagttaacttaccatcttcttggactaggcttgctgtagccgctatggctcgcagacaacttggccatctagaggccacaggatctagcctcttagataaataggccactgggcgtctttagggtcttagagtctgagtaaacacgtctttagcaactccttggcttttatggagatattagggagggctaaagcaggggcttcagttaatgctaaattaacgggcta

SEQ ID NO: 39151 - DNA, 361 bp, Homo Sapiens
gtcagactgtcctagtgcaagctgtcatccctatagctcctggagcttatcctccacatgccccctggggtgactccttctctgatctcctcggcttggcggctgaggaatgacactgcccgaacacctcggaagccccatgaaccatcatggacctcgagtaactcttaaggtggactggtacgtccatcccctttaaagatctgatatagggggccactcactccatcctgccctcctttcagggacctggctccctagcctccattactgtcgtgggaattgacggcctatgcctccagatctctccagactccagttgtgtgtcaactagatcaggactccttatggcactcctttt

SEQ ID NO: 39152 - DNA, 389 bp, Homo Sapiens
actagcataacactatctgtatgtctatcctcgtcagacccgctgctcctttttcaactaagtttaagtcatattctaagtccctcgttgccagttgaataatgctcacagcatcttcaccaggactagattctacctcaagaaaccacgttctttgctcattcattaaaagcaactcctcatccattcaagttttatgagattgcagcaatccagttacatcttcaggctgcacttctaattctagttctcttgctatttccaccatatgtgtagttgcttcctacactgaaggcttgaaccccttaaagtcatccatgagggttggaatcaacttcttccaaactcctgttaatgttgacactttgaccttcttcctgaatcatgag

SEQ ID NO: 39153 - DNA, 356 bp, Homo Sapiens
gaggaaggtagaaccgccgatgcaggcacgtcttacatggccagagcaggagcaagagagagaggtgggaggtaccacacacttttaaacaatgagatctcatgataactcactcactataccataacaaaggggatggctctaaatcattaatgagaactccacctccatgatccaatcacctcccaccagaccctacctccgaaactgggaattacaatgagacttgagatttggacagggtcatatccagaccatataattctacccctgccccctcccaaattttatgtccttctcaaatttcaaaatacaatcatgccttcccaacagtcccctaaagtcttaacttattc

SEQ ID NO: 39154 - DNA, 363 bp, Homo Sapiens
tgaacctggccggacatgggctgtacctcctgctcacattcctagacccgactcactgagcccgtcgccgctggaacagcagagctgtgtgaaatgtcaagaggagttatgctcataggctccctggcctcagtctctttgtggcttgcatattcttccattagtactgtgttcatcacatggaaatcagagggtacaattaaaagataatttgctagtcccagacttaatttggggcccccttcttgcctgattgaattacaggggaacataatagatttttggtgagaaatagttgtctgtgtggctgggagaaagattgctcccagctctccagctgggcagccctttcagtatcccgta

SEQ ID NO: 39155 - DNA, 355 bp, Homo Sapiens
cttgcgagggggaaccccgtgcgggatttttcctccgacactccggtatctccttcagactcacaaacctctctggggtcctcccttgtctccctcaggtctttgccctcagcccacagtatctctttcagctactctgaatacttttctagattccagctggagtcagttcccaggcacccacgaaacaccaacaatactacacccatatcactgactacatagtatacaaccccaggcctaaaaggactcttactgtctctctacatatactctccaaccaactccagatatcagctggagtcaaattcccacacccaggagtaacctagaaactcacagaacttactggcac

SEQ ID NO: 39156 - DNA, 355 bp, Homo Sapiens
agtttctataagccttgcactagcccatggatgcatggtatgacacaacacccaacaagaatgagtacaccaattactgctgtaagagaagtgagaattgaggctacaatttctttccatttactgaaccacctttctagccatcttgagaaagggttattgactccaggatttttagctaattcattggataaagtggtaaatccttgtagggcccttgttatgctcccattgggggcagtgttgtttgcccccaacggataaaggtacaacactgagttttaatcataacacaaacaccaccattttcagctaatatcataactagggccattctgttttcccgggccatctg

SEQ ID NO: 39157 - DNA, 520 bp, Homo Sapiens
gctgtctagaggatctcgatcagagcataccctataggaagaatcacgtgtcgctggggcgagggtccctcctctcttctttaaaaggcaatctgactgtaacgttcatgcattcacctggtccttcctgagtgatcggggcctcgaatttttcccagaacagagaaactccagttctagaagtcagagccacattcttggattgtcccatcttctaccattctcccagtacctcatttgcacaagccttcctgccattcttcaaatatgcgaagcctgttctcacctcaaagccattgtacttgctgtttcctatgcctgaatgttcttcccacagatgttgacaagacttgctccttcacttcaatgacattcagatatcttattctcagagagcatttgacaacctatctaaaatagctccccctcactgttcctgcccatgctctttataccccattttactttcatctttcttcctagtactgacattatatatttgtttactgtctatagatcc

SEQ ID NO: 39158 - DNA, 445 bp, Homo Sapiens
gagcataccctacgctctttctggtattattctcctagccacttctgtcttccatgttttgacatttaaaaatggcttattatctcagtgttatttgtatagcaccttcaagaaacaggtactatatcaatggaataaaaatactgcaataatgatacttcttttttatgtcatgtaatctcattagctctcctatgtcaataatcattgtgtccctcccataaccatctgtctaccatttaattggaaatgttatatgatcctgaaagaactgaaactgagtcatcactgtaccatctagcataatccccaatgcctggagacagatgcacacacagaaacttactcactcaggcacaataagcctttgaaggtgaaggatgttggtatctaaagacaattatgaataccaggtcccacccacacactctccagcccatgcttg

SEQ ID NO: 39159 - DNA, 445 bp, Homo Sapiens
cctaagcagagtatagccatcatacatctggtcaagtgggtgtggtctgattttatcttggagacccaggcagttaactccctggaggggaagggaagagtacttgggaggatgctttccatatatcccttctggctaaagagaaagaagctggaaactgtgtatcaggcaaggtttggagcctagtggttgtgcctttatgccttccatactgtttattataggacaggagctagtgtgtgagatggctctggtgtgggaagagcctttccccagggttgggaggcctaggtagggtgacctaggttggatatatcacccctccctgtgtgtcatccctgaaaggctcagccctccttaggtagacagtaccttgcactcctgggagatggtatggttagctgggaaagtgagctccttctgagtctatcttagcagctttttg

SEQ ID NO: 39160 - DNA, 573 bp, Homo Sapiens
tacccttgtcccaagaagtatgtggacacgacagggcacatggaccaatgatggtcatgtcaagcgtgatgaagtccatggtcctgagggacacttggaccacggcctgcatgagagggcctggaacccaactgcgcggatctagaaagaattcctctggacttgattcctgaacttgaaggtagagatggaaggagaagagttctgggtagcatgttcctggcagaagaagcccactgcaagagcaaaggcactgaggaagcctggtggtcactggaaaactgggattcaagtagctgaaatcgtaagggtgcagcctagggagaagtgagacccgtgatggggggcagagccaaatctctgtatccaaacctttctatatgaaagatacagtgtctgtgtctcacaaggaatctgttttcttcgggtgtctgttatttgagtgctaaccagaacagaatttctaaagatggtctttgaggccaggtaacaaggctgaggctaagaagaactatggaaggtctgttggcaggagagatgtatgattagatctgcattagaagaaggaaagtt

SEQ ID NO: 39161 - DNA, 375 bp, Homo Sapiens
tgatcttgagaatataaagaggcgtgacaaagccccctctcacttggctttcatgaggaacaagcaagtggattcacataaagtgcttgcaagaatgacaggcatatactttttgaagcatgtttgccacagctgcttataaaatacttttatgggaaactataatttgtttgacaagaacctttgtaaaacttatcacagacaatcttgaaaaaagttacttaaaaacagaattgagactatagtacatatacagttttataaactgctttatacttattacaaaggcattaaggattttagagggtcatgagattactgccagatgatacttcagaaaaacagtatcactttatactaggatcaacagtctct

SEQ ID NO: 39162 - DNA, 386 bp, Homo Sapiens
tcgatgcatctgtgctccccccactacatctaagttctttgcatcttctaattcaaacttcaagaaagaaaatctaattgaagtcactcctccctttcaggaggagtagtatgtattctggggcctttattgagcttattaattggttcccattggtaatagggaatcccattaaattcatctggtgtagaaaacaggccaaaagaatatctatctggttaggggtgaagtggaagctggaggttggcagatacattgacacatgtagaacatgaaactagttaatttttaccaaatgagtgaaattggtctctgttctgtggtcaggaccatttgaaaaatctccatagaggaagaatcaagataaatagagagagccgagaacc

SEQ ID NO: 39163 - DNA, 428 bp, Homo Sapiens
tctggctctatcactgctcatctgagtactctggtcacctgctctgtctgagtatccctggtcagctgctctgacctgagtcatcctgagtcacctgttctgtaacccgtcttccccgctaaacaacgcaccccaccactctgactcatacccctgctctctttaaaatagccaattggaattggcttagactgtgtcgtcccaccctagccaataggggaacaacacagcagtaggggctacctgtgtcaggaataagaaccccttcccctcccttgttcagatgtgctctcgccattgctccatccacgaggtgcgcccttctatagaagtaaaattgccttgctgagaaaattaaatttatgttcgagtgctatttcttttgtggcatcaaaaatttatttctaacacagtcattctattcctag

SEQ ID NO: 39164 - DNA, 409 bp, Homo Sapiens
tcatgtcagtaaaagcttagtgaacataagccagctcgagctccatagagaaatagatgaacacctatgttacagttataggaggaaataatcctctgcatgtagcagttacaaatcattggctcaacctgtacaaataatgtatctcaaaaacaacatgtcaaggaggaaaaatgtccagcactctacaccatcatgaaaccatgcacactgtacaaaacttcatgttgtctgtagctagcacagatctccataaacaacatgtgtcaagcaatgtgctggcacggccaacatctccttggtgtgcagggtggttactgccctgagtgggcaggcacaggatcacagggtcagtgcatgcaacgaggactctggcttcattatacaatgtatgatttctttacacatt

SEQ ID NO: 39165 - DNA, 360 bp, Homo Sapiens
cggtgtctcacgtatagtctgaggtcaatttgatacccattcttttttctctgggactttagaatttatctttgacattgatgttctgcaaggtcttatggcttttttatgttatttttccaccttgtgcatttccaggctgactgagatcattcacctttagatctgagaacgtcttggtcgtcgttgcttcatgtcaatgacttcttacttttgtattttgcagttagatggatgtgaatgaacacctcccttacccatttccattcatctatctctgtacgttgtctctctttacgcctctctgctattcctgggagaatctcctgagctgtatccactcaccccatctgctggatg

SEQ ID NO: 39166 - DNA, 351 bp, Homo Sapiens
aaagacataaatatacaagataacactgtgccaaatctttactttttccttagctgtcaccctctttcttcctccatctcacaatagactgcttagaggaagattgtcatttttgacttgtgatctattagttctcagttcatttaaaatctggcttctagattcacctctgatgaaatagttcacggaaagtttacctgttactctttatctctcaaatttgataattatttttaagtgtttatctcccttgaatcttaattacatttctgatctaactcttcctcatcgaaattccccttcctggttccctctataatttataaagccttcaatgagtcagactcttaa

SEQ ID NO: 39167 - DNA, 424 bp, Homo Sapiens
tctcaagctaccatacgagcccttagtcactgaggctgatagggagctctgtcgtcttcagagcaaaacttcttagaattcatcccaactgattactacatccagggtaagaagacttattggatgagaaatgtgtgctggggatgttcttccagttcttgctaacagatgtggaatggttactgctaaagactcataaccttggcagctctgcaagaactcagcctgtgcaaatgtgggggaaagagattctcatccatatgagattttccatggattcataatctgagactgcttgctgaaacaaatgatctgttcgatgccacttgggggtagcagttttaatcatatgagaaaatggtggctgacagtgaaatctgaaccaggagtacagagctccctgcatcccccacaccttccccca

SEQ ID NO: 39168 - DNA, 445 bp, Homo Sapiens
ggaggtgagagctataaaggtgagagatgattgctgcgaacatcatccaaatgcccccagaagaaaatcatcctttacggagtgcacaccctgcaaaaagaaaaatgttaagaaaggagaacgaaggagcattgacaatatattgcttgattttacataaggctccagatacatttcatattaaacggtgtttatcactgtagcagtagatgactttctgttgtggagatgatttctttttggtgcatttagcatgcacggtgccaaagcaccctgtgccacaggccacagtgggaaaacaaacatatttgtctataatatgcgtgggtgggaagcccacacagattataggggccacggggcttctcctgcctggtggaagtcttgaatggggcaatcggaactgtgggatgaattctgggcatcttagatcatcctccatggt

SEQ ID NO: 39169 - DNA, 397 bp, Homo Sapiens
ttataaatgcagaggcagccgaggatgtctgaggtagaagggcctgtggtgttgaggggtcaacggcaagggctgagcagtcaagcattcctgggttcaagatcccagctcatcctccttgtgagtttcccggggctgccgtaaccatgatcgcaaatgtggtggcgtaaaacctgaaatgtattctctcacagttctggatgccagaagttcaaaattgaggtgtggccagtgccgtgctccctgggaagggagaagcccttccttgcctgtccagcccataaaggctgtcagcagtcctgggccttccagggctggtggccacatcatgctgtcgtcgacactctgctttgcctccgtctttacgtgaccttccgccctctgacttctcatcttc

SEQ ID NO: 39170 - DNA, 351 bp, Homo Sapiens
ttcgtcgagacactctctgtcaatgtctgcgcctagaacgcttcccacgggagaaaagaccaccaagtcgggcactgaccatgcccgaggtcacagagccaggccggccagctcacactcccaatcctggtgagggaggccgggcgagatctcagaggcaagaacaggtcactccagcagcccagagctgcgtcctctgacacctcctgctctgccagaggctatcctggctccagcccctccccacggcaggaccaaccattaacccctggagtttggagaaagttgtgtgggaggaagtgctgtctgtcctggaacttggcagtgagtgtggtttcgccagcgtcattt

SEQ ID NO: 39171 - DNA, 379 bp, Homo Sapiens
acaacctccagggagtgacacgtcacgcgccattctctggaagaggatccttccttcttgtaggaaacctgcttgtgaagtgttgagtttagacaacggaaagatcacatcagtatccccttagaaagggttccactaaatatcggtgctcgttcacaattctttcttcctcttttctacttatgaagctagcacgtgctcttgtggagaaacgtgacctcacagaaacacatgagctagagaggggagccctgcccggcccacttcccctttctccctggcagctgagagccatccatgcgtggcgtattcctctgggaagaccttgagtatgtagagtccccagaatccaacttcattcttcttgagtgccacaagg

SEQ ID NO: 39172 - DNA, 355 bp, Homo Sapiens
agacgggcacctcttcaccatagaggatgttggttggatcaagggatttctcaaagattcctgactgtccatgtgcatgatctgtggctgggccaggtgcagtggccccgagctcagcgggggacaaggacccgccagctgcttccctgggtcctcttgctgaagaggaggcagcacagcaggcgggccatggtgccacccggaccggaggccagcatgcaggtgctccagctgctcttgcttcacgctctgatccatgccaacctcgccctgggagatttctggggagccactgaaggaagcttgccgcaccagaaagcatttcttcctctccctggacggtgataccgtggag

SEQ ID NO: 39173 - DNA, 407 bp, Homo Sapiens
cagaagaagaaagtctctaccggcgtgatattcttggtaagaaatggattacccgaaacgttcacaaggcccaacggatacacattctctaagaaaattgccttgtcattgtcaaaagtgtcaagttcatggaagtcaaggaataatgaaggaggcagggcaccgaaattcaacacctagccctgcatcagattctcctgctgcaagggacatgactgagacattccaacaggaacagggtctgccggtgggaggcgactcacacagcggtgctagtttcctgattctgatggccgtgccagggtctcaatggagactatcttcgtacagcaaagacacattcaagtactccggagtgatgggatatcagtattgggaagttactctcccaagatgttgaaaaatta

SEQ ID NO: 39174 - DNA, 439 bp, Homo Sapiens
agaaggatgttgaagcaagaactagtgaaatcagaaattgctgtcatacatactcaccagtgaacgggcgtacagaggatcccaagcgcaggacttgtcctggaagcagaggattggatgtccatcaggaaaagaggcaagtagaaacaccaaatgctggtgctccctttccccagctcatcttatttgcaggcacacagattttggaatcctccaggactaacaataaaaaccacacgaggttgttttcctaattcctatgaaatgagtcagtaggtcaaacaacttatccactccagagagagaacaattccttgagctacactccctgtttccagtaaccctattccctgtctgtgcccctagataaaagtgctgccaataatgcatggagagcccaccgggttctgaattagacacatcatagagattggcagaa

SEQ ID NO: 39175 - DNA, 442 bp, Homo Sapiens
ggactcagtcacagggaggatgttgacataattaaaacgtttcaaatcctgtcactggctgtgatagagtaagaatttagttaaatcccaagagccaacctgtcctattacctttagaagtgaatatacctccggccatctgtacttcctcccctgcccttctgtagaggtagctctcttccccactgactccacactgcacttccaacactagggacctctctgttcagatcttacttcacttcctggcagcattcagcatcgttgagccttaacacccttttctcctgacttctatgacatcatacccttctgggtttcatgctgctttcatgaccattccttttctggcccttttctcactgttgcaatcctgctggtctcccattcagaccagtctctcatactgttctggctatttttcaaatatgtcaccaatact

SEQ ID NO: 39176 - DNA, 382 bp, Homo Sapiens
agacacccagtcacaagttcagcttaggatccagttaggacctggaacatctgggcaggtgggaacggaggagtcataaggtctgcagacagtgagtgactctcccatgctgccttgggcaaattctaagcatcgctgcaccaagagagactctgagatctccaataaatgcaaccttaatcaatacaacacgaggctcaagcctggggtgctgctgccatgcccttccgagctgggtatctgccaagtttccaccatgtgcctcaaaacaaaggggcctccagaagctttctgcttataacttgtgcatgcctttggtaagagatgttcaaagtctaccctcttccaaaacaaagaggacttccagaataggcatccagcc

SEQ ID NO: 39177 - DNA, 411 bp, Homo Sapiens
gagtcttatagaaaccataaggatgttagaacagaagacaggaaaatgggacagaacgctgccaagaccacaactgaaaaaacatgcgggtgcccctgtatgcatctgccgatgtccacgcactgaatatcaggggtggtacgtgccacgtaaccacgcgcactgcagacacctgccctcctcaccagggcgtgcagctggggagaaagcaccctgtggttggttcatccatcccatgttctccactcagaccatttgtgattgatttgtgaaatttctaatgctggcattaatgcatctttgctttgtgaaaaagcgaagtctactgaagatgtgcatcacagggagagccccttctcagacatgctcagaagaggtgggatggtcattttgctggattcggggaagagt

SEQ ID NO: 39178 - DNA, 405 bp, Homo Sapiens
tgtgtgtgacagagtatcttaagaaccagtggtaggtaggagaataggaggaagaggaagtgatcagagtcatggaaccaagcaatatgcacgcagtctccgagtctgtgcacacagcaagggtaggcagagcaaaaggaaaaagaagatatcaacacaagtggaaccgcagcaatttctcttctctgtggatatccaagtgaacttggccagactctcgtttaacctaataagaggaaagactgccatctctacacctgcgggctctaaacaatgatccccagatgtctccctcagtggaggattagctagatgtgttcacaataccaaattcggctaatacatctcaactgtgctgtttgttgcttcaggctttctccttttctatcatgggctttaaccacc

SEQ ID NO: 39179 - DNA, 359 bp, Homo Sapiens
gttagcttctatcctgtgggtggagcataggacgtggaattgcggtcacacggtaactcttggaggagctgcaggcttattccagagggccgcacgggttgacattcccaccagcattgcacgaaatgttccagtgactccacgtgccccccgcgctggttattcacctttagtaatacgaccatctttgtcagtgtgcagtatctctctgtggattccatttgcatttccttgatgactaagggtgttgagcatctttgcatttgcttgagggcaatttctacattttgtacatctttggaagatctgcccagacccttcggcacaggcccaaagttgtttgtttgcttgtttgtttt

SEQ ID NO: 39180 - DNA, 405 bp, Homo Sapiens
ggcttcacaacagcctagactgttgcagagccttctcctgtactggaccctactcaaaactggcagccttttaggtcactcgatggatgggctggagtaacataccagaatgaggaatgtattgcctccaaaatccaaatagacccactaggcgttgtccctctttcttggttgtaggagggggcaaatgcagcaacttatccttcaccttagaaggaatatcttgagaggccccacaccactggaccactagaaattttactgaggtagaaggtccctgaattttagttaatttcccatcccctggcatgcaaatgtctcatcaataagtccagtgtgttggctacttcttgctcactagatccggtcacatactgtcatcaatgtaatgaactaatgaactgg

SEQ ID NO: 39181 - DNA, 452 bp, Homo Sapiens
ggcctacaagaaggaagtatatcgttgaactcatacggttagtagccttttttgattggcttcatttcgtttagtaattatgcatttaagtttcctccttgttttttcatggctttctggctcatttcttttgagcactaaatgatattccattgtcaggatgtaccacagtttatttatccattcacctactgaaggatatcttggttccttccagctttgggcagttatgaataaaactgccataaatatttatttcctggtttttgtttggacatagttttcagttcctttgggtaagtaccaaggagcacaattgctggatcatgtggtaagagtgtgttgatttttacaagaaatcaccaaactgtcttccaaagtggctgtaccatttagcactcccaccagctatgaatgaaagttcctgttgcctcacattctccatggtgggg

SEQ ID NO: 39182 - DNA, 479 bp, Homo Sapiens
cggacctaacagggaagatgcagagggagcaggtatctgcatgtgaaggcgcaaccttgttggtgttgatggagttggtgtttgtcttgcaggcactggaaagccgttgacggatttagtgagtgccactggtgacaagctcttattaagacatccgagctgaggtgcaaaagatgggttggagttggcaaggcccaaagtgaggctaaaaagagagttgaggggagtgtccacacagaggaaggaacgtgtacgaaaacttggaggcaagagcggcatggcacttttgaggaactgcgagaagtagagtgtggccagggataatgctctggtcgggagatgtgtccattgaggctgcagaggaagcaggtatctgcatgtgaaggcggcaaaccttgttggtgttgatggagttggtgtttgtcttgcaggcactggaaagccattgacggatttagtgagtgccactggtgacaagc

SEQ ID NO: 39183 - DNA, 463 bp, Homo Sapiens
tacacaggaagatgagtagtatggttgtgggcttgtgagacagcagccttgaacttaggagctggcactggcctgagagtcattatctgtctctagtccttggccccagagtgccctacatcttcaccgtattttcttggggtaccaaaaactccattcctgaaaatgttttttgaaaatgtgttataacctataaagtcattattcttaatgatgctgagattgtctcaagttttgccagtggggatcccttcaatttggctcattgtccttttgacacaatatccgttagtctagatagctttcttgatttctggcacaagatatagcaggttcaccttgcacttgcactttttttagaaaccaaaatatgagcacaaagtgtgctcattgctactgagatgttgttgtttctaaggaaggtgcgtgttttttgagaattattctgctgttgatagcgtag

SEQ ID NO: 39184 - DNA, 443 bp, Homo Sapiens
taaacatgggttatcgataacggacatgcaagatggaaaattggttgtggcatccagataagggaaaacaagtaggacaccagattgtatacactgtgatcaaaaccatgtgaaaaacacatgcatgaagaggactgggaagaaatacacaagaagtggttgcattagggtgagaaggagtattcatgtttttctcatccgtctttttcaaaccttgtgtaatgggtggttttattaattttataatgcaaaatgttaatttaaaagcaagttatttacagtttagtaagctcatggcagggaaaggctgtgctctgtttattgctcttactttttcccaacgcctactcccatgcctggcaattatagagataataaatgtgggtgtggaatgagtgcccactgggaaacctctcagaggactttgacccaggaacatattt

SEQ ID NO: 39185 - DNA, 406 bp, Homo Sapiens
tatctcacagcaacccagtgaggtaggcaccattattttcccattttaatacgggaaagaatcaaaccccagagaggttaagtaactttctcagagacgtataatggaagagctgtgattcaaaccccaggagtggcttgtgctcttaacccaatgctatctctagttgacacttatgtcatagatttgttctttgtgtaatatgaattttaacttttattttagattcagggggtagatgtgcaggtgatataggtatatggcacaatccttcagggaacttctcatgatccccatttcccaggtgggtaaatgcacttagagaaggcttcttggctaacagtcccacaggtaaccgatggactttctaaagtgtcagccattcccctggtttctccttccccaa

SEQ ID NO: 39186 - DNA, 377 bp, Homo Sapiens
atcatagagcacacatcatcacactaaacccacaggctcactaaattctcttatttcagattattgagattaggagggtatgcgagccagttttgacttcaaataaaacaggactctgtccaagtcaattgataactaaaggggaagcagcatgttgggaaagaatgggagaggaacaaacgttacagctgccccagctataatgttcctcaagtcttggtaagtagtttattttaaagatgtgtataagtcacaatctttaaatcctttaaaacctgaataaccagtcctgttctttctcccttcttcccttattctcttgtcaaatctagcgtcagtgcagattctgagtgtgcagagttcaatcaagaactctg

SEQ ID NO: 39187 - DNA, 355 bp, Homo Sapiens
tcagttgagtgtacagtacttaaagatggtgtgtctggagttgttccttcagatgttcagatgtgtctggagtttcttccttctggtgggtttgtggtcttgctgacttcaggagtgaagctgtgatccattgcagtgaatgttacagctcttaaaggtggttcatctggagtttttcattcctccagatgggttcgtggtctcgctgacttcaggagtgaagccacagaccttcccagtgagtgttacagctgttaaaggtggcacgtccggggttggttgttcctcccagtgggtttgtggtctcgctggcttcaggagtgaaaccacagacctttgcagggagtgttacagc

SEQ ID NO: 39188 - DNA, 375 bp, Homo Sapiens
ttattctactaacaatatctaatttatatctatgataactccccttcgtaatattctaaatacataaacatcttgctcctcatacggctacctaccagctctaggtcaatcaatctaaatctactattctgtctgtataaattatgaattttcctattctggacatctcatgtatatagaataatacaatatgtttgactttttgtgactgatttctttcactaagcataatgttttcaaaggttatccatgtcataccatgtatcgataaaattcatttctttatattgcttaataatattccagatcctttgcctgtttttaaattatcttgcctttttactattgagttttttgtatattccagatacaagt

SEQ ID NO: 39189 - DNA, 363 bp, Homo Sapiens
tcaggtcagctgggatcataggagctgggggtatgagggagaggtgtgtgggacctgctttgccactcttctctcacccaatagaagatgaaaggacaacccctcactacgctgcccttcgactcccgtgcgagttcccactctttgtagtgggcagggaaaacatttatctgtgctcacaaatctcaatcaggggggcagccaggcgcagcggccctccttgggaataccttcccctttgaaaggtttatcaatccatctgccgcttggtcagccccagacaggaccatgattaattattcctgtctttcccaagttgactttgatggttgcttgttgaaacaagtcgtctgaattcaggaa

SEQ ID NO: 39190 - DNA, 389 bp, Homo Sapiens
actctatatgagagtgcacacgctataaacgacattgcaggacccagcacagtctcatttggctggagccaccggctctgcggagctgacttgcccattccctctacacctcactgtgtccttcaccctgtctgagctagtcccgggaaacctggtgactcccaaaagcatcttctgctgccagtaacataggtcgaggctgggagtcgggagacttgagttctagtttacaggctgtgtaaacccgggcagtcatccctcagctctgcgccttgtgctcgcttttcctgggccaccatttgtaaaacgggcctcctgctcctgttgcctgcataccccatgggacagaaggggaaagggggattggacctcagagtctcttatctcga

SEQ ID NO: 39191 - DNA, 385 bp, Homo Sapiens
ttatatccaagatcaatttcttgggttagtagtatactctgttggccaaattaattgcaaatagtatgttgtgctcctttgaagtgtctaaagtatatatgacctcaagtggaaggatgactttttcctacttactctgattctaggactcttcagacttttctgattgttttattatctttttgtgttgtcagggtattagttcctctgactatgaatgaaatctcacatgagggtttatttccctcccttagagtcttaaaaagtatttaatttcatttgagttggttgcaagtgtttggctttttgtatttcagaaactttattgacataaactgaatatgtactgtatttttatttgaactgtcttgttacttagtatagt

SEQ ID NO: 39192 - DNA, 377 bp, Homo Sapiens
agcctagaggttgcagtttctttcccagagtaacacttttcctaccaatcaagtagttgattaagtaggttttaactggatatccttcctgtctaccatccattgtgtgtgagatgggacattaatatgggtaagagacacagacaaatctaaaaggtgctgaaaacccacataatagagtaactgacctcccccgaacaaacccaatgacttgttttaccgtgcgtgacactagaaagataagcactgattagctaagccctgttagacaggcttccaatgtgaatcctctaaccatcctccctgaatctcctctggaagcatttctgaaaggcagcccaggaaatgggaaagaaagcaggctttgtggtcaagat

SEQ ID NO: 39193 - DNA, 394 bp, Homo Sapiens
tgtctgtttaacatgaagaataacacatctgttacctctccctaggatggctgcgcgtcagtgagttcatgcagctgaatgcatgacaagtgcataggaagcactcactacatatttattcttcttcttcttctctataaagcaaaaagaaataaaaggagaatacaaaacagcacgtacatattgcttagagcagtgctttcagatatgaatcatgtctagaatggattatagaaggatgggagcttttagtatttagtagtttcctttcttctccctaagtttacaatccattttaaaaaatgaatgaattaagtatctccgaaacaaactggcaattgctctgaagacaagtttagcaatttccgtgaaataattctctggcttcggccaa

SEQ ID NO: 39194 - DNA, 370 bp, Homo Sapiens
aagacttcaatctaacgaggattaatacgttaaggaaatggacaaaacgccggagagtctcagcagagacttgaaatttatagaaaagaatctcaaggaccttccaggactggagtaatacaatacccgaatggacccactgaacagcttttttaccagcagcctgaacacagcacaaaacacaattagtggaatcaaaaggaaaccaatgtttacaagaccaaaaccaaagtgtaaaaggaaagaacaccgtttagggtagtacaagacagtgaggcaacctctaagatacgtgtaaatgagtgacagagaaagcaaagaaggaggcagcacaaaatctgaagagataacagccaaggattcttcaaaa

SEQ ID NO: 39195 - DNA, 403 bp, Homo Sapiens
tcttcatgcgctatatcgtacctaagagtcttgagatacagaagtatgaggtccctcctaacccccgttgggaattggtccccatagtcaaaaataacctgccggtgtcgctgcagatttacccactttaggcaccatctgacaacttcccacgtggaagtagaggttccagctctttccatcccctctcacgtgcccgtcccctgcctgccgtgctccgctggcatctgaccctgggtttgttagggggccgagtcgggtgcagcccctggcctcagagcacgctgtgatcgctcttcccacagtaagcggctgtgttccttgccgcagttgaccatgtgttgccgcagactctccgcagactgttgtctctggaggcagtcgggcaccaggagcccgcgac

SEQ ID NO: 39196 - DNA, 456 bp, Homo Sapiens
tactccctttcggggagcccaaagggcagaataaacaaatattcaaaaacatttatgactaagtttgtttctctgccttccctcaccttccctgcctctgcgaaaaacataacccatgtaatgactactgcgatcaacattggctcgccagtaagaacaggtatctataccccaatactagaatgtcaacagcaagcatatgacatttaccaagctggacctccagggagtcactaaatccattcaagaatggcagagcgataaacagaaaatagcattcgaagtcaaatcccaccattctgatgactgtcaaaccctttgctttgttaagcaccttagtatctttccagtattttctcatacgacaagatttatggttgcaaatctgaagaaaatcccaagctacttgatcccaaaatgtgccaactattctggaatccttccagaaaaatcatg

SEQ ID NO: 39197 - DNA, 353 bp, Homo Sapiens
ggagtgccacggtgtattccagtcttccctgctggccatctgaatcctccctctctgctagtgggaacctggctccctgactcctctagcatctgctcagccctggtgcacgtgcgagaatggtccacccaggcccgggggggagagccctggagtgcagcgtttgtgtacagctccttctggccttgcggtctccactcagaacattttccggagttgcttaggcggctcctgccctctggccagtgtgtttctgtttcacatccgtgcgtgtggagcctgtattctatctgcatcccccaacctcctggtcgggtcttcccccaatagtttgtgcacattgaagttcatct

SEQ ID NO: 39198 - DNA, 401 bp, Homo Sapiens
gacgctgaagcaggataatcggctagaacccatgaggacagagcgttgcaatcgacgctgagattgccactgaactcaagcctgtatgacaagagcgcagggctgagactcatcacaaacaaatcaaacaataaatgcactatagattatttaaatgtaagcctgtctcctatcgtcgaagcctaatccctttcaggctgcttgcatgttccactgatctttatattccctgcgttccacaccttgtcatagagggagctcaagtatttgtctcctggtcttgttaaattagaatgctttgacccctgggggcctttcctgtgagcttatttgtgctttgcttgtccaaggaatgtggttgagagtttgtcctagtgtaaattagggctctctttctgacg

SEQ ID NO: 39199 - DNA, 431 bp, Homo Sapiens
accgggccgcattgagagtgccacgttttgccttccggcggctgtgcttcgcacacatgcctctgcccgtgcttcggagtatgcgtctacttgtgtgtacgttgtgtttatgtatgtgtcgtctctgtccccaccagacttctgctttagctgccaagtttctgttacttgtattttttaaaaacatgctactccgataggtatttctgttacttctaagtcacagaatgacactgataaatcatacatcaaaatagactattaaatctttaatgttcaaatacaatttttctagaaaagtaaaacgcagaaggctggaaggtgtgaccggcactccactctggccttgctccttaactgcaaagtcacacctgctgactgggcgcttaccctaccccgacaccaggaggatgccagtctacgcctcgaaa

SEQ ID NO: 39200 - DNA, 380 bp, Homo Sapiens
atgccatacaggctgttgactcacatggaattaagtggatcttgctattagtatagctgatcactaggcaaaagaaaggtttgggtctaataggtatttgcagcaaagtggtccaactggcaaaatctcttacactctctactttcaacgctgagttttcacttttctactgttaaagttcagaactgacaagtttgaggccgcaggtttaacgtgcattttttaaaaggcagtcataattgtttatgctccctcattcttcaaaattcatatgctaagccagataaaccagaggtgacaagaggttacagatcaaaagccctgaaaggtattaatacagggagagagtggtacttcttcaatttatcctgaagcaaata

SEQ ID NO: 39201 - DNA, 444 bp, Homo Sapiens
ctgagagagccacgtttaaacgagcagaatgtcaaagcttgatgagacctcatcatatatagaattggggactctatgaagacgcctctcagaccaattttttcaggttgaactacacattacatgtttcgactccaagcctgagtgacttaaatacaaagcagttcctaagaagcttaagacaatataaaaaggggtaactatattgattcatcttaacacaagacaatatctattttctaagatgcagaacacagagaggagacaggccaagggcacgttttcaactgtgtgaatgatgctgccccctggcccttgccctcccgccttgcctactaccctctgtaggcctcaagactcattacccttctttggcccctatgctggtcacccccaggccacagccactacattctgacagaaagaatcctgaaggcaatgggg

SEQ ID NO: 39202 - DNA, 425 bp, Homo Sapiens
tctctgtcgtcactgtaactttgcattgatttggttgtatagtactattgcccctgaatgtggacaaagctgtgggcaagaggtcagcaggacccgcctgggggtgccggcgttggtgactgcgggtcggggctcctagaacataggagccggctgcctggcctcctttctcctccaggaagagtcattctttggcatttgtgtttagagccaggaggaaggcggaaggtagggagggagggctggtccccctctgagggggctctagtgcctgaccctgacctgtcctcattcgacagctgaaactgttaagcgctggcccagtccccccatcccacccagccgtgtactgcctgggctcccctcaaagggaaatttttacggaaacatcttggcagcaagtggaaaaagatctatggcccatg

SEQ ID NO: 39203 - DNA, 355 bp, Homo Sapiens
ctgcatgtgatctagcaactaccgtctgcatttccctctccttgtctagcagcaggactcagggccacacccccgcgggctcgtattccttcagtcccacatctcttcaatcggctccaggatgccacctgctgaagtcagaagcccttctgctatcgggtgccattgaggagcatcactccatcctcaacagcaccagctatggacctaaaggtttcagggattctatgaccccaccgtctctcacaaagttgtccaagtttcctactctacatctaccagctccacctggctacctctgctcagtagagttatctatgtctcacttgtttaccaatctttggtcaaaagtgtg

SEQ ID NO: 39204 - DNA, 382 bp, Homo Sapiens
gaggtaactagtaagacgctatagcttcacgtgcttggcaaccaactgtcaagatcgccgatcagctgtccacgtaattccgaacctgatctaggccagatggaagtcccccagctgtcttgtgtttcgaataacaaaaaacagctggagtggtgggtggaaggggcaggtccacggggaggagtctttcttgccagctaagttcctgttgacgaggcggcccagctccccaggcgtggctgtgttccggatatccacatcgtggggcgacacataaagctttgtgtcattcaagtcaaagaactcgacttctgtgagacccacccaccacgagttgccccagttggacaggatctccatggtcacgtagatagcatctttg

SEQ ID NO: 39205 - DNA, 418 bp, Homo Sapiens
ataggagtcacgtctttgcaagcatgatcctccactaatggaggcagcgttcctagttgtcatcacacagctgaagacatcgctacatacgtgtgaaatcgatgacaaaggacaaacagagacacacggcattgttcatgggaggcatcgtcaccctcctgggtgttctgtgggaggttcctgtgtgaggaaaacgtaggcacagggttgtgctgtacccacccttccccggcgagataggcctcggactgtgccgctgcttacaccctcgccactccatggcagcttttggtctgtttccggctctggcctctgccctgaactctcatccggcttgtacctggctggtggaaccctccacctggaggccaggccatgtctcaggcccagccctagcctcttctcctcaaattctaag

SEQ ID NO: 39206 - DNA, 415 bp, Homo Sapiens
cgctgggcatcggctgataactgtggtcctttggcgactttagctgaaaagcagcccaaggctggagggcttatgtatgctggggtgctggggaatgcagggtctcctgtacttgggaacgccatcaccccttctactcccacacacagcacagggctccatcacaccagcctccccgacacccccttccttctcacacacccgagatgccaaactgctgccaacagttatcttgctcgtctctgtcccacagctggggcctgcagcaggtggcacttcacatcactcacttgatgaggctccctcatcaagaccctcccatccctgtaacctggccctttcctctcctcttcctttatttttcctgcgtcattgtcattatctttttctcaccctcccaaatatctcacaccat

SEQ ID NO: 39207 - DNA, 365 bp, Homo Sapiens
tgggctcggctcgtggcttgtcagtggatagctctactattccccagatatgatatttaacagattctggggtctatcctaatgaatcaggcccagggtgatactggtccagcagcttgaatcgcttccaactcaaacttctgtggcctcggaatatgattaattgcttttcattgttactgttgttggtttaaacagaccatagaacctgacatctgatctcatacatcagatgcatatgagctatgactgctgattggaaatgccctttcactgcacctcctttccctttgtagttgtagctaaagaacacgtgtttcttgaagttattgttaaattattgctgaatgtctcctaaagccaag

SEQ ID NO: 39208 - DNA, 408 bp, Homo Sapiens
accggcccgcagcggggctggacatcgaaagccactgctatactaaagaatcatacaaagtctcagggattcttcagagaatcagctattataaaatccatcttgataattcattttgtgcgagaatgtgagaatgaaatgcaaaggaggttaattttacccagagagagcattcatatccttttccacttgtcagaatatacttgattcataagtggtcttttaccgacctacgactacatcacaagagcatgccacccacagtgtcttcccttaacactttgtgtttttttgtagggattatggtcacatagtcacacggtcccttctcctcctgggcaggtccttttcccttctgtcccagccttgctgccaacacaagatcatatagcctctgtgtccacccag

SEQ ID NO: 39209 - DNA, 426 bp, Homo Sapiens
cccgcagtggggctggtattctagtagctttttccagtgcaaacattctcaaatctgtactagtttccattgctgtactgaggtgtttggttgccacaattaagcaagacagctttttcccaatttgcttgaaaaaaatactgtaattagtctctccctttcataaaattttcttaagaaattgctacttctgataatactgacagaaggtaacataataaatactaaactaatactaatggaaaaacttagaactaaccatgtttaacttgagggctttaaaaatggttacttgtgcttaaactctgatttttatattgtacatttatatatgctatttgtgtatatttgaatatatgtatgtacacataggcatttttttggttagtaaaattattctggctgggcgcagttgctcatgactat

SEQ ID NO: 39210 - DNA, 401 bp, Homo Sapiens
ctcggcccgcagctggggctggtgtcttgtaggaggctgcgctgcatggatgcgttggctaggggctggcttgggtgggcttgggctctctggacttgactagtctggtggattttggtgttttcttgtttagtgctgcccatgtgtctctgtttagacagagaggattccttcttattccttctttgcccagaagccaaatggcgcaatctttgttttgtgcctgagcccctttctgtttgtttctcgcagaagcttgagttcgtgtccctgcctgtccagagcagaggagcccgtggtgtaacgagggagggggcagtcctcacagtgcctctctgagctgcgggcaaagtgtcaggcacgcggatctctctggaggaatgtatctgagattgcgtctg

SEQ ID NO: 39211 - DNA, 461 bp, Homo Sapiens
cgacccgctggggctggcaagctggcactgtgggcatttattcagcagcggattaatgacaatggctttgagtcaacacacttgtgggtaatcaacatggtcgccctccccggagtgagcagtcctgtgtgcggatgatgaaaggccaggttcggaggcctaagtaaactaacttatctagatcagtttttttacatccccttgttatctaacctaagctttcaggcaccagattagagagtctagctgccttcagccaaatcgttttccaaagcttttataaaacctcttggtcttccaagaaggtttgcatcgttctgcaattgttcctaccaccctgatggatctcctacagccagaaggcttcctcatctacaacattatcttttctctatttcatatctcgttctctgggtactcagatccctctcacctcatctttgcttgtgaatctttgagga

SEQ ID NO: 39212 - DNA, 460 bp, Homo Sapiens
tcccgcattggggttggccagtcagcagccctcggtttccagcagcgtccaatatgtacatgcagtccctgtactacaaccagtatgcctatgtacctccctatggctacagcgaccagagttaccacacccaccttctgagcactaacacggcttaccggcagcagtacgaagaacagcagaaacgccagagcttagagcagcagcagcggggagtggacaagaaggcagagatgggcctgaaggagcgggaggcagcactcaaggaagagtggaagcaaaagccgtcaattccaccaactctcaccaaggcccccagcctgacagacctggtgaaatcaggacctggcaaggccaaggagccaggggctgacccagccaaatcagtcatcattcccaagttagatgactcttcaaaactcccgggccaggcccctgaaggccttaaagtgaagctgag

SEQ ID NO: 39213 - DNA, 378 bp, Homo Sapiens
tcccgcgattaggctggcgaacataacagcctactaactatcacaaaaagagatggacgtccacacgtgcctcctcactggtgaaatgctccagcaaaacacaacagtcaaacaagcaaaacagcaacagactctgagcagggcctgaggtctaactaccaatttacagaaatacaggagacacgggggacaccaacagcaaaatccagatgggggacaccctccaggacaaatgactggttcttctacaaagagactgctaaggacaagaggcagaggggggacctgcagctagaaaaggcctcacgagccctatccaccaattataatgtatggagctgatttggatccagattcaaacaactacactgtaaacca

SEQ ID NO: 39214 - DNA, 412 bp, Homo Sapiens
gtttttgagtctttctttcacttcttacatttctaggagcgtctggtattgttcataatctcgttcttgatcatttctagcccttttcaaaaatgtactcatattatagcctatattctaccagagaggtttcgtatttgcatcttctgcccttgtctgggaataccactggtcaggaccaagtcaatcacattttccactttagagagtattggggatcatacaggtagtattaattcaggccacttcaggggagatagattgcgataagagtcttgctagctgttcctttgaaaaagacttatttagggtcccagctttatatagtggtccattagatctggacctgggccttaaattctctcatccattctgctatcaaaatagcgtgactagattccagggctcagca

SEQ ID NO: 39215 - DNA, 370 bp, Homo Sapiens
ttagaaatcataggaatcttgccttttggcattaatgaaagatggatgccacactttagaaagcaaagctggcaggccacctcacagttccctgtctttcaggtgagagaattaaaatcaggaaagtttggttgcttgcctaaaatcataagttggggagaaagcctatcgtaattactggaaaagaaacttcctgaaaaaaacggattcttagagtgaattcaacatgaggagaatgaggcaccaatgggcttccctgtcacaggagagggggtccctcactcttgggtccttgattgaagatgtacagattaactattcattgccagcagattctggaactggtgtgagtatcccaaggctgttttga

SEQ ID NO: 39216 - DNA, 380 bp, Homo Sapiens
aatactgtgctctctgagactatgggcttagacaatggtttgcatcactcttgaattctaacacattcagggtttatttgggggaaattatgtcaggttgacgaatgaattctagcatttcctgcattcctgtttgtctgtattcacagaatcagttgtaccactaaaagtagtggaaattctaagtgttttgggtaggcatcctcttccatgattcttaaaatattgggtatctgtattaacaatcaagttgctggccaggaacgaaaaggatttttgctcattgtaaagcaatgttataattttgctgtgatgttgtaagaccatgtgataatgttgtatactgctgattgtcctatttgtcagatagcacattactt

SEQ ID NO: 39217 - DNA, 397 bp, Homo Sapiens
actgtggccaggcctgtgacagcaggccctcgcagcacagcccagaatagcctcggctttgcatgcttttccagctgccctatcactttgcaggctggaatctaatttgctgtccaccctctccaccccagtctctcagccagtgctgctttctttgcccataaaatatttataatcacagattatgtttccctgtgaatataaacttgcttttgttgtttttccccttctgtgcccttaagaatctgccccgacaggccaaagggctttattctctgggttcatggacttcatcacactttctttgctgaagtggctggctccgctcatgatcctactccctctgctagataactgctgaagaaatgtgaggaaagagctctaggttagttactgt

SEQ ID NO: 39218 - DNA, 436 bp, Homo Sapiens
gtttcaagttatttctgtgatgtagcatgatttctccccgataatgcaggctctgggctggcagtgcctggcttgcttctcctctacaccaattgatattctgctcacagcgttgcacacaggagagccaaggccaaacccagaggatgcacaatagtaacaggccaagagcaggctgttttctgggagacagatcctgttaccctcttgttgtttggggatagcaagaagtagaaagaggagcaggccttcagcagtgtctgaaagacaaacacccgtgctaaatcactacaggatctacctgcaggaacttcaaggaatcaaaacataactctgagctgcatggtttccggtaaacaaaacactccctgttctttacccaactgtattcctctgttcagcagccatacaattgccatttcgtaagccgggagcc

SEQ ID NO: 39219 - DNA, 439 bp, Homo Sapiens
gaagttcaagtatagtcaaaaatatcctcgaaaaatctcttgtaaaaaaatgtaccaaagctatgtctcaaaacaaaaatcactgatacttcaggtaaaggctaaatgcttccttgtactatggggccatagcatataaacaatacttatacatttacagcatagcaagatgcccactcactaagaggcacgtaggaatagaaactgagaagagctcattcatgtttcccatctcacaaacataccaggactaactcacttagcagaatgaggtgctaaatcacccacactgcaacatttcattctttctacctgaagtcacatttatccattatccattatcccctagtatgcccctcctctgaattagtttgctcagtgccaagtcaatcttttacattactgtctcccattcctgtctcccctcatttgctcttgc

SEQ ID NO: 39220 - DNA, 419 bp, Homo Sapiens
tgggtgagacaagtctagactaagagctagtatccagccttaatactgtcccaaaaacacttcttggtatgtaagcctaaatatctcttgacagttaatatcacatgcaggtctttaagctgaggaataattcaaaacaacaatattatcttcacacacatttgtttactacggcaccatttatgctagcaaaagaaaaataaaagcagcagcagcaacatcacttccaaggatagcgtttggcataattaaagtacggaacatccaataagcataactagtcattggaaaactagagagaaaagtaaaacagcattatataaacttgctgcatcctacatagagtgtgtctacctatggacaaagatgaggtgggaatttacttataggcaaatacctgagttatggtaatggggtaa

SEQ ID NO: 39221 - DNA, 369 bp, Homo Sapiens
ggcaagagcactgtctgacgtttctcaggtattatgttctacggggttgtcctaaggggttattgttagattgttccatgacaccctctttgtacactgtcactactctgcttccctgcccagggcaggaggaatggcctagttggacccagggccctgtcactgcccaatgcacaccaacagttgttggagcactctgttcctcatccaaaggaccaaaagataaccagtccaagccacaaaggacaaagacaacagtttctaggcagtaactgacattcttagtgctaccatattttccttcttctctgttaaagaattctgctcgtgatttttaaaaggaaaagcccaggactgacacagcctttc

SEQ ID NO: 39222 - DNA, 359 bp, Homo Sapiens
ctgggcacttttcccaagtgcaggaaggtactctctgaaagtttcctttcctgactagagaagcctctatagtagaagaatcaatcgcattcgtcccctcgctgaaatctcgtatcctatttcaaaaagactcagaaatgcagccattcctggagggactttttcacaagattactcaaaagaaaattatttactaatttctgtccattcattgttcctaataatcatttgctgctcctcaaaataaatgtctacatttctcatctaccctttcccctatgaaaaaaagatataaaatcttctgtactccattaagctactgggtaatcatcctcctgcttttaccccggtgttatgta

SEQ ID NO: 39223 - DNA, 377 bp, Homo Sapiens
agttcacgtgcactgccattgccacaagggggcagccacgcacagggccaggctcgggatggaagtgtatctgccactaccaggagaactgaggagcctgcgtctcctcactggctagacaggaacaatagatatggacacctcatagagttgccttgagagcacaagtgagctgatgttctctcaggagtgagagttcccttctgcttgtctgaactaaactgacaacagctaacatgtattgagcagctgcgatgcattgggcatctcctctgagcactgtttgcatgaacattttggggctcagaacacaattccaaagcatggcgccggggccagcagagagctttgaactaacggaaattggaaggcctcag

SEQ ID NO: 39224 - DNA, 463 bp, Homo Sapiens
ccctcgagtaaaaatcttaagcagtttgaccgcccttccgcgtcacacaccaagtgtctgcgttagcccaccaggaaagtgagactgctgcatccatgggctctcaaaattaagcttcattgcattacacaccctagggcataaggaaaaactgttaacatgtaattctgcactgcttagagatgccaacttcttcaacagtccttggacctcattattttatattctgtaagtgtagatgtgatgtatgtcactttatatatttgggttacccactcttctttatatccagtaggaaagcatttaaatgcatgtttgtcgttatgtttctatttttcatgattggtataaagatgaatggctctaggaatgtcatctagtccattaagctaacggctggctctctgatccctgatcgcttgctgtcagctcacccgagctcagctgtacctttgaagtgcag

SEQ ID NO: 39225 - DNA, 391 bp, Homo Sapiens
ttcataagttgtaggcaagattcagcatatactaagcagttctaagactgatgtccctgtattcttcaacgacagtaggcaggagccactctcagagtcctagaggccacctgtcttccttgacatgtggttcctccattttcaagccaacaacagtgcctctaacccttctcatgcttcacacttatctgatgtccccttctgcaaccataaagaaaacactctgcttatacagggctcatgtgactcatgtgactagatcaggcccacccagacaatcgctcttacagtcaactatgccatatattataaccttctcacataagtaaaatttatcacattcacagacccatggaatatgcagcgtatactagggagatatatactcgag

SEQ ID NO: 39226 - DNA, 403 bp, Homo Sapiens
ccatgcaagacctggatcccaccaggagtatgtggggtgggaggctgacgctcagtgagtgggacatgttagagggggctgcctggagcggaagaggggctctggaagccacactcggtgtgcggctgttttttctccgccactaggtcagcacctgggccttcctaggcggtgagtcagctggtggcctcccctccctgggggaacctgctagaaggtcacctcgggccatggctacccagcccaggaagggaggtcaggcaagctcccaaggggcccccagagccaggggccaagactgaaggatgcagtcaaggagtgtctggagagccctgtgagagccaacacggagacacagacagggcccgcgggccgagagccactgtcaacatgatgcaacttg

SEQ ID NO: 39227 - DNA, 354 bp, Homo Sapiens
cggtgttacatggcagcaagtcccttagccacattcttgagtgaatgtcttcaggtgtgtacacggtggcagtcccttggctgcatgcggagggaacgtcttcagtggtgttccttggccacattcttagggaatatcttcagtgtgtacacggtttgtgtacagggcggtggtcccttagccacaagcttagggaacgtcttcagggctgttccttggccacattcttagggaatatcttcagtgtgtacacggtttgtgtacagggcggtggtcccttagccacaagcttagggaacgtcttcagtgctgttccttggccacattcttagggaatatcttcagtgtgtacac

SEQ ID NO: 39228 - DNA, 452 bp, Homo Sapiens
ggcgggaccattgacaggcatatattggcactggtgctagtgagcatcaggtgagatacaatttggaacacaacaggaaaggggtagaagtacagaaggacttgtttagacattggtcctttttgaggataccacactcccttgcccttgcttccatcccccatccctaataggctgggctttgcaggaaatggcatgaaatcagctcttctgagtgtacagaagaacctttcgagcattatttctacacccttctcccccactctttcctctttggaggcttccaagttagtgatgaatcccaacagctaatgatgctgggtttccagtttatttccttctgttagtttaatgtgcaagtcagtgaggttttgaatgctgtgcattgaatttgcttgctctcttctgtcttttagcaggtttggatgcatctgctcggactacttctcatg

SEQ ID NO: 39229 - DNA, 379 bp, Homo Sapiens
tacctactattagcctctcataaatactgatagattttacagttgtggtcagtgtttacttttgaccatcagttaccagtaacttctttcatggttcaataaaatcatagctttagtttatggcaccttttcgaaacttcctttggcttttctttgtgcttaatttaggtagttttgcttttagctcacttcctaattctcttttttacgcaattcattttggtcctaatttctttactttactatataaacaaggtgctgaaatgtgtgtgtatgtatttaacttcctctacccatttgctcttggttatttcttcagttatgatattctggatttgccagtcattgtccgtcctcctgcctctattactggcataaa

SEQ ID NO: 39230 - DNA, 431 bp, Homo Sapiens
gcgttccatcttcacgttttcttcctcctcttcctcctggactctaagaaagtacaggaggcccgaccggtcctcaggacaggcgctcagtgcgtgtatactggacatgctgtgcacgcaggagggggatgtggcgcagaccctccaacaagccccctcccactttccacggtgtctccctctccccctcgcagggccctccaagttactagacgagcccagagccatttgtgggagaccccgcccctccctgcaagcacccacagcctcagagagcagcagaggcccctcactcctgcacgctcctccaaggttgccaggacaagaagcctggagccagggagacaagggaatccgtgtccctgacccacagagcattcagggagagggcacaggcgggacccgggcccagagccagagtcaagagttcg

SEQ ID NO: 39231 - DNA, 421 bp, Homo Sapiens
ggcttggaccattgacacacttgatggcttcctgaaggagctttctcaaaagcaatagaatttccttgcatatttgaatctgctcttgcagcagtttgaggcggtgagcccagctctgtgaagcagaaggttagacattaccacagactccaaggcttggaaacactgcaggacattttgtaaacagaagtgcagccttaggaacacatcttcagcatacgggggaagttccagcacatttcacaagagggaaaagtaatgcaaggaaaggataatttcagtcttctgtgttgattacccttctccttgccctctgtacaagggggttagcaagggcagctggtcgcaagactgcagctgttcttaattgttgattttagctttgcagtggtcccttgtgggacaagatgccacatctgta

SEQ ID NO: 39232 - DNA, 448 bp, Homo Sapiens
taacccgctggcggaccattgacttattgtatgacttaagcaaactgatatcactctaggttttcttatctataaacaagactggggatttccaaagtctcttcgaggtcttaactctacatgaaccctaggatctaggcaccataaaatccatttcccactttttagatgacttccagagtcaccttaattatatccttttgtgcctccgtgtttactgctcaaccaacatcaaacttgtggagagcaccaaggagttcctggtaataatatcctctagaccataaataccacatgtccaatgtgtccgtaccactgattcttcctagtgtattaatcattataaaagcctagatatcagtgtgctggggaggttgatataaagccaccaattgagaagaaagcccaaacacatagtttgcacagtgttgaatccacggtgggcatt

SEQ ID NO: 39233 - DNA, 375 bp, Homo Sapiens
tagcaggccggcgtgcactttcctttgccggctcctttggatctcggaagggctgtgccattcctgcagccttccgcgatccagggaatcctctcttcaaacctgtccttgtccacaggcccgatgagcgcgctgggggatcgataggagggggagataaactagaattggagaacccaggaggggttctctgaggatgtgcacgttcaggatcccccagatggagaaatgcgaaggaacttgatcggcgtgaaggaaccgcttgagcaaaggcaggaaggagtgtcgggcgccttcattctggaagtacctccttgctttcaggactcagtttcctgcgttccgcttcacggaccctcatctccttacagtcca

SEQ ID NO: 39234 - DNA, 387 bp, Homo Sapiens
tgagccccaaacaatctccattaatctctacagtccattgttggaagcttattccaattctctaccagtagccacaggtcttgtatgtttctcccaggctgcttatctctaatcataatggcctaatacagggatatcctcttttccaaactttcctaacaccaaagtgttctaccaccagcaaccccacgatgcagatacagccactgttgttcaagcctgaaagggaccaatgcaaaggttaagtatttccattttctacccagaagagattatgtaaacacggtctttaaatgtatatagattataatggagtttatgttgaaacagctgttaacacatgtaaggtgatgaaaaaaatacaaatgaaactcaaattaggttgga

SEQ ID NO: 39235 - DNA, 442 bp, Homo Sapiens
ccaccctggagccccaaaatgctggaattacaggcatgagccatggcccctggcaatcatctctgtttttacaaatgaggaactagaaacttaggtgagtaacttgctcaaaggtacacagcaggaaagtgctgggagctggatttgaaccagactggcttactgttaagcctcttccattaataccagttcctgttctatcatgcggactgttaaaaggggcactctgaaatctagggttctaattgataattccccccgccccgcctcacttttcattctccttttcagctcctgcattgcatattaagaaatcaatagtcagttggcatcttgcagagtctctggcattgctcacaggccctcgaactactacacagtttttgcagtaaatcctattgggctcatttctgttgtcacagggcactggcggctgtatctc

SEQ ID NO: 39236 - DNA, 461 bp, Homo Sapiens
cctttagccccaaagctagagaattcctgctctgagccatctctgaaagcaccaagagccagctcacggaggagatgccagctcacggaggaaaatctggaaggtgttgaagcatagacgctggaacataaaatgactcatgatctcactgggagaagggctgggaacatcgtgggctctcttctccccgcgctcctctctccgggtctctgtttccctcattccacgatgtttagaaccatcggcgcactacatcagactagaggtctggggtcacccgaccatcccgccacaagcccctccgaggcatcactgtgtccagattttgcaaactgcacctcctgaaggggctggggtctgtccacttcgccccatctgccgtggcagcacttcctccgtggttcgcacccccacagcagcctcctgggaaggcacctccctggggcccctctcagtccacg

SEQ ID NO: 39237 - DNA, 482 bp, Homo Sapiens
ccacccttggagcaatgggtagtttcctttcctcttcctcacatccttagttctgttcacttccatcgttatcaagaagtatttatatgtgttccctagttttaaatagattctcccttgtattttatttctcttgttggttaatttgatagtggaagttgaagactcaccttagtgtgtcacctcaatatgaaaattctggcattgtgtttatgactccaaagtacatctgttgaaacaatagatgtttaatgattgctgtaatagcatttagagttgagatagtaaattcttgccaaaataaaagatatttttattttactttccttttctttgcctgtgaactgcaagtctgcataaataggtattgcttatattatccagagattattttgttaacattaactctctctggctctactgattgctctaacttgggaaaagaaaacaagactgctgaaggcttctacatgtttttagca

SEQ ID NO: 39238 - DNA, 387 bp, Homo Sapiens
ccaatgtgctggtattacggtgtagacccacagtgcctggccggttcatctaatttttgaaggaatgctttggtgcaggaacaaagccttgtctcccctgcagctcttggtaggagtgaggaagtgtccaacctgaaatggggtggtattttgtagctcaacaggaaatgtccagatgtaaggccagttttggtttgacacattgaccatactgataggcctcctgacaggtcattctacctttgggacctggagttccccggtacacgaggtgtaggtgtaatttacttaccagctcacatgtgcccctcatgaaaacccatggcccattcttgtccatgtagtgttgtagttatcaaaattatttctgttcttatatgtttctaa

SEQ ID NO: 39239 - DNA, 354 bp, Homo Sapiens
tacctggaataatatattgaaggcatattcggtactagtcgtactagggtaaatcacaaacttgcccccttataccatactcggatgaaaagtgaaatctagttaaagtgaacaccagaggtacactcaaaacagaatgggagaaaaagcaaaagattcctggaagttatctagaacaagaatgggaatctttattttttaaataagtgcaagttttattgatgctctctattgtatgagagctattttttcttctttgctgctgtcagtgtacggaagctgttcactataggttcaatttgatttattccttgttaattctacaaatttattatttttatgggacatgttgtg

SEQ ID NO: 39240 - DNA, 415 bp, Homo Sapiens
gtccgctaaccccgctgtgttagcataagactacactatattatctactagacctaggggatgacgtctttcaataatactaggccctaaacatgtacatatcttgtaggtaagactttttcttttgtgtttcggaaatttcctatgtagctttcagttgtctgtttgtatagcctggatttttttgaggtaaatgaaactttctcatttgtatatttggcttgatatggtcttaatattatctttccacgaaatggatatatttctagaaaatatatatttactaccataatttctaccaccaaccccattttgctctgcattatacacagtagagaagaactgaagacactgctgtgacagtattgcagtccaaggcatcatgtgctcttggtgggatactctgattatcagc

SEQ ID NO: 39241 - DNA, 437 bp, Homo Sapiens
tcaggtctagtacatgttgtatcttcctttttgcttgtgggggctcaggttattcatggcctctggctcttctttaggagcagctctctttaacttcactggagtagttccaacaggggacaatggtggcgacttcacagggcctgaaggacttttcctatgcgttaagtcatggttctgtttagcgtcattattattgtgttccgttttattgttcacaggcaaattggaagacaaaattaggggtgaaacactcgaagaggaatttgataattttctaaaggcattactggtaaagcttgcctgcgggggaggcttcagtcgatcattatctccattctctgtctttttcacttttatgcttgtacttgttgaacttccatcaaatacgatgaggggtcttttccttaacccatctacagtgctactccttttag

SEQ ID NO: 39242 - DNA, 405 bp, Homo Sapiens
gagtatgacaggaagctaaagtgaacaggttctcagggtggcaggttgtgtcaagtgaccgaagtaaagaaactccgcccttgcacgtaccaagcagtgtaggttgcaccctacccattctccaggtactgccagtaaaaacatctgtggcccaatctactgcctgagcacggtacctgctactgcagcggagtcagtcccaaggagcgacaccagtaagcaggaaagcagaaaaggtgtgggaggaaactcctgtgtggtcccctttagggggtgggtagtgggaaccagaagacccaggtgctgctatttcgaagtcatcagggtcggttccatcactgcttactgacttgctgcacctgcccatttctactgagaaccaagggcagtagctttgttccttta

SEQ ID NO: 39243 - DNA, 374 bp, Homo Sapiens
cacaacagattattttgtgtacacagaaggctgtatctaggacaaaaataagccagtatctctcagtaactaaacagcatgtaggatctaacaaccggggactattactgaaataggtaagacgtatatggggacaaagggaggggagagaatttaaaaaggtaggaagcttcttttatttgaaaatataaaataaatcaagaaagacgtggtgtggaacttgagattttaaaaggcattaaggactattccacacatatattcttatacagatatgtgcatatgtttgtatacaggatgtatatatacacaccgtgtttttatgttctattatattatacatatgtgtatgtatatttgtaattttatgtttt

SEQ ID NO: 39244 - DNA, 432 bp, Homo Sapiens
tacttgtcatgctcagggcaggattattttaatgcattttaggggaggagaagatatcctaagcctggcaaaataaaaataacacagattaaggaaacaatgaaacattattttaaaagaaatgcacttcagttaatattattctatgggatctcctgagtcctttgaaggcagagcttatcttagaaaatatgtctcctttagtgggcaggaggttagttaagcaacctcacaccagatcacagattatactgaaatgatcctaataaggaaagactttccaaagctatactcattttagcatgaataaatggattcaagtcttatttgtgggattttaatttccaactttgaatttgcaaactatcaaattccttcaaagacacggtgtgcagagaaggctctgagtaataggattgcttatttttaaag

SEQ ID NO: 39245 - DNA, 378 bp, Homo Sapiens
gaaagactctgtctgtttcatcaggttacaggagcactcgcagaatcctgactctataccaagcagccttgaaggggcttggatacaaagcatattcttgagccatgccatctttaatcaaactgcaggtggaatttgtagctgttagaatagctcctattcctttcatttctttttctgtaatattactcttccatctcagcctaaaaagaaaaacacgttaatttgagccataggaatttagaatttgttttttcttttgcttagatatgtttgactaaagcttcctttttcacaggtttattttttccaacattttattatgaaaaaaatatatactgaaaagttgaaagaattttacagcgcgcacccacatat

SEQ ID NO: 39246 - DNA, 418 bp, Homo Sapiens
atccctcgagtgtgttgtgtcagtaacagtacatgtagagagtaggcagcacgaagccagagaagtatccccatctgccctgagcaccagaggagcagcaaagcccagaatgaaaatgctctgttcagaggcatcacacttctcaagacacggtccacacccttccacagtaggtgcacaataaaatcttctttaagtttagctaacagtttctcatggcaaataagcaaaagaaacataaatcctaaaaaccacttatttgccgattttaaaaaatagttctacattttctgatgttctttaaattgtcaaagtacctcttttgccacctattttgaccaaaaaaatgcagttttacttccataaatgatttttacaaactgaatatagcatttgtcaaagcaattgaaactaagat

SEQ ID NO: 39247 - DNA, 438 bp, Homo Sapiens
ttatgctcagggtaaaggagagcgggggctggagtctgaggtgctgtgttctgttaacacactcactgcctctctattcctcccagctaaaaaagtgtctacctcatcaaacttaagaacaacataaaatccaactaatttaaagggttttgaaaaaacgcatcaaaaacataaaagcaatatacatgcaaaagccaactgaacaatataatgaaagtctcaaattctagtcaataggccacttttcttaaaaatcaagagacatgataaagttccagtaccaccaaaaggtgcttaacacttatctttatccatctcttcattctcttcacctgttgtgaagtgcccacttggtacttctctccaaattttgctcacgcacctccagatgcaacctcttggggcctctgtttacacctcagtgggatagaaaaaaca

SEQ ID NO: 39248 - DNA, 415 bp, Homo Sapiens
aaggctcttacacagagtaagagccggcatgagtcaccaggatcccagggtgggggctgggaggtggaagtcgctggctttctggcatggtcaccaagtaacacccacctgagatgttctcccaaagtcttgtggtggttattgttttcaactccatctttaagagcacatatgaagaagttatgtagttgggattaaccacctgtcagctgtgggccttgtgttatcaagttactaacacaattaatagttctaattacatagtttttagttcaagtttaattccactaaagtgtcatggtgaagctagaccaattatgaaggtttatggatcacaggatagtgatcagattaaaggttatcatatatatgattcacagttgagacacacaagatacttgcaaaccaagagtgg

SEQ ID NO: 39249 - DNA, 410 bp, Homo Sapiens
gatattgagtgtgaggcgtataataccagtagcgctagtttaagagtactgcggcaagtactattgacccagcgaataaggcttctgctgttactagctgtcaggtctcctgcataggaagggcttattgtctgagcataaatggggaaacctggagttcatctatctgcgaggaagctttggcacccagttaaatttcactgtctcaagcttcccttgtgtgtcctagagcttttctttaacagttgtcatgaggaagtctcatttgtcaagttgaccaattgtccattttttccctgtcatgaggaaatcctttcttaagccagctttattttctaaatgggaatttccagccttgaatgcagtaacttgtgctctgggtagtccaggtcctaaagttcagttcttca

SEQ ID NO: 39250 - DNA, 401 bp, Homo Sapiens
acggctctgtatgctcaggtggctctccctatgtgtcccgttgcttattcctgctgctgataattctgttcccagaaaactttgaagtttatttcccagcattatcacaacagtaatggaactcccagtaaaaattttagtgacccgttgtttgatttaaattatttattgcattacatattttagcatttttgaagtaagagatactgtagttctgttaaggatgaaaaccaagtcaaacccataagcagtcagacttgttttaaattggatggtaccagaggtttttaagagccacctgaaaaaatagaaaaataaagacacgaaatggtttttgaggttttacataatccatgtttctacaggcgacatgggagctaggagagtaaaaatagggcaaa

SEQ ID NO: 39251 - DNA, 382 bp, Homo Sapiens
cgtcacctcgtggtgtcttctcccttggggaactctcatttccagttgctttcaaatctgtctccacttcacctagaggcttaacctcctctgggccatttttctgtggggatatttctcttcttccagcttcttccaaatctttgtctatttcctcagtggcatcaatcacctctggcgtcttctcccttagacaaatctctcttcccattgctttcagacctgtctccatttctatggtgtcatcaatcacatctagaatcttctccctgggagaaatggctcttcttccagtttcttttaaatctgactgcatttctttagtattaatctctgctggtaccatctcctttggtgaggtgtctagtcttacagtttctct

SEQ ID NO: 39252 - DNA, 418 bp, Homo Sapiens
gctctgtatgctcaggtactttcacacatgaataccactgggcacccggtgtccttttgctgcagggttcctctgccatagctttgggatgggggtagagaatgctcacccccagcctctggagcctggagtcgggggcaaggccattttgtcctgcacgtatcccccactgtcccgttctcgggcagggtgggtgcagacaccaacctcctccacctcccatgctgtctcattccttcacacagtcgctcaccgcctctcactggggacccgtgaggagttctcaaatcacctggcagaggaaataccaccagtgccctggactacgacaaggacatgaagtatccatttccaaagtctatccacaggcaggacttagtctgtttgttccttatccccaccctgagcagtgttgtta

SEQ ID NO: 39253 - DNA, 372 bp, Homo Sapiens
tgtatgctcaggtgtctgtgtcatgtgtttagagattttggctgtgagctactcatatcacttggagctttatctgtggatatcactgaagcttgtggtgaaaatgggcttcctcagaaaaggctcgtgtttgcttctgtgaggcactagggaacctccagtttccatcactttaaactaaaggttgacttaggggcttttggactacccagatagggtaaagtcaggctgaaaatcagtctgagggctgctccgtgccaacgtttcagacaggtaattttcctcatagtccccaagggggtttatttctaggtcactctcactttgaagtacagccttcgagaacttctcggacaagctttgtcttctgtt

SEQ ID NO: 39254 - DNA, 384 bp, Homo Sapiens
tcgtcatgcctcagggagtgggtggggagtggttatgtattttcctctttttcgatacttaaaagaggcaatatttgggagctggagcaagacgactgaatatagcccttcagtgatcatttcccctcaggatgaccaaatagagcaactattcatgcaagaaagcaccttcatagaaaccaaaataggtgacaaccacagtacttggtttgactatattatcaaggaaagagtcattgaagagggtagaaaagacagtcttgcattgcctacagcacccctccctgaaccccatgtagtatagcatgaagacagaatctgtgtacttaggcaagaaagaccaaagtgagagtggacctttggaactcagtgctgtcctgtcac

SEQ ID NO: 39255 - DNA, 398 bp, Homo Sapiens
tgtgtgctcaggtaacagccccatacaacagcaactcagaaaccgatctgtgaccacatcctcccattctttctgtaccttctccatttcttcagcctttatgaaataagcacccgcctccatcagacgtcttcatgctctggattccctgttatgcctccacttgtgctcagcgatccttttactggtctttatttgactgcccatgttattcctcccaaacaaggctcttcacttggttttttttaacccttctcagctatgtattctaaactcttactctttgtaagtaatattttattttaccacaaaggcatccccagcttcctcccattcctaacagggaaagggtactccaccttctttcctaacctgtcttctttaatccctttcatccg

SEQ ID NO: 39256 - DNA, 403 bp, Homo Sapiens
tgtcatgctcagggttgcaggtcgagctttgggagtcagaacttctcagactagatgtttccccttcggacagaacaacccaattctcagtgggcatttgatcaggactaacccaggccttcatgaactctttcccattgagcacttagccacctggctggcatttctcttctcccaggagcttccatgaggttcctacttatgtattatgtcgacttgaatgaatattttatgtctagagtgcagccaagcctcagactttgtggcccattatcgacaaatggggtagggggtgggcgccacctttggccccgtgatagcttctctgctaaatggactccccccagcagcactttgaagcccattaatggattggaatgaagtaacctcagcagatggaaag

SEQ ID NO: 39257 - DNA, 399 bp, Homo Sapiens
cgaccctaccttctcagacatggtcagaccagatcctcatactcatcccagatcctacctctgcagacatggacagacccagatcctcatactcatgccagatcctacctcctcagacatggggagacacagatcctcataccagggccagatcttatctcttcaaacattgacagacccagatcttcatgcctataacagatttctaccatctcagacatggagagacccagatactcatacctgtactagattcctaccttctcagatattgacagactctgatcctcataccagggacagatcctaccttctcagatattgaaagatccagatccttatatctgtgccagatcctacctcctcagacatggacagacccagatcctcatactcatg

SEQ ID NO: 39258 - DNA, 451 bp, Homo Sapiens
aggattagcaattagcatgcacttctcacttccaggcctgcgggaggggcagaggagagggctgccttggaggaagggagggttggaggacctggcccagctgcagccgcacctcagcgaggcaacccggggaacactccccatctccgctgtcccttttcatcttcctcctactgttgatcctcattgctgaatccaaccagaacctgagggtgagtgtccgggtaaagggttggtataggtcagccaggtggctgctgggacacagagcaggatagacagtggttttcaagaacaggtggaagattccagcactgtactagtcctgtggctgctgtaacatgaccacaaactgggcagcttgcaacaacagaaacttaattctgtcacagctctggaggccagaagtctgaaatcagggtaccctgttccctttgcgggctccagcggt

SEQ ID NO: 39259 - DNA, 356 bp, Homo Sapiens
aaacattccaagcttgtgataagccccctcaccctaaaaccaacatatactctcagtctgtaagagaaagcgctcctgaccaaaatcggccaggagtacctctcaggttttaactaaagaaaacctgtctttgactgccaagctgcatttcatgtttctttcctctttaactcttacacctgttacagatactgggaggtccagcatgatattatttgaaacaacacatcagggttctatggctggaagaaaccccagctgtctccaccccctgggaggcgccactcaccccgctgtcttggacatggcacctggtgtccaggctgggtgactgggaggtgggggccccagggggg

SEQ ID NO: 39260 - DNA, 459 bp, Homo Sapiens
tgatacggctgtgggtgtgaagatgtgtgctagacaatcccagtttccagcacaggacaaagactcagagaggcacctgccaggagtctcaggtgatggaacccagtggcgggcatgtgggcagctgccccaggtggaagggatcgtggcacagctcttggttccccaggctggccctgaccttcgtgctttcctgcccatggcccagacttccgagctccatgttggggatgctcagggacaacccttcagcctcccccaccatgtaccggctactgcccaggattcttgttctctggagggtggatccagccctccccatcttggtgccctaccagggccaggcttcccatggctctttctgcagcccctggcacagactgtggggcgcacagcccggggagcagtgggccttggaggggccaggtctgcatgttcccacccccatcatggagtttg

SEQ ID NO: 39261 - DNA, 465 bp, Homo Sapiens
acctaccttctgttcctttcagccttctacatcctatttcctgacactctttgcacattgtgctccggcagcaccgaagtgcttgttgcatttgcctgctccatcatgttcttgcatgcctctgtgacctactcatgctcatctgtccattttcctcatcttgcttccccatttggataactctgacttactctgtttaatcagatcacatggcatcttcttcagactttccttgggtgccatctgcaggaaaccttctctcttgctcccagcctgctcattcctggcacaaagggcagcccctcactgtgctccttccgcactgtaaatccattactgacttacatcagtgtaatgaaatcattcatgcacacacccatgttcttcttgacactgtaagctttggaagggccaggactcacttctatttataccctgtactttataaagtaaatggaacattat

SEQ ID NO: 39262 - DNA, 464 bp, Homo Sapiens
acttgtaatacagcaaactgagttcaagcaaaacgcatttgaaatatgagactgactggcctaagcagtacatttcaaaaggatgggtaggatttttgtacttgggcagtcacggttctgaaagttggcctgtgatcagagagagtccgggctgcctctgctgaacctctggggaacactgagcaagcaagctgagatctgttcttccagggctcagaagctgctggacccatgcccggactggcagaggctgtaactctcttccactccttctctacctacagatcctccctgtcctctacgtgctctgagaagtcaagaggaggctttagagcttgttttgacttcactcctgccctgggactctgttctgtgcaaaggcacactcatttagagaagaaaaaaatatgaacatgctcttggctctgcctttgaaaactagaaagctagttttgtttttgttt

SEQ ID NO: 39263 - DNA, 496 bp, Homo Sapiens
acgccaatcaacagtgatgaatagctaaagggacaagtaggtctctaaatttacttcatatctgacagcccttcagcagatacggataatggatccctatgactcacaaatacaactccttcctactacaagcaagccctttcttttccctacaagaaagggcaagaattcctaatgacccctgttcttcctttccccttttcaacaatccaagaaaagtatgttaaacgcctgtagcatcaggttctttgcagctgctgggccagatataaaatgctagtgaaaacacacatccctttttatctcttaagctattactgtgagtcttatgactacatttgaatcagtgttaccaatcaaacgaagttgaaaaaatcaatttgtgtagatgtgtacatctcactactgtaccttgctgacctccagatgttcacgtgcctactgcatattaatctgcatcctggaccatttgcaacaagtagatccccacacattt

SEQ ID NO: 39264 - DNA, 460 bp, Homo Sapiens
agggaaagatcaagggtgtttgttcatacattgctatgaaataaagctgtctctgcctaacaaagtagggggtgccaaagggcctgtttatctttggccatactgaatgtttcagttaaagagccacattctcttagccctttgcacattatcttccttatccttagaatacccttccttgcttactttcttgcgcagctctttatctcttaggactcggcttcaatgctcccttttaaggaaagcctttcttaactccaggcagcaggaaagaatggaaaccatcttggagtcacacaggtttgtgaaacgatctcacctctgtatcaacagccttgacttagtaggatccggcactttggaatccctgaaggctggctccatgctctggtcagggcaggagtactttaaatcaggtatgcagggggatgggcaagcccttactgaagaagtgtagctg

SEQ ID NO: 39265 - DNA, 365 bp, Homo Sapiens
agggactacattgaaaatggaagcacaggtgagtgtgcatgtttagggggcaggagtctccctggactcccctgcttgcctcctgccatgaaatcacgcaacaccgctggacaacattgtgtttgcactaagctggtctagggctcagcttttgattggtaggcatggcagccaagaagagaaggggtggggtgatgttgacatggttactgattcagcccaggctctgcagtccgatggccagagaaacgacaagggtgaccagtaggctggaggcaagggctccaccctcaagcctgggaccatggtccaaagtgagaacttacacccctattttcctgctcaaatgttgccttttccaaaac

SEQ ID NO: 39266 - DNA, 437 bp, Homo Sapiens
cattggagtttataagtgaagtgtttagaatagcatttgacatacagtaggcactatatgagatttttactattgttatttttgctatcacctttatcctcaggaaatgttttggcaaggtggtttggaaaaaacatgtatatatttttagcccaggattcaaattggctgcctgtaaccacattgaatccaccaccaagttttgtttgttcatccaaactgaaagtttattttttaacagtggagaaacccagacatttttcttttaaaagctccagattcctcacttctcttgaaaaattaaaagatctggaaatgataagcctaaatatatacctaatgataagcctaaatttggagttgtcaagaagctgccccccttggatgaacagtctctctggtttggatctgcctatgtctagtgctcttcactcatg

SEQ ID NO: 39267 - DNA, 382 bp, Homo Sapiens
acgtgatggactggacccaaaccctcagcattgctgacgtatgcttttatgtcatctccttgtttaagaaacttcagagtctcctctattgccttctggaataatcatttgctacatgtcagcagggctatcccaggagaaggtctttgtgtatcagagttaggcaagcagacgctgaacggttcatggtagggaaactgtagaagaaattcatctgaatttgaggttgaagtacttttccaagctcagttctatttctgtgatgcctcagtgtagctacccatcatcaccttatctttaagttatgtatttgtctccaggcaaactgatgattctccaaatatgtcccatgctgtctcaccttttatttgtacctttggct

SEQ ID NO: 39268 - DNA, 470 bp, Homo Sapiens
agcttagaagtcttctattccttcaaaaatatatattcctccttaaaaataagtagaaggtgtcatctcttcaatgtcaatgactgtctgggactacccatcagtacagggcttttgcagggtcattccataaaaatagttaagtatctaatgctataccagcgatcatcttattaactttcctatcaccacctcttggaatttgctttgttgctacattacacccaatcatttgtttagccactcctaccacaacttcaggtgtatttttaaataaaaacctcctttcaatccactcttaaagtatcttttcctctccctgtggctaaattttaaattctaaaacagaatcttttgcatctgttgtctcatggactcttaagagtactgactacaaagactctggcctctcatcctcttatcttatgccagtttcatgctctggtggtattcctgtaggttcaaccaac

SEQ ID NO: 39269 - DNA, 424 bp, Homo Sapiens
aagagagcatacttttaaaggattttagcacattaatggaatgcaaatacatactgctaataacaaatgagtctaatttagtctttgaaacaggtcttgtagtacctgtatttggtagcagatggttccaattactgtatatatttctaagttctgtgcatatttctttaccgtgtctattacttatattttgtggaatttaagcctactcattttcaccaatcactatcttattttagtctctaaagcatctatgtcaattattttttaaatgtataatctttttaaaaatgtataatctttaaaaaaagattattcttctagattttcttccaaggtatataccttgattcttttgtgggtttcttaaatagggttttataagtgaaacaacaaaaggcctttaagaatcaatttagacaca

SEQ ID NO: 39270 - DNA, 517 bp, Homo Sapiens
agtacagaattccttttcaaattcgggcttatgaggcatgttttgatccaggctgtcgtagcaagggatttgatgctggagtctgtgactgctgtgcgtgtggaggcttccggaaggcagccagtgctggttactgcttggagtttggggagctgccattttggattgtcctagcctcatgccttctgagaagcatctgtcagggtccctgatgcacctacagagaccctgagcttggtggtgggggttgcacagagagagctgcaggttgttcctcaggcataacgaggcccggagctggtggtcccctccctctgtgagtgtgtgcagagcatggatcgggtctgggagtgttcgtgctggcaggccggaggaggactgctgggcacacttgcagaattgcggttctgtacagcagtgtgtatcgactgcagcgctctttttctctagcagcaaaatgctcagctctctgccttctttctgtgcatttaacagacgtttccagaaagcagaattg

SEQ ID NO: 39271 - DNA, 453 bp, Homo Sapiens
tgtcggtgttccgtggcaacaaatgttaatgtgcttttcctttcccctggtgatccacgtctcctgctgaagttcttgcctagctgcggtctttcccacccccacccccacaaaaatgtgaagatagctattgagaagtaccttttaaggccttctccctcttgggatgagaacctgatcaccagagccctggagaggcctggagagtgagccacctgccaaacaaagctctgggaactagggacccattgcaggctgtgaagctgtggcagcagaaatacgcatggcccagagcatgcatgcagaaagtcaaagagtcttttccaccagagtaaggaggattttcccggctgcggcagtctggtcctctgctaagaggaccttaatgcttcataccacagtattgcactggcttttcagatggctcccatgtgagtctcacaacaacctcat

SEQ ID NO: 39272 - DNA, 412 bp, Homo Sapiens
accaagtaaaatgatgagataaggaaaaccacaacatcatactcagtatcttgtgaaactgaaatggttgcagagtaaacactttgccttacagtgattttattttgactattatgctggatttaacaatataatggttaatatccatgctataaagttttattttttcatcaacaaaactaattgcattggcactttcaaaatgttgtttgcacataaatgatttatacttaagtatgagtgtaacaatcttgccatcaggacctggtctgttgggagatatcagtgaatggagcctggctcttccaatgggcaaccgttgtttgttggtgaagctgccacccttgagacctgcctggtctccttcccacctgtagctggctaagtagtgtctccccacaattcacgtcca

SEQ ID NO: 39273 - DNA, 594 bp, Homo Sapiens
actagtgatgatcttggcaatggttttgagcttggcgagcctcagtttccttgtctgtgtaacgaaagatgggggtgtgtctacatggcagggttatcatgaggcataactgacacattgctcaggaagcacttcttattggtattacttacgaacgggccatgattgcataatgaatctgatggctacatgcttttgaaattacaaaaccaatgccatccaattgattggtgatctgcctgggataggagcaagttaatgcattgaccatggggggcttagcacagcgccgtttccctgggagacttgggctgaaccgaatttgttcagccaaagattctgcctcctgcctgggaactaggaacaaaagggccttgcttgaaagaggctgttgttccttcaccaagtttagaaagccaaagttcagtttctgcaaccagttccaggagttatgtggcagggctagactttttccttttttcttgtgcctaattttgggccagttcttctggttagatgattgaggtgaccagaacatacaaggaaataaacagaaacccccaaactgccctttgaagctggccatccctcgtg

SEQ ID NO: 39274 - DNA, 429 bp, Homo Sapiens
gcattgtaaatagggaattcagacattggctaggggactatgctaggtgatctttaagattccttataagctctagtctgacgtcttactgggttggtcaagactaggaaataaaataaagaataggagctaagagggatgactgtttaaaaataaaggaatgtgctagcagttatttaaggtggcacctgaagtttagagacacagaaataaatagatgcttggtttggctcatgagtaaagataaaacttactcttataaatcaaactgtagggttttgaaatgaacttgatcaaaattgagtcagatttcaagtcaaggtctttgagcaaatttagaatttgcttgatattctgaagatttgagattccagtattcattataggcaaaactttgaaatatataaatcatattttagtaattgtata

SEQ ID NO: 39275 - DNA, 648 bp, Homo Sapiens
aattcataccctatcattaaatccaatcaactctacattcaaaataagtccttaatctgaccacctcatctcctctactaagaccacctggccaagccacattacaacccaccaactagactattgcaacagcatgctctctagtctcctagctttcacttttaccactctataatccattccccatatggtggccagagtgactttttaaaatttgaaagaaagctgcggaaaggcatagtacaaagaactttttcatactgctttgaagtacattatcttctccattatttatagtaatcctgagaaataactatagcaagtgtactttctttttcatggatagacaaggctcagagaagtgcactgatttgcccaatattacacagcgaataattggcaagatcatgactggccttctaaatactatcaattatgccattcaagtccctctgcatgtatgccacttattaatcaccctcataaatcctaacatcctttcaatgcccagaattacagtaatgtttcaaaagaacagctagaggtacagaaacactatgattttcaacccggcctacaaatttctttcctgctaaaagcataatgcatgctctgactacaggtctaccacatggcaagtgtttttgt

SEQ ID NO: 39276 - DNA, 720 bp, Homo Sapiens
accatataaagtagaagtacattttatttattccaatgctatctctttcacactttaaaatttaaactagtcctaggatcttgttaacagtttccagactcctgtttttttcatagagctttttacatttttgtgcctctggattcaaagggttctaatggtcttggtttatctttatatagcattcactcacccactctgacaggtcagaatgactcaatctcatcatgcgtggtacccagaaggcccaacagagaagagagcaatctagttgtccctgaggatacttggctcaaagcctcctaccatcctctctgagccaggctatgcatccagtccctgcacagaggagctggctgtgaggaactatagggaaaccctggtcttgactacacaagcttcagttttacataatgcaacttcacaactaattttttcccaatggtcagatcggcaggtagactgaagccattaaggtagccaaaagcaccagtcaactgggatatacagtttttctatcatgtggacatagccttgccatcattcagcaatatgtaagcctgtgacttttctgaaaaacagaatgaggggatctctggttcagttccttgagtttcaatctgggtaagtgggtcacttgttgcatactcttgtaatatccttccacttaatattctagagggatggatttgttagggaaaacagaagcacctattcctg

SEQ ID NO: 39277 - DNA, 518 bp, Homo Sapiens
acccgctgctctatccacttacaggggtagcaggcaacatgagcccagctgggaacatcaccgctcggggtgcagtggggggccctccttctcaccgcatggcaatgctgttggttctgctccgacagtgtggaccacggacccaggcttcctgtctcatggcctttatctgcccatctagaaattctgagggaggctgagcaacggccaccaacagctcccgcccagcccagggtccagaatgcctgtgcccacctccaacctcactcgggtgctccgggacaggctgtccctctcctggcctggaaggaggcctgttcacagaacccagggagctgggcctggaaggaggcctgttcatggaacccgtagcaggagctggactctacggcgtggaccagctgcctgttgttgtacataaggtgttactggaactcagccatgcccatttatgaactgtctatagctgcttttgtgagcggtcgttgactatctgtgatggagactctaaggcccta

SEQ ID NO: 39278 - DNA, 700 bp, Homo Sapiens
agaaatttattccaccagacatcctaaatcatctttctcaaattcaaagttccacacatctctctggtaggggcaaaatgccagtctttttgcatagcaagactcatctttactccagttcccaacaagttcccttctccatctgacatcacctcggcctggacttcattgtccatcttactatcagcatttcagtcaaagccattcaagaagtctctagcaagttccaaactttcccacatcttcctgtcttctgagccctgcaagtctttaggaagctccaaactttcctacattttcttgtcttcttctgagccctccaagctgttccaagctctgttatccagttccaaacttgcttccacatttttgggtatctttacagcagcaccccacacctggtgccaatttactgtattaggccattctcaccctgctatgaagaaatatttaagactgggtaatttatgatgaaaagtggtttaattgattcacagttccacatggctgggagggcctcagaaaacttacaatcatggcaaaagtggaaacaaacacgtcctccttcacaaggcagcaggagagatatgccaaacaaacagggagaagctccttataaaaccatcagatcacctgagaactcactatcacaagaacagcagcatagggtaaccaacgccataattcaattacctcccac

SEQ ID NO: 39279 - DNA, 556 bp, Homo Sapiens
atcatatttcaaactctcatttaatttgtgtccatttctagactctattctggactgctgatgggcctgttgataggccagagctcagttattttaattatgtaactttatgatgcacttatctgtgtagcaggactccccctcatctccattacttaagagccaataatgggaagctcattttcacaaatgcagtcaaccaggggaattcatggcatggcctaagatctaaacactcttaagatttaaacacaggattagctcttgagttagacaggaagctggggtgtttgggactgaggcttcatcgtggcagctaataatgtcagggagcatgagcacttgtttcttccaaggctcacttcaaggaaggcagaatccaggtcgggggtgcacaggagttgccagctggacccaaggaccatttcgtatacatgtatgatcatactttcagggcatcttggaaaaactgaatttgctaactcaatagagaacaaaagagcaaataggcctaattcaagaatttttaaaaacccgcaataagaaacataatcta

SEQ ID NO: 39280 - DNA, 467 bp, Homo Sapiens
atgtttgatattgcccatcaattgttaactcattttatctagataggcatgtgaaattatctaggaaatcaaaggattgcagatggaatcagaaccacgttgccacagtttcattctggctttagccttgagtacagtatggactgaatggagactactaggctctcagccatctgctgtgttctggtagtgctctacaatcatgtgtctctactacttctttgcaatgtaaatactagtgtaaaactactcagccacaagctctgagagagatcgagagatgtccttctcttaatagaaataagtcatttggtggaataactcttcgagtcaaccagtgtaagtaacagagacaccaaaaactagccattagtttagtttacttgacccagcaatctacctcttagtatatgctttggtgacactcatgtacttatgcaccaggtggcaggtgtgtactagaatta

SEQ ID NO: 39281 - DNA, 567 bp, Homo Sapiens
aacacataaggaaagtgagacagaggttgggaaactcactccaggtaacacagctagtaagtaacaatgccaaggacatgagtcgcgttaatgtctgggctattcgtctctttgctattaatagtccaaacataccatatgcatcaatatgagctaatttcttaaatcttcgagttctagttcattttatattttggcaactttctttacatgtataattgcttttcatttagttataacaagatcagttttgggtataaactgaccttccttttgtaattcagctatcctccctttgaaaaaacaggcctatgcaattatgtgctttagtaagaacagaacatatataaccaaaaaaatatatagatgattatatataaatcagaacacgctagctgcatgaataggggctgagagtcaaggaggaaggcactgttgtgttactcaaatttaattatagcatctatctgcaacaacaagctcacagtctttcttccccggtgacaatcaagttggtaaatttggaaaagattgagcaagtccaataaacatttaacagcagtgaca

SEQ ID NO: 39282 - DNA, 425 bp, Homo Sapiens
aaaatacctttattaaaggaggtgtgtcgaaacttcacctgttggcttgctagtttatgtcaggttgttctctctgtaatcgttaaaaacaagcacttaaatccacatttgtatttggtcagtaaaattacaaaaacaatcttacttttaagattaagctgtgaacaacgctgtgtccagcaggaacatctgtgagccgtttcctttgcccagaaaaagagagttgctgttgtccactctcagtgatatctcagaaataatggcttgtagctcaaagatgctttctctctttttacaaaaccataagacccacaaaaattacattagagccatgatttgcttaagtcccactcacattaaccattattactcacctccctacaagagtacaaaagtaaccaaatgttcccttcatgttagtcaaa

SEQ ID NO: 39283 - DNA, 470 bp, Homo Sapiens
acaaagaagttctgtgttgtctgtcgacttttcttgtggaattgtttccttctttttccagaatttttaaatatatttttctttatatttgaccttttttctcttattaaaatgaagacttggtagtagtaatccatgacccattaaaatttatgtattacattttcctcaagaactctagtattgtggtggctttgttccttcttatgtccctgtgtgagttgtatcacccagtaacctaccatagtgggtagccttgtgaaaaatccacaaaaataccaactgggaccttattcatgaaaaatgtgtcttaaatgataaggaatgaacagctccaaaatgcttactattcattggaaatttattcacaattcttgggaaaccaatcttcaaatactataaaaatgaatgttctagaggttttaagtacagggacttgtctgtagggggtcagggctggcaatgcaaat

SEQ ID NO: 39284 - DNA, 434 bp, Homo Sapiens
acattatcccaaggctattctcaaaaatgaattataaacattagttgaactcatcaattgggacaacttaccccaaaccacactcttgaccttatgcagaatcattcacttttaaagtcaaactcttgtaacctcccagtccccactcttacctataagacttactcttgaatactgtcctttctctcttagcacgttcccttcaggctttagtccttccctgcaaagttcatggagacccagcaactccattctttctgcaggcatatcactgtcttgtccttctgctacaccatccctaaaatacccagatcaatccaaccccctgcccctcctcccactcttgcagccaagatttaggtgagggagggggacactgagagagagaactagaggttgaagtcactacaaacggcctggcaatcctaggttat

SEQ ID NO: 39285 - DNA, 538 bp, Homo Sapiens
aagggctttaaattggatgatcttattagaggtacattaaagatagatcgctgtatactgtgtggagaaaagatttgaggaggacaagactagaggtagagagactggtcagtagactttttcagtaatgctgataaggaataatgggagacttagtacagccattaaaaggttggaaaaattggaagactcagaaatatttggaagaggaatatttggcagcacttaatagttgattagatatggcatatgagtagcagtcaaagatgagtcccagatttgtaggttgtgacaagatatatagtgatgctgttaataaagaataaaggaaaaatagctcatgagacagtgataaacccactttagtcctcttaagtttgagggtacctatgggacagccaaattagcatgtctgcactgcagtaggctatagtagtagaagttagaaatatttgagtcattggtatgtaagtagctgaaatcatgtgagtggaatagcccatctgggaaaagactgtgtgaagtagtgatttttttt

SEQ ID NO: 39286 - DNA, 384 bp, Homo Sapiens
atgagtcttttcccttggcttactttaaattgtattcattccctgtaataaaccataatcatcagtgtaacagcttaaagtgagttctgtgagtcattcctgtgaatcactgaacctaagagtggttttcggaacccactgaactagtatattggtgccaaaactgaggcagtcctgggcagtgttccctgtaatttatagttcactgaactttattttttgtctgctgttctgaaggtacatcatgactaaacttttgaagatggtgtcagaggtgagaacagtgttagggactgtgccttctaactctcgcaaaatcctttttaattacaaaagtaaaccacattataaagaatttggaaagttttctatgaccaccctatt

SEQ ID NO: 39287 - DNA, 439 bp, Homo Sapiens
atgcacagctgcctgtcataaaattaaccacaatttgctgtccaagtctttccctggaagttacaagccttcaatagaacccagggttacaaaaaattatatgagactgatttttccagtgtaattattgttcagatatggagacagatttttggtgcttcctactgtgccatcttcccagctccacaatatacatttacttctcaaaacaattagatgagagacagatatggaaattgaggaaaagaagtgctcaatagattgaccaagatttcatatttggctgtagagctgggatttaaatctagcaggtctgattcctgaacccacactcttaaccaccatgctatacaacctctctctgtgactcttcatgccctctgtggccctctatgatgatatactttacactgtattaataagtactagaaaactgaag

SEQ ID NO: 39288 - DNA, 443 bp, Homo Sapiens
atattaatcagtaattgggttgatttcctgtaccaccaaccacctgcatttgattcctcattgataatcaaggcaactttttgcttttttagaagtctccagtgtaacaaaaatgagtacactgcaaagagagccctgttataaactgtaaattctgaacgctaattaagcatgctagtcctctccaaataatcaaatcctaacatgtccatgataattaacagaaaaaaattgttacataatcctatcaggaaataaaagttggttatgtatagatgggggtgaaggaagaggtttctctccttcccatgaaaattgaagtactaaaggctagccaaacctcatccacaacttctcaaagaccttctgtaatacatctggtttcatgcatttctttccatttttataagtcttttactttcctctcctctcaacttgaaatc

SEQ ID NO: 39289 - DNA, 468 bp, Homo Sapiens
aattcagaaaacaaagtgatcccttatcacttttgatacagtgtgagaaatcagcagatctcctggatgacgttctggcggtcagcagtcttctggacactttccggacaccagcccacagtcattccctcccacagcccactcagaactgcaactggaaatccaaacgcattcaaaaactggctaaggcaggtcagcattttagccagaaagtatctgcttcactcaagccagcagattctcaaatcacaatcatttgactcaaaaagcaccattagttacagactcctgtgtatgccagattatgccagaaaagcatacatgtcctggtaatgcaataaatcttgacctaagctagaagagtgtcaaaaacctaaatacagaaaaaagagtgggtatcgaaacagacacagcatggagcatcaggcctcattacaaatcatgtttttaaagaatttcagtcgctta

SEQ ID NO: 39290 - DNA, 386 bp, Homo Sapiens
aggatctgggattttaacccagttgtgccttggtctgggtggttacctttttccctcaccatcagagggatattttaaaatgacaaacagaacctggggagaggaggcccaatttgacatctttgaaccttgatggggccactttatagattcagatttacagggattgttgggtggggatttgcaacccaggagagccttttagtgcctttcatagagggacacagaatcagagtttcctgaaatggcgtttttctgtgtgagacctgtcaatagaaatatcaaactgtgaatatacaattgaactttattatcccctttgattttgtaactacataggtatgacagacagaagctgattttaaaagaatctcacaattgccagt

SEQ ID NO: 39291 - DNA, 584 bp, Homo Sapiens
atgcacagttgctaggaacagtgaatgattgtagttcagcatcacactgagtcctgacaaagatttcacatgcgattttcaccgatgttgacaactgagtaaattctttaaatctcgcttttgacgctggcgtacacctctcccattcgcgtgaccatctttgccttactgtgttgtttttttagttttgcttcacgtcattctccagtgaaaatatatacgcatatacttgtggtttccttcagacttctcttaaggtcctgggattgtgttttcaatccaacattcctgccttcctgcgactgaaacgtatccaaatgtgatatactattaaggatttttcagggacctatcttaggggatacttacatactcgcatcaccttgtcctgtttttttctccgaatccgcgtgtgttttggaagtatatttcagaatcacagactaaacactaatatattcaatggatcataaatgtctgccgccttcttgcaaaatgggggttcccagagtgtaacagatttaatagtaggtttcctctcaacttattttgctagatgttaatgagaatgagttaaattgctt

SEQ ID NO: 39292 - DNA, 513 bp, Homo Sapiens
aacagaggaccattttttcccctaatgctaaaccttaaacattcaaagcaaaagcactaagaattgtgtctcacttatctatacttgatggataacatgtgtgtgaaatctccagaaaatctttctttctaacaccatcaggtttaattagttgggtaatatgaagtcagaaaggtggcagaaatattatccgttatcatgatagtctaaaattatctcacaataatttctttattcttagataagactattcatagccttgaaataatagagcggagtagtaactttttactggcttttattccaattagcttaatttgacagtcaaatgtagccagctaggccttagaagattctaccgtataccacaaaataataaaattttccaactcaaaagcttaaaattcaccttagcacattacaggaaaatacaaccaaatactgctaaatgcacagacgtttgcctatttaccaatatctattcaaataaagttaaaagatactgccaaaata

SEQ ID NO: 39293 - DNA, 381 bp, Homo Sapiens
cccagtcacaccctcagagcacacttcccactcacgtccacctttctccacctctatggatgactccaagtactcacacagtcatcacccctacccatgcacagatggccacattctgcctccatccactcaatgccaacaggcacgattcctccaccgacaacgctcaaggccacagggtccacccacacagcgccaacaatgacgctgaccaccagcgggaccagccaagccctgagctcattaaacacagccaaaacctctacatccctacattcacacacttcctccacacaccatgctgaagccacctcaacttctaccaccaacatcacccccaaacccaccagtacaggaaccccaccaatgacagtgaccacc

SEQ ID NO: 39294 - DNA, 355 bp, Homo Sapiens
tccccactatcaacttcataaaaacaattttatttgaactcttcatatatatcttcaacatcagtgtcttcttccatcacaaaaatagtttatcaatctaaaaattttccatagcacatcatcttcagtttggctcaaattgtaagataatacaccatctaaatcatctatgatgctgtcactaaaattcttttccaagtcataagtagtcactcatgtgacagtaggacagttgttttttatctgtcctctaggtataatgtgatttgtaaaatgtaacacttgctatgttgctttcttagtgagatatacaaggttcatttgttctgacatctaacacaaccattagtcagac

SEQ ID NO: 39295 - DNA, 412 bp, Homo Sapiens
tgatccatctccctcccctattacagctgtcatgactcactgcaattgtgcttaataaacttttccttgacattcttaacaagtttccagtgcaatctctctttaacagggaacaaggctgtaaacttgagaccctggttcatttatctgaaatgcataggggatgacaggctccctcccactggggatgaaggagctgggaaccacacatgccattctgctgggcccacccaagtctgaatccatggagggggagggtgtcctgagagtacctcccacccacaaagccaaaacaccaggctcagatttctctctggatggccacaccctgttgtcaccccatgatctgggtgagatccaggattgcaggtgcacaactgcccagagagaggtccaggaggtagactgactc

SEQ ID NO: 39296 - DNA, 402 bp, Homo Sapiens
tgaccctgggcggggaccgcgcacgggacggtggatggctgagtgcagcctgctgcaattcctctcttctcgggggaggaagcctaggagctggaatcagaaacacctgttagaacctgagctctgtcactctctcacttgtgcctggtgccagctccctttccctctctttgcctttgcttcctctctggaagaatgaagcatgcacgcatcaacccatctgcacggggagccgattcacagattcacatgagggaatgctttgaaaatatttccacacattgtaatgttcaaatatatgtgtgaggtaatccatcatcaattcactcaacaaacatatggttagtactattctaaggtgatgtgtgttcctaaaagtcacccttgttacacaaaatcaca

SEQ ID NO: 39297 - DNA, 366 bp, Homo Sapiens
tgagcacctcgcccggctgtccatgattttaaagacaagagcataatgtatttgaaaagaatgtgtttggagacatataaacctggctttgaactctgaacctatcacttatcagctgtgtggtttagcttcaggtatctctcttagacttctgctatccttgagacagaggttgtggctgagtaatctgtgagggagataatattattaccctagttttatagatgagcaaactgaggcttagcaaagttaagttggtaatagagaactcaatttgaactcatggagatttatcccctggccttttctcttaaccattgaactgtgctatctctaagaagtcatagaacaagcaactaggagtca

SEQ ID NO: 39298 - DNA, 361 bp, Homo Sapiens
atgttggtcaggcggtctcgaactactgagcttgtgtccgccactttggctccccacagtgctgggattacaggcgtgagccaccgtacctggtggtaagtcctcttggttgtaccctgctgctttcccagggtacactgaggcctggaacatctttgatccttcaccctgaactattgtcctctgacctttgtaggtaaccaaggcctggcctatggtagtggcagaaagatagaataaggtggggttgctaagggattatttttttcctacagtgttctacgtctctgttttcctagtaagtttttattaaggcaagtaggctccttacatttgatacactgtaattttgacaagggca

SEQ ID NO: 39299 - DNA, 414 bp, Homo Sapiens
ggcagggaatgcatgttactaaacaaatttcacaatgatgttatctttgtgtggtgaaataattggtgagagaagctgctagtccatctaagtacttttatctttaaatgggctgcttgtccatttaaaatggtctgtaactataaaatagtaagattaaaacctaacccctggatttattggaaagactgaagcacaggaagaacctaagtacacagcactatgcctagaacctgtttgtgcttggtacaagttccctttttcctctctgcctgccggatctgccctctttctgggcatttatctttaccaggcagagaagcaattctacatcactctcgggtctcaagacttcacttacagaaacagtgaattaaaataaatttggaaaagtcgcacaaaggataccaattt

SEQ ID NO: 39300 - DNA, 355 bp, Homo Sapiens
tctagacgatccccttgaaagagacgacctcccaaagtgctcgggaatctgtatatttactatgatcctcaggtgatctttgtgcctagtagtggcctgacaatgaatcttaggaaactctgatttaaatagactcaatcaaataatttccatatcacaaatatgagtgtcagaggagcctgggctgctcctttgctggatatctgtactctgggcaaagtgagagagcagataatatgccgggtggttaattatgttggcatttattcattctgaaatgtttacaaatgtaattagaagccagattaggtatgatgctcactgacctttaaggagagcttggcatcaaacaacc

SEQ ID NO: 39301 - DNA, 579 bp, Homo Sapiens
gtggtacaaatgaagagtgtatttctcatcaccggtatttttctagaagaaataacagcagagattagaaatctaatacaaaatgtcgtaatcatcttatgttctcttctttgaggtagactaaaagagcatcattatatttgaagaaaccaagattgaatgttcatgggcttggcagttttaaacacagtgcagttgggaacatgtcccagttcttgtggatcacatttatggaaactcttaaaggacttaaatgcccctccctaatcctttttctactgtaaaacctcattaatatatcctcaatgtataatgtataagtaataaggattggggtcattcgagatttaaaactttgagataagtgggatattcggaataatgtaatgatttgtaataataggtcttaaacatttaaatagcttaactcattgtttaagactagtcatcagctatatttgagtacatattccccacagtaaaactattttcaataatattactatgcatctttgtaagtgcctaataaaatgggctttaaaaaatggctgcgtttcttcccttaatttagccatttaa

SEQ ID NO: 39302 - DNA, 458 bp, Homo Sapiens
aaggatccaattctgcacccacagccaagctgcttggccacagaccaactctggtatttattttcaggtgaattttaccgggaaggcgagatgggaggaccgttttcctatgtgtagtaaggacactgttctctctgtgtgtgctctctactggaggaaagggattcaaagtcatactccattgattggggcctggtcctgccttagactctcacgcttttgggctataggttccctggcctttggatgtcttgagatttatttgaacgacacgtattacttactatgtgtgtatttgaacgacacgtattatttgctatgtgacacgaacgtgctggaatttctaaacagacgaaccattacagcccctaaaaacgttaccaagctcccagcacttatgtgactgggtttgaaacaaaacagacaagtggtatgacgctgtgtagtgcgcagcattt

SEQ ID NO: 39303 - DNA, 393 bp, Homo Sapiens
gaagagaccaggtgatgttgagggtgtccagcgcccttaggtcattttctcactgcctgggaacctcaccaaaatacttcgtgttcccttggggtcagcccaaagctgtcacaaaatcagatatttccctttattccagatttcctggacactttcacccaattataaacaccccacttcagccccaatcacgtgggaggaagtgtaacttcccttttctggattctcaagcagttactttcacggtcagaacacgcagctattatgattgaaaacttaaaagggcaacaatttcagtcttgcttctagggctagacaggaacttggcaaacatctgtggcctgttcagcaaaggatgttaatatttaagaatcttgtcttgggctgggtgtg

SEQ ID NO: 39304 - DNA, 661 bp, Homo Sapiens
ggagctcgtgacgaaggagaacaggtgaggcacgtgagaataactctgctgacaccccacagcatcctcgtccttctgccggacttccagatttctatttctgggcccaaactctctcctgaacatcactccatggattcgtctacaaccacttctagtattttcttccacagccagggaagaagtccataaacagctcccggctacatcatacttaggacgcccagaaaaatgtatcagtatatcacatctcagggaaaccttttattgactctgtttaggtgatgtgctcaacaataattcaccacatggcccaggagccaccaccctggaccacaaaccccatagcagatgcagtcagtacctcactcatatacccttggctcactccaaaggttacctgcagatagttcctttatgacccggtgtgtctgtctgtcggagggagttctttagcccctagagtcagcttggcttgacatgcagggcaggctggaaatgctgtggaggtaacaactcaggagcaagcacatccggtgagaaaaaaatagaggacagataatcctgtccttaccttcatgggatatttgaggtggtctcacagtttgagaggttagagagacggcacgggtctcaggtaacggtcataggtccttattgg

SEQ ID NO: 39305 - DNA, 524 bp, Homo Sapiens
tgtggcctgtgctgaatcaggtgtctcaggctcagcatggtatcccatcccatcctcctctgtcgctcatcacaatttattgggccctccgtgtacagacctgtctaggtgctggagggggtcagaggtgaaacaaggcctgggtggggagggggctcgctgaagtggatggagagccctgggccaacacccagtgtgacaactcctctgtgaaccactctctggttcaggagagggacgggtcagtcgaggccaaggttgcagggcgcgctgggctagttacctggagggtctcctggggcatcccaggctcccttctgattgggaacagccactttccagtctgtgcttcagcttcttcagtgctaaacccagagctagtcattctgatttccaggaaggcttgaaaatttaatcatagaatccctggagaggactgcctatagtatccacttacggcagggggtccctaagtgggggctggaattgtgtgctgtgtgacccaaccctacactgtgtctctt

SEQ ID NO: 39306 - DNA, 393 bp, Homo Sapiens
tgaccgaaggagaacaggtgacgcaagagagtgcatcagatgcaaagtgaagtagacacctgccgtcagcactgggcagccctgttcctggggccttacttgactcatcctggtgggttttccaaatggcagaggtgcacaaccacttcttgcaagcatgggcacttgaattgtagcccatgtacacagtgattcttggaaaaagtcatgagtaatgaatggaacttttctctcccaggttgatcttgtgtaatgagacataaagagtcaaaggttggtgcctaggatgctcattcttattgtttttggtagtttgattgttgaaggcttttgacacgacattgaagtgaatatttggggcattttgctcctcttggcttttctctaaagcac

SEQ ID NO: 39307 - DNA, 576 bp, Homo Sapiens
ggtgactgaagagaacaggtgagtaatcacaatgagaaagtaaagggggaggagctcgcactgggatgaacaccagacttgcccaggtgctctggtggaggttgctacccacaccaccagcaccagagttcctctcttcagttctgccctaacacttttcactccattttaagtggcatgctgggactgtcaaagaaaacagcttaaccaagacctggatgatatgatggcagaacagtgaggagatggcagagcaagatctctacagcaaagagtaggaaatacatctgaatagatcatgaccttctgcttcctgaaaactactactcatcattcaagactgctcccatgtcacctcttctgggaagccttccctgaccactataagctgttgacttcctttgttctgtttcattttccctgcttgaagaacctatttagttcttaaaatattaatgtgtaaataagtacttatgcctctgggtgcacttagttctaagaatcttacctacactgatttcaaggctagtatacaagaagtaatcaatagttgctgttgactgagaaagacaaaaa

SEQ ID NO: 39308 - DNA, 527 bp, Homo Sapiens
tcgaaccctgacttgtcatctactgctgggctcccagagtgtaggattacaggcatgagcaccgtgctggccctgcgtgtatttctagggcaggatggcctgcccttcttctagtgggaagggcaccagtggcattacttggttgtttgctccggaaagaaccttcaaaggccacagaacgggaccttccccctggtgactcacaggctgtgggcgggcaggggcggcctccactgtgcaagggtccggactctctgactctcattaatgagtgagtacatgttcctgctgagatgctggactggagcccggttgtgggcggcggtgagtgggcaggcagcagtgagtagcagccggggtggggtgagctgtccccaccgtgactcagaaggtatttcttgctgctgacctctgagcttgagtgtcctgagtaatcccagttcccccggaggaagataaaactttaggcagctttgtgtgagtaaaggagtcgtttaaataggaaggaataatagaaaaaaaccaag

SEQ ID NO: 39309 - DNA, 423 bp, Homo Sapiens
atctgcccgccttggctcccaaaatgctgggattacaggtgtgagccaccgcgcctagccctctacttcagtttttaaatttatgtcttctaaattttagcaatgttacatcaagtttagcctaaagctgcctccttacatactttaagttcagcctccaggtttctctgtacatggtgaactataacctaaagggagttagactctagcctactcttgagccagttactgagttgtggtcaaaggtggacaactgttcaaactgtgttaaaataaggcagatgccaagctgtaaccaattcggctatttctgtacctcactttcgttttctgtatgtcactttcctttttcagtccataaatcttcctgcacgtggctgtgctaggagtctctgggcctactctggctcagaaggctgccga

SEQ ID NO: 39310 - DNA, 412 bp, Homo Sapiens
tgtcatgcgacagtgaaggagggcctggctccatgctgagtccacctctcaaccctggacagtctggggccatgcccagaaacgcatccatggccccctaagcttgtctaatccaggaggccctggctctcaggcaggttctgaacctgtgagagaccccaggaagggctcttccttgcggagtcccaatcccagtctccatgctctggcccatcccagccgcaaaagagcatctgcggagaccagtgttaaagacaagacatcggggcggaacccaccctgctggaggaggccatccagcgcgtccttgtccgcctgcgtcagggcgcccttctgcagtcgcagcagcaggtcagccattgcggaagggccggagttccagaaggtgcagcactcggtcacggaagggcct

SEQ ID NO: 39311 - DNA, 428 bp, Homo Sapiens
ttcggagaagggtgtgagggtgggggtgcacaaccacaggcattagttcccagaagtctgtgcccacaggctcatgatggcctcactaggcaattgtgcagatgctaacggggagcagctggaaccagaggccggggccaaggggcagggaccatcctggtaaccatctcaccgtctcgtctctggggactgggctgagctctgaagggcagccgtcctgggtcccactcacccatggagtcattcaggatggaatggaagggggtcttcctttccaaccttggctcccactgacttagtgcctgactcctgcaggcagctccagggcacccgcgggccctgccagcctttcctggaagagccctggggtgacggaagcctcacaatcccgcccagttcgaatgacagttcatcaccagaagctcctc

SEQ ID NO: 39312 - DNA, 404 bp, Homo Sapiens
accatcttaccacacatgcgtgcttttagtttctgagattatccatcttccttctatcttatagcggctcacctaaactattactcagggaagccttccttgagagtcttgctttttgcactcattggtttggggcttctttatattatactgttaattgaattctgagtcgtgtttatctcaactgagattaggtaatttattttgagaacagtaaatgtttatcatctgtcattctttttttcatgcccacattcagttatttgtaagtgctgaatgtataagtgttcatctacagataaggatcagttcttttttccccaactagaaatgttactccagttgataataacagctcaaacggaaatataaggcagaggtgagagagtcacttgaggccacga

SEQ ID NO: 39313 - DNA, 426 bp, Homo Sapiens
acctggaatgtgattcttgtcagcacaataccatctagggtgctagaatgggcatttagcaaatggtactttagaggctagctcgacttggtgcccctctcctctgaagaaggcttagtgtgctgcagcttaatgaatgaaacagcactaagtgattccacctatttctctactcattgatgagaaacaactgcagtaggctattttcagctattatttacctcaaacagggcatttaattagtgcttgttaagacagtgcaaatgatttggctgccagtcttcttgcccctgctctttattgtgctgtatgtctgccccgcctctctcctgtctagttcacagggcatccatagccagtcttcatgcctttccataactgacatcagcctgacctccacggatgtggaagtttgaggaaaggaag

SEQ ID NO: 39314 - DNA, 364 bp, Homo Sapiens
ccgtgggtttatcgcttcagccacagtgtttcctctccccgtcggctctgattccacgcatgcagactctccatactgtcccttgccctggcagccccaaagccccgcagtgcgctctgctggcagcccctgtgggctctctctcgctgctcctcctcccatgagctgctgtcacacacaatggccgcatccccccaggctctgagcccaggtcaaacccagccaccacctgagtcccagcgcagctctgcttcctctgtgactcgggccactccaacctctcccatcgcgaagccccctcgtgccctcctacgtgcacaccgtgagctccaacgctttcgtgcacgttagtcctgcccacttc

SEQ ID NO: 39315 - DNA, 425 bp, Homo Sapiens
gtgggtgatcgcttcggatctctgctattcccatggtctattgtgtgtctttcgtcagcaccgcactgttttgatgaccgtagctttgtggtaagttctgaagtcaggaagcgtgacttttacagctttttcaaggtgatttggctgttgggtgttccttgagtttccatatgaattttagggtggattttcctatttctgcaaaagacatcattggtattttgataggaattgcattggatctgtagatcactttcggtggtattgacatcttaacaatattggtcttcctatccatacgttccctagtgcatttagtgggtcccatggtaaagtatttatgtgtcagcatgtagactgggcttaacaaaaatccaaggaatacttgatgttggaactctggtgacctccctcatttccggggt

SEQ ID NO: 39316 - DNA, 367 bp, Homo Sapiens
gtttattcacattttccctcctttactggttatttagtgatatagcccttgttgttccccatctcactgagcccctaattctacacatgtcatatctgttgtctgtataaaaaactaatgatcaacaccagtcatgtgaataagacgtcccttcatgtgttttctttaagctagcctatcgacagccccatgggaaagcctaaagaatagtacctgtggattataataaagacgtctcactggttcttgctctctatccctctctctacacactggtcaagtacactcttgtctccagacttcccattggcctcctgtcaacacctgtacccactctggacctgggaataataaacttctttttttt

SEQ ID NO: 39317 - DNA, 370 bp, Homo Sapiens
cggcggacgtaccgatggatttacatgcgcggtgccagcacagtgcaccactgcccatgacgctctgttgaccctgacaggaacctcacaagcactacgcctgatgttaggcgcctccatgacttgaccctcaactccagcctttcacctctaaataccctgcacccgccacaaggaagtgagcaaaagcccatacaagcccctgcctgcaatggaccttgacgcttaaacagggaaacatagaccgtcagttcagaaaacaagtgagcagggcatggcggacctctagacactggtgaacgccataaagcaatgctgcacagtatgagccccaatagagcagcacgcaggactcggacaagctgttcaa

SEQ ID NO: 39318 - DNA, 351 bp, Homo Sapiens
agtgtggtcgtgtggaatgcattgtcccgtcttacaggcacgttttctcaagggcgccagtccgtttgtacggtgggttgactgcgcccggctgttctggtggcagagcgtcgccccttcgagaggagggctcggaaggggtgctcgcgagctcagagcgggctgctcaccttgagctgtgaggagctggtctggtggaacttgagctggcagggtgactgagtgctacgaggaagcccccacagcagggtgcccactgcttttgtccagaggaacccctgcctgggagcctaagttgagctttgttacctgagaagaaagaaggatgtaggacagaggacatcacaggat

SEQ ID NO: 39319 - DNA, 371 bp, Homo Sapiens
tattgctcgggacgggggcaggtggagcagtttagagaggcctactctctatgtgattctgatttgtgattataaagttcattctgcccaaacttttcactgcccagactttacccactgtagactaattccagctttgttcaaaactctgaccctttcagagtcctggggcccatgactgctcagtcccatcacccatctttagtgtccacattcctggggtgtgggagaagcagagggttgctagggaggaagcaggaatgctgagtgtctagcagcctccatactcgtaggatgaggatgagaacagtacggggaacaagggagagcagaccaagaatccagacctgcatgaggacaatgtgactgaa

SEQ ID NO: 39320 - DNA, 412 bp, Homo Sapiens
gtagtaatgaaaatgctattatctattgagctgggatcctgtcaaaaataggaatgtaatggagtacctatcgaatcaaataagttaatacatggacacattctaagttaagaatggcaagagtggcaggcacatcgtggatgttcagtagacataaactatggttattgatagtccagagtaaaagaaaatttgggtgaagctgcaaacctgggatcttagcaatctcagtgtcagcaaaactttgagtcaggatcaagattcaagacagagtccagacttctcagattcttcaaggcatcaccaagttcccactgttagttcctgatcagagcccagggaaggttaaaagccccccaacacaaggagcctctgaagaactggactataaatgtcacaagcgacatcaaag

SEQ ID NO: 39321 - DNA, 426 bp, Homo Sapiens
agtggaggcaaaagaagaggaaaccagcagacctggagaaagcttaggcttgggtggagggaagaattttataatggcaggtgggcggttggaggttgaggatgttgctgctatttggattgggaaagagagctaagctggctgagggatgcagacagctcccagagcccattggaggctgggagcaccatggatgctattaccagtatgcagtacagctgaagtgtgccagggtgcaatcatcagcccaggtgacaagccctcatcctccccttcctccacccagtcctcaccaggtaacatttcccagcttctcctctctccaaacatcctgcgtgggcacgatgcccaagcctgcgacgtgagccacctcttcctatgctgccgactcaggacctcagcctcctttcgcccatccttctgtct

SEQ ID NO: 39322 - DNA, 503 bp, Homo Sapiens
tctagccgatccttatgggtgcatgatgtgagaagtcgattttgaatgtgaatcccaagaccatgctctgccagctccaaggtccctacagtgaggtgccctcttgcctgtctcagcctcacacgtgcacagggagctgggctgggctgagggcctgtggagctactgcaaacagcagttgtcaggtggcccgatgttctgcctagctgagctagccctggggcagggcttctgtagctgcagccgggctgcatgcccaggcagctgtctccaacaacggttagctacatcccacacaagctgggtgagatgtggtatgatgcagacacagtgtagcctggcccatgcccatgccatgccatgctgaactgggaggtcccaaggggtctccctggaacacaccaaaagtgtgccagtcactcctgcctgtgaccagtgctttctgccacagacccctcctgaggctttccttgcctctaccttggacccttccaccacagtat

SEQ ID NO: 39323 - DNA, 451 bp, Homo Sapiens
cgggtgcatgcatgtgggtactgtttacacttaataataagacctctttttttcaggggcccagatgtaaactgatctgaaacttgttcaaatttaccaccaaagcaactctgggaagcagtacaaatacagagttccatgagacaacacttaagagttcctcttggacaggaaagcacatgcaaacactgtccaacatgagtattcagacatgcagagaaatcttataccaagtataaccaaccataaatgggcaatatagcatttttactgaaaaggtaaatatagcctaatttactctgcttaagcatgatgctcagataggagaactaatctaccgtgtccacagaccagtgaatttactgtggggaaacagtaaacagttgaggtgacgtctatggtctaaggcctgcagaaattgagcaatggtaaagcctcaagaggagaatgt

SEQ ID NO: 39324 - DNA, 391 bp, Homo Sapiens
tgggtgatctacaggagcttatgggtgcatgcatgtgaggtcatcatggtagatgctgtgctctgaggtgcccgttactactgtcgtcgtttccccccagttgtcatcctacaggcagaagggggccagccacacaataaggaggaaaggataagaagaggaagaggagggaaacaggagaaagggtgaggggacaggagacagagaagaacacatgggaaaggagaaggcagaaagaagagagggtaatcaacaaatacgcaaccatcaaagtatttacttgagctccaatgtgtgtcaaagtctggcctctgcagatggccaaatccaagacccgagccctcggggagctggacactggtcagtgagagaggaaaaaaccacacatgca

SEQ ID NO: 39325 - DNA, 462 bp, Homo Sapiens
ctgggtgcatgcatgtgcagggtaggccagatttatgtttcactttatgcaaatatctcagtgtagcaaagagtaacagagcagtattgctgccagcatatcttgcctcccacagggcggttttctcctatttcagaatagaatggattggtcggctttacacagagacattccattccccggaacgagcaggagacagaagccttcctcttatctcaactgcaaagaggcctccctctttcactattcctcctcagcacagaccctttaggggtgtcaggctgggggatggtaaggtctttcctttcccacgaggccggatctcaggctgtctcagtgggggaaaaccttggacaatacccaggctttgttgggcagaggtccctgcggctttccgcagtgcactgtgcccctggttaaccgagaatggagactggtgatgacttttaccaagcatactgc

SEQ ID NO: 39326 - DNA, 469 bp, Homo Sapiens
gggtgatggcatgtgcacggggacagacagatctgtgtgggaatgcgggctccattatcttccagctgttacctctgggtgcatcttttccttcttggagcccttttcttggactgttcacagggggatcttcattaggaggtgctgaagggattcacggctaatggtttcgtaggccctctgttaactgaagccctttgcatatgcccttgaagaaatgctgtttctcccaacatcttccacggagattggtgctcagaccaaggtgggtgcagagctgatgtctcctcctctaccagtggtgctgagaaatggtggcatgaggctgaatttccccatgctctgaatgactggggagagtggccacaaatctgaacaggccagatgtaatttctgactctgggaacctgtgtctggcagaagggaggaaggtggacagatttagctgcaggatgcatagtgcgctgct

SEQ ID NO: 39327 - DNA, 480 bp, Homo Sapiens
tgatctagaggatctcctgggtgatgatgtggggtaaacatccgggtgtgattggtgctatgggagcccagaggtggggccaagcaaaggcttcacagaggagtaatgtttcaggatgggaggggctggcaaaggcctggaggtgggaactcacttgatgtgtggccaaaagagcaaagaattctgagcttggggctcattgtgtctgagtggctgataatttaatcgtttgtgtttatttaacacacatagagcacccaacagaggctggggcgcccttgcacgtttttcagtattgctgcctccagtcctcaggtgaagcctgcggggcaggggctgcaggggctgccacctgctgatgcccctgaggcggggagggtcaaggtcacagggtaagttgggggtggcctcaagaggcctggggactgtgccctgtctgcatttggaaaacagcctcagagagggaggcgccttgttcag

SEQ ID NO: 39328 - DNA, 495 bp, Homo Sapiens
aggcgactctacaggatcttagggtgcatgcatgtggtaactgacgctcagaagccggctcattgcccaggctagggtgcagtttgcctggggttggagcggacgtgtgctccagccacaaagccaggccagcatagccaggccaggtctcaggcctgccccctttccatgccactcgatgcagccaggacatgcggcactgaatgatgcctcccatgcctgcatctgtccagcccctcggcctggctctgtgtcttacctgagagagcgggtctgttccccagcagtgccgattgggtgggaggtccttgcagccgcgccctccccaggctggcagcagggggcagtgcagctgtgtctgggctgcagctgctggggtggatggagatgcttcgccccgctgcctctccagccagcacacctgctgaccttggtctccccacctcctccaggccaaggtgtctggcaggggacttggggtccatttgtctctga

SEQ ID NO: 39329 - DNA, 401 bp, Homo Sapiens
atgcatgactctggcatcttaggctcttccttgctctctcaggaactgtggacccatgggcgctccctagtatcaacagctgggggcactgatcagtctcatcatcatcaaaactcccctgtcctgggtcccaacccttccaggctgttaggagtctcacaggctcatccgaaaaccaattcatgctcctgagcttcatgggttcgcctgccagtggaggcctagcctccatctcgcttaggatgcctgatgtgggctgatggcagaatcaggggagcgacacctgcttcccacaccacagagaagcctcttcgggctggggttggcagcagggactaacgacaatgccataaacagataaacagtgaatgcaccgagtcacagttttaacccgcattctc

SEQ ID NO: 39330 - DNA, 424 bp, Homo Sapiens
acaacgatagaaattcagtgagaagcttatgaggcatcattatacccttctctctacttattttgcatacttgaaattttttgagaataaaaaataaacaatgtagtgtcttctgggactcaacaccttcgctgatggtcatgtctatctagagcacagaaaatctgtttccttcacaaagcccttccacactggccatctagaggtcaaaggacaaggacttgggaagcaggccaggagaggccagttggaaagaaaataaaaggaagcatctttgcagaatctcctatctgtgatacttaaaatgtcagccaatgtgtggtgttaagtacgtttggttttcagacctgagtttcatactcaactttgccactcaatgcctaagtgaccttagactaagtcactttctaacacaaagttacag

SEQ ID NO: 39331 - DNA, 383 bp, Homo Sapiens
ctccctcatgcaatgtgtttcctaacatgtgtgtttcccaacactggaacagggagtcatagtctggagcttctggctgaaacacgccaacccaacaggtgaagaacaagggcttcaatcagtaggatgtgaattttgacctggagaccatgcggacataggcccaaggtggctcggctaacagtcaactcccctggtgtgagtacacactcctcctcacgggacatctgatgtcctgagcagacactgtctctagccgccctctcaggtgaggcgtacctggtggaaaaccaatcacaacctgtgctggagggcgcctttgcaatggccagcacatcagcctgaaacttggggtcaaggccagaggtggtcttcccaatcta

SEQ ID NO: 39332 - DNA, 373 bp, Homo Sapiens
gtatatgatctatatccatgaagggtgaggtggttcagcctgcttgtccaggcaaacagttgctccaaatgcctggatttttgccagggagtagaccagagagggccctgcttgcaccacagggaacaggctgtggcaaccaatcatggcacatgcagaccagttccaggttgctaagctggatctggcttgaagtctggttgtccaggagaaacaatagctgtagcagctcttctttcatccttgacctgcagtggcggagagcacaatcccagcacctactgctgaggcactaactacagtgtggctgtgaagacctctgtcctgctccagagccagaggcctatgtggccatgctactgggttgccaaag

SEQ ID NO: 39333 - DNA, 412 bp, Homo Sapiens
acctgttaatatctgtgcatccattactttggaggtgtgactctcctcttccatctgctacatggccagagaaagattgtgttgatctctgggttcagcaacaggtgctgtgtttcttgggtgccaggcttgcctgcagagggaattgtgacatagctgggtccagtaccaagtaacgtgactttgttgtctgtgccttgctttcgagaaggaattgtaacataaccctggacaggtaaccaggtaatatgactctcctgcctggtccttgtcctgaaaaattgtgacatatttccgactcagcatgcaggtgatgttactctcccatttactttctactcacaggttagattgtgacatacactttagcccagttcacagttgcgatgatgatactcataccacaaaccag

SEQ ID NO: 39334 - DNA, 462 bp, Homo Sapiens
gcgactctagcaggatcttcctgggtgcatgcatgtgcacacagccacacacccactacacaacagctacgcagactcggatgcggctgggcaacagtgcacagccacacgcacaccagcggctgcagatgccacccacagattcagctacacccacacaggtccacatacagccacaccaactcagcaacagccatttctgctcacagccagacagtagcgtccaccgggtactcacacacgccccccagcccagccatacgacagccgcctagaacacacagccgggttccgcacgccgttctcaattgagtatgtgtccactgcatacacacacccgctccagccacaacagatggacatagagccaaacagccccaggtactgcccggcaaactcagatataaccacacttgggcccggacttgaccacggtgccctcttgcacacctgcatgcgggt

SEQ ID NO: 39335 - DNA, 479 bp, Homo Sapiens
cgggtgcatgcatgtgaacatcggtatttcatggggctgtcatgcagggctattcttctttgctttacccgaagaagtaaagagagttaccctagtcttagtcttagatattgatggatactcaaacaaagtaattcccaccagtcttaggtattgatggatacccagatggaataattcctaccagcttctgggagattcagcatggcaggatgtttatcaacatttgcatctattctcatccttgctgaagtctgagggccaggagctttgtccatgctccctctgtaaggactagcttttggtgatcggattcccttcacagtgagcccagattagagaacacttatcataaaggtccttagtggtgaatctgtgcacagccctgagactgggccactgccactaagatggtggtagcaggtatcacacagtggtaaagcaatcatgctatacactcagccttacagtatagtcac

SEQ ID NO: 39336 - DNA, 363 bp, Homo Sapiens
cgggtgatgcatgtgggagggaggtataaggattaagtcttcattttccacataaagtatataaaactgaaataataagacattcgtaggataaacatagtgtttagaaatatgttggcaaattaccagatcaaaaagctaagtttcagtgtggttgcccatggtgagtgagagttggagtgagagagggggctggatgaggcagaagaggccattttgttttttggttggttggttggtttgaaagatggggtctccttatgctgcccagtctgatcttgaactactgggctcaaacaatcctcctgcctcagcctcttgagtagctgggactacacatgtgcacccaggcacatgcatgca

SEQ ID NO: 39337 - DNA, 421 bp, Homo Sapiens
tcgcccgggtgcatgcttgtgcggaacatgcaggttgtaacataagtatacatgtgccatggtggttgctgcacccatcaacccgtcatctgggttttaagcctgacatacatcaaagtacttcctcaaaataaaagggcacatatatattaagatcatcaccagcaataattattacagccatatagttaatgtggcatgacattatttggcaagccttttagaaatctagaacagaccaagtaaatatttcccctaattttactttcagcatagtgttcctttaacaaatatttattacgtacttattcctttatacttattcctttaacaaatatctattacgtactgtatatcaggtgtgattctgatgccaaaatgtagcagcaaataaaacagataaaaatccatgaccacatgc

SEQ ID NO: 39338 - DNA, 423 bp, Homo Sapiens
aaggatccccctgggcatgcatgtgtatggttgagtggactcccatcacatccaacagggcctaagaccaaaagaggaaagacacacagtcatgcgggaggctgtgtgctgtcaccatggtgaatctcagtttgcttggacagaatggccactggaggttggaaacttaattagagttgggccaaaggaacaccatgacatgggtaaccagaggcagctgccacaagcagttcctttgtgccaagcactgtgcaactgagtaactccatccctgcccatggcagacatcactaatcaattacagcattcttgttccataagtccagacatggctgcaacatcattcctcacatagtgctccaggcaggcattaacggtgtgattggagttggaagggtcaagaggttccatggccattatcgg

SEQ ID NO: 39339 - DNA, 382 bp, Homo Sapiens
tgcatgcatgtgaagcgagcgggtggggcggggggaaagaattcaccctggtatggctcaatggaagagacttaaatgaatgacttcttacagccatgtggtcaggggcagacagggacgttggagtgcccagaggctcccgagtgagaagggatggaaggaattgctggagcccaagatgaggggctgtcatcgtggatcatggaggaaatgctctgacctcccccttggctatacctgtgtactgctctagccttcccctggtgaacccagctggaagccagccagcacaggagccctagagtttctcagggacacacatggacctggaggggcaaagaagaaccagtactgtggccaagagctggctgtgaaatacaaa

SEQ ID NO: 39340 - DNA, 545 bp, Homo Sapiens
tggggtgatcgaggatccccctggtgcatgcatgtggacttggaagaatatacagcaaagtataacagcaaataacaatgcttggtgttagaattagtggtgacttttattttcgcctatgcacatctatgttttctaattttcccaattccttcattcatgtttattcattcattcaatagattgtgtgagtgtggctgacactgcctatcccctatagtacaatgggcagtgataacagaaaggtctctgcctttgtggagacaggaccacatcaggccacaaatgtgactctgaggctgggagggtccctgcgcaggctccgggggtgctgagctctggagatggtaacctgggtcacgaggaactggaaggaatcccaggtagcagatgcagcacaggccaaggcctgggaggggcagccagggagcctgaggaactggataaggaggccttcccagaaagccactggaaaggtgaaggcctgacgaccggcatgatctggtccatactagacaaagatcacacacttggcacgtacagca

SEQ ID NO: 39341 - DNA, 413 bp, Homo Sapiens
tctgggtgcatgcattgtgacaaatcaagttattcaacagttctagtctttctattctttaaagaaaatgtctgtatctctgtgacttacatttattatttctggaagattttttcttataactttggtatttcacttgaaatatttggtgtccttcatttgcttttctttttcttcagtacaggcaagtagagttcaaatgtcagtagctgagatgacaaactttttctaaaccttaaaaataatgttgttagaggaaaggttggaaataattcgtgagtagattttaatttccgttttttaaagacttaattttttaaagagtcatttaaggttcacagcaaaattgagaggaaggtacagagatttcccctgtatcccttccctacacatgcatgcacccaggggtaccg
